United States Patent Application Publication US 2024/0327476 A1 - sequence listing, part 99

SEQ ID NO: 190429 - DNA, 13125 bp, synthetic construct
  misc_feature 1..13125: note = Description of Artificial Sequence: Synthetic coding sequence
  source 1..13125: mol_type = other DNA
atgaaggtggaccggaccaagctgaagaagacccccaccgaggccccagccgactgccgcgcacttatcgataaactcaaggtatgtaacgatgaacagctgctgctcgaattacagcagatcaagacctggaacattgggaagtgcgagctgtaccactgggttgacctcctagatcgcttcgatggcatcctggctgacgctggacagactgtggagaacatgagctggatgctggtgtgtgatagacccgaaagagaacaactgaaaatgctgctgctcgccgttctgaattttaccgctctgctaatcgaatacagttttagccgccacctgtactcatctatcgagcatctgactacactgctggcctcttcagacatgcaggtggtacttgcagtgctgaacctcctttacgtcttttcgaagcggtcgaattacattacccgcctgggatctgataagaggactcccctcctgacccgtctacagcatctggccgaatcttggggcggtaaggagaatggcttcggactcgcagaatgctgccgggatctgcatatgatgaagtatcccccttcggcgaccactttgcacttcgaattctatgctgacccaggagcagaggttaaaattgaaaagagaacaactagcaataccctgcattatattcatatcgagcagctggacaaaatcagcgagtccccgagcgagataatggagagtctgacaaaaatgtacagcatccccaaggacaaacagatgctgttgtttacacacattaggctggcccacgggtttagtaatcaccgcaaaaggctccaggcagtccaagcacgattgcatgcaatctctattctcgtctactccaatgctctccaggaatctgccaacagcattctgtacaacggcttgattgaggaactggtcgatgtgctgcagatcaccgacaagcagctgatggagattaaggctgcatctttaaggacattaacctccatcgtccacttggagcggacgcctaaactgtcctctattattgattgcaccggtacagcgtcatatcatggcttcctgccagtactggtgagaaattgtattcaggccatgattgacccctctatggacccttatccccatcaattcgcaacggcgttatttagcttcttgtaccatctggcctcgtacgatgcaggaggagaggccctcgttagctgcgggatgatggaggcactccttaaggtaataaagttcttgggtgacgagcaggaccagattacgtttgtcacccgggcagtgagggtcgtagacctgatcacaaacctggacatggccgcttttcaatcacattctggcctgagtatcttcatctacagactggagcacgaagtggacctgtgtagaaaagagtgcccttttgtgatcaaacctaaaattcagcggcctaatacgacgcaggagggcgaagaaatggaaaccgacatggacggcgtccagtgcataccacagagagccgcactcctaaaatccatgcttaacttcctgaaaaaggctatacaggatcccgctttctcggacggcattcggcacgtcatggacgggtctctgcctactagtcttaagcacattatcagcaacgccgaatattatgggccaagtctgttcctcttagcaacagaggtcgtgaccgtgtttgtttttcaggaacccagccttctatcctcactgcaggacaacggactaactgatgtgatgttacatgcgctgctgataaaagacgtcccggccaccagggaagtgctggggagtcttcccaacgtattttctgcactgtgtttgaacgctagagggcttcaatcgttcgtccagtgtcaaccgtttgagcgtttgttcaaggtgctgctctcacccgactaccttcctgcgatgcgtcgccgacgctcctcagatccactgggagatacggcgagcaacctgggaagcgctgtggatgagctcatgcgccatcagccaaccctaaagacagatgctaccaccgctatcattaagcttctcgaggagatctgcaatctcgggcgagaccctaaatacatttgccagaagccaagcattcagaaggccgacggcactgcaacggctcctccgcctcgcagcaaccacgcagcggaggaagcatcatctgaggacgaagaggaagaggaagttcaggccatgcagtcttttaattcaacccagcagaacgaaactgagccgaaccaacaggtcgtaggtaccgaggagcgcattcccattcccctgatggactacatcttgaacgtgatgaagtttgtggagtctattctgtccaataatacgaccgatgaccattgtcaagagttcgtgaaccagaaggggcttttgcccctggtgacaatccttgggctcccaaacctaccgatcgacttccccaccagcgccgcttgtcaggcagttgcgggcgtgtgcaagagcattctaacattgagccacgagccaaaggtgctccaagaggggctactccagctggactcgattcttagtagtttggaacctcttcacaggcccatcgaaagcccaggcggatctgtgctgttacgcgagctcgcctgtgcaggcaacgtcgctgacgcaactttgagtgcccaggcgacacccttgctgcacgctttgaccgctgctcacgcttacattatgatgtttgttcatacatgccgggtcgggcagtcagagatccgctctatttctgtaaatcaatggggaagccagttaggccttagtgtactgtccaaactgtcacaactttactgctcactggtatgggaaagcacagttttgctgtccttgtgcactcctaattctctccccagcggatgcgaattcggtcaggccgacatgcaaaagctagtccccaaagacgagaaggcaggaacgacccaaggagggaaacgtagcgacggcgagcaggatggggcagccggaagtatggatgcatcaacacagggcctgctggaaggcataggactggatggcgatactctcgcccccatggagactgacgaaccaaccgcgagcgactccaagggaaaatcaaagatcacccccgccatggccgcaagaatcaagcagatcaagcctctgctgagtgcgagtagtcgcctaggacgggctctggccgaactgttcgggttactggtgaagctatgcgttggaagtcccgtccgccagcgcaggagccaccatgctgcctctaccaccacagcgccaacaccagcggctagatcgacagccagcgctctcacaaagctgctgacgaagggcctaagttggcagccccccccctacacccccacccctagattcagacttactttctttatctgctcagtgggttttacatctccaatgctgttcgacgaaaggaagtatccctaccacctgatgctgcaaaaattcctgtgtagcggcgggcacaacgcattattcgagacctttaactgggccctgagcatgggcggtaaagttcccgtgtccgagggtctcgaacattctgatctgcccgacgggaccggcgagtttttagacgcctggctcatgctcgtagaaaagatggtcaatcctacaactgttctcgagagccctcattctttacctgccaaactcccgggaggcgtgcaaaattttcctcagttctctgctctccgcttcctggtggtaacacagaaagccgcattcacatgtatcaaaaacttatggaatagaaaacctcttaaagtctacggcgggagaatggccgaatcaatgctggccatcttatgccacatcctacggggtgaacctgtcatcagggagagactttccaaagagaaggaaggcagtcggggcgaggaagacacggggcaggaggaaggcgggagcaggcgggaaccacaagtgaatcaacaacagttacagcagctgatggacatggggtttactcgggaacacgccatggaagcgctcctgaacacatcaactatggaacaggcgaccgagtatctccttacccacccaccaccaataatgggcggcgtggtgagagacctgagtatgtctgaagaggatcagatgatgcgcgctatcgccatgtctctcggacaggatataccgatggaccagagggccgaatcaccagaagaggtggcttgccgtaaggaggaagaggaaagaaaggcgcgcgaaaaacaggaggaggaagaagccaagtgcctcgagaaatttcaggacgcggaccccctggaacaggacgagcttcatacatttactgatactatgctcccaggatgcttccacctgctggacgagcttccagacactgtataccgggtatgcgacctgataatgaccgcgatcaaacgaaacggcgctgactacagggacatgattctgaagcaggttgtgaatcaagtgtgggaggccgccgatgtgctaataaaagctgcactccctctgacaacctcagacaccaaaaccgttagcgaatggatttcacagatggccactctgccccaggcttccaatctcgcgaccagaatactcttgctgacgctcctgttcgaggagcttaagctgccttgtgcatgggtagtggaatcgagcggcattctaaatgtgctgattaagctgttagaagtcgtgcagccatgtctgcaggctgccaaagagcagaaggaagtgcagaccccaaagtggatcactccagttttattgctcatagatttctacgagaaaacggcaatcagcagcaaacgcagggcacagatgaccaagtacttacagagcaacagtaacaattggagatggtttgatgacagatccggtcggtggtgcagttattccgcatcgaacaattctacaatagacagcgcctggaaatccggtgagacgtccgtgcgatttactgctggaagacggcggtataccgttcagttcacaacaatggtgcaggttaatgaagagacgggtaatagacggccagtcatgcttacacttttgagagtcccacgcttaaacaagaatagtaagaactctaatggccaggagctcgaaaaaactctggaggagagcaaggagatggacataaagaggaaagaaaataaggggaacgatacgcctctcgcgctggagagcacgaacaccgaaaaagaaacctctttggaggaaaccaaaatcggtgaaatactcatccaaggtcttacagaagatatggtaactgtgctgattagagcttgcgttagcatgctgggtgtgcccgtcgacccagacaccctccacgccacactcaggttgtgcctccgcttaacccgggaccataagtatgccatgatgttcgctgagctgaagagcacacgcatgatcctaaatttaacacagtcttccggattcaatggattcacccccttggtgaccctgttgctcaggcacattatcgaggatccatgtaccctgagacacacgatggagaaggtggtgagaagcgcagccacaagtggcgctgggtccactaccagcggtgtggtgagtggatctctgggcagtcgcgaaatcaactatatactgagagtgctgggccctgccgcatgccgcaacccggatatcttcactgaagtcgcgaactgttgcattagaattgccctgcccgccccccgcggatcgggcacagccagcgatgacgagttcgaaaatctgaggattaagggaccaaatgccgtccaactggtgaagaccacccctctgaagccatctcctctacccgtgatacctgacactatcaaagaggtgatatacgatatgttgaacgcactggctgcctaccatgctcccgaagaagcggacaagagtgacccaaaaccgggcgttatgacccaggaggtcgggcaactgttacaggacatgggagatgatgtctaccagcagtaccgatctctcacaagacaaagctcggactttgatacccagagcggatttagcattaacagtcaggtgttcgctgctgacggggcctctacagagacgtccgcctccggaaccagtcaaggtgaagcctcaacacctgaggagagtagggatgggaagaaagacaaggaaggcgaccgagcctctgaagaggggaaacaaaagggtaaggggtctaagccccttatgcccacctcaacaattctacgcctcctggcagagctagttaggtcttacgtggggattgctacactcatagcaaattactcctacaccgttggacaatccgaactgattaaagaggattgctccgtgttggcgttcgtgctcgaccacctgctgccccatactcagaatgctgaagacaaagatacccccgcccttgcacggctgtttctggcaagcctggcagctgctggcagcggcaccgatgcccaagtcgcactcgtgaacgaagtgaaggctgcccttggcagagctttagccatggctgagtccacagagaagcacgcacgcctgcaggctgtcatgtgcattatttcgaccataatggaatcctgtccatcaacttcctctttctattcttctgcgaccgctaagacgcagcacaatggtatgaataacatcatccgcctatttctgaaaaagggactcgtgaacgatctagctagggtgcctcattctctggatctctcttctcccaacatggccaatacagtgaacgctgcattgaaacctctcgaaactctttctaggattgtgaatcagccatcaagcctgttcggctcaaaatccgcgagcagcaagaataagtcagagcaagacgcccagggcgctagccaggactctagcagcaatcaacaggatccgggggagcccggcgaagctgaagtccaggaggaggaccacgacgtcacccagacagaagttgcggacggcgacattatggatggagaggccgagaccgacagcgtggtcattgccggccagcccgaggtcctgagttcacaggagatgcaggttgaaaatgagctcgaggatctgattgatgagctgctggagcgtgatgggggttctgggaactcgacgataattgtgtcacgcagcggggaggatgagtcacaagaggacgtcctgatggacgaggcccccagtaacttgagccaggcttcaaccctacaggcaaatcgcgaggacagtatgaatattcttgatccagaagatgaggaggaacatacccaggaggaggatagttcagggagtaatgaagacgaagacgactctcaggatgaagaggaggaagaagaggaagatgaggaagacgaccaggaagacgatgagggggaggagggagacgaagacgacgacgatgacggatctgaaatggagctcgacgaggattatcctgacatgaacgcatcccctctggtacggttcgagagattcgaccgagaggacgaccttatcatagagttcgacaacatgtttagtagcgccaccgatatcccaccttcacctggcaacattccaaccacacatccccttatggttagacacgcagaccatagctcactgaccctggggtccggctccagcactacccgccttactcaggggataggaaggtctcaaaggactctaaggcagctcactgctaacaccggtcataccattcacgttcactatccaggcaatagacagcctaacccaccgctcatcctgcaaaggctattaggacctagcgctgccgccgatatcctgcaactctcgtctagtctccctcttcaatcccgcggccgcgccaggctcctggtggggaatgatgatgtccatattattgcccgctctgatgatgagctgctagatgactttttccatgaccagtccaccgctacctcacaggcggggacactatcttccatcccaaccgctcttacccggtggacagaagaatgcaaagtcctcgacgcagaatcaatgcatgattgtgtttctgtggtgaaggtgtccatcgttaaccatctcgaattcctgcgcgacgaagagctggaagagagacgggaaaagaggcgtaagcagcttgccgaggaggagaccaaaatcactgataaaggaaaggaggataaggagaacagagaccaatcagcgcagtgtacagcaagcaagtcgaacgattctactgaacagaacctgagtgacggcacacctatgcccgattcgtacccaacaaccccctcatccacagacgctgccaccagcgagtcaaaagaaacactggggaccctccaaagcagccaacaacagcctacactcccaactccgcctgccctgggcgaggtgccacaggagctccagtctccagccggagaaggtggcagtagcacccagctcttgatgcctgtggagcctgaagaacttgggccaacccgccctagcggcgaagctgagacaacccagatggagctgtcacctgcgcccactatcacttctttgtccccggagagggccgaagatagcgacgcactgacggcagtgagcagtcagctggaggggagccccatggacacaagctctctggcaagttgtactttggaagaggcagtgggtgatacttctgcggcgggatccagtgagcagcctagagctggttcttccacccccggcgacgcccccccggccgttgccgaggttcagggtcgtagcgacggatctggtgagtccgcacaaccccctgaggactccagccctcctgcaagttcagagtcatcgagcacgagagactctgctgtcgctatcagcggcgcagacagccgaggcatactggaagaacccctcccttcaacgtcgtctgaggaagaagatccactggccgggatatcacttccagagggcgtggatccatcttttctggctgctctgcctgacgacatcaggcgtgaggtcctgcagaaccaactgggcattaggccccccacacgaaccgcacccagcacgaattccagcgctcccgcagtggtggggaatcccggggtcaccgaagtgagccccgagtttctggccgcgttaccccccgcgatacaggaagaggtgctcgcccaacaacgcgcggaacagcaaagacgagagctcgcccaaaacgcgtctagcgatactcctatggatcctgtgacatttattcagacattgccgtctgacctgcggaggtccgtgctggaggacatggaggactcagtactagcagtgatgcctccagatattgccgccgaggcgcaggccttaagaagggagcaggaggctagacagcgccagttgatgcatgagaggctgtttggccatagttccaccagcgcgctgtcagccatcctcaggtcccctgccttcacctccagacttagcgggaacagaggtgtccagtatacacggttggccgtccagaggggcggtacgttccagatgggggggagctcctctcataatagaccctccggctctaatgtcgataccctcttgcgtcttagaggtcgtctgttactggaccacgaggccctgagctgtctgctcgtcttgctgttcgtggatgagccaaagcttaacacctccaggctgcacagagtcctgcgtaacctgtgctaccacgcccagactaggcactgggtgatcaggagtctgttaagcatcctgcaaaggtcatcagagtctgagctgtgcatcgagaccccgaagctgactacatcggaagagaaggggaaaaaaagcagcaagtcttgtggtagtagctcccatgagaaccgacccttggacctgctgcacaaaatggaaagtaaaagctctaaccagctgagctggctgtcggttagcatggacgccgctcttggatgtcggactaacatctttcaaatacaacgcagcggcggtcgcaaacacactgaaaagcatgcatctggaggctcaacagtgcacatccatccccaggcggccccggtggtctgcagacacgttctggataccctgatccaacttgctaaagtctttccatcccacttcacccagcaacgaacgaaagaaacgaactgcgaatctgaccgcgaacggggcaacaaggcttgctcaccttgtagcagccagagctccagttcgggaatttgcaccgatttttgggatttgctggtgaaactggataatatgaatgtgtcgcggaaaggaaagaatagcgttaagtccgtgcctgtgtccgctgggggtgagggcgaaactagcccctacagcctggaagcttcaccattggggcagctgatgaacatgctttctcaccccgtaattcgccgtagtagtctcctcacggaaaagctgttaagactacttagtctaataagtatcgcgcttcctgagaacaaggtatctgaggctcaagctaattccggatcaggggcctcatccacaactactgctacgtcaaccacatccaccaccacgactaccgcggccagcacgacgccaacccctcccaccgccccaaccccggtaactagtgcacctgcactggtcgcagctactgctatttccactatagttgtggctgccagcaccaccgtcaccacaccaaccaccgcaacaacaaccgttagcattagccccactacaaaaggttccaagagcccagccaaggtttctgatggcggatcctcctcgacagactttaagatggtgtccagcggcctcacagaaaaccagctgcagctctcagtggaagtgctcaccagccacagctgcagcgaagaagggctggaagacgctgctaatgtgctcctgcaactctcccgaggcgactccggaactcgagatactgtgctgaagctgctattaaacggggcacgacacttaggatataccctttgtaaacagataggaactctactggccgagctccgagaatacaatttggaacagcagagaagggcccagtgcgagactttgtccccggacggattgccagaggagcaaccccagacaacaaagcttaaaggcaagatgcagtcacgcttcgacatggccgagaacgtggtcatcgttgcaagtcagaagcgaccgctgggcggccgcgaactgcagcttccgtcaatgtctatgctaacttcaaagaccagcacccagaaattctttttgcgagttctccaggtcataatccaattacgcgacgacacccgcagagctaataagaaagctaaacagaccgggagactcggcagctcagggctgggatctgcttcttcgatccaagcagcagtgagacagctggaggccgaggcagatgccataattcagatggtcagggagggccaaagggcacgcaggcagcagcaggccgccaccagcgagagctcccagtctgaggctagcgtccgcagagaagaatcaccgatggacgtagatcagccctctccctccgctcaagacactcaatccattgcatcagacggtacgcctcagggagagaaggaaaaagaagaacggccccctgagttacccctactctccgagcagttgtcattggatgagctgtgggacatgttgggagaatgtctgaaggaattggaagagtcgcacgatcaacatgccgtgctagtcctccagccagccgtggaggcatttttcttagtgcacgccactgagcgggaatcaaaaccaccagtgagagataccagagagtcacaactggcacatattaaagatgagccccccccgttgagcccggcacctttgaccccagcaactcccagttccctcgaccctttcttctctagggaaccttcaagcatgcatatcagctcttccctgccaccagacacacagaagttcttgcgctttgcagaaactcaccgtaccgttcttaatcagatattaaggcaaagtaccactcatctggccgacggcccctttgccgtcttggtcgattacataagagtcctcgactttgacgtaaagcggaaatacttccgccaggaactcgaaaggctggacgaaggattgaggaaggaagatatggcggttcacgtgcgaagggaccacgtgtttgaggatagttacagggagctccaccgaaaaagccccgaggagatgaaaaatcgcctatacatagtgtttgagggggaggagggccaagatgccggtggactgcttagagagtggtacatgataatctcaagggagatgttcaatcctatgtacgccctctttaggacctctccgggtgaccgggtgacctataccattaatccttcttcacattgtaaccccaaccacctgagctacttcaaattcgtaggccgtattgtcgccaaggctgtgtatgacaatcgcctccttgaatgctatttcaccaggtccttttacaaacacatattggggaaatccgtgcggtatacagacatggagagcgaggactaccacttttaccagggtctggtttacctgcttgaaaatgacgtgtcaaccctcggttatgatctgaccttttccactgaggtccaggaatttggagtttgcgaagtgcgggacctaaagcctaatggagcgaatattctcgtaaccgaagagaacaagaaggagtacgtgcatctcgtgtgccaaatgcgaatgacgggtgccattcggaaacagctggctgctttcctggaggggttttacgagataatacctaagagactgatctctatctttaccgagcaggagttagaattacttatctccggactccctaccatcgacattgatgatttgaaaagcaatactgaatatcacaagtaccaatctaatagtatccagatacagtggttttggcgcgcactacgctcattcgaccaggccgaccgggctaagttcttacagtttgtgacaggcacatcaaaagtgccattgcaggggttcgccgccctggaggggatgaatggcatacaaaaattccagatccatcgagatgataggtccactgatcgactacctagcgctcacacctgcttcaaccagttggatcttcccgcctacgaatctttcgagaaactgaggcacatgcttctactggccatacaggaatgttccgaagggttcggtctcgcatag

SEQ ID NO: 190430 - DNA, 13125 bp, synthetic construct
  misc_feature 1..13125: note = Description of Artificial Sequence: Synthetic coding sequence
  source 1..13125: mol_type = other DNA
atgaaggtggaccggaccaagctgaagaagacccccaccgaggccccggctgactgtcgtgctctgatagacaaattaaaggtctgtaatgatgagcagctcctcctggaactccagcagattaaaacttggaatatcggaaagtgcgagttataccattgggtagacctattagaccgcttcgatgggattctggcagatgccggccaaaccgtggagaatatgagctggatgctcgtctgcgataggcctgaaagggagcagctaaagatgctgctgcttgcagttctaaactttaccgccctgctaatagaatattcattcagcagacatctatattcatccattgagcatctgaccactttgctggcttcttccgacatgcaggtagtcctcgcagtgcttaatctgctctacgtgttttccaaacgtagtaattatatcaccagactcggctccgataagaggacacctctgctgacacggctgcagcacctggcagaatcctggggaggaaaagaaaatggcttcggcctggcagaatgctgcagagatctccacatgatgaaataccccccctccgcaacgactcttcacttcgaattctacgccgacccgggcgcagaggttaaaatagagaagcgcaccacctctaacaccctccactatattcacattgaacagttggacaaaatctccgagagccccagtgagattatggagtcacttacaaagatgtattccatcccaaaggacaaacaaatgctccttttcactcacattaggctggcacacggcttttccaaccaccgcaaacgactgcaggcagtacaggcccggctgcacgctatctccatcctggtttatagtaacgctctgcaagaatccgcaaactccatcctttacaacggactgattgaggaactcgtggacgttttacagatcaccgacaagcaacttatggaaatcaaggctgctagcctgcgcacactaacgtctatcgtgcacctcgagcgtacgcccaagctgtcgtctatcattgactgcaccggcaccgcctcctaccatggctttctccctgtactcgtgcgcaattgcatacaggccatgatagaccccagcatggatccctatccacatcagttcgcaaccgcgctattttctttcttatatcatctggcctcttatgacgctggtggagaggctctggtctcatgcggcatgatggaggcactcctaaaagttatcaaattccttggcgacgagcaggatcagatcacctttgtgacgagagctgtgcgagtggtcgacctaattactaacctggacatggccgccttccagagtcactcaggattgtctatatttatatacaggttggagcacgaggtggacttgtgtaggaaagagtgcccatttgttatcaaacctaaaattcagcgccccaataccacccaggagggcgaggaaatggagacagacatggacggagtgcagtgtattccgcagcgcgcagcacttctcaagtcgatgttaaactttttgaaaaaagccatccaagaccccgccttctctgatggcatccgacacgtcatggacgggagcctcccaacctccctgaagcatatcatttcaaatgccgaatattacggaccaagcctgtttctcttggctaccgaagtggtgacagtcttcgttttccaggaacccagcttactttcaagtctgcaagataacggactcaccgacgtcatgctccacgccctccttatcaaggatgtacctgctaccagagaagttttgggcagcctgcccaacgtctttagtgcgctgtgcctgaacgccagaggcctacaaagttttgtgcaatgtcagccctttgagcggctgttcaaagtcctgctgtcccccgactacctccccgcaatgcgtcgaaggagatcgagtgaccctcttggagatactgcatccaacctgggtagcgccgtagacgagctcatgcggcatcaacccacactaaaaacggatgccactaccgcaattattaaactgctcgaggaaatctgcaatctcggaagagatcccaaatacatctgccagaagccatccatacagaaggccgacgggaccgctacagctcccccaccgaggtccaatcacgcggccgaggaggcatcatcggaagatgaagaagaggaggaggttcaggctatgcagagttttaatagtacccagcagaacgagacggaacctaaccaacaagtggttggaaccgaagaacggatccctatccctctgatggattacatcctgaacgtgatgaagttcgtggaatccatccttagtaataatactaccgacgaccactgccaagaatttgtcaatcagaaggggttgctgcctcttgtcaccatacttggcttgcctaatcttccaattgactttcctacaagcgctgcctgtcaggctgttgcaggagtctgcaaaagcattctgaccttaagtcatgagcctaaggttctccaggagggtcttttacaactggactccatcttgagttcactcgaacctctgcatcggcctatcgaatcccccggggggtcagtgttgctgcgcgaactggcctgcgctggaaatgttgctgacgccaccctatccgcacaggctaccccattactccacgcactcactgctgctcacgcctatattatgatgttcgtccatacctgcagagttggacagtcagaaatacgcagcatatcagtcaaccaatggggctcccagctgggcctctcagtactctcaaagctgagtcaactttactgcagcctggtgtgggaatccacagtgctgttgagtctctgcacccctaattcgctcccgtcgggatgtgagttcgggcaagcggacatgcagaagctcgtcccgaaggacgaaaaagccggaaccacccagggcgggaagagatccgatggagagcaggacggtgcagccggtagcatggacgccagcactcaaggattgttagaggggatagggctagatggcgacacactggcacccatggaaactgacgaacccacggcatccgacagtaaggggaaatctaaaataactcccgccatggcagcccgcatcaagcagataaagcctctgctctcagctagctccaggctgggccgagccctggccgagttatttggactcttggtcaaattgtgcgtcgggtctcctgtacgtcagcgcaggtctcaccatgccgcgtctaccacgacagctcctacacccgccgcgaggagcacggcctccgctctaacgaagctactgacgaaaggtttgagttggcagccacctccttatactcctactccgcgcttccgtttaaccttctttatatgctctgtgggtttcacatcccccatgttattcgatgagcgcaagtatccgtaccatctgatgcttcagaagtttctgtgtagtgggggtcataatgcgctctttgaaactttcaattgggcactgtcaatgggaggcaaagttcctgtctccgagggattagaacactccgatctgccggatgggacaggtgaatttctggacgcgtggcttatgctcgtggagaaaatggtaaatccaactacggtgctcgagtctccccactccttgccggcaaagctcccaggcggggttcaaaactttccgcagtttagcgccttgcggtttctggtggtgacccagaaggccgcctttacatgcatcaaaaatctctggaacagaaagcctctcaaagtgtatggaggaaggatggcagagtcaatgcttgccatcttgtgccacattcttcggggggaacctgtgatcagagaacgcttaagtaaagagaaggagggtagtcggggagaggaagataccggccaagaagagggagggtcccgacgggaaccacaggttaatcagcagcaattgcagcagcttatggatatgggcttcactagagagcacgccatggaagccctcctaaacacttccacgatggagcaggcgaccgaataccttctgacccatccaccccctatcatgggaggtgtggtccgggatctctccatgagtgaggaggatcagatgatgagggccatagctatgtctctggggcaagatatcccgatggaccaaagggccgaatctcccgaagaggtggcatgccgcaaagaggaggaggagaggaaggccagagagaagcaggaagaggaggaggctaagtgcctggagaaattccaagacgccgacccactggaacaagatgagttgcataccttcacagataccatgcttcctggctgtttccatttgctagacgagctgcccgatactgtatatcgggtatgcgatctcatcatgaccgctatcaaaagaaacggagccgactaccgcgatatgatcctgaaacaggttgtcaatcaagtctgggaggccgcagatgtactgataaaagccgctctcccactgacaacaagtgacacaaagacggtctctgaatggatctctcagatggccaccctgccacaggcttcgaacctggcaactagaattctcctactcacactgctatttgaggaactcaagctgccctgcgcatgggttgtagagtcaagcggtattttgaacgtgttgataaaactactggaagtagtacagccgtgtctgcaagcggcgaaggaacagaaagaggtgcagacccccaagtggattacccccgttttactgctgatagatttttacgaaaaaacagccataagttccaagaggcgtgcgcaaatgactaagtatttgcagtccaatagcaacaactggcgctggtttgatgatcggagcggtcgctggtgttcttactcggcaagtaacaattcaaccatcgacagcgcttggaaatctggagagacctctgtccgtttcaccgctggacgcagaaggtacactgtacagttcaccactatggtacaggtaaacgaggagactggcaaccgtcggccggtaatgctaacactcttgcgcgtgccgcgcctgaacaaaaacagtaagaactcaaatgggcaggagctagaaaaaacacttgaggagagcaaagagatggacatcaagaggaaagagaacaaaggcaacgacacccccctggcgttggagagcaccaacacggaaaaagaaactagcctagaagagacaaagattggtgaaatcttgatacaaggtctgacagaggatatggtgaccgttctgatccgagcctgtgtgtccatgctgggcgtcccagtagatccagataccctgcacgccaccctgcggttatgtttgagactcacccgggatcataagtacgcaatgatgtttgccgagctgaagagtacccggatgatcttgaacctgacacagagtagtgggttcaacggcttcacaccactggtgacactgcttctgagacatataattgaggacccttgcacgctaagacacaccatggaaaaggtcgtgcgttccgcggcgacaagcggagctgggagcaccacttcaggggtggtgtctggaagcctgggcagccgcgaaatcaactacatccttcgggtgttgggccccgccgcctgcagaaatcctgatatattcacagaggtggcaaactgttgtatcaggatcgcattgccggcgcctagaggcagcgggacagcttctgatgacgagttcgagaatctgagaattaaaggacctaacgcagtgcagctggtcaaaacaacgcccctcaaaccgtcccctctgccggtgatccccgataccatcaaggaggtgatttatgatatgctgaacgcattggcagcgtaccacgcccccgaagaggccgataagagcgaccctaagcctggcgtgatgacacaggaagtggggcagctcctacaggacatgggcgatgacgtgtatcagcagtatcggtcactgacccgccagtcgtccgacttcgacacccaatctggtttctccatcaactcacaggtctttgccgcagatggtgcttcaaccgaaacgagtgcatccggcacatctcaaggagaggccagcactccagaggagtcacgggatgggaaaaaagataaggagggggatcgtgcgagcgaggaggggaaacagaaagggaagggcagcaagcccctcatgcccacctccaccatactcagactacttgccgagttggtacgctcatacgttggaatcgccacgttgatagctaactactcgtacacagttggccagtctgagctgataaaggaagattgtagtgtcttggcgttcgtgctcgaccatctccttcctcacactcagaacgcagaggacaaggacaccccagcgctggcacgcctgttcctcgctagtctcgccgccgccggcagcggaaccgatgctcaggtggccctggtaaatgaggttaaggccgctttaggacgagcattggctatggccgagagtaccgaaaagcacgcccgcctgcaagcagtgatgtgcattatatcgaccatcatggagagctgcccctccacatcatctttttattctagtgcaaccgctaaaactcagcataatgggatgaacaacatcatcagactcttcctgaagaaaggcttagttaacgacctggccagagtacctcattctttagacctgtcttcgccaaatatggcgaacacggtgaacgctgcccttaagcccttggaaacactcagtagaattgtaaatcaacctagttccctgtttggaagcaaaagcgcctcatcaaagaacaagtccgaacaggatgcacagggggcgtctcaggattctagcagtaaccagcaggaccctggcgagcctggtgaggctgaagtgcaggaggaggaccatgatgtaacacagaccgaagtggccgatggtgacatcatggatggcgaggcagaaacagatagtgtggtcatcgccgggcaacccgaggtgctgtcgagccaggaaatgcaagtggagaacgaactggaggatctgatcgatgagctgctcgagagggatggcggttctgggaatagcacaattattgtctccaggagcggcgaagacgagagccaggaggatgtcctgatggacgaggccccatcaaacttgtcacaggctagtaccctgcaggccaatcgtgaagattccatgaacattctcgacccggaggatgaagaagagcatacgcaggaggaggacagcagtgggtccaacgaagacgaggatgactctcaagatgaggaggaggaggaggaggaagacgaggaggatgatcaggaagacgacgagggggaggagggcgacgaggacgatgatgacgacgggtctgaaatggagttggacgaagattatcctgatatgaatgctagccccctcgtccgttttgagagatttgacagagaggatgacctgatcatagaatttgataacatgttttcctcagcaaccgacatccctccttcacctgggaacatcccaactacccacccccttatggtgcggcatgcggaccacagctctctgaccctcggctcaggatcctccacaacaagactgacgcaaggcatcggtcgtagccaacgcactttaagacaacttactgccaatacgggccacactattcacgtgcactatcccgggaacaggcagccgaacccccctctgattctccagcgtctcctcgggccctccgccgctgctgatattttacagctgtccagttctctccccctccaaagtagagggcgggcacggctactggtcgggaatgatgacgtacacattattgcccgaagtgacgacgagttactcgatgatttctttcacgatcagtcgacagccactagtcaggcaggcactctgagcagcataccgactgcattaacccgatggacagaggagtgtaaagtgctggatgcagaatcgatgcatgactgtgtctccgtcgtaaaggtgtctatcgtgaatcatctggagtttctgcgcgatgaagaactggaagagcgccgtgagaaacgcagaaaacagctggcggaagaggaaaccaagattactgacaaggggaaggaagacaaagaaaaccgggatcagagcgcgcagtgcaccgcttctaagtctaatgattccacagagcagaacctgtccgacggcaccccaatgcccgattcctatccaactacaccatcctcaactgacgccgccacctctgagtcaaaggagaccctgggaacactgcagagcagtcagcagcagccgacgctgccaactcctcccgccctgggcgaagtgccacaggaactgcagagtcccgcgggcgagggtggctcttccactcagctgctcatgcccgtggagccggaggagttggggcccactcggccatcaggtgaggccgaaaccactcaaatggagctatctcctgcccctactattacctctttgtctcccgaacgggctgaggatagtgatgccctcacagccgtctcatcacaattggagggttctccaatggatacatcatccctcgcttcatgcacactcgaagaagccgtgggagacacttccgccgctggctcttccgagcagcctcgggcaggatcctctaccccaggcgacgcccctcctgcagttgccgaagtgcaggggcgcagtgatggctctggcgagtctgctcagccgccggaggactcctccccccctgctagtagcgagagtagtagtactagagattccgccgtcgctatcagcggagcagactcaaggggcattctggaggagcctcttccgtcgacctccagcgaggaagaagatccactggcaggcatctctctgcccgaaggcgtggatccctcttttctcgcggccctgcccgatgatattagaagagaggtcctgcagaatcagcttggaatacgaccccctacacgcactgcaccttccacaaattccagtgcgccagctgtagtgggcaaccctggtgtaaccgaggtctcccctgagtttctggcagcattacccccggctattcaagaggaagtgctggcgcagcagagagctgagcagcagagacgagagctggcacaaaatgccagtagtgacactcccatggaccctgtgacattcattcagactctaccttcagacttacggcgctccgtcctcgaagacatggaagattccgtcctggctgtcatgccccccgacattgcagccgaagctcaagctctgaggagggaacaggaagcgcgccagcggcaactcatgcacgagagactctttgggcatagttctacctcagcgctgtccgccatactgaggtccccggctttcacctccagattgtccgggaaccgtggagtccagtacacccgcctggccgtccagcgcggcgggacttttcagatgggaggctcctccagtcacaacagacccagcggaagtaacgtggatacacttctgcggttgagggggcgtctccttttggatcacgaggctctcagctgtctgctggtcctgttgttcgtggatgagccaaaactaaacaccagtcgcctgcaccgcgtccttcgaaatctctgctaccatgctcagacccggcattgggtgattagatccctgctctccatcctgcagcgctctagcgaaagtgaactgtgtattgagacgccgaagcttaccacatctgaagaaaagggcaagaaatctagcaagtcctgtggatcaagcagccacgagaatcgtcctctggatctattacacaagatggagagtaagtccagcaatcagctatcctggctgtccgtgtccatggacgctgcactcggctgccgcacgaatatcttccagatccagcggtctggcggtaggaaacataccgagaaacacgcctccggaggcagtaccgtgcacatccacccacaggccgctccagtggtatgtcgacacgtcctcgataccttgatccagttggctaaagtcttcccatcccattttacccagcagcgtacaaaagaaaccaactgcgagagtgaccgcgaaagggggaataaggcgtgttctccgtgctccagtcagtcatcttctagtggaatttgcacagacttttgggatctgctggtcaaactggacaacatgaatgtgagccgcaagggaaaaaatagtgttaagagcgtgcccgtcagtgccgggggcgaaggcgagacaagcccgtattcgctcgaagcatcccctttaggccagctgatgaatatgctgtcccaccctgtgatacgaaggtccagtctgctcactgaaaagctgttgcggctgctctctctgatttcgatcgcacttcctgagaataaggtatctgaggcacaggcaaatagcggctccggagctagttccacgaccacagctacttcgacaacaagcacaacaaccacaacagcagcatcgacaacgcctaccccgccaactgctccaactccagtgacaagtgcccccgccttagtcgcggccactgccatttctaccatcgtggtagccgctagtactacggtgaccactcccactactgctactacaacagtgtccattagccccaccacaaaaggatcgaagtcaccagccaaagtgtccgacggaggcagctctagtacagatttcaaaatggtgagctccggactgacggagaaccagctccagctgagcgtggaggtgctgacgtctcattcctgcagcgaggagggcttggaggatgcagccaacgtactcctgcagctttccagaggcgactctggcacccgcgacacggtgttaaagcttttgctcaatggagcaaggcatctgggctatacactgtgtaaacagattgggacgctgctcgcggagttgcgtgagtataatcttgaacagcagcggcgggcccagtgtgagactctatccccagacggactgcctgaggaacagccccagactacaaagctcaaaggtaaaatgcagtcacggttcgacatggctgagaatgtagtgattgtagccagccaaaagcgaccattaggaggaagagaactgcaactgccctctatgagtatgctgacgtccaaaacctctacccagaaattcttcctccgggtgttgcaagtcattatccagctgcgcgatgatacgcgccgcgcgaataagaaagctaagcagaccgggcgtttgggaagctctggcctgggtagcgcctcgtccatccaggccgcagtccggcaactggaagccgaggcggatgccattattcaaatggttcgggagggacagagggcgagacggcagcagcaggccgcaacttcagaatcatcacaatctgaggcgagcgtacggagagaagaaagtccaatggatgttgaccagccgtcgccaagcgctcaggatacgcagtccatagcctctgacgggactccccagggtgagaaagaaaaggaagagaggcccccggagttgccactcttgtcagagcagttaagcttggacgaactgtgggatatgctaggggaatgtctcaaagagctagaagagtcccatgatcagcacgccgtattggtcctgcagccagctgtcgaggcattcttcctcgtgcacgccaccgagagagaatcaaagccaccggtgagagacacccgtgagtcccagctcgctcatataaaggacgagccgccaccactgtcacccgcaccactgacgcctgcaacacctagctcgctcgaccctttcttttcaagggagccctcgtcgatgcacatctcgtcatccctgccccctgatacgcagaaattccttcgtttcgccgaaacccataggacggttttaaaccaaatattacggcagtcaaccactcatctagcagatggcccttttgccgtgctggtcgattatattagggtgctggactttgatgtgaagcgcaaatacttcaggcaggaactggaacgtctcgatgaaggcctacggaaggaggacatggccgtacatgtgcggcgtgatcacgttttcgaagactcataccgggaattgcatcgaaaaagtccagaggagatgaaaaacagactttacatagtgttcgagggagaagagggccaagacgcaggtggcctcttaagggaatggtatatgatcattagcagagaaatgtttaatcccatgtacgcactgttcaggacatcacctggggacagggtgacctacactattaatccttcctcacattgtaaccccaatcacctgtcctatttcaaattcgtgggaagaattgtggctaaggccgtgtatgacaatagactgctggaatgttatttcactaggtctttctataagcatatcctcggcaaatccgtacgctataccgatatggagagcgaagactaccatttttatcaggggctggtgtacctgttggagaacgatgtgagcaccctcgggtacgacctgacgttctccacagaagttcaggagttcggagtgtgcgaggtgcgcgaccttaagcccaacggagctaacatcctcgtgacggaagaaaacaaaaaggagtacgtgcatctggtctgtcagatgcgcatgaccggcgcaattagaaagcagctggcggccttcctggagggattttatgagataattccaaagcgcttgataagtatttttaccgagcaggagctggaactgctgattagtgggctgcccacaattgatatagatgacctgaagagtaatactgagtaccataagtatcagagcaattctatccagattcagtggttctggcgggcccttcggtcttttgatcaggctgatagagccaagttccttcagtttgtgacaggtacttctaaggtccccctgcaaggcttcgcagccctcgagggcatgaatggcattcagaagttccagatccatcgcgacgacagaagcaccgacagacttccatcagcccatacttgtttcaaccagttagatctgccagcctacgaatcttttgagaagctgcggcacatgctactcctggccatccaagagtgctcagaaggctttgggttggcgtag

SEQ ID NO: 190431 - DNA, 771 bp, synthetic construct
  misc_feature 1..771: note = Description of Artificial Sequence: Synthetic coding sequence
  source 1..771: mol_type = other DNA
atggacccctacccccaccagttcgccaccgccctgttcagcttcttgtatcatctggcctcttacgacgctgggggggaggcccttgtgagctgcggaatgatggaagctctgctcaaggttattaaatttctcggcgacgagcaggatcagattacttttgtgacccgagccgttcgggtggttgatctgattacaaatctggacatggctgcttttcaaagccactccggactcagcatttttatctatagacttgagcacgaagtggatttgtgtcgaaaagagtgtccttttgtgattaagcctaagattcagcgccctaataccacccaggaaggcgaggagatggagacagacatggacgtggccgatgtagccatggagtccagccctggcagttcaattagcatggaacatcgacttgatgtggagctgagggcaagtggctcaagtagttctacaaacatctcatctgggccatctcctggtccctctccaggcaccgggcccggcccaggacccggaccaggccccgggcctggtcctggcccaggccccggacccggaccaggccctggtcccggtccaggacccgggcctagaccgggagttcaatgcatcccgcagcgggcggcactgctgaagagcatgttgaacttcctcaaaaaggccatccaggaccccgcttttagtgacggcatccgtcatgttatggatggcagtctacccactagccttaagcacatcatcagtaatgctgagtactag

SEQ ID NO: 190432 - DNA, 687 bp, synthetic construct
  misc_feature 1..687: note = Description of Artificial Sequence: Synthetic coding sequence
  source 1..687: mol_type = other DNA
tgagtgagctgcggcatgatggaggccctgctgaaggtgatcaagttcctgggagacgagcaggatcagattacgttcgtgacacgcgccgtaagagtcgtggacctgatcaccaacttggatatggctgcttttcagagccactccgggctatctattttcatttaccgcctggagcatgaggtcgacctgtgccgcaaggagtgcccatttgtcatcaagcccaagatacagcgacctaacaccacgcaggagggtgaagaaatggagactgacatggacgtagccgacgtggctatggagagctcccccggatcatccataagcatggagcaccgactggacgtcgagcttcgggcaagtggctcatcatcttcgacgaacatatctagcggcccgagtcctggaccaagcccaggcacaggacctggacctggccccggacccgggcccggcccggggcctggaccaggacctggccccgggccaggaccaggtcctgggccaggcccaggacccaggccaggcgttcagtgcatccctcaaagggcagccctgcttaaaagcatgctgaattttctgaagaaggctatccaagatcccgccttctcagacgggataagacatgtgatggatgggtccctcccaacctccctcaagcatatcatttcaaacgcagagtactag

SEQ ID NO: 190433 - DNA, 3594 bp, synthetic construct
  misc_feature 1..3594: note = Description of Artificial Sequence: Synthetic coding sequence
  source 1..3594: mol_type = other DNA
tgacccagcggcagcaacgtggacaccctgctgcggctgcggggccgcctcctacttgaccatgaagcccttagttgcttgcttgtcctcctgtttgtcgatgaaccgaagttgaacacctcaaggctccaccgcgtactgaggaatctttgctaccatgctcagaccaggcattgggttatccggtctctcctctcgatacttcagcggagtagtgagagcgagctgtgtatcgagactcccaagctaacgactagtgaagaaaagggaaagaaatcgtcaaaaagttgtggctcatcaagtcacgaaaatcggccactggacctgctgcacaagatggagtccaagtcctcgaaccagttgagctggttgtccgtgtcaatggacgccgcgctgggttgtcgaaccaacatctttcagattcagcgtagcggaggccgaaagcacacagagaaacacgcctcagggggaagcacggtccacatacaccctcaagccgctccggtggtctgccgccatgtcctggacactctcatacagctcgccaaagtttttccatcgcactttactcaacagagaaccaaggagaccaactgtgagagtgatagagaacggggcaacaaggcctgtagcccctgctcttctcagtcatcctcatcaggaatttgcaccgacttctgggacctcctcgtgaagctcgataatatgaacgtttcccggaaagggaaaaacagcgttaaatcagtgcctgtttcagccggcggcgaaggtgaaactagcccatattccctggaggcatcacccctgggccagttgatgaacatgctttcgcacccagtgatccggagatcctctctgctaactgaaaagttacttagactgcttagtctcatcagtattgcgttgcccgagaacaaggtgtccgaggcccaagccaactctggcagcggggccagttccaccacaacggcaacttcgactacatcgactacgactactacagctgctagcactacccccacacctcccaccgcccccactccggtaacctccgccccagccctggtcgccgcaaccgcaatctctactatcgtggtagctgcttccaccaccgtgactactccaacaaccgcaacaaccaccgtgagcatatcccctactactaagggctccaaatcacccgcaaaggttagcgatggcggatcttcaagtacagacttcaagatggtgtcctctggcctgactgagaaccagcttcagctgtcggtggaagtgttgaccagccacagctgctccgaagaggggctggaagatgcagctaacgtcctgctgcagttatccagaggagatagcggcactcgggacaccgtgctgaagctgctgctcaatggcgcgcgccatctcgggtatacactatgtaaacaaataggcacattgctggctgagctgagggaatacaacctagagcagcaaagaagagcccagtgcgagactctgtctccagacgggttgccagaggaacagccccagacaactaaactcaaaggaaagatgcaatcccgctttgatatggccgagaacgtcgtgattgtcgccagccagaaacgccctctcggtggtagagagctccagctgccaagcatgtccatgctgacttccaaaacctctacccagaagttcttcctacgtgttcttcaggttattatacagctgcgagacgacacaagacgtgccaacaagaaggcaaagcagaccggtcgcctagggtcctccggcctgggatcagcctccagtatccaagcagccgtacgtcagctggaagcagaagccgacgcgatcatacagatgtctgaatcctctcagtctgaggcatctgtcaggagggaagaaagccctatggacgtggatcaacccagtcctagcgcacaggacacccagtctatcgcctcagatggtactccccagggcgaaaaggagaaggaggaacgccccccagaactccctctcctgtctgaacagctgtccttggacgagctgtgggatatgctaggtgagtgtctaaaggaattagaggaatcccacgatcaacacgccgtgctggttttgcagccggctgtggaagccttctttctggttcacgccaccgaacgcgaatccaagccacctgttagggacacccgagagtcccagctggcccacatcaaagatgagccccctcccttgagtcccgcacccctaacaccagcaaccccctcaagccttgatccctttttttcgagagagcccagctccatgcatatcagttcttctttgccccctgacacccagaagttcctgagatttgccgaaactcatcgcaccgttctcaatcagattctccggcagtctacaacacacctcgccgacgggcccttcgccgtgcttgtggactacataagggttttagatttcgatgttaaaagaaaatatttccgccaggaacttgaaaggctggacgaaggcctgaggaaagaggatatggccgtccatgtgcggcgcgatcacgttttcgaagacagttaccgcgagctccacaggaaatcccctgaagaaatgaagaaccgtctatatatcgtttttgagggtgaggagggacaggatgcggggggcttgttgagggagtggtatatgattattagtagggaaatgttcaaccccatgtacgctctctttcgaacaagccccggtgatcgggtaacctataccatcaatccgtcgagccactgtaatcctaatcacctctcctattttaaattcgtcggccgcatcgtggccaaagccgtgtatgacaacaggctgctggaatgctattttacccgctcgttctacaagcacattctgggcaagtctgtcaggtacaccgacatggaatcagaggactatcatttctaccaggggctggtgtatcttctagagaacgacgtcagcacattgggttatgatcttacttttagtactgaagttcaagagttcggggtgtgcgaagtccgtgacctgaaacccaacggagcaaatatcttggtaactgaggagaacaaaaaagagtacgtgcacctagtgtgccagatgagaatgactggcgcaattaggaagcagctggctgcttttctcgagggcttttacgagataatacccaaaagattaatctctatctttacagagcaggagctggagctgctgatctctgggctgcctacaatcgacatcgatgaccttaaatcgaacaccgagtaccacaaataccaaagcaacagcatacagattcagtggttttggagggctctgcgatcctttgatcaagccgaccgagctaagttcctgcagtttgtcaccggcaccagcaaagtcccgcttcagggttttgccgctttggaagggatgaatggaatccagaaattccaaattcatagggatgatcgcagcacggaccggctgccctccgcacatacctgcttcaaccaattggatttaccagcttatgagtcctttgagaaactcagacatatgttgcttcttgccatccaagaatgtagcgaggggttcggactggcttag

SEQ ID NO: 190434 - DNA, 10227 bp, synthetic construct
  misc_feature 1..10227: note = Description of Artificial Sequence: Synthetic coding sequence
  source 1..10227: mol_type = other DNA
tgaagcctgcccagcggctgcgagttcggccaggccgacatgcagaagcttgtgcctaaagatgaaaaagctgatggagaacaagacggcgccgcaggatctatggatgcaagcacccaggggcttctcgagggaattggcctggatggggacacactggcacccatggaaactgacgaacccaccgcaagtgatagtaagggcaagagcaaaattacacccgcgatggcagcacgaatcaaacagataaagcccctactctcggcaagcagcagactcggtcgggcgcttgcagagctcttcggcctcttggtaaagctgtgcgttggaagtccagtccgtcagcgcagaagccatcacgccgcctctaccacgacggccccaactccagccgctcgctctaccgccagcgcactcacaaagctactcaccaaagggctgagttggcaaccccctccttatacacctactccacggtttcgcctgacatttttcatttgtagcgtgggcttcacatctcccatgctcttcgacgagaggaaatacccataccacctcatgcttcaaaaattcctgtgctctgggggccataatgcactgttcgagaccttcaattgggctctgtctatgggaggcaaggtacccgtctcagagggccttgaacactctgacctccccgatggaacaggcgaattcctcgatgcctggctcatgttagttgagaagatggtcaatcctaccactgtgctcgagtccccccatagccttcccgccaagcttcccggaggagtacagaatttcccgcaattttctgccctgagatttctagtggtgacccagaaagccgcttttacatgtattaaaaatttatggaatcgcaagccacttaaggtgtatggcggccgaatggcagaatcaatgttggccattctgtgtcacatcttgaggggtgagcccgttataagggagaggctctccaaagagaaggaagggtctcgaggagaagaagacacaggacaggaggaaggaggctctcgccgcgagccccaggtgaatcagcagcagttacagcaattgatggacatgggtttcaccagagaacatgcgatggaggccttgctgaatacctcaactatggagcaggcaacggaataccttctcactcacccacctcccatcatgggcggtgttgtccgtgatttgtcgatgagtgaagaggaccagatgatgcgggctatagcaatgtcattggggcaggacattcccatggaccagcgggctgagtcaccagaggaggtcgcttgtcggaaggaggaagaagagagaaaggctcgggaaaaacaggaggaagaggaagccaaatgtcttgaaaaattccaagacgccgaccctctggagcaggatgagctgcacaccttcacggatactatgttacccgggtgttttcatctcctggacgagctccccgataccgtgtacagagtgtgcgatttgataatgaccgcaatcaaaagaaatggcgctgattaccgggacatgattctgaaacaggtagtgaaccaggtttgggaggcggcagatgtgttaatcaaggccgcactccctctcaccactagtgataccaaaacagttagtgagtggatctcccagatggccaccttgccacaggccagcaacctggcaacgaggatcctcctattaaccctgctgttcgaggagctgaagctgccctgcgcttgggtggtagaatcaagcggtatcctgaacgtcttaattaagttgttagaagtcgtgcagccttgtttacaagccgccaaggagcagaaggaggtccaaacacccaagtggataacgcccgtgctgctgctgattgatttttacgagaagacagcaatctcctccaagcgacgggctcaaatgaccaagtacctgcaatccaatagcaacaattggagatggttcgacgacaggtccgggaggtggtgctcatacagtgcttctaacaactctaccatagacagcgcttggaaaagcggcgagacaagtgtgaggttcactgctggtaggcggagatatactgttcaatttacaacaatggtgcaggtcaacgaagagaccggcaatcgcagacccgtgatgctcactctcctgcgggtacctaggcttaacaagaactccaaaaattcaaacggtcaggagcttgaaaagacacttgaagagtcaaaagaaatggatattaagagaaaggaaaataaagggaacgataccccattggcgttagaaagcacaaatacggagaaagagacctcacttgaagagacgaagattggagaaatcctgatacaggggcttacggaggatatggtcaccgtcctgatccgggcgtgtgtgtctatgctcggcgtgcctgtggaccccgacaccttgcacgccacattgcgcctgtgtctgaggttaactcgagatcacaaatacgccatgatgttcgccgaattgaagtcaacaaggatgattttgaacttgacacagagctccggttttaatggtttcacgcccctcgtcaccctcctgctgcgccacatcattgaggatccttgcaccctgagacacacaatggagaaagtggtgcgaagcgctgccacatctggcgccggcagcacaaccagcggagtggtgagtgggagcttgggcagtcgggaaatcaattacattctgcgagtgctgggccctgccgcttgtcgcaaccctgacatattcaccgaagtggcgaactgttgtattagaatcgctcttcctgccccgagggggtccgggaccgccagcgacgatgagtttgagaacttacggatcaaaggacccaatgccgtccaactcgtcaaaacaacccctctaaaacccagtcccctgcccgtcatacctgacaccattaaggaggtgatctatgatatgctgaacgctctggccgcgtatcacgccccagaggaggcagataagtcagatcccaagcctggggttatgactcaagaggtcgggcaacttctccaggacatgggagacgatgtctaccagcagtatagaagcctgacccggcaatcatcagacttcgatacccagtctgggttctctattaattcccaagtttttgccgcagacggggcctcgacagagacatctgcatctggcaccagccagggcgaagcaagcactcctgaagaatcgcgggacgggaaaaaagataaggagggcgacagagcctcagaggaagggaaacaaaagggaaaaggcagcaaacccctgatgccaacatcaacaatccttaggctactggcggagctggtgcgaagttacgttggaatcgctaccctgattgcaaattatagctacacagtaggacagtccgaactcattaaggaagactgctccgtgctggcctttgtgctggaccacctgttgccccacacacagaacgctgaggataaagacacgcccgcactggccaggctgtttctcgcaagcttggccgcggccggaagcggcactgacgcccaggtggcacttgtaaatgaagtgaaggctgcactgggccgagctctcgcaatggctgaatccaccgaaaagcacgctcgcctgcaagctgttatgtgcattatatcgacaatcatggagtcatgtcctagtacctcgtctttctattctagtgccactgcgaagactcaacataatggtatgaataacatcatcagactgttcctcaagaagggccttgtgaatgaccttgcccgcgtgccccactcacttgatttgagcagtccgaacatggccaacaccgtgaatgccgcattgaaaccgctggaaacactgagtcgtatcgtcaatcaaccctcatctctgtttggctcaaaatccgcatcatccaaaaacaagagtgagcaggacgctcaaggggccagccaggacagtagtagtaatcagcaggatcctggcgaaccaggggaagccgaggtgcaggaagaggaccacgatgttacacaaaccgaagtcgcagatggtgacattatggacggcgaagcagaaacagatagcgtcgttattgctggtcaacctgaggtgttatctagccaagagatgcaggtggagaacgaacttgaggatcttatcgacgaactcttggaaagagatggaggtagtggaaattccacaatcattgtgtctcgctcaggtgaggatgagtcccaggaggatgtgctgatggacgaggccccctctaatctgagccaagcctccaccttgcaggcaaaccgcgaagactccatgaatatactcgaccccgaggacgaggaggaacacacacaggaggaagacagcagcggatcaaacgaggacgaggacgattctcaggatgaggaggaagaggaagaagaagacgaagaggacgaccaagaggacgatgaaggggaggaaggcgatgaagatgatgacgatgatggctcggagatggagttagatgaagattatcccgacatgaacgcaagccctctcgttcgcttcgagagatttgaccgagaggacgacctgatcatcgaatttgacaatatgttttcttctgccaccgatattcctcccagtcctggcaacatcccaaccactcatccactgatggtccggcatgccgatcacagctctctgacactgggcagcgggtcctccacaactcggctgacccagggtattggccggagtcagaggacgttgaggcaactgacggccaacacagggcacactattcatgtgcactatccagggaatcgacagcccaacccgcccctgatcctccagaggctcctgggcccatcagcagccgctgacatactgcagctgtcaagctccctcccactgcagtcaagaggaagagcccgcctgctggtcggtaatgatgatgtgcacattattgcacgatccgacgatgaactcctcgatgatttcttccatgaccaatctaccgctacatcccaggccggaacattgtctagtattcccacagcactgactcgttggaccgaagaatgcaaagtgctggatgccgagagcatgcatgactgcgtgagtgtggtcaaagtctcaattgtgaaccatctggagtttctgagggatgaggagttggaggagagaagggagaagcgcagaaaacagctagcggaggaagagacgaagatcacggataagggaaaggaagataaagaaaatcgcgatcagtcagcccagtgtaccgcctccaagtccaatgatagtaccgagcagaacctgagcgatggcacacccatgcccgattcctatcccaccacccctagtagtaccgatgcagcaacaagcgagtcaaaggagactcttggcactctccagagtagccagcagcagcccactctcccaaccccccccgcgctgggagaagtaccacaagagctacagtcgccagcgggcgaaggtgggagcagtacccagctcctgatgcctgtcgagccagaggaactcggaccgaccaggccaagcggagaggctgagacaacccaaatggagctgagtcccgcacccacgatcaccagcctgtctcccgaacgagctgaggactcagatgctttgacagctgtgagttcccagctcgaggggagcccaatggacacatcttctcttgccagctgtaccctggaggaggctgtgggtgacacatcagccgccgggtcatctgaacagccccgagccggatcttccacccccggcgacgcccctcctgccgttgctgaggttcagggaagatctgatggctcaggagaatcagctcagcctccagaggactcgagcccaccggcaagttccgagagctcaagcacccgggattctgctgtggccatttccggtgccgattcaaggggaattcttgaggagccactcccaagtacatccagcgaggaagaggatcccttagccggaatttcactgccagagggcgttgacccatccttcctggcagctctgcccgacgatatccggagggaagttctgcagaatcaactggggattaggcctcctactagaaccgcgccatccacaaattcctccgcacccgccgtggttggaaatccaggggtcacagaggtcagcccagaatttctcgccgctctgccacccgcaatccaagaggaggtgctcgcccagcaaagggcagaacaacaacggagggaactggcacagaatgcaagtagcgacacacccatggatccagtcaccttcattcagaccctgccgagcgaccttcgccgaagcgtgctcgaggatatggaggatagcgtcttagcagtgatgcctcccgatatcgccgccgaagcccaggcactgaggagggagcaagaggcgcggcagaggcagttaatgcacgagaggctcttcgggcattcatctactagtgccttgtctgccatacttagatccccggcgtttaccagcaggttgtcaggcaacagaggggtgcaatatacccggctcgccgtacagcggggaggcactttccaaatgggcggatcaagcagccacaaccgacccagcgggtctaatgtcgacacattgctgcgactccggggcagactcctacttgaccacgaagcattatcttgccttcttgtgctgctattcgttgacgagcccaagctaaatacaagccgattacaccgagtcctgcggaatctatgctaccatgctcagactaggcactgggtgatacggagcctactgtcaatcctgcagcgttcgagcgagtctgagctgtgtatcgagacccccaaactgaccactagtgaggagaagggaaagaagtcaagcaagtcttgcgggtctagctctcatgaaaatagaccgctcgacttgctgcataagatggaaagcaaatcctctaaccagttgagctggttatccgtgagtatggatgctgccctgggttgtcgcacaaatatatttcagatccagcggtccgggggaaggaaacacactgaaaagcacgcatcagggggatcaacagttcacattcatccgcaggcagctcctgtggtctgcaggcacgttctagatacattgatccagcttgccaaagtgtttccaagccattttacccagcagcggacaaaagaaactaactgcgagtccgacagggaaagggggaataaagcctgtagcccatgctcttctcagtcaagctcatcagggatttgtacagatttctgggacctcctggtcaaactggataatatgaacgtgagcaggaagggaaagaatagcgtgaagagtgtgcccgttagcgcggggggtgagggggaaacatcgccgtacagcctcgaggcctcacctctgggacagttaatgaatatgttgagtcacccagtgattcgacgctccagcctgctgactgagaagttgttgagactactgagcctgatttctatcgcattacccgaaaataaagtctctgaggcccaggcaaactcaggatctggcgcatcgagtaccaccaccgccacctcgacaactagtactacaaccactactgcagcatcaactacaccaaccccgccaacagcccctactccagtgacatccgcccctgctttggtggcggctacagcaatcagtactatcgttgtggccgcatcaaccacggtgactacccccactaccgcaacgacaacggtgtctatctcccctactacgaagggttccaaatctcccgctaaggtgtccgacggaggttcctcatctactgactttaagatggttagctccggtctgaccgagaatcagctgcagctcagcgtcgaggtcctgacgagccactcatgttccgaggaaggcctcgaggacgcggccaacgtactcctgcagcttagcaggggagacagcggcacccgagatacagtccttaagctgctactgaatggcgctagacatctggggtacacgctttgcaagcaaatcggcacactgcttgccgagctgagagaatacaatctcgagcagcagaggcgtgcacaatgtgagacactcagtcctgatggcctgccagaggagcagcctcagacgacaaagctgaagggaaagatgcagtcaagatttgatatggcagagaacgtggtgattgttgccagccaaaagagacccctcggtggacgggagctgcagctgccttccatgtccatgttgacatcaaaaaccagcacacagaagttcttcctcagagttctgcaggtgattatacagctgagggacgatacccgaagggccaacaagaaggccaaacaaaccggacgcctcggctctagcgggctcggcagtgccagctccatccaggccgccgtgcggcagctggaagcagaggccgacgccattatccagatggtgcgtgaaggccaaagagctcggcgacaacagcaggcagctaccagcgagtcttctcagtccgaggccagcgtcagaagggaagagtctccgatggatgtggatcagcctagcccgagtgcccaagacactcagtccatcgccagcgacgggactccccagggtgagaaggagaaagaggagcgccctcctgaactacccctcttgtctgagcagctgtcactagacgaattatgggacatgttgggagagtgtctcaaagagctggaagagtcacacgaccaacatgctgtgctggtccttcagcctgcagtggaagcgttttttctcgtccacgccaccgaacgggagtctaaaccacctgtgcgggacaccagagaatcccagttggcgcatattaaagacgagccacccccactcagccctgccccactcacccctgcaactccttcgagcctcgatccgttctttagcagggaaccaagctcaatgcacattagctccagtctcccacccgacacccagaaatttctgcgattcgcagagacacataggaccgtgttaaaccagattcttcgccaatctacaactcatcttgcagatggcccttttgccgttctggtcgattacatcagggtgctggatttcgacgtgaagagaaagtactttagacaggaactggagaggctcgatgagggcttacggaaagaggacatggctgtacacgtgagacgggaccatgtattcgaagactcatatagagagctgcacagaaaatcccccgaagagatgaagaaccgcctgtacatagtgtttgaaggggaggaggggcaggacgccggggggctgctcagggagtggtacatgatcatctcccgagagatgtttaaccctatgtacgcgctctttcggacctcccccggcgatcgtgtaacttataccatcaaccccagtagccactgtaatcctaaccatctgtcctacttcaagtttgttggtcgcattgtagccaaagcggtttatgataatagattgctggaatgctactttacccggtcattctacaaacacattctaggaaagtccgtccgctatactgatatggaatccgaagactaccatttttaccagggcctggtgtacctactagagaatgatgtcagcaccctcggctacgacttgacatttagcaccgaggtgcaggaatttggagtttgtgaggtccgtgaccttaagccaaatggagccaatattctcgtgacagaggagaacaagaaagagtatgtgcatttagtgtgtcagatgcgcatgaccggggcgatccgcaaacaactggccgcgttcttggaagggttttacgagattattcccaagcgactgattagcatcttcacagagcaggagttagaacttttgatctctggtttgcccaccatcgatatcgacgatcttaagtcaaataccgagtatcacaaataccagtcaaatagcattcagatccaatggttctggagagcccttaggagtttcgaccaggcagatcgggctaagttccttcagttcgtcacaggaacctccaaagtgcctttacaaggtttcgctgcgttagaaggaatgaacggtatacagaagttccagatccatcgagacgatcgctccactgatcggttaccaagcgcacatacatgttttaatcagcttgatctgccggcatatgaatctttcgaaaagttacgtcatatgttgctgctcgccattcaagaatgcagcgaggggttcgggctggcctag

SEQ ID NO: 190435 - DNA, 651 bp, synthetic construct
  misc_feature 1..651: note = Description of Artificial Sequence: Synthetic coding sequence
  source 1..651: mol_type = other DNA
atgaaggtggaccggaccaagctgaagaagacccccaccgaggcccctgctgattgtcgggccctgattgataaactgaaagtgtgcaacgatgagcaacttcttctagaattgcagcagatcaagacctggaacattggaaagtgtgagctctaccactgggtggatctgctggacagatttgatgggattctggccgacgccgggcagaccgttgaaaatatgagctggatgctcgtttgcgaccgacccgagcgcgagcagctgaaaatgctcctgctcgctgtcctgaacttcaccgccctgctcattgaatactcattttctcgacatttatacagcagcatcgaacacctaaccaccctccttgcctcctcagacatgcaagtggtgcttgccgtactgaacttgctgtatgtgttctccaagagatctaattatattacccgtctgggctcagacaagcgaaccccactgctgacccgtctccagcacctggccgaatcgtggggaggaaaggagaacggtttcggcctcgctgagtgctgccgcgacctccatatgatgaaatacccccctagcgccacaacactgcattttgaattttatgcagatcctggggcagaggtgaagattgagaagagaaagtag

SEQ ID NO: 190436 - DNA, 282 bp, synthetic construct
  misc_feature 1..282: note = Description of Artificial Sequence: Synthetic coding sequence
  source 1..282: mol_type = other DNA
atgaaggtggaccggaccaagctgaagaagacccccaccgaggcccctgcagactgccgcgctctgattgataaacttaaagtctgtaacgatgagcagctgctcttagaactgcagcagatcaagacatggaatatcggcaagtgcgaactgtatcattgggtagacctgctggaccggtttgatggtattctggcagatgctgggcagaccgtggagaatatgagctggatgctcgtgtgtgaccgacccgagcgggaacagctgaagatgcttctctag

SEQ ID NO: 190437 - DNA, 1482 bp, synthetic construct
  misc_feature 1..1482: note = Description of Artificial Sequence: Synthetic coding sequence
  source 1..1482: mol_type = other DNA
atgctgccccggtgggagctggccctgtacctgctggccagcctgggttttcacttctacagtttctacgaagtttataaagtcagcagggagcatgaggaagagctggaccaggagttcgaattggaaacagatactctgtttggagggctaaagaaggatgctactgactttgaatggtctttctggatggagtggggcaagcagtggctcgtttggctgctgctaggccacatggtggtgtcccagatggccacacttttggctcgaaagcatcgtccatggatactgatgctgtatgggatgtgggcatgctggtgtgtgctcggcacacccggcgtagcaatggttcttcttcacacaacaatttccttctgtgtggctcagttcaggagccagctgctgacttggctgtgttcacttctgctgctgagcaccctgcgcctccagggagttgaggaagtcaaaaggcgctggtacaagaccgaaaacgaatattacttactgcagtttacccttacagtgaggtgcctgtattacacctccttctccctcgaactttgttggcagcagcttcctgcagccagcacgtcttactcttttccgtggatgcttgcatatgtcttctactatcccgtgcttcacaacggaccaattctgagcttctctgagttcatcaagcaaatgcagcagcaggaacacgactctctgaaagccagtctgtgcgtccttgccctcgggctcggtcgcctgctttgctggtggtggttggccgagctcatggctcatttaatgtatatgcacgccatctacagttctatacctctcctcgagacagtttcttgctggactctggggggcttggccctcgcccaagtgctattcttctatgttaagtatctggtactgttcggagttccagcactcctcatgcgcttggatggcctgacccccccggctttgcctcgctgcgtctcgacaatgttttcattcacaggaatgtggcgatacttcgacgtaggcttacacaacttcttgattagatacgtctacattcctgtgggagggtcccagcacggcctcctgggtaccctgttcagtacggctatgactttcgcattcgtgagctactggcatggcggatatgactatctctggtgttgggccgccttgaattggctaggtgtaacggtggagaacggagtgcgtcgcctggtagagaccccgtgtatccaagacagtttggcccgttacttctcaccgcaagcccgcagaagattccacgctgctcttgcatcttgcagcacgtccatgttgattctcagcaatttggtgtttctgggcggaaacgaggttggaaagacctattggaacagaatattcattcaagggtggccatgggtaaccctgagcgttctggggtttctttactgttacagtcatgtggggattgcttgggcccagacgtacgctaccgactag

SEQ ID NO: 190438 - DNA, 1347 bp, synthetic construct
  misc_feature 1..1347: note = Description of Artificial Sequence: Synthetic coding sequence
  source 1..1347: mol_type = other DNA
atgaagttcaccaagagccccgaggacgccaccgacttcgagtggtccttttggatggagtggggaaagcagtggttagtctggttgctgctgggacacatggtggtgtcccaaatggccacactgctggctagaaaacatcgaccgtggatcctcatgctttatggaatgtgggcctgctggtgtgtcctgggaaccccaggggtggccatggtcctgctgcacactaccatctccttctgcgtagctcaatttagatctcagcttctcacttggctgtgttccctgctgttgctgagtaccctgcgattacagggcgtcgaggaggtcaaacgacgatggtacaaaactgagaatgagtattatttactacagttcacactgactgtgagatgtctttattataccagcttcagcctcgagttatgctggcagcagctacctgccgcctctacgtcctacagctttccctggatgctcgcatatgttttttactacccagtgctgcataacggacctattctgagtttctcagagtttattaaacagatgcaacaacaggagcatgactccctgaaggcctctctatgcgtgctggccttgggtctgggaaggctgctgtgctggtggtggctggccgaactcatggcacacttaatgtatatgcacgccatctacagttccattccccttctggagacagtgtcttgctggactttgggcgggctcgctttagctcaggtgctgttcttctatgtcaagtatctcgtcctctttggcgtgcctgccttactgatgaggctcgacggcctgacacccccggccctgccccggtgcgttagcacaatgttttctttcacaggaatgtggcggtacttcgacgtaggcctacacaacttcctgattcgttatgtgtacatacctgtcggaggaagccagcatggactgctcggaacactgtttagcaccgcgatgacattcgcatttgtatcttactggcacggtggttacgattacctctggtgctgggctgcccttaactggttgggtgtgaccgtcgagaatggagtgcgaaggctggtagagacaccatgcatccaagatagtttggctcggtactttagtccccaagctcgcagacgctttcatgctgcactcgcgagttgcagtacatcgatgctgattttgtcgaatctggtcttcctgggaggtaatgaggtcggcaagacttactggaatcggattttcatccagggctggccatgggtgactttgagcgtgctggggtttctgtattgttactcacacgttggcattgcttgggcacagacatacgctactgactag

SEQ ID NO: 190439 - DNA, 552 bp, synthetic construct
  misc_feature 1..552: note = Description of Artificial Sequence: Synthetic coding sequence
  source 1..552: mol_type = other DNA
atgcggctggacggcctgaccccccccgccctgccccggtgcgtgtccacaatgttcagttttaccggcatgtggcggtatttcgacgtcgggttgcacaattttcttatacggtacgtgtatataccagttggcggcagtcaacacggccttttgggaactctcttctccacagcaatgacgttcgcgttcgtcagctactggcacggcggctacgactacctgtggtgctgggcagccctgaattggttaggagttacggtggagaacggtgtgaggcgccttgtcgaaacaccgtgtattcaggacagcctggcaaggtacttctcacctcaagcacggcgccggttccatgcggcgcttgccagctgcagcacttctatgttgattctgtctaaccttgtctttctggggggtaatgaggtcgggaagacatactggaatcgcatctttattcagggctggccctgggtgactctgagcgtcctcgggttcctgtactgctactctcatgtggggatcgcctgggcgcagacctatgcgaccgactag

SEQ ID NO: 190440 - DNA, 1482 bp, synthetic construct
  misc_feature 1..1482: note = Description of Artificial Sequence: Synthetic coding sequence
  source 1..1482: mol_type = other DNA
atgctgccccggtgggagctggccctgtacctgctggccagcctgggtttccatttctattccttctacgaggtttataaggtgtcccgtgagcacgaggaggaactggatcaggaattcgaactggagacagataccctgtttggtggacttaaaaaagacgcaaccgacttcgaatggtctttctggatggaatgggggaagcagtggctagtctggctcctgctcgggcatatggtggtctcacagatggctacactgctcgcccgcaagcaccgaccctggatcctgatgttgtatggcatgtgggcctgttggtgcgttctgggaactcctggagtcgccatggttttgttacacaccacgatctcgttctgcgtggcccaatttcgatcacaactcttgacatggctctgcagcctgctgctgctctctaccctccggctgcaaggggttgaggaagttaaacggagatggtacaagactgagaacgagtattacctgctgcagttcactcttactgttcgctgtctctactatacatctttttcattggaactgtgttggcaacagcttcctgcggcctcaacttcatatagtttcccctggatgttggcttatgtgttctactacccggtgctacacaatggccccattctgtcgttctcagaattcattaagcagatgcaacagcaggagcacgattcccttaaagcttccctgtgcgtgctggctttgggactggggagacttctgtgctggtggtggctcgctgagctgatggcccacctgatgtacatgcatgccatctactcttccattccactgttggagaccgtgagctgctggacccttggtggcctcgccctggcccaggtgctgttcttttatgtgaagtaccttgtactttttggcgtgccagctctccttatgaggctggacggactgacgcctccggcattgccacggtgtgtgtcgaccatgttttccttcacaggaatgtggcgatacttcgatgttgggttgcacaacttcctcattagatacgtgtacatccccgttgggggctcgcagcacggcctcctcgggacactgttttccaccgccatgacttttgcgtttgtttcttattggcacggcggatacgattatctgtggtgttgggccgccttgaattggctgggagtaaccgtggagaacggagtgcggagacttgtggagacgccttgtatccaagactcactcgcccgctacttcagtcctcaagcgcgcaggcggttccacgccgcacttgcttcctgtagcacttccatgctaatacttagtaaccttgttttcctgggggggaatgaagtgggaaaaacctattggaaccggattttcatccaaggatggccgtgggttaccctgagtgtccttggattcctgtactgctactcccacgtcggcattgcctgggctcagacctatgctaccgattag

SEQ ID NO: 190441 - DNA, 1557 bp, synthetic construct
  misc_feature 1..1557: note = Description of Artificial Sequence: Synthetic coding sequence
  source 1..1557: mol_type = other DNA
atgctgccccggtgggagctggccctgtacctgctggccagcctgggcttccatttttattctttctacgaggtgtacaaagtgtcacgagagcacgaggaggagttagatcaggagttcgaactggaaacagatactctgttcggcggcctgaagaaagacgccactgacttcgagtggtcattttggatggagtggggtaaacagtggcttgtctggctgctccttggtcacatggttgtttcccagatggccactctgctggctaggaaacacaggccctggatcctgatgttgtatggaatgtgggcctgttggtgcgtgctgggcacacctggtgtggccatggtgctactgcataccacaatttccttttgcgtggcccagtttagaagtcagctcctcacctggctatgctctctgctcctgttgagcacgctgcgactgcagggagttgaagaggtgaagcgcaggtggtacaagacggagaatgagtactacctgctacagtttaccctgactgtcaggtgcctgtactatacaagcttcagtctagaactgtgctggcagcaactcccggccgcatccacctcttattctttcccttggatgttagcatacgttttctattaccccgtgctgcacaatggccccattcttagcttctctgaatttattaagcagatgcagcagcaggaacatgatagccttaaggccagtttatgcgtcttggcactggggctcggtcgccttctttgctggtggtggctcgctgagctgatggcgcatctgatgtacatgcatgcaatatattcttcgataccactcctcgagacagtgagttgctggaccctcggggggttggccttggcacaggttttatttttctacgtgaaatacctggtgctcttcggagtgcccgcccttctgatgcgtctcgacggcctgactccccccgccttgccacgatgcgttagcactatgttctcgtttaccggcatgtggaggtactttgacgtgggactccacaactttttgattcgttatgtgtacatccccgtgggcggatcccagcacgggctgctggggactttgtttagcacagctatgacgtttgctttcgtgagctattggcacggcggctatgactatctatggtgttgggccgcattgaactggctcggcgtcaccgtggagaacggcgtgcgcagattggtcgaaacaccctgcatccaggactccctcgcccgctactttagtcctcaggcaagacggcgtttccatgccgccttagccagttgctctacaagcatgctgatcttaagcaatttggtattcctgggtggcaacgaggtggggaagacttactggaatcggatattcatccagggggggttgttcctgttcttcctcctgaacccctgctgggaaacagctttccaggggttccccgtgttccttcacttcctgcagacagaggtgcttgccaccttcgtccccaactatttctcttggaatatttgtattgaaaacaccagcgagttaagttcttactag

SEQ ID NO: 190442 - DNA, 1482 bp, synthetic construct
  misc_feature 1..1482: note = Description of Artificial Sequence: Synthetic coding sequence
  source 1..1482: mol_type = other DNA
atgctgccccggtgggagctggccctgtacctgctggccagcctgggctttcacttctactccttttacgaggtatacaaagtgtccagagaacatgaagaggagcttgaccaggagttcgagctggaaactgacacactgtttggtgggttaaagaaagacgcaactgactttgagtggagtttctggatggaatggggaaagcagtggctagtttggcttcttttggggcatatggttgtgagccagatggctacccttctggctcgcaagcatcgcccatggattctcatgctatacggtatgtgggcgtgctggtgtgtgctcggcacaccaggtgtcgcaatggtgctcctgcacacaacgatctccttctgcgtcgcacaattccgttctcagttgctcacatggctgtgttccctgctactcctctccactttacgccttcagggagtggaagaagtcaaaagaagatggtacaaaacagagaatgagtattacctcctccagttcaccttgactgtgagatgcctctattacacttcattttcactggagctgtgttggcagcaactccccgccgcaagcacatcatactcctttccttggatgcttgcctacgtcttttattaccctgtactgcacaacgggcctatcctgtccttctctgaattcatcaagcaaatgcaacaacaggaacacgattctctgaaagcctctttatgcgtgctggcccttggtttgggcagacttctctgttggtggtggttagctgagctgatggcccatctgatgtatatgcatgccatctactcctctattcctctgctggagaccgtcagctgttggacgctcggaggactggctttggcacaggtgctgttcttttacgtgaagtatctcgtgctgtttggggttccagctttgctcatgagattggacggtctgaccccaccagccctgccaaggtgtgtgagcacaatgtttagtttcaccggtatgtggagatattttgatgtgggactgcataattttcttataaggtacgtgtatatcccagtcggtggaagccagcatggcctgcttggcaccttatttagtacagctatgacttttgcatttgtgtcgtattggcacggaggctatgattacctctggtgctgggctgccctcaactggctcggggtgacagtggagaacggtgtgaggaggctcgttgaaacaccctgcattcaagacagcctcgcgaggtatttctctccacaggcccgccgaagattccatgccgctctcgcatcatgcagcactagtatgttgatcctatccaacctggtatttttgggtgggaacgaggtgggcaagacttactggaatcgtattttcattcaggggtggccctgggtgaccctttctgtcttggggtttctctactgttactcccatgtcggcatcgcatgggcacagacgtacgcaacggattag

SEQ ID NO: 190443 - DNA, 624 bp, synthetic construct
  misc_feature 1..624: note = Description of Artificial Sequence: Synthetic coding sequence
  source 1..624: mol_type = other DNA
atggagtggggcaagcagtggctggtgtggctgctgctgggccacatggtggtgtcgcagatggctactttattggctcggaagagaaggtggtacaagaccgagaacgaatactacttgctccagttcacactcacagttagatgtctgtactatacttcctttagtctggagttgtgctggcagcaactgcccgccgcatccacctcctatagtttcccctggatgcttgcatacgtgttctactaccccgtcttgcacaacggcccaatcttgtctttttccgagttcattaaacaaatgcaacagcaggagcatgattcactgaaggcaagtctgtgcgtgttggcgttggggttgggccgtctactttgttggtggtggctggccgagttaatggcccatcttatgtacatgcacgccatctattccagcatcccactgctggaaactgtgagctgttggactttgggcggtctggcgctcgcccaggtattgttcttctacgtgaaatatttggtgctcttcggcgtccccgcactcctgatgcgcctggatggattgacgcctcccgctttacccagatgcgtgtccaccatgttttccttcactggtatgtggtag

SEQ ID NO: 190444 - DNA, 1287 bp, synthetic construct
  misc_feature 1..1287: note = Description of Artificial Sequence: Synthetic coding sequence
  source 1..1287: mol_type = other DNA
atgctgccccggtgggagctggccctgtacctgctggccagcctgggctttcatttctacagcttttatgaagtttacaaagtgtctcgcgagcatgaggaagagttggaccaggaatttgagcttgagacggacactctgttcggcggtctcaagaaggatgccaccgacttcgagtggtccttctggatggagtggggcaagcagtggctcgtatggctgctgcttggccacatggtggtgagccaaatggcaactctgctagcaaggaaacgtcgctggtataagactgagaacgagtactacttactccagttcactctgaccgtaaggtgcttgtattacacctcattcagtcttgaactttgctggcaacagctgccagccgcttctacgtcctatagcttcccctggatgcttgcttatgtattctactatccggtcctccacaacggtcctatcctcagtttttctgagtttataaagcagatgcagcagcaggagcacgatagtctcaaagcatccttgtgcgtgttagcgctgggtctggggcgccttctgtgttggtggtggttagccgagctgatggcacacttgatgtatatgcatgccatatacagttccataccactactcgaaacagtcagctgctggaccctcggcggactggccctggctcaagtcctgtttttttatgtgaagtaccttgtgctgtttggggtgcctgcattactgatgagactggatggcctcactcccccagctctgcctagatgcgtatccacgatgttcagttttacaggcatgtggcggtactttgatgttggactgcacaacttccttattcggtacgtatacatccctgtcggtggcagtcagcatggactccttggcaccttgttcagcactgccatgactttcgcgtttgtgtcatactggcacggaggatatgattacttgtggtgctgggcggccctgaactggcttggtgtgaccgtggaaaatggagtgcgcaggttggtggagacaccctgtattcaggactctctagcaaggtactttagcccccaagctagaaggcgcttccacgccgctctggcaagctgctcaacctccatgctcattctgtctaaccttgtcttcttgggcggtaacgaggttggtaagacatactggaataggattttcatccaaggctggccgtgggttaccctgagcgtattaggatttttatattgttactcacacgtgggaattgcttgggcacagacttatgctactgactag

SEQ ID NO: 190445 - DNA, 1071 bp, synthetic construct
  misc_feature 1..1071: note = Description of Artificial Sequence: Synthetic coding sequence
  source 1..1071: mol_type = other DNA
atgctgccccggtgggagctggccctgtacctgctggccagcctgggcttccatttctattccttctacgaggtgtataaagttagcagagagcatgaggaagagttagatcaggaattcgagctggagaccgacacactgtttggaggtctcaaaaaggatgctactgattttgagtggagcttttggatggaatgggggaagcaatggctggtctggcttcttcttggccacatggtggttagccagatggccacattgttggcaagaaagatgcaacagcaagagcacgacagccttaaagcatctttgtgcgtgttggcacttggcttgggaagactgttgtgttggtggtggctcgctgaactgatggcgcatctgatgtatatgcacgctatttacagctccatccctctgctcgagactgtctcgtgctggacgctaggaggactggctttagcgcaagtcctgtttttctatgtgaaataccttgttctatttggggtccctgcccttctgatgcggcttgacggcctaactcctcctgccctgccccgctgtgtgagcacaatgttctcctttacaggcatgtggcgatacttcgatgtgggcttgcacaatttcctcattcgctacgtctacatcccggtcggaggttctcagcacggactgttgggaaccctgttctcaacagcaatgaccttcgcatttgtatcttactggcacgggggttacgactacttgtggtgctgggctgctctcaattggctgggggttaccgtcgagaacggagtgcgaaggctggtagaaacaccctgtatccaagactctttggctaggtacttttccccccaggccagaagacgcttccatgctgctctcgcatcctgttccacatccatgttaattctgagtaatctggtctttttggggggtaacgaagtgggtaaaacatactggaaccggatctttatccaaggctggccttgggtcacactgtcggtgctagggttcttgtattgctactcccatgtcgggatcgcctgggctcagacctatgccacggattag

SEQ ID NO: 190446 - DNA, 1485 bp, synthetic construct
  misc_feature 1..1485: note = Description of Artificial Sequence: Synthetic coding sequence
  source 1..1485: mol_type = other DNA
atgagcctgggcctgggcagcgccgagcggggcgtgctgggcacccggggggccagagagcgctgcaggagacgccgaccgggccagcccggcgaacacgaagaggaattggatcaggagtttgaactggaaactgataccttattcgggggcctgaagaaggatgcgactgatttcgagtggagcttttggatggaatggggcaaacaatggctagtatggttgctactcggacatatggtagtcagtcaaatggcgaccttattagcccgaaagcaccggccatggattctcatgttgtacggtatgtgggcttgctggtgcgttctcggaacgccaggggtcgcgatggtgctgttgcacaccacaattagtttctgcgtagcccagttcagatcccagctgttaacttggctctgcagcctcctcctgctgtcgacgttaagacttcagggggtggaggaggttaagcggcgctggtataagactgagaacgagtactacctgctacagttcaccctgactgttcgctgtctctattacacctctttctccctggaactatgctggcaacagttgcccgcagctagcacgtcatacagcttcccctggatgttggcttatgttttctattatcctgtgttgcataacggcccgatcctttccttttctgagttcatcaagcagatgcagcagcaggagcacgattccttaaaagcctctctgtgtgtactcgcccttggattgggacgtctcctgtgttggtggtggctagccgaattgatggcacacctgatgtacatgcatgccatctattcttcaatccctctgttggagaccgtctcgtgttggacactgggcggtctcgcattggcccaagtgctcttcttttacgtaaagtatctggttctcttcggcgtgcccgctctccttatgaggcttgacggcttaacaccaccagcccttccgaggtgtgtgagtacaatgtttagttttaccggtatgtggagatacttcgatgtgggcttgcacaacttcctcataagatacgtgtacatccctgtcggcggttctcagcacgggctgctgggtactctgttcagcaccgccatgacattcgccttcgtatcttactggcacggcggctatgactacttgtggtgttgggcggcactgaactggctgggagtgacggtcgaaaacggagtaaggaggttagtggagacaccgtgtatacaagactctctggcccggtacttttctccccaagctcgccgaagattccacgctgccctcgccagctgttccacctcaatgctgattttatccaatctagtgtttctcggcggtaacgaggtgggcaagacctattggaatcgcatcttcatccaaggttggccctgggtaactctgagcgtactcggatttctctactgctactcccacgtgggaatcgcctgggcccagacgtacgctacggactag

SEQ ID NO: 190447 - DNA, 1293 bp, synthetic construct
  misc_feature 1..1293: note = Description of Artificial Sequence: Synthetic coding sequence
  source 1..1293: mol_type = other DNA
atggagtggggcaagcagtggctggtgtggctgctgctgggccacatggtcgtgtctcagatggctacactgttggcaagaaagcaccgcccgtggatattgatgctgtatgggatgtgggcatgttggtgcgtgctgggaacccctggcgttgccatggtgctcctccacacaacaatctctttttgcgttgctcaatttcgatcccagctcctgacctggctctgctccttgctacttctgagtacgctcagacttcagggggtggaggaggtgaaacgacgctggtataagactgagaacgaatattatctgctacagttcactctcacggttcgctgtctatattatacctcgttttctttagagctttgttggcagcagttgcccgccgcctccactagctacagttttccctggatgctagcttacgtcttctattaccctgtactgcacaacggtccaatcctgagcttctcagagtttatcaaacagatgcagcaacaggagcatgattctcttaaagcttcattgtgtgtcttggccctggggttgggccgcctcctgtgttggtggtggctcgccgagttaatggcccatctgatgtatatgcatgctatatactcaagtattccccttttagagaccgttagctgctggacccttggcggtctggccctggcacaggttctgttcttttacgtgaaatacctggtgctatttggcgtccccgcactgcttatgaggttagacggcttgacgcccccagccctgcctaggtgtgtcagcacaatgttctccttcacaggaatgtggcggtactttgatgtgggcttgcacaactttctcatcaggtatgtatacattcctgtgggcggtagccagcacggcctcctggggaccctattcagcacagccatgacgttcgcttttgtgagctattggcacggaggctatgactacttatggtgctgggcagcattgaattggctcggggtgaccgttgaaaatggggttaggcgtctcgtggagaccccttgtatccaggactcccttgcgcggtacttctccccccaggcccgtcggagattccacgccgcgttagcaagctgctcaacctccatgctcatactatccaatctcgtgttcctgggaggcaacgaggttggcaagacctactggaacaggatcttcattcagggatggccgtgggtgaccttatcggtactcggattcctatattgctactcgcacgtgggcatcgcctgggcccagacatacgcaacagattag

SEQ ID NO: 190448 - DNA, 2103 bp, synthetic construct
  misc_feature 1..2103: note = Description of Artificial Sequence: Synthetic coding sequence
  source 1..2103: mol_type = other DNA
atgctgaagatgctgagcttcaagctgctgctgctggccgtggccctgggctttttcgaaggagatgctaagtttggtgaacggaacgaaggctctggcgcaaggcgcaggcggtgtctgaacggtaaccctcctaagaggctcaaacggcgggataggcgaatgatgtcacaattggagctcctgtcaggcggagagatgctttgtggcgggttttacccaagacttagctgctgccttagatctgactctccaggtctcggtcggctggagaacaagatcttcagtgtcacgaataacacagagtgtggcaagctgcttgaggaaatcaagtgcgccttatgttccccccactcccagtctctatttcactcccccgaacgggaagtgctggagagggacctggtgctgcccctactgtgtaaagactactgtaaagaatttttctacacgtgcagaggtcacatcccaggttttctccaaactactgctgacgaattctgtttctactacgctcgcaaagacggtggactatgttttcctgacttcccacggaagcaggtgcgtggtccggcctccaattacctcgatcagatggaggaatacgataaggtggaagagatcagtcgcaaacacaaacataattgcttctgcattcaggaggtggtgtccggactccggcagccagtgggagccctgcacagcggcgatggtagtcagcggctgttcatcctggagaaggaaggctacgtaaaaattcttacccctgaaggagagatttttaaagagccttatctagatatacacaagctggtgcagtccgggatcaaggggggcgatgaaaggggcctgttgagcctcgcatttcatcccaactataagaaaaatggaaagctgtacgtatcctataccaccaatcaggaacgctgggcgatcggtccccatgaccacatccttagagtggtagagtacactgtgtcaagaaagaatcctcatcaggtagacctcaggactgcccgcgttttcctagaagtggccgagttacaccggaaacacctcggagggcagctgctgttcggccccgatggttttctgtacattatcctgggcgacggaatgatcacactagacgacatggaggagatggatggtctctctgactttacaggtagtgtcctgagactggacgtggataccgacatgtgcaacgttccttatagtattccccggagcaacccccacttcaattccacgaaccagcctccagaggtgtttgctcacggtttacatgatcctggccgctgcgcagttgatcgtcaccctacggatataaatattaaccttacaatactctgttctgactccaatggcaaaaatcgctcctccgctcgaatccttcaaataatcaaggggaaagactacgagtctgagccaagcctgttggagtttaagccgtttagcaatggccctttggtgggtggcttcgtctaccgggggtgtcagagtgagcgcctctatgggtcctatgtcttcggcgatcgtaacggaaactttctgacactgcagcagagcccagtcacaaagcagtggcaggaaaaacctctttgtcttgggacgtccgggtcctgtagaggctacttctcgggccatattttagggtttggtgaggacgaactgggtgaggtatacatactgagctcttcgaagtctatgactcagactcataacggtaaactgtacaaaattgtcgaccccaaacggccgctgatgcccgaggagtgtcgcgctacagtgcagcccgcacagacacttacttcggagtgctcccgtctgtgccggaacgggtattgcacccccaccggaaagtgttgttgcagcccggggtgggagggggacttctgcagaacagctaagtgcgagcctgcgtgtagacacgggggcgtctgtgttaggcccaataaatgcttgtgtaaaaagggctacctggggccacagtgcgaacaggttgataggaacatccgacgggttacccgagcaggcattctggatcagatcattgacatgacctcctacctgctggatttgacttcatatatcgtgtag

SEQ ID NO: 190449 - DNA, 963 bp, synthetic construct
  misc_feature 1..963: note = Description of Artificial Sequence: Synthetic coding sequence
  source 1..963: mol_type = other DNA
atgctgaagatgctgagcttcaagctgctgctgctggccgtggccctcggattttttgaaggcgatgctaagttcggagaacggaatgagggctctggggctcggcgccggaggtgcttaaatggcaatccaccaaagcggttaaagcggcgcgacaggcggatgatgagccagctggagcttctgtctgggggagagatgctgtgcggcggcttttacccgcgcctgagttgctgtctgcgatcagatagcccagggctgggcagactggaaaacaagatattctccgtcacaaacaacaccgagtgcggaaagctgcttgaagaaatcaagtgtgctctgtgctcccctcactctcagagtctgtttcacagccccgaacgcgaggtattggagagggacttggtgctgccgctactgtgcaaagattattgcaaagagtttttttacacctgtcgaggtcacatccccggcttccttcaaactaccgccgatgagttttgtttttactatgctaggaaagacggaggcctgtgcttccctgatttcccccgtaagcaagtgcgaggacccgccagcaactatctggatcaaatggaggaatacgataaggtggaggagataagcagaaagcacaagcacaactgcttttgtatccaggaggtcgtatcgggtctcagacagccggtcggcgcactgcattccggggatggctctcaaagactattcattttagaaaaggagggttatgtgaagattctcacacccgaaggggagatattcaaggagccttacttggacatccacaagctggtccaaagcggaatcaaggttggctttctgaactttatttatttctgcgctggctatgttaattttatacttgtattgccctcaagcttgaaagtgttcctgtgtaacaaaaggaaaaatctagccggcgaaaataagggagccacctag

SEQ ID NO: 190450 - DNA, 4146 bp, synthetic construct
  misc_feature 1..4146: note = Description of Artificial Sequence: Synthetic coding sequence
  source 1..4146: mol_type = other DNA
atggccagcccccgggccagccggtggcccccccccctgctgctgttactcctcccattgcttctgcttcctcctgccgcccccggtacccgcgacccccccccttcgcccgcacgccgtgctctttctctcgcgccgctggccggcgcagggctcgaactgcaactcgagcggagacccgaacgagaacctccaccgactccacctcgggaaagacgtgggcctgcaactcctggcccttcctacagggctccagaacctggggccgcaacacaacgcggcccatcaggaagggcaccgcgcggaggctccgccgatgcagcatggaaacactggccggaatcaaataccgaagcacatgtagagaatatcacattttatcagaatcaggaagatttctccaccgtgagtagtaaagagggcgtgatggtacagacttctggcaagagtcatgccgcatccgacgctcccgaaaaccttaccctgctggccgagaccgcggacgcgaggggcagatccgggtcctcctctaggacaaactttaccatcctccccgtaggatacagtttggaaattgctactgctttgacttctcaaagcggaaacttagctagtgagagcctgcacctgcccagtagtagttccgaattcgatgagcgaattgcagcctttcagacgaagtccgggacagcctcagaaatgggcacagagagggctatgggcttgtccgaggaatggaccgtacactcccaggaggccactacaagtgcctggtccccaagcttcctgcctgccctagagatgggagaactgaccaccccatcgagaaagcgaaactcttctggacctgacctgagctggctgcacttctatagaactgccgccagcagtccattactggatctttcttccagctccgaatctacagagaaactgaacaatagcacaggtctgcagagcagcagcgtcagccagacaaaaaccatgcatgtggctaccgtcttcactgatggcgggccccgaaccctgaggtctctgacagtgagtcttgggcccgtgtccaaaaccgaagggttccctaaagactccagaattgccaccacatcctcatctgtgctcttgagccccagcgcggtggagtcgcggagaaactcccgcgtgacgggcaatccaggggatgaggagtttatcgagcccagcacagaaaatgagttcggccttaccagcttgagatggcaaaacgactcccccacttttggcgagcaccagctcgcatcctctagcgaggtgcaaaatggttctcccatgagccagactgaaaccgtctcccggagtgttgcccccatgcgtgggggagagatcacagcacactggcttctgactaattccaccacttccgccgatgtgactggctcctctgctagctatcctgaaggagtcaacgcttcagtactcacgcagttcagcgattccaccgtgcagtctggcggttcccatacggctcttggggataggagctactctgagtcttcctcaacatcaagctccgagagtctgaattcctccgccccccggggcgagcggtcgattgccggtatttcgtatgggcaggttcgaggcaccgccatagagcaaaggaccagcagtgaccacacagaccacacctacctgagcagtacgtttaccaaaggcgagagggctttgctatctatcaccgataattccagcagcagcgacatcgttgaatcctcgacgagttacattaagatttctaatagctcgcactctgagtactcttcgtttttccacgcacaaaccgaacgatccaacatatcctcttacgacggggaatatgcccagcccagcacggaatcacccgtcctgcacacgtccaatttgccctcatatacacccaccattaatatgcctaacacttccgtcgtcctagatacagatgcagaatttgtgtctgactcatccagttccagctccagttcaagcagcagcagttccagtggaccacccctgccacttccttctgtgtcccagagccatcatcttttctcaagtatcctaccatctactcgggcttcggtgcatctgctaaagtcaacatccgacgcatcgacgccttggtccagcagcccttctcctctgcccgttagcctcactactagtaccagcgctccactttctgtatcacagacaactctgccccagtcaagtagcacccctgttctcccacgggcaagggagactcctgtgacctctttccagacgagcacaatgacatctttcatgactatgcttcacagctcccagactgctgatctgaagtcccaaagtactcctcaccaggagaaggtgattactgagtcaaaaagtcctagtcttgtgtcgctccccaccgagagcaccaaagcagttaccactaatagcccattacccccaagccttacggagtcctctacggagcagaccctgcccgcaactagcactaatcttgcgcagatgagtcccacattcaccactactatcctaaaaacatctcagccattaatgacaaccccgggcactctgtctagtacagcaagtctggtcaccgggcctattgctgtccaaacaacggcgggcaagcagttaagcctcacgcacccagaaattttagtcccacaaatatccactgagggaggtatttcgacggagagaaatagagtcatcgtggatgccacaactggtcttatacccctgactagcgttcccacaagtgctaaagagatgacgactaaactcggagtcaccgcagagtattcgcccgcgagccgctctctgggcacgtcacctagtccacaaaccacggttgtgagtacggccgaagacctggcccccaagagcgccacttttgccgttcagtccagtacccagtcgcccacaacagtgtcgagcagcgcttccgtgaattcctgcgctgtaaacccttgtttgcacaacggtgaatgcgtagccgacaacaccagcagaggctatcattgtaggtgcccaccatcctggcagggcgatgactgttctgtggatgtcaatgagtgtttatccaacccctgtccctcgactgccatgtgtaataatacccagggctccttcatttgcaagtgcccagtcggataccaactggagaaggggatctgtaatctggttagaacgttcgtgaccgagttcaagctcaaaaggacctttctcaacaccaccgtggaaaagcacagcgacttgcaggaagtggaaaacgaaattaccaagacactcaacatgtgcttttccgcactcccctcttatatacgctccaccgtgcacgcttcaagggaaagcaatgccgttgtgataagtctgcaaactacgttcagcctcgcctctaatgtcaccctgttcgatcttgctgatcgaatgcagaaatgcgtgaattcttgcaaatcaagcgctgaagtgtgtcagctcctgggctctcagcgcaggatcttccgcgcaggatctttgtgtaaacgaaagtcacctgaatgtgacaaggacacctctatctgtacagaccttgatggtgtggccttatgtcaatgtaagtcgggttactttcagtttaataaaatggaccactcttgtagagcttgtgaagatgggtaccgactggaaaacgaaacttgtatgtcttgccctttcggtcttggcggcctcaattgtggcaatccctaccagctcattaccgtggtgattgcagccgcaggggggggcctgctccttatcctgggcattgctctgatagtgacatgttgtaggaagaacaagaatgacatctctaaactcatcttcaaatccggcgatttccaaatgtctccatacgctgagtatcccaagaacccaagaagccaggagtgggggagggaggcgatcgagatgcacgagaacggttccacaaaaaatcttcttcagatgactgatgtgtactacagcccaacttctgttcgtaaccctgagctggaacggaatggactgtatccagcctacactggattgcctggatcacgccattcttgcatcttccctggacagtataatcctagtttcattagcgatgagtctaggcgacgagactatttctag

SEQ ID NO: 190451 - DNA, 5829 bp, synthetic construct
  misc_feature 1..5829: note = Description of Artificial Sequence: Synthetic coding sequence
  source 1..5829: mol_type = other DNA
atggaggaccggcgggccgagaagagctgcgagcaggcctgcgagagtcttaaacggcaggattatgagatggccttaaaacactgtacggaggccctgctctctctcggccaatacagcatggcagatttcaccggaccgtgtcctctggagatcgagagaatcaagattgagtcgctgttatatcgcatcgcatcctttcttcagctgaagaattacgtccaggccgacgaagattgtcggcatgtacttggcgaggggctcgctaaaggagaggacgcatttcgggctgtgctgtgctgcatgcagctgaaaggaaagctgcagccggtgagtaccatcttagctaagtcgctaaccggcgagtctcttaacggcatggtcacgaaagacctgacccgcctgaaaaccctgctctccgaaactgaaaccgctacctccaacgcactgtctggctatcacgtagaagatcttgacgagggtagttgcaatggctggcacttccggcctccaccaagaggcataacatcaagtgaggagtacactctctgtaaaagatttctggagcagggaatatgtcgttacggcgcgcagtgtacatcagctcatagccaggaggaactcgcagagtggcagaaaaggtacgcctcaagactgatcaagctcaagcaacaaaacgagaacaagcagctctccggttcgtatatggagaccctgatagaaaagtggatgaattcactttctcccgagaaggtcctgagcgaatgtatcgaaggggtgaaggtggaacacaaccccgatctctccgtgacggtttccaccaagaagagccatcagacgtggacttttgctctgacatgcaagccagccagaatgttgtacagggtggctcttctgtacgatgctcaccgcccccacttcagtattatcgccatctcagccggagatagtactacacaagtctcacaggaggttcctgaaaactgccaggagtggattgggggcaaaatggcccaaaacggcctagatcactatgtgtacaaagtgggtatcgcatttaacaccgaaatcttcggtacgtttcgccagaccattgtgtttgacttcggccttgaacccgtgctgatgcagagggtcatgattgacgcagctagcaccgaggatctggaatatctcatgcatgcaaaacagcaactcgtcaccacggcaaagcgatgggatagttcatcaaaaacaattatcgactttgaacctaacgagaccactgatctggaaaaatccctcttgatccggtatcagattcccctgtcggcggaccagctctttactcaatctgtgttagacaagagcctgactaaatcaaattatcaaagtaggctccatgatttgctgtatattgaggaaatcgcacaatataaggagatatccaagttcaatctgaaggtgcagcttcagattctggcctctttcatgctgacaggcgtctccggcggcgcgaaatacgcccaaaacggccaactattcggaagatttaaactgaccgagaccttgagtgaggatacgcttgcaggccgcctagtgatgacgaaagtgaacgcggtttacctccttcctgtgcccaagcagaagctcgttcagacccagggcaccaaagaaaaggtgtatgaggctaccatcgaggagaagactaaagagtacatctttctccgtctctctagggagtgctgcgaggaactcaatcttagaccagattgcgatacgcaagttgagctacaattccagctgaaccggctacctttgtgtgaaatgcactacgcactcgaccggatcaaagataatggggtcctgtttccggatattagcatgactcccaccatcccttggtcccccaaccgacaatgggatgagcagctggaccctcggctaaacgccaagcagaaagaagccgtcctggcaattacaacgcctcttgcaatccagctgccgcccgttctcattatcggaccttacggaaccggcaagacctttaccctggctcaggccgtaaaacacatcctgcagcaacaggaaacacgtatactaatctgtactcatagtaactcagctgcagatctttatattaaggactacctgcacccatacgtagaggccgggaacccacaggctagacctttgagagtctatttccgaaatcggtgggtaaagacagttcaccccgtggtgcatcagtattgtctcatcagtagcgcacacagtacgttccagatgccacagaaggaggacatcctgaagcatagagtggtggtagtgactcttaacacttcccagtatctgtgtcaactggatttggaacctggctttttcacacacatcctgctggatgaggcagcccaagcgatggagtgtgaaacgattatgccactggcattagccacgcagaatactcgcatcgttctggctggagatcatatgcagctctcaccctttgtgtacagcgagttcgccagagaacgcaaccttcacgttagcctgttggacagactgtacgaacactatccagccgagttcccctgcaggatcctgctgtgtgagaattacaggtcacacgaagcaattattaattacacatccgagctcttctacgagggcaagctgatggcttcaggtaaacagcctgcccacaaagatttttacccacttacctttttcactgcccggggagaggatgtgcaggagaagaactccacagcattttacaacaacgcagaagtgttcgaagtggttgaacgcgtggaagagctcaggcgcaaatggcctgttgcttggggcaaactggatgatggaagtataggggtggttacgccttacgctgatcaggtcttccgcatccgtgccgagctccggaaaaagcgcctgtctgatgtgaacgtcgaaagggtgttgaatgtgcaaggaaagcagttcagggtgctcttcctgtccactgttaggacccgacatacgtgcaagcataagcagacccccatcaaaaaaaaggagcaactgctggaggattccactgaagacctagattatggcttcctttccaactataaattgcttaacaccgccataactcgcgcccagagcctagtagctgtagtcggggatcctatcgctttgtgtagtataggccggtgccggaaattctgggaacgctttatcgcattatgccatgaaaattctagtctgcatgggatcactttcgagcagattaaggcccagctggaagcgctggagctgaaaaaaacttatgttctgaatccactggcacccgagttcatcccgagagcacttaggctgcagcactcagggtcaaccaataaacagcaacagtcacctcccaagggtaaaagtcttcaccacacacagaatgaccattttcaaaatgatggtatcgtccaacccaatccatccgttctcatcggaaatcctatccgggcatatacccccccgccaccactgggtcctcatcccaacctgggcaagtccccttccccagtgcagaggattgacccccatacagggaccagcatactgtatgtaccggccgtttacggcgggaatgttgtaatgtctgtacccttacctgtcccttggaccggctatcaaggccggttcgccgtcgaccccaggattattacacatcaggcggcaatggcctacaatatgaaccttctacagacacacggcaggggctctcccatcccttacggtctggggcaccatcctccggtgacaattggacagcctcagaaccagcaccaagagaaggaccagcacgagcaaaataggaacggcaagtctgatacaaacaattccggacccgaaattaataagatccgcacaccagaaaagaagccgaccgagcctaagcaagtggacttagagagtaatcctcaaaacaggagccccgaatctaggccgtcggtggtgtacccctctacaaagtttccccgcaaagacaacctgaaccctcgccacattaatctgcctttgcccgccccccacgcacaatatgccataccaaatcgccatttccacccactgccccaacttccaagacctcccttcccgattccccagcagcacaccttgctcaatcagcagcagaacaatctgcctgagcagcccaatcagatccctccccaaccgaaccaagtagtgcaacagcagtcccagcttaaccagcagcctcagcagcctcctccccaattgtcgcctgcctatcaggccgggccaaataatgcttttttcaacagcgctgtggctcatagacctcaaagcccgcccgctgaagcggtgattcccgaacaacagccaccccctatgttgcaggaagggcactccccactccgcgctatagcccaaccgggccctatcctcccttcgcacctcaactccttcatcgacgagaacccgtccggcttaccaatcggcgaagctctggatcgaatccacgggtcggtagccctggaaacactaaggcagcagcaggcaagatttcagcagtggtccgaacaccacgctttcctctcccagggcagtgcaccataccctcatcaccaccatcctcatctccagcacctcccacaaccgcctcttgggcttcatcagcctccagtgcgcgccgactggaagctcacttcgagtgcagaggacgaggtggagaccacctactctcgatttcaagatttgattcgcgaattaagtcatcgcgatcagtcagagactagagagcttgctgagatgccacccccacagtcccggctcctgcaatacagacaggtccaatcccgctcaccgccagcggtgccatccccaccctcctctacagatcattcgagccatttttcaaacttcaacgataacagtagggacatcgaggtggcaagcaaccctgccttcccccagcggttgcccccccagatattcaattccccattcagcctcccctccgagcacttggcgcctccacctctgaagtacctggctcctgatggggcctggacgttcgctaatttgcagcaaaatcacttaatgggcccaggcttcccatatggccttcctcccctgcctcaccgccctccacagaaccccttcgtgcagatccagaaccatcagcacgcaatcggccaggagccattccatcccctgagcagtcgaacggtgagttctagctcactgccaagcttggaggagtacgagcccaggggacctggtaggccgttataccagcgcaggatatcgtcgagcagcgtccagccttgctcggaagaagtgtccacaccccaagactcattagcccaatgtaaagaactgcaagatcatagcaaccagtcctcctttaacttcagtagccccgagtcctgggtcaataccacatcgtccacaccgtatcagaacattccttgcaatgggagtagcaggactgctcaaccacgcgagctcatcgcacctcctaagactgtgaagccaccggaggatcagctgaaatcggagaatctggaggtcagttccagcttcaattattctgtactgcagcaccttggccagttcccacctctgatgccaaataagcagattgccgaatccgccaattcctcctctcctcagtcttccgcaggaggaaagccagccatgagctacgcctccgccttgcgagcacctcccaagccaaggcccccccctgagcaagcaaaaaaatcaagtgatcctctgagtctgtttcaggaactctctctggggtccagctcagggtccaatggcttttattcttattttaagtag

SEQ ID NO: 190452 - DNA, 1365 bp, synthetic construct
  misc_feature 1..1365: note = Description of Artificial Sequence: Synthetic coding sequence
  source 1..1365: mol_type = other DNA
atggaggaccggcgggccgagaagagctgcgagcaggcctgcgagtccttaaagcgtcaggactacgagatggcactcaagcactgcactgaggcattactgtcactgggccagtactccatggccgacttcaccgggccatgccctctggagattgagcgcatcaaaattgaaagcttgctctatcgcatagcgagcttcttgcagttaaaaaactatgtgcaggccgatgaggattgtcggcacgtcctgggcgagggcctggcgaagggagaagacgcattccgggccgtcctgtgctgcatgcaattgaaaggaaagctgcagcccgtttctacaatattagccaaatcactcaccggcgaatcacttaacggaatggtgaccaaagatctgacacggcttaaaactctgctctctgaaacagaaactgcgacatctaacgctctttctggttatcacgtggaggatttggacgaggggtcttgtaatggatggcacttcagacctcctccacgagggatcacttccagcgaggaatacactctatgtaagaggtttctggagcaaggaatctgtcgatatggtgcccagtgtacatctgcacactcacaggaagaactcgccgagtggcagaaaagatatgcctccaggttgattaagctcaagcaacagaacgagaataagcagttatctggttcctatatggaaactctcattgagaagtggatgaatagcttgtcccccgagaaagtgctctcagagtgtatagagggcgttaaggtggagcacaaccccgacctgtcagtgactgtatcaaccaagaagtcccaccagacatggactttcgccctcacatgcaaaccagcccggatgttatacagagtggcacttctgtatgacgcacataggccccacttttccattatcgcaatttccgccggggattctacgactcaggtgagccaagaagtgcccgaaaattgtcaggaatggattggcggtaagatggcccagaacggactggatcactatgtttacaaagtcgggattgcatttaacacagagatttttggtacttttagacaaaccatcgtctttgacttcggcctggagcccgtgcttatgcaacgcgttatgattgacgctgccagcaccgaagacctggaatacttgatgcatgccaagcagcagctggtgaccaccgcaaagcggtgggattcctccagtaaaactatcatcgattttgagcctaatgaaactacggatcttgagaagagcctgctcattcgatatcagatccctcttagcgaaaagaaaaaaaaaaaaaaaaaaaaaaagaagaaaaaaaaaaaaaagaaatag

SEQ ID NO: 190453 - DNA, 294 bp, synthetic construct
  misc_feature 1..294: note = Description of Artificial Sequence: Synthetic coding sequence
  source 1..294: mol_type = other DNA
atgcccgccgagcggcccgccggcagcggcggcagcgaggcccccgcaatggtggaacagctggacacagctgtgatcacgccggccatgctggaagaggaggaacagctcgaggcggcaggcctggaaagggaaagaaagatgctggaaaaagcacggatgagttgggatcgtgaatcaaccgagatacgatacaggcggctgcagcatttgctggaaaaatcaaacatatactcaaagtttctgttgaccaaaatggaacagcagcagcttgagacagtaatgaagatatag

SEQ ID NO: 190454 - DNA, 2517 bp, synthetic construct
  misc_feature 1..2517: note = Description of Artificial Sequence: Synthetic coding sequence
  source 1..2517: mol_type = other DNA
atgcccgccgagcggcccgccggcagcggcggcagcgaggcccccgctatggttgaacagctcgataccgccgtcatcaccccagcaatgctcgaggaagaggaacagctggaagccgctggactggaaagggagaggaagatgctggagaaggcacggatgagctgggatcgggagagcacagagattcgttatcggcggttgcagcacctgctcgagaagagcaacatttatagcaagttccttctaaccaagatggagcagcagcagttggaggagcagaagaagaaggagaagttagagagaaagaaggagagtctcaaagtgaagaaaggcaagaattctatcgacgcctcagaggaaaagccagtgatgagaaagaaacgtgggcgcgaagatgagagctataacatctctgaagtgatgtctaaggaggagattctaagcgtggcaaagaagaacaagaaggaaaacgaagatgagaactcttcctctacgaacctatgtgtagaggacctccagaagaataaggattcgaactccatcatcaaggatagactctccgagaccgtgcgccaaaatacgaagttttttttcgaccctgtgaggaaatgcaatgggcagccagtcccatttcagcaacccaagcacttcaccgggggcgtgatgagatggtatcaagtggaggggatggagtggctgaggatgctatgggaaaacggcatcaatggcattctggcagacgaaatgggtctcggcaagaccgtgcaatgcatcgccactatagccctcatgattcagaggggggtgccgggtccatttttagtgtgtggacccctttctactctccccaactggatggcggagttcaagagattcaccccagacatcccaacaatgttgtatcatggtactcaggaggaaagacaaaaactggtgcggaacatatacaaaagaaagggaacgctccaaattcaccccgtcgtgatcacaagcttcgagattgctatgagagacagaaatgcactccaacattgttactggaagtaccttattgttgacgagggacacagaatcaaaaatatgaagtgtcggctgattagggagctcaagcgcttcaatgccgataataagctactgctgacgggaacgcctttacaaaacaaccttagcgaactctggtctttgttaaattttttgcttcccgatgtcttcgacgatctcaagagctttgaaagctggttcgatatcacatctctgagcgaaaccgccgaagatatcattgccaaggagcgggagcagaatgttttgcatatgctccatcagattctcaccccttttctcctgaggagactgaagagcgacgtggcattagaagtcccacctaaacgggaggtggtggtgtatgcacccctgagtaagaagcaggaaattttctacacagccattgtcaacaggaccatcgctaacatgttcggctctagcgagaaggaaaccatcgagttgagtcccaccgggcgacctaagcgccgtactcgtaagtcgataaactattccaaaatcgacgactttcccaatgagctcgaaaaactgatatctcaaatccagccagaagtggatcgcgagcgtgccgttgtcgaggttaacatacctgtcgaaagtgaggtcaatctcaagctgcagaatatcatgatgcttttacgcaaatgctgcaatcacccttatctgattgagtacccgatcgacccagttacgcaggagttcaaaattgatgaagaattggtaacaaatagcggaaagttcttgatactcgatcgcatgctccctgaactcaagaaaagggggcacaaagttctgctgttttctcagatgactagcatgctagatatcctaatggactattgccacttgagggacttcaacttctctcgccttgatggctccatgagttacagtgagcgggaaaaaaatatgcatagttttaatactgaccctgaagtattcatcttcctggtgtctaccagagccgggggattgggaataaacctgactgctgctgacacagtgataatctacgattcagattggaacccccagtctgacttgcaggcccaggaccgctgtcatcgaattgggcagacaaaacctgtggtggtctaccggctagtgacagctaacactatagaccagaaaatcgtagagagggccgccgcaaagcggaagctcgaaaagctgattatccataagaaccactttaagggcggccaatctgggttaaacctctccaagaattttctcgatcccaaagaactgatggaactgcttaaatcccgggactacgagcgcgagataaaaggttctagagagaaggtcattagtgacaaagaccttgagcttcttctggaccgttccgatttaatcgatcagatgaatgcctcaggacccataaaagaaaaaatgggaatttttaaaatcttggaaaacagcgaagattccagtcctgaatgtctgttctag

SEQ ID NO: 190455 - DNA, 2655 bp, synthetic construct
  misc_feature 1..2655: note = Description of Artificial Sequence: Synthetic coding sequence
  source 1..2655: mol_type = other DNA
atgcccgccgagcggcccgccggcagcggcggcagcgaggcccccgccatggtagaacagctcgacaccgccgttattactccggctatgttggaggaggaagagcaactcgaggccgctggtcttgaacgagaacgaaagatgcttgaaaaagcaaggatgtcctgggacagagagtctactgaaatccgctatcggcggctgcaacacctcttggaaaaatcgaatatttattcaaagttcctgctcaccaaaatggagcagcagcaactggaagagcaaaaaaaaaaggagaaactggaacgcaaaaaagaaagtctgaaagtgaagaaagggaagaactcaattgatgccagcgaggagaagcccgttatgcgcaagaaaaggggcagagaggatgaaagttataacatttcggaggtcatgtccaaagaagagatattgtctgtggccaaaaagaacaagaaagaaaacgaagacgagaatagcagttccaccaatctctgcgtcgaagacctccaaaaaaacaaggacagtaactcaatcattaaggataggctgtctgaaactgtgagacaaaacaccaagtttttctttgatcctgtgaggaaatgcaatggccagcccgtgccattccagcaacctaagcactttaccgggggcgtcatgagatggtaccaggtagagggcatggagtggctcaggatgctgtgggagaacggtattaatgggattttagcagatgagatgggattggggaaaacagtgcaatgcatcgctaccattgcactcatgatccagcgcggagtgccgggcccattcctggtgtgtggcccactgtctaccctccctaattggatggccgagttcaagcgattcacgcctgacatccctacaatgctgtaccacggaacacaggaggagcggcaaaaacttgtacgaaatatttataagaggaaaggtaccctgcagattcatccagttgtgatcacctctttcgagattgcaatgagggatagaaatgcattgcagcactgttattggaagtacttaatcgtggacgaaggccaccgcataaaaaacatgaaatgccggcttatccgtgagctcaagcggtttaacgccgacaataaacttctgcttaccgggacccccttgcagaataatttgtcagagctttggtctctgcttaattttctgctgccagatgtatttgatgacctgaagtcttttgaatcttggtttgatatcacctcactgtccgagactgcagaagatattatagccaaggagcgggaacagaacgtgctgcacatgttacatcaggagcgaatccctagaatgtacgtgtcggaatttacagatgaaggtttcttcgagggcaaactgccatccaggaaagacctgtatgacattaggccgtacgagaacacctatctgctgaagcttcacacaaatttcgagatccttacaccctttctgcttcgaaggctgaagagtgacgtggctctcgaggtccccccaaaacgcgaggtggttgtttatgctcccctctcaaaaaagcaggagattttctacacagctattgtaaacaggaccatcgcaaacatgttcggttcaagcgagaaagaaacaatcgagctgtcccccactggcaggccgaaacgacggacccggaagtccatcaactattcaaaaatcgatgacttccctaacgagctggagaagctaatctcacaaatccaacccgaagtagatcgcgagagagctgtcgtcgaggtcaatatacctgtcgagtctgaggttaatcttaaactccagaatattatgatgctgttgaggaaatgttgcaaccatccctacttgatcgaatatcccatcgaccctgtaacacaggaattcaaaattgatgaggagctcgtgacaaattctggtaaatttctgatcttagataggatgctcccagagcttaaaaagaggggtcataaagtacttctgttctctcagatgactagcatgctcgatattttgatggactactgtcacctccgggatttcaatttcagcaggctggatgggtcaatgtcttacagtgagcgcgagaagaatatgcatagtttcaatactgaccccgaggtttttattttccttgtgtcaacacgggccggcggcttgggcattaatctcacagccgctgacacagtgatcatctacgactcagactggaaccctcagtctgacctgcaggcgcaggataggtgtcatcgcattggccagaccaagcctgtggtggtgtacaggctcgtgacggcaaacaccattgaccagaagattgtcgaacgtgccgcagccaagcggaagctggaaaagctgattattcataaaaatcatttcaaaggcggccagtctggacttaatctgtctaagaatttcttagatccaaaagaacttatggagctacttaaaagcagggattacgagcgcgagatcaaaggctctcgcgagaaggttatcagtgacaaggacctggaactgctgttagaccgttccgatctgattgaccagatgaatgcttctggaccaattaaggagaagatgggtatattcaaaattctcgaaaactccgaagacagcagcccggaatgcttattctag

SEQ ID NO: 190456 - DNA, 390 bp, synthetic construct
  misc_feature 1..390: note = Description of Artificial Sequence: Synthetic coding sequence
  source 1..390: mol_type = other DNA
atgcccgccgagcggcccgccggcagcggcggcagcgaggcccccgccatggttgagcagcttgataccgcggtcatcacaccagcgatgctcgaggaagaggaacaactggaagctgcaggcctcgagcgggagagaaagatgcttgagaaggctcggatgagttgggacagggagtcaaccgaaattaggtatagaaggctgcagcacttgctggagaaatcaaacatctactcaaagtttctgctgacaaagatggagcagcaacagcttgaggaacagaaaaagaaggaaaagctagagagaaagaaggaaagcctgaaagtgaagaaaggcaaaaactcgatcgatgccagcgaagagaagcccggaaattttgtttgcgggtag

SEQ ID NO: 190457 - DNA, 948 bp, synthetic construct
  misc_feature 1..948: note = Description of Artificial Sequence: Synthetic coding sequence
  source 1..948: mol_type = other DNA
atgcccgccgagcggcccgccggcagcggcggcagcgaggcccccgctatggtggagcagctcgacaccgctgtcatcacacctgcaatgctggaagaggaggaacagctggaggctgcaggattggaaagggaaaggaaaatgctggaaaaagcacggatgagctgggacagagagagcaccgagattcgatatcgaaggttgcaacacctgcttgagaaatctaacatctattctaagtttttgctgacgaaaatggagcagcagcaattggaggagcagaaaaaaaaagagaaactcgagcgtaagaaggaaagcctgaaagtgaaaaagggtaaaaactccatcgacgcgtcagaagaaaaaccagtcatgagaaagaagagaggccgcgaggacgagtcttataatatctctgaggtgatgtcaaaggaagaaatcctgtccgtcgccaagaaaaacaagaaggaaaacgaggatgagaacagctccagcacgaatctctgtgttgaggaccttcagaagaataaagacagcaattccataatcaaggataggctgtctgaaactgttcgccagaatacaaaattcttctttgacccggttcgtaagtgtaacggacagcctgtaccatttcaacagcctaaacacttcaccggtggggtgatgcggtggtaccaggtcgagggcatggagtggttacggatgctctgggaaaacggaattaatggtatcctggcagatgaaatgggcctagggaagacggtccagtgtatagccactatcgccctcatgatccaaagaggagttccagggccctttttagtttgcgggccgctgagtacactcccaaactggatggctgagttcaagagatttacaccggacattcccacaatgttgtaccatggtacgcaggaggagcgccagaaactgatttacctctag

SEQ ID NO: 190458 - DNA, 2223 bp, synthetic construct
  misc_feature 1..2223: note = Description of Artificial Sequence: Synthetic coding sequence
  source 1..2223: mol_type = other DNA
atgcccgccgagcggcccgccggcagcggcggcagcgaggcccccgctatggtagaacagctggacaccgcagtgattacacctgcaatgctggaggaagaagaacagctggaggcagcaggcctcgaaagggagcgaaaaatgctcgagaaggcccggatgtcctgggatcgggagagcaccgaaatccggtaccgtcgccttcaacacctgctggaaaaaagcaatatttactctaaattccttctcactaaaatggaacagcagcaactcgaggaacagaagaaaaaggaaaagctcgaaaggaagaaggagtcactcaaagtgaaaaaagggaagaacagcatcgacgcctccgaggagaaacccgtgatgcggaaaaaaagaggtcgggaagatgaatcctataatatatccgaggttatgtcgaaggaggaaattctgagcgtagctaaaaagaataagaaggagaatgaagacgagaattcatctagtaccaacctctgcgtggaagacctgcaaaagaacaaggatagtaacagtataataaaggatagactgagcgaaacagtcagacaaaatacaaaattcttcttcgaccctgtgcgcaagtgtaatgggcagcctgtcccctttcagcagccaaagcacttcacaggtggcgtgatgcggtggtaccaggtcgaggggatggagtggctcagaatgctgtgggagaacggcataaacgggattctcgcggatgaaatgggactgggcaagacggtgcagtgtattgcaacgatcgccttgatgatccagcgaggagtgcccggaccttttttggtttgcgggcctttatctactttgcccaactggatggctgaatttaagcgatttacgcccgatattccaaccatgttatatcacggtacccaagaagagaggcagaaactggttcgcaatatatataagaggaaggggacattgcagatccaccctgtcgtgatcacctctttcgaaatcgccatgagagacaggaatgcacttcagattctgacacccttcctgctgagaagactgaaaagcgacgtggcacttgaagtcccaccaaagagagaagtggtggtgtacgcgcccctgtcaaagaaacaggaaattttttacaccgccatcgtaaatagaaccatcgcaaacatgtttgggagtagcgagaaagagactattgaattgagccccacgggacgaccaaaacggagaacaaggaaaagcatcaattactccaaaattgatgactttcccaatgagcttgaaaagttgatcagccagattcagccggaagtggacagagagagggctgttgtcgaggtcaatatcccggtggaatcagaagtcaacctaaagctgcaaaatatcatgatgctcctcaggaaatgttgcaatcatccatacctgatcgaatatcccattgatcctgtcacacaggagttcaaaatcgacgaggaacttgtgactaactctgggaagttcctgatcttggataggatgttgccagagctgaaaaagaggggccacaaagttctgcttttcagccagatgacttctatgctggacattcttatggattattgtcacctgagggactttaactttagtcgcctggatgggtcaatgtcctactctgagagggaaaagaatatgcactcctttaacacagaccctgaagttttcatcttcctcgtgagcacccgggcaggggggctcgggattaacctcacggccgctgacacagtcatcatatacgacagcgattggaacccccagtcagatttgcaggcccaagacaggtgtcatcggattggccagacaaagcctgtggtagtttacagactcgtcacagcaaacacaatcgatcagaaaatcgtggagcgagccgctgccaagcggaagctggagaagcttatcattcataagaatcatttcaaagggggccagagcggtctcaacttgtcaaaaaactttctggatccaaaggagctcatggaactcttgaagtcccgcgactatgaaagggaaatcaaaggctccagggagaaggtcatcagtgataaggacctggaactgctgctcgaccgcagcgatctgattgaccagatgaatgccagcggcccaatcaaagaaaaaatgggtatttttaaaatcttagagaacagcgaggacagtagtcccgaatgcctcttttag

SEQ ID NO: 190459 - DNA, 579 bp, synthetic construct
  misc_feature 1..579: note = Description of Artificial Sequence: Synthetic coding sequence
  source 1..579: mol_type = other DNA
atggtggagcagctggacaccgccgtgatcacccccgccatgctggaggaggaggagcagttggaggccgcgggtctagaacgcgagcgtaagatgttggagaaggcgaggatgtcttgggacagagaatcgacggaaattcgttatcgccggctgcaacatctgctggaaaaaagcaatatctactctaagtttctgctgacaaagatggaacagcagcagctggaggagcagaaaaaaaaggagaagctagagaggaagaaggagagcctgaaggtgaagaagggtaaaaacagcatcgatgcttcggaagagaagcccgtgatgcggaagaaaaggggccgtgaagacgagtcttataatattagtgaggtgatgagcaaagaggagattctgtcagttgcaaagaagaataagaaggagaatgaggacgagaacagtagttctacaaatttatgcgtcgaggatcttcaaaaaaacaaggacagtaactccatcatcaaggatagactctccgaaacagttaggcaaaataccaagttcttcttcgatccagtccgaaagtgcaacggacaatag

SEQ ID NO: 190460 - DNA, 1461 bp, synthetic construct
  misc_feature 1..1461: note = Description of Artificial Sequence: Synthetic coding sequence
  source 1..1461: mol_type = other DNA
atgtggaagagcgtggtgggccacgacgtgagcgtgagcgtggagacgcagggagacgattgggacacagacccggactttgttaacgacatcagtgaaaaggagcagaggtggggcgccaagaccatcgaagggagcggaagaaccgaacatattaatatccatcagctccgaaacaaggtctccgaagaacacgatgtgctgaggaaaaaagaaatggaatcgggtccaaaagctagccatgggtatggaggacgcttcggcgtggaaagagaccggatggacaagagcgccgtcggtcatgaatatgttgcggaggtggagaagcacagttctcaaacagacgcagctaagggctttggaggaaagtacggtgtggaacgcgatcgtgccgataagtccgctgtgggctttgattacaaaggcgaggtcgagaaacacaccagtcagaaggattattccaggggcttcggcggacgctacggcgtagaaaaggacaaatgggataaagctgctctgggctatgactataagggagagaccgaaaaacatgagagccagcgggactatgctaaagggtttgggggccagtacgggatccagaaagaccgcgtcgacaaaagcgccgtcggtttcaacgagatggaggcccccactacagcttacaaaaagaccactccaattgaggccgcttcgtccggaacgaggggtctcaaggccaaatttgagagcatggccgaagagaaaagaaaacgcgaggaagaggaaaaagctcagcaggtcgcaaggcgccagcaagagcgaaaagccgtgactaaaagatctcccgaggctcctcagccggtgattgccatggaggagcctgccgtacctgccccgctgcctaagaagattagcagtgaagcctggcctcccgtcggaacccctccatccagtgagtccgagcccgtcagaacttccagagaacacccggtgcctctactccccatccggcaaacactgcctgaggacaatgaggaaccaccggccttgccccccaggaccctggaagggctgcaggtggaagaagagcctgtatacgaggctgaacccgaaccagaacccgaaccagagcctgaaccagaaaacgattatgaggacgtcgaggagatggatcggcacgaacaggaagatgaacccgagggcgattacgaggaagtgcttgaacctgaggattcatctttcagtagcgcccttgcaggaagcagcggatgtcccgccggggcgggcgccggcgcagtggccctgggcattagtgctgtggctgtgtatgattaccagggggaaggctcagatgaactcagttttgatcctgacgacgtaataactgatattgaaatggttgatgagggctggtggcgcgggagatgtcacggccatttcggcctgttcccagctaattacgttaagctgctcgagtag

SEQ ID NO: 190461 - DNA, 600 bp, synthetic construct
  misc_feature 1..600: note = Description of Artificial Sequence: Synthetic coding sequence
  source 1..600: mol_type = other DNA
atgcccaactacaagctgacctacttcaacatgcggggccgggccgaaataatcaggtatatctttgcgtacctggacatacagtacgaggaccacagaatcgagcaggcggactggcccgagatcaaatctactctaccattcggcaaaatacccatacttgaggtcgatggtctcacattgcaccagagtctggcaattgcccgatacctcaccaaaaacacagacctggccggtaataccgagatggagcagtgtcatgttgacgccatcgtggatactcttgatgacttcatgagttgcttcccctgggccgagaagaagcaagacgttaaggagcaaatgttcaacgagctactgacttacaacgccccacatctgatgcaagatctcgatacttatctgggtggccgagagtggttgattggtaattctgtgacctgggcggatttttactgggagatctgttcaactaccctcctggtgttcaaacccgacctgcttgataaccatcctcgcctggttacattgcgtaagaaagtccaggcgatccctgctgtagctaattggatcaagcgccgccctcaaacgaagctatag

SEQ ID NO: 190462 - DNA, 813 bp, synthetic construct
  misc_feature 1..813: note = Description of Artificial Sequence: Synthetic coding sequence
  source 1..813: mol_type = other DNA
atgcagtacccccaccccggccccgccgccggcgccgtgggcgtgcccttatacgcacctactccccttctacagccagcccatcctacccccttctacattgaggatatcctcggacggggccctgctgcccctacccccgctcccacgctccccagccccaactcctcgttcacatctctggtaagtccatatagaactcctgtgtatgagccaacgccaatccaccctgcattctcacatcattccgccgcggcattagccgctgcatatggtcccggcggattcggtgggccactgtaccctttcccaaggaccgttaatgattatactcatgcactactgaggcatgaccctcttggtaagccgctcctgtggtccccatttctacagcggccactccataaacggaagggcggacaggtccgattctccaacgatcaaacgatagagctggagaagaagttcgaaacacagaaatatctttcaccccctgagaggaagagacttgctaagatgctgcagctctccgagcgtcaagtgaaaacttggtttcaaaatagacgagccaaatggcgcagactgaaacaggaaaatccccagagtaataaaaaagaagagctagaatctctcgattcatcctgcgatcagcgccaggatcttccctcggaacaaaataagggcgcttctctggactcatctcagtgtagccccagccccgctagccaggaagatctcgaaagcgagattagtgaggactctgaccaggaggtcgacatcgaaggtgataaaagctactttaatgcagggtag

SEQ ID NO: 190463 - DNA, 570 bp, synthetic construct
  misc_feature 1..570: note = Description of Artificial Sequence: Synthetic coding sequence
  source 1..570: mol_type = other DNA
atgctgggcatgatcaagaacagcctgttcggcagcgtggagacctggccctggcaggtgttgtctaagggggacaaggaggaggtggcctatgaggaaagagcgtgcgagggaggtaagtttgctacagtggaggtcaccgacaagcctgtcgacgaagccctcagggaagccatgcccaaagtcgctaagtacgctgggggcacgaatgataagggaatcgggatgggaatgactgtacctatcagctttgccgttttccctaatgaggacgggtccctgcaaaagaagctgaaagtctggtttagaatccccaaccagtttcaaagtgatcctcctgcaccttcggataaaagtgtgaagattgaggaacgagaaggaattaccgtgtactctatgcagttcgggggttacgctaaggaagcagattacgtggcacaggcaacccggttacgggcggctctggagggcaccgctacataccggggcgacatctatttctgcactggctacgatccaccaatgaagccctatggacgcaggaatgagatctggctgctcaaaacttag

SEQ ID NO: 190464 - DNA, 4059 bp, synthetic construct
  misc_feature 1..4059: note = Description of Artificial Sequence: Synthetic coding sequence
  source 1..4059: mol_type = other DNA
atgagcaaggtgaccgcccccggcagcggcccccccgccgccgcctccggaaaggaaaagcggagtttttccaaaagactctttagatctggacgcgccgggggtgggggggctggaggacccggcgcctccggtccagcagctccgagctcacctagcagccccagctccgcacgcagtgtaggctctttcatgagccgcgttttgaagaccttgtcaaccctgagccatctctcctctgagggagcggctccagacagaggtgggctaaggagttgcttccctcctggcccagccgccgctcctacaccacctccatgccctccgccgccagctagcccagctcccccagcgtgcgctgctgaaccagtcccgggcgtggcaggattgaggaatcatggcaacacatgtttcatgaatgctacattacagtgcctcagtaataccgaattgttcgccgagtacctcgctctgggacagtatagggcggggcgtcccgaaccctcccccgatcccgagcagcctgccgggagaggagcccagggccaaggagaagtaaccgaacaactggcccacctggtgcgggctctgtggaccttagaatacacgccccagcacagccgcgacttcaagaccatcgtgagcaaaaacgccctgcagtacaggggcaattctcaacatgatgcacaggaattcctgctatggctgttggaccgtgtgcacgaggacctaaaccacagtgttaaacagagtgggcagcctcccctcaaaccaccctccgaaactgacatgatgcccgaggggccaagcttcccagtgtgttctaccttcgtgcaggaactgttccaagcccagtaccgcagctcacttacttgtccccattgccaaaagcagtctaatacatttgatcctttcctctgcatatcccttccaatccctctgcctcacacacgccctctttacgtcacggtggtgtaccagggtaaatgttcccattgcatgcggatcggcgtggccgtgcctctgagcgggaccgtcgctagattacgcgaggctgtgtccatggagacaaagataccgactgatcagattgtgctgacagaaatgtattatgacggctttcaccgctcgttttgtgacaccgatgacctggagacagtacatgaatctgactgcatcttcgcttttgagacccccgagatttttcgacctgagggaattttatctcaacggggaatccacctgaataataacctgaaccatcttaagttcggcctggactaccatcgcttgagttctccaacacagactgctgccaaacaagggaagatggattcaccgacaagcagggcaggctctgataaaattgtgcttttggtgtgtaaccgggcttgcaccggccagcagggcaagaggttcggcctgccattcgtcttgcacctcgaaaagacgatcgcttgggatctgctccagaaggagatcctcgagaagatgaaatattttctccggccgactgtgtgcattcaggtgtgcccgttctctctgcgcgtagtctcagttgtcgggattacctacctgttgccacaggaggagcagcctttgtgtcatccaatagttgaaagagccctcaagtcttgcggccctggggggacggcacacgtgaaactggtggtggagtgggacaaggagacacgtgatttcctttttgtgaatacagaggacgaatatattccagatgcagagtccgtccgtctccagcgcgaacgccaccaccagccacaaacttgcacattgagtcagtgtttccagctgtacacgaaggaagagcgactggcacctgacgacgcctggagatgcccccactgcaaacaattgcagcagggttctatcaccttgtctctgtggaccctcccagacgtgctgatcattcacctgaaacgttttcgtcaagagggggataggcgcatgaaactgcagaatatggtcaaattccccctgactggcctagacatgacaccccacgtggtaaagcgatcacagagcagctggtcccttccctcccattggagcccctggaggagaccctatggattggggagggaccccgaagactacatatacgatttatacgccgtgtgcaatcatcacggaaccatgcagggtggtcactacacggcctactgtaaaaacagtgttgacggactatggtattgtttcgatgacagtgacgtgcaacagctgagcgaggacgaggtgtgtactcagactgcatacattctcttttaccagagaagaactgccattccttcctggagcgctaactctagcgtggctgggagtacctcctcctctctctgtgagcattgggtctcaagactgcccggttccaaaccagcatccgtgactagtgctgcttctagccggcgcacatcattggccagtctctcagaatctgtagagatgaccggggagagatccgaggatgatggaggcttcagcaccagacccttcgtacggtctgtccagcgacagtcactgtccagccgctcctctgtgacttccccactggccgtgaatgagaattgcatgagaccatcctggtcattatccgcgaaactgcaaatgcgatcaaacagtcccagcagatttagcggggacagtccgattcacagctccgcctctacacttgaaaaaatcggagaagctgctgatgacaaggtgtcgatctcttgcttcggctccctgagaaatttgtcatctagctaccaggagccttctgattctcactctcgaagagagcataaagctgtgggtcgggctccactcgcagtaatggagggcgtgttcaaggatgagagcgacactcggaggctgaacagctccgtagtagacactcagtcaaaacattccgcccaaggtgatagactgcctcctctgtcggggccatttgataacaataaccaaatagcctatgtcgatcagagcgatagcgtcgacagttcccccgtgaaggaggttaaagctccctcccatcctggcagcttggctaaaaagcccgagtcaaccacaaagcgctcacccagctcaaaggggactagcgagcctgagaagtccctgaggaaaggtcgtccagctctcgccagccaggaatccagccttagttctacatctccctcctctcctttgcctgtgaaagtgagcctgaagccaagcaggtcccggtccaaggcagatagttcctccagaggctcaggcaggcacagctcgccagcacctgcccagcccaagaaggagtccagtccgaagtcccaggactccgtcagctctccctctccccaaaaacaaaaatccgctagtgccttgacctacacagcaagtagcacgagtgccaaaaaggcatcgggacctgctacacgcagcccatttcctcccggcaaatctaggaccagcgaccactccctgagccgagagggctctagacagagcctgggctctgacagagcttccgctacatccactagcaagcctaacagccccagagtgtcacaggctagggccggagagggcagaggcgccggaaaacatgtcagaagctctagtatggctagcctgagaagtccttcgaccagcataaagtccggactgaaaagagatagtaaatcggaagacaaaggcctgtccttttttaaatccgcacttaggcagaaggaaacccggagatctaccgatctcggaaagacagcacttctctccaaaaaagcaggtggatcctctgtcaaatccgtctgcaaaaatacaggagatgacgaagccgaaagaggccaccaacccccagcaagccagcagccaaatgccaacacaacaggtaaagagcaactagtaaccaaagaccctgctagcgccaaacactccctcctgtccgccagaaagtcgaaaagttcccagctagacagtggtgtgccctcttctcctggaggacgacagtcagccgagaagagctccaagaagctctcctcgagtatgcagaccagcgccagaccatcccaaaagccacagtag

SEQ ID NO: 190465 - DNA, 951 bp, synthetic construct
  misc_feature 1..951: note = Description of Artificial Sequence: Synthetic coding sequence
  source 1..951: mol_type = other DNA
atgagcgccgaggtggagaccagcgagggcgtggacgagagcgagaagaaaaacagtggagcgcttgagaaggagaaccagatgaggatggctgacttgagtgagctcctaaaggagggaaccaaagaggcacacgacagagccgagaacacacaattcgtgaaggactttttaaaagggaatataaaaaaagaacttttcaagttggccactactgcactgtacttcacgtattcagccctggaggaagagatggagcgcaataaagatcacccagcatttgctccattgtattttccaatggaattacatcggaaagaggctcttaccaaagatatggagtacttcttcggcgaaaattgggaggagcaagtgcagtgtcccaaagctgcccaaaaatacgttgaaaggatacactatattggacagaatgagcctgagctgctagtggctcacgcttacacaaggtatatgggtgatttgtctggtggacaggtgctcaagaaagtcgcacagagagctttaaagttgcccagtaccggcgaagggacacagttctacctgtttgaaaacgtagataatgcacaacagtttaagcagctctatcgtgctaggatgaatgccttggacttgaacatgaagactaaggagcggatagtggaggaggctaacaaggcctttgagtacaatatgcagatttttaacgaactcgaccaggccggttcaacgttggctagggaaaccctggaagatggctttcctgtacacgatggtaagggggacatgaggaaatgccctttttacgctgctgaacaggacaagggtgcgttggaaggcagtagttgtccttttagaacagctatggcagtcctgcgcaagccctcattgcaattcatcttagcagctggcgtagcgctagctgcgggcctcctagcgtggtactacatgtag

SEQ ID NO: 190466 - DNA, 951 bp, synthetic construct
  misc_feature 1..951: note = Description of Artificial Sequence: Synthetic coding sequence
  source 1..951: mol_type = other DNA
atgagcgccgaggtggagaccagcgagggcgtggacgagagcgagaagaagaatagcggtgccctggagaaagaaaatcagatgcgcatggcagacctcagcgaacttctcaaagaaggcaccaaggaggcccacgaccgggcagagaatacacaattcgttaaggacttcctgaagggcaatattaagaaggaactcttcaagctcgcgacaaccgccctgtactttacatacagtgccctggaagaggaaatggagcggaacaaggaccatcctgcatttgcaccactttacttccctatggagctccataggaaagaggcgctcaccaaggatatggaatactttttcggtgagaattgggaagagcaggtccagtgccccaaggccgcacagaaatacgttgagcgcattcattatattggacagaatgagcccgaactactggtggcccatgcctacactcggtatatgggagacctctccggcggccaagtgctgaaaaaggtcgcccagagggcactaaagctcccttcgaccggggaaggcacacagttttacttgttcgagaatgttgataatgcgcaacagttcaagcaattataccgcgccaggatgaatgccctcgacctgaacatgaagactaaagaaagaatcgtggaagaagcaaataaagctttcgaatataatatgcagatcttcaacgagctggatcaggccgggtccacactggccagagaaaccctggaggatggatttcccgttcacgacgggaagggcgacatgaggaagtgccccttttacgctgccgagcaagataaaggggcactagaaggctcttcatgcccatttcgtacagcaatggcagtgttgcgcaagccatcactgcagttcattctggcagcgggtgtggcccttgccgctggcctgcttgcctggtattacatgtag

SEQ ID NO: 190467 - DNA, 951 bp, synthetic construct
  misc_feature 1..951: note = Description of Artificial Sequence: Synthetic coding sequence
  source 1..951: mol_type = other DNA
atgagcgccgaggtggagaccagcgagggcgtggacgagagcgagaaaaaaaacagtggcgctctcgagaaggagaaccagatgcgaatggccgatctaagcgagctgctgaaagaggggacaaaggaagcccatgatcgtgctgaaaatacacaatttgttaaggacttcctgaaaggcaacattaaaaaggaactgtttaagctcgccaccaccgctctgtactttacctattccgcactggaagaggagatggaaagaaataaagaccaccccgcatttgccccgctttatttccctatggagctgcataggaaggaggctctcaccaaagacatggaatatttcttcggcgagaactgggaggaacaagtccagtgccccaaggccgcccagaagtacgtggaaaggatccactatatcggtcagaatgaacctgaactactggtcgcccacgcctacacaagatacatgggagacctttcgggggggcaggtgctgaaaaaagtcgcacaaagagcccttaagctgccctctaccggggaaggtactcaattttatctcttcgagaacgtcgataacgcccagcaattcaagcagctgtaccgagcgcgaatgaacgccctcgacctgaacatgaaaacaaaagaacggattgtggaggaagccaataaagccttcgaatacaacatgcagatattcaatgaacttgatcaggcaggctccaccctggctagggagacactcgaggacggattcccagtgcatgatggaaagggcgacatgcgtaagtgtcccttctacgccgccgagcaggacaaaggcgccctggagggctcatcttgtccttttcgcacagcaatggccgtccttagaaaaccctctctccagttcattctggccgccggcgtggctcttgccgctggtctgttggcttggtattatatgtag

SEQ ID NO: 190468 - DNA, 951 bp, synthetic construct
  misc_feature 1..951: note = Description of Artificial Sequence: Synthetic coding sequence
  source 1..951: mol_type = other DNA
atgagcgccgaggtggagaccagcgagggcgtggacgagagcgagaagaagaactcaggcgcccttgagaaggaaaaccagatgaggatggccgatctctctgaattgctgaaggagggtaccaaggaggcccacgaccgcgccgagaacacacagtttgtgaaagattttcttaagggcaacatcaaaaaagagctattcaaactagccacaaccgccctctactttacgtacagtgctctcgaggaggaaatggagaggaacaaggaccaccccgcttttgcgccattatacttccctatggaactgcatagaaaggaagcccttacaaaagacatggagtattttttcggggagaattgggaagaacaagtacagtgccccaaagctgctcaaaagtacgttgagcgaatccactatatcggccaaaacgaaccagaattgcttgtggcccacgcatacacccgatatatgggagatctgtccggaggacaggtcctgaagaaggtcgctcagcgggccctgaagcttccctcgactggagaagggactcagttctacctgtttgaaaatgtggacaacgctcagcaatttaagcagctctacagagctcgtatgaacgctttggatctcaatatgaaaactaaggagaggattgtggaggaagccaacaaggcttttgaatacaatatgcagatctttaatgagcttgatcaggcagggtcgacactagcccgggaaaccttggaggatggattccctgtgcacgacggcaaaggagatatgagaaaatgccccttttacgcagcagagcaggacaaaggagctctggagggctctagctgcccattccgcacagccatggctgtgttgcgcaagcccagtctccaatttattcttgccgccggggtggccctagccgccgggttgttggcttggtattacatgtag

SEQ ID NO: 190469 - DNA, 951 bp, synthetic construct
  misc_feature 1..951: note = Description of Artificial Sequence: Synthetic coding sequence
  source 1..951: mol_type = other DNA
atgagcgccgaggtggagaccagcgagggcgtggacgagagcgagaagaagaattctggggcccttgaaaaagagaatcagatgcggatggcagacttaagtgaactgttgaaagaaggaacaaaagaagcccatgatcgcgccgaaaatacccagtttgtcaaagacttcctcaagggcaacattaaaaaggagctgttcaagctggctacaacggcactttactttacgtatagtgccttggaagaggagatggagcgcaacaaggaccatccagcttttgccccgctgtactttccaatggaattacaccggaaagaagccttgaccaaggatatggagtacttctttggggagaattgggaggaacaggtccagtgcccgaaggcagcccaaaagtacgttgagagaattcactacattggacaaaacgagccggagctgctcgtagcacacgcatatacaaggtacatgggcgacctttcaggcgggcaagtcctcaaaaaggtcgcccagcgggcacttaaactccctagcactggagaaggtacccagttctatctgttcgagaatgtagacaatgcacagcagttcaagcagttatatagagcgcggatgaacgcactcgacctgaacatgaagactaaggagcggatagtggaagaagctaataaggcatttgaatacaatatgcagatctttaacgagcttgaccaggctggaagcacattggcaagagaaaccctagaggatggcttccccgtgcatgatgggaagggggatatgcggaagtgccctttctatgccgccgagcaagacaagggtgctctggaaggctctagctgccccttccgcaccgccatggccgtactacggaagccgtcgcttcagttcatacttgccgccggggtggcactggctgccgggctcttagcctggtattacatgtag

SEQ ID NO: 190470 - DNA, 16908 bp, synthetic construct
  misc_feature 1..16908: note = Description of Artificial Sequence: Synthetic coding sequence
  source 1..16908: mol_type = other DNA
atgatcagctgggaggtggtgcacaccgtgttcctgttcgccctgctgtactctagcctggctcaggatgctagccctcagtctgaaattagagccgaagaaatacccgaaggcgcctctacgctcgccttcgtcttcgatgtgacaggatccatgtatgacgatcttgttcaggtgattgagggtgcctctaagattcttgagacttcactcaaacgtccaaaacgccctttattcaacttcgcgctggtcccctttcatgacccagagatcggcccagtaaccatcactaccgatcctaagaaatttcagtatgaactgagggaactgtacgtccagggtgggggggattgtccagaaatgtcgattggcgccatcaagatagcccttgaaatctcactccccgggagttttatctatgttttcacggatgcccgatccaaggattatcgcctgactcacgaggtgctgcagctgatacaacagaagcaaagccaggtggtcttcgtgttgactggcgactgcgacgataggacccatattggctataaggtttacgaggaaatcgcaagtacctcttcgggacaggtgttccacctggataaaaaacaggtcaatgaagtcctgaaatgggtggaagaagctgtacaggcctctaaggtgcacctattgagcaccgaccacttggaacaggccgtgaacacctggagaataccttttgatcctagcctaaaagaggtgaccgtgagcctctctggtcccagtcccatgatagagatcagaaatccactgggcaagctaataaagaagggctttggcctgcacgagctgcttaacattcacaatagcgcaaaggtcgtgaatgtgaaggagcccgaggccggaatgtggacagttaagaccagctccagtgggagacactccgttcgcatcaccggactgtcaaccatcgatttccgtgcgggattctcacgcaagcctacactagacttcaagaaaacagtaagcagacctgtgcaagggattccaacttatgtgctcctgaacacttctgggatttccacacctgcacggattgacctccttgagctgctatctatttccggctcgagcctgaagacaataccagttaaatattacccccatcgaaagccatacggtatttggaatatcagcgactttgtgccacctaacgaggcattcttcttgaaggtgaccggctatgacaaagacgattatttatttcagcgggtgagctccgtcagcttttcctctatagtgcccgatgcccccaaggttaccatgccggaaaaaactcctggctattacctgcagccaggccagatcccctgtagtgtggattcattgttgccctttacactgagcttcgtgcgcaacggcgtcacgctcggagtggaccagtacttgaaggagtccgctagtgtgaacttggatatcgctaaggtgacactttcggatgaggggttctatgagtgcattgctgtgagcagtgcaggaaccggacgcgctcagactttttttgatgtaagcgagccccctccagtgattcaggtgcccaacaatgtgaccgttacacccggtgaaagagccgtgctcacctgtctcataatttccgctgtcgactataacctcacatggcagcgaaatgaccgggacgtgcggcttgcggaaccggccagaatccgtaccctcgccaacctctccctagagttgaaatcggtgaagttcaatgatgccggcgaataccactgcatggtgagtagcgagggtggcagcagcgcagcaagtgtgtttctgacagtgcaggaacctcctaaggtgactgtgatgccaaaaaatcaatcatttacagggggttctgaggtaagcatcatgtgcagcgccaccggctatcccaagcccaaaatcgcatggactgtgaacgatatgtttatcgtgggctcccaccgctacagaatgacaagcgatggcaccctgtttatcaaaaacgcagcccctaaggacgctgggatatacggctgtctcgccagtaattcagccggcactgataaacaaaacagtacactgcgttatattgaggcgcccaagttaatggtggttcagtctgaactcttggtggctctgggtgatattacagtgatggaatgcaagacctcgggcatccctcccccacaggtaaaatggttcaagggggatctggagctgaggcctagcacctttctcattatcgacccactccttgggctgttgaagattcaagagacccaagatctagacgccggcgattacacatgcgtcgccatcaacgaagccggcagggccaccgggaagatcaccctggacgtgggaagcccccccgtctttatccaagagcctgccgacgtgtcaatggaaattgggagtaatgtgacccttccatgttacgtgcagggatatccagagcccacgataaagtggcgccgacttgataatatgcctatcttctccaggccatttagcgtctcctctatctctcagctgagaacaggtgctctttttatcctaaacctctgggccagtgacaagggaacctacatctgcgaggccgaaaaccagttcggcaaaatccagagcgaaacaaccgtgaccgtcaccgggctcgtggcacccctgatcggcattagccccagtgttgcaaacgttattgaaggacagcaactgaccttgccctgtacacttctggcaggcaaccctattcctgaacgaagatggatcaagaactcggccatgctgctgcaaaatccttacattacagtgaggtctgatggctctttacacatagagagagttcagctacaggacggaggtgaatatacatgtgtagccagcaatgtcgctggcacgaataataaaaccacgagtgtggtagtacacgttctcccaacgatccagcacggacagcaaatcctcagtaccatcgagggtataccagttactctcccgtgtaaggccagcgggaacccaaaaccctccgttatttggagtaaaaagggcgagctgatcagtacctctagcgccaaatttagtgctggtgcagacggtagcctgtatgtcgtgtctcctggtggagaggaaagcggcgagtacgtgtgtaccgcaacaaataccgccggatatgccaagagaaaagtccagctgactgtgtacgtcagacctagagtcttcggagaccagcggggactttctcaggacaagccagtagagatctccgtcctggccggcgaggaggtcaccctgccctgcgaggtcaagtccctgcctccacctattattacctgggccaaggagactcagctgatatcccccttcagccccaggcatacttttttaccgagtggcagcatgaagattacagagactcggacgagcgattctggcatgtatttgtgcgttgcgacaaacattgcaggcaatgtcacacaggcggttaagttgaacgtacatgtgcctccgaaaattcagcgcggtcccaagcatctcaaagtgcaggttggacagcgtgtggatattccctgcaacgcgcaaggaacccctcttcccgtgataacctggagcaaaggagggtccaccatgcttgtggatggggagcatcacgtgtctaacccagatggaaccctctctatcgaccaggctaccccatctgatgctggcatttatacatgtgtagccacgaacattgccggcactgatgagactgagatcacacttcacgtgcaggagcccccgacagtggaagacttggagccaccgtacaacactacgtttcaagagcgtgttgccaatcaacgcatcgaattcccatgtcctgccaagggaactccaaaaccgacgataaagtggctccataacggacgtgaactgaccggtagagagcctgggatctccatacttgaggacggcaccttactggttatagctagcgtgactccatacgacaacggcgaatacatctgcgtagccgttaacgaagcaggaaccaccgagcggaaatacaacctgaaggtgcacgtgccacctgttatcaaagacaaagagcaggtaaccaatgtgtctgtactgctgaatcaactgacaaatcttttttgtgaagtcgaggggacccccagtccaattattatgtggtataaagacaatgtgcaggtcacagagtcctccacgatccagaccgttaacaatggaaaaattctcaagctgtttagagcgactcccgaggatgctgggagatacagttgcaaggccatcaatatcgcgggaacctcccagaagtacttcaacattgacgtgttggttccaccaactatcattggcacgaattttccaaacgaagtctccgtggtcctgaacagggatgtggcactggaatgccaagttaagggcaccccgttcccagatatccactggtttaaggatggtaaacccctattcttgggggatccaaacgtggaacttctggatcgtgggcaggtattacatctgaagaacgcacgaagaaacgataagggacgctaccaatgcaccgtgtctaatgccgccgggaaacaggctaaggacattaagttaacgatttacatcccaccatcgataaaagggggcaatgtgactaccgatatcagcgtattaatcaactccctgataaagcttgaatgtgaaactagggggctgccgatgcctgccatcacttggtacaaggatggacagccaataatgagtagttctcaggccctttacatagacaaaggccaatatctacatattcctcgcgcacaggtctcagacagtgctacgtacacttgccatgtggccaacgtcgccggcacagccgaaaaatctttccatgtcgacgtatatgtcccaccgatgatcgaaggaaaccttgcgacaccattgaataaacaggtggtgatcgcccactcacttactctcgagtgtaaggctgccggaaatccttcaccaatattgacctggttgaaagatggagtaccggttaaagccaacgacaatatacggatcgaagccggcggaaagaaactggagattatgtccgcccaggagattgaccggggtcagtacatttgcgtggccaccagcgtggccggggaaaaggaaattaaatacgaggtggatgtcctcgtgccaccggccattgaagggggcgacgaaacatcctactttattgttatggtgaacaacctacttgaactggattgtcacgtcacaggtagccctcctccaactatcatgtggttgaaggacggccagttaatcgatgagagagacgggtttaagatactccttaacggacgcaagctcgtgatagctcaggctcaagtgagtaacacaggcctttataggtgtatggcggccaacaccgccggcgatcataagaaagaatttgaggtgacagtgcacgtgccccctacaattaaaagttctgggcttagcgaacgtgtggttgtgaaatataaacctgtcgcacttcagtgcatcgccaacggtatcccaaatccttccataacctggctgaaagacgaccagcccgtcaacaccgcacagggcaatctgaaaattcaatcaagtggtagggtgctgcaaatcgctaaaacactgttggaggacgcgggccgatatacttgtgttgcaaccaacgccgccggagagactcagcaacacattcaactgcacgtgcacgagccacccagtctcgaagacgcagggaaaatgttgaatgagacagtacttgtgagtaacccggttcaactggaatgtaaggcagcaggcaatcccgtcccagtgatcacctggtataaggacaaccgactgctcagcggatctaccagcatgacttttcttaataggggccagataatcgatattgaaagcgcacagatttccgatgctggaatatacaagtgtgtcgccattaatagcgccggtgctaccgaactcttctactcactgcaggtgcatgtcgcgcctagcatttcaggctcaaacaacatggtcgcagtggttgtcaacaaccctgtgagacttgaatgtgaggcccggggcatacccgcgcctagtctaacctggttaaaagacggttctccggtcagtagcttttccaatggactccaggtactaagcggaggacggattctggctctcactagtgctcagatttccgataccggcagatatacttgcgtcgccgttaacgctgccggtgaaaagcagagggatatcgacctgcgggtttatgttcctcccaacatcatgggagaggagcaaaacgtaagcgtgctaatcagccaagccgtcgagctgctatgtcagtcagacgctatacccccaccaactctgacatggctgaaggacggccacccacttctgaagaagcctggcttgagcatatctgagaatcgaagtgtcttgaaaattgaagacgcacaggtccaagacacaggtaggtacacgtgtgaagcaaccaacgtcgctgggaagacggagaagaattataatgtcaacatttgggtgcctcctaatattggaggcagcgacgagttaactcagctcactgtcattgaggggaacttgatctccctactttgcgaatcctcaggaattcctcccccaaatcttatctggaagaagaagggaagtcccgtactgactgattccatgggaagagtgaggatcctctctgggggccgccagctgcagataagcatcgcagagaagtcggatgctgccctgtattcgtgtgtggctagcaatgttgctggaacagctaaaaaagagtacaacctgcaggtgtacatccgccccacaatcaccaattcaggcagtcaccccacagagattatcgtgacgcgggggaagagcattagtcttgagtgtgaagtgcagggtatccctccaccaactgtgacatggatgaaagatggccatcctttgataaaggccaaaggcgtggagattctcgatgaggggcacatcttgcagttgaaaaatatccatgtgagtgatactggtcgttatgtgtgcgtagctgtgaacgtcgccgggatgacggataaaaagtacgacctgagtgtccacgccccgccaagtattattggcaatcacagaagtcctgaaaatatttcagtggtggagaaaaactcagtctctctgacatgcgaggcatctgggatccccttacccagtatcacatggttcaaagatgggtggcctgtgagcttatccaatagcgtgagaattctgtctggagggaggatgctccgcctcatgcagactaccatggaagacgcagggcagtatacctgcgtcgtgcggaacgcggccggcgaagagcgcaagatttttgggctctctgtattggtcccaccgcacattgtgggtgagaacacccttgaggacgtgaaggtcaaggagaagcagtctgtaaccctaacttgcgaagtaaccgggaaccccgtccctgagatcacctggcacaaggatggccagcccttgcaggaggacgaggcccaccacatcatctctgggggcagattcctccagattactaacgtccaggtacctcatactggtagatacacatgcttagcctcttcccccgcaggacataagagcaggagctttagtctgaacgttttcgtgtctccaaccattgccggggtagggagtgacggtaaccccgaagacgtcaccgtgattctgaatagcccgacctcacttgtttgcgaggcgtattcttacccccccgctacgattacctggttcaaagatggaacccccctggaatccaataggaatatcaggatcctcccaggtggccggacactgcaaattctcaatgctcaggaggacaatgctggccgctactcctgtgtcgcaaccaatgaggcgggggagatgatcaaacactatgaggtgaaggtgtacatccctcccatcatcaataagggggatttgtggggacccggattaagccccaaagaggttaaaataaaggtgaataatacactgactctagagtgcgaagcctacgctattccctctgcaagcctgtcctggtacaaggacgggcagcccttaaaaagcgacgaccacgtcaacatcgccgctaatggtcataccttgcagatcaaagaagcccagatcagcgacacagggaggtacacctgtgtcgcctccaatatcgccggagaagacgaactcgatttcgatgtgaacatccaggtgcctcccagctttcagaagctttgggaaattggcaacatgctcgataccgggagaaatggtgaagcaaaagatgtcatcatcaacaatcctatttccctgtactgcgagaccaacgcagcccctcccccaactcttacctggtacaaagacggacaccctcttacctcttctgataaagtcctgatcctgcccggggggcgcgtcctgcagatcccacgcgctaaagtcgaagacgcggggagatatacatgcgtggctgtaaatgaagccggcgaggattctctgcagtatgacgtcagggtgttggtgccacctatcataaagggcgccaattccgatctgcccgaggaagtgaccgtcctcgtgaacaaatccgctcttatcgaatgtttgagcagcggctcacctgctccaagaaatagctggcaaaaggacggacagccactgttagaggacgatcaccataagttcctctcgaatggacgcattctacagattctcaatacccagattaccgatattggccggtatgtgtgtgttgcagagaacaccgccggctccgctaaaaaatatttcaatttaaacgtccacgttcccccatcagtgattgggcccaagagcgagaatctgaccgtggtggtaaacaactttatctcccttacatgcgaggtgagtggtttcccccctccggacctgagctggctgaaaaatgagcagcctattaagctgaatacgaacactctaattgtgccgggcggtcgaacactgcagatcatccgcgctaaggtatccgatgggggggaatacacttgcatagcaattaatcaggcgggggaaagtaagaaaaaatttagtctaaccgtctatgtaccaccatctatcaaggaccatgactctgaaagtctaagcgtcgtaaacgtgcgggaggggaccagcgtcagtttggaatgcgaatctaacgcagtgcccccaccagtaattacctggtataaaaatggaaggatgatcacagagtccacacacgtggaaatcctagctgacggtcaaatgcttcacatcaagaaagctgaggtgagcgataccgggcagtacgtttgtagggccatcaacgtggctggcagggacgataagaattttcacctaaatgtgtacgtgccgccatctatcgaagggcccgagcgggaagtgatcgtggaaacaatatccaacccggtgactctgacatgcgacgcgaccggtattccacccccgactattgcctggctcaagaaccataagcggatagaaaattcagacagcctggaagtgagaatcttatctgggggcagtaaactgcagattgcacgtagccagcatagcgacagtggcaattatacatgtatagctagtaacatggaaggaaaggctcaaaagtactattttctctcgatccaggtgccacctagcgtcgctggcgcagaaatcccgtccgatgtgagcgtgctgctgggggaaaatgtcgaactggtctgcaatgctaacgggatcccaactcccctcatccaatggctgaaagacggtaagccgattgctagcggcgaaacggaaagaattcgtgtctcagccaacggctccaccctgaacatctatggagccctgactagcgacacagggaaatatacgtgtgttgctacaaatcccgcaggagaggaggaccgtattttcaatctgaacgtatacgttactcccactatccgggggaacaaggatgaggcggaaaagctaatgaccttggtagacacaagcatcaacattgagtgcagggcaacaggaacgccccctccgcagattaactggctgaagaatggcctgccgctccctctgtcctcccatatccgattactggcggccgggcaagtgattcggatcgtacgagcacaggtgtcagacgttgctgtttatacgtgtgttgcatctaaccgggccggtgtggacaataagcattacaatctacaggtgtttgctcccccgaacatggataactccatgggcacagaagaaatcaccgtgctgaaaggaagctctactagcatggcgtgcattaccgacggcactcccgcaccatctatggcctggctccgagatggacaacctctgggacttgatgcccacctgacggtgtcaacccacgggatggttctacaactgttgaaggccgagaccgaggactcagggaaatacacctgtatagccagcaatgaggctggggaagtgtccaagcatttcatattgaaggttctcgagccaccgcatataaatggtagcgaagaacacgaagagattagtgtcattgtgaacaaccccctggagttgacctgtattgcctcagggatccccgcgcctaaaatgacgtggatgaaggacggacgccccctcccccagaccgaccaggtgcagactcttggagggggtgaggtgttacgcatatcaactgctcaggtggaggacactggaaggtacacatgcctggcttcatcacccgccggcgatgacgacaaagaatatctcgtccgtgtacatgtgccccctaatattgctggtactgacgagcccagagacatcacagtgcttaggaacagacaggtaaccctcgagtgtaagagcgatgcggtgcccccccccgtgataacttggcttagaaatggcgagagactacaggcaaccccgagagtgaggattctttcaggtgggcgatatctgcagataaacaatgccgacctgggagataccgccaactatacctgcgttgcttcgaatatcgccgggaaaacaacgagggagtttatcttgacagtgaatgttccccccaatatcaaaggcgggcctcagtctttggttattttgctgaacaaatcaaccgtcctcgaatgcattgcagaaggggtcccaacacctaggattacttggaggaaagatggcgccgttctggccggaaaccacgcgcggtatagtatcttggaaaacgggttccttcacatccagtcagcccacgttacagacacaggccgatacctctgcatggcaacgaatgctgctgggactgatcgtaggcggattgatctgcaagttcacgtgccaccctcaatcgccccgggccccacaaacatgaccgtgatcgtgaatgtgcaaacaacactcgcctgcgaagctacaggcattcccaagccctccatcaattggaggaagaacggacaccttctgaacgtggaccagaaccaaaatagctatagactcctgagttcagggtcacttgtgatcatttcccccagtgttgacgacaccgctacctacgaatgtacagtgaccaatggcgccggggacgacaaacggaccgtcgaccttaccgttcaagttccacctagtattgccgacgagcctaccgattttctggtgacaaagcacgcacccgccgtgatcacctgcactgctagcggagtgccctttcctagcatccattggacaaagaatggcatacgcttgctgccccgcggcgatggatacaggatcctttcaagcggggctattgagattcttgccacacagttgaatcacgctggaaggtatacgtgcgtggctcgtaatgcagccgggagcgcccaccgacacgttacgcttcatgtccatgagcccccggtcattcagccacaaccctcagaactgcatgtcatcttgaataaccctattctcctcccttgtgaggccactgggaccccatccccattcatcacttggcaaaaggaaggaatcaatgtcaacaccagcggacgaaaccatgccgtgttgccctctggtggcctgcagatctcccgggcagtgagggaagatgctggcacgtatatgtgtgttgcccaaaatccggcgggaaccgccctgggtaaaatcaaactgaacgtccaggtaccaccagtcatctccccacatctcaaggaatatgtgatagctgtggataaacccatcacgctcagttgtgaggctgatggccttcctccacctgacatcacttggcacaaggatggtcgggccattgtggaatccattaggcagcgagtcctgagctctggaagccttcaaatcgcgttcgtgcagcccggcgacgcaggacactacacatgtatggctgccaatgtcgccggatcatccagcacaagcactaaactcactgttcatgtcccacccagaatcaggagcacagagggccattatacggtgaacgagaacagtcaggcaattctgccctgtgttgccgacgggatacctacaccagcaataaactggaaaaaggacaacgtactgctggccaatctactaggtaagtatactgctgagccatacggagagctcattctggagaacgtagtgctggaagactccggcttctatacctgtgtggcaaataatgcagctggtgaggacacacacacagtgagtttgactgtgcatgtcttaccaacattcaccgagctgcccggcgatgtttccttgaataaaggcgaacagctgaggttgtcatgtaaggctaccggcattcccctacccaaactgacttggacattcaacaataatattataccagctcacttcgacagcgttaatggccatagcgaacttgtgattgaacgggttagcaaggaagattcaggaacctacgtgtgtacggcagagaacagcgtgggttttgttaaagcaataggcttcgtgtacgtaaaggagccccctgtcttcaagggcgattacccgagtaactggattgaaccactgggaggtaacgccatattgaactgcgaagtgaagggtgacccaaccccgactattcagtggaatagaaaaggggtggacatagagattagccataggataaggcagctgggtaatggctctctggcaatatacggtacggttaacgaggacgctggcgactacacttgcgtcgccactaatgaggcaggagtggttgagcgtagcatgtctctcacacttcagtcacctccaattataacgttggagcccgttgaaactgtgatcaacgctggcggaaagataattcttaattgccaggccactggtgagccacaaccaacgatcacctggtccaggcaagggcactcaatttcttgggacgacagggtgaatgtcttgagtaacaatagtctctacattgccgacgcccagaaagaggacacttctgagtttgagtgcgtagctcggaacctgatggggtctgtcctggtcagggtcccggttattgtgcaggtgcacggcgggttcagccagtggagtgcttggcgcgcctgcagcgtcacctgtggcaagggaatacaaaaacggtccaggctgtgcaaccagcctttgccagcgaatggcgggaaaccttgtcagggctctgacctagagatgagaaattgccaaaacaagccatgcccagtcgatggctcatggtctgagtggtccctctgggaggaatgcactagatcctgcggcagaggaaaccagacacggacgagaacctgcaataacccctccgtgcagcatggaggtcggccatgtgaagggaacgctgtcgagataatcatgtgtaacatacgtccgtgcccagtgcacggcgcctggtcggcttggcagccatggggcacctgcagtgaatcctgtgggaagggtacgcagacaagggcccgattatgtaataaccccccgccggctttcggcgggtcctattgcgatggggccgagactcaaatgcaagtatgcaatgaaagaaactgtcccatccatggcaagtgggcaacatgggcgtcctggtcggcctgtagcgtctcatgcgggggaggcgctcgtcagcggacgaggggttgtagcgatcccgttcctcagtatggaggccgcaagtgcgaaggctcagacgtccagtccgacttctgtaattctgatccctgtccaacccacggcaattggtctccttggtcaggctggggaacctgtagcagaacatgcaatggcggacaaatgaggcgatacaggacttgtgataatcctcccccttcaaacggtggaagggcctgcgggggacccgacagtcagattcagcgatgcaacaccgacatgtgccctgttgacggaagctggggcagctggcatagctggtcacagtgcagcgcctcctgtggcggtggtgagaaaacgaggaagcggctctgcgatcaccctgtccctgtaaagggcgggaggccatgccctggggacacaacacaggtcactcgatgtaacgtccaggcgtgccccggagggccccagcgtgcacgcggttctgtgataggaaatatcaatgatgtggagttcggcatcgccttccttaacgccactatcaccgattctcctaattccgatacccgtatcattcgggcaaaaattaccaatgtacccagaagcctggggagtgccatgcgaaaaattgtgagcatcctcaatcccatatactggaccacagctaaggaaattggagaggctgtgaatgggttcacactaaccaacgcggtgttcaaaagggaaacacaggtcgaattcgccaccggtgagattctgcagatgagtcatattgctcgaggcttagactccgatgggtcccttctactcgacattgtggtttcagggtacgtcctccaactgcaatctcccgcagaagtgacagtgaaggattatacagaggactacatccagactggccctggccagctctacgcgtattctaccaggctgttcaccattgacggtattagcattccctacacttggaaccacaccgttttctacgaccaggcacaaggcagaatgcctttcttggtggaaaccctccacgcctcaagcgtggagtctgattacaaccagatcgaggagaccttgggattcaagattcacgcttccatatcaaagggggaccgatccaatcagtgcccttccggatttactttggacagcgtgggccccttttgtgccgatgaggatgaatgcgcggctggcaacccgtgctctcattcctgccacaatgccatgggaacttactactgctcatgtccaaagggcctgacaatagccgctgatggccgcacttgtcaggacatcgacgaatgtgccctcggacgccatacatgtcacgctggacaggactgcgataacacaataggcagctacaggtgcgtcgttagatgcggaagcggttttagacgaacttctgatggcctttcttgtcaggatatcaatgagtgccaggagtccagcccatgtcaccaacgctgttttaacgctatcgggtcttttcactgtgggtgcgagccgggctaccagttgaagggccgaaaatgcatggatgtgaatgaatgtcgacagaatgtttgtcggcccgaccagcactgtaagaatacaagggggggatataaatgcatagacctttgccctaacggcatgacaaaggctgagaacggcacatgcatcgacattgatgaatgtaaggatggcacccaccagtgcagatataaccagatttgtgaaaacaccagaggctcttatcggtgcgtctgtccaagaggctacaggtctcagggcgtgggccggccctgtatggatattaatgagtgtgagcaggttccgaagccttgcgcgcatcagtgttctaacacgccgggaagcttcaagtgtatttgcccacccggccagcatttgcttggagatggcaaatcatgtgccggtttggaaagattgccgaactatggaacacagtattcttcatataatctagcacgattttcaccggtgagaaacaactatcagcctcagcagcattaccggcagtacagccacctgtatagtagctactctgaatatcgcaacagtcggactagcctgtcccgaactcgccgcacaatccgtaaaacctgccccgaagggtcagaggcctctcacgacacctgcgtggatatcgatgaatgcgagaatacagacgcctgtcagcatgagtgcaagaatacattcgggagctaccagtgtatatgcccccctggatatcagctgacccacaatggtaagacctgtcaggatattgacgagtgcctggaacaaaatgttcactgcgggcccaaccggatgtgttttaacatgcgcggtagctaccagtgcatcgacactccctgtccacccaattaccagcgagatcctgtctctggcttttgtttaaaaaactgtccacctaacgacttagaatgtgcactgagtccctacgctctcgaatataaacttgttagcctcccttttggaatagccacaaatcaggaccttatcagacttgtggcctacacccaggatggtgtcatgcaccccaggacaacttttttgatggttgacgaggaacagacagttccttttgctctgcgcgatgagaacctcaagggcgtggtctatacaactcggcctttgcgcgaggctgagacataccgaatgagggtgagggcttcgtcctattctgccaatggtactatcgaatatcaaaccacgttcatcgtgtacatcgctgtttccgcctacccatattag

SEQ ID NO: 190471 - DNA, 16557 bp, synthetic construct
  misc_feature 1..16557: note = Description of Artificial Sequence: Synthetic coding sequence
  source 1..16557: mol_type = other DNA
atgatcagctgggaggtggtgcacaccgtgttcctgttcgccctgctctactcctctcttgcccaggatgcttcccctcagagtgaaatccgggctgaggaaattcctgaaggggccagtaccttggcttttgtgttcgatgttaccggcagcatgtacgatgacttagttcaggtcatcgagggagctagcaaaatcctcgagacctcactgaagcggccaaagcgaccactgtttaacttcgctctggtgcccttccacgaccccgaaatcggacccgtaaccattacgacggatcccaaaaagtttcaatacgagctgcgcgaactttacgtgcagggaggaggcgactgcccggagatgtccattggagccattaagatcgctcttgaaatctccctgcctgggtctttcatttacgttttcacggatgctcgctcgaaagactacaggctaacccacgaagtgcttcagctcatccaacagaagcagtcacaggtcgtatttgttctgacaggagactgcgacgaccggacacacattgggtacaaagtatatgaggagatcgcctcgacatcctcaggtcaggtgttccacttggacaagaagcaggttaatgaggtcctgaagtgggtggaggaggctgtgcaggccagcaaagtgcacctcctgtctactgatcacttggaacaggccgtaaacacctggcggataccttttgatccctcccttaaggaagtgacagtgagcctatctggcccttctcccatgatagagatccgcaatccactgggcaagctcataaagaaaggtttcgggctgcacgaactactgaatatccacaatagcgcaaaagtcgtgaacgtcaaggagccagaggctggtatgtggacagtcaaaaccagctcttctggacgccattccgtccgaattacaggcttaagcacgatcgacttccgcgctggcttcagtcgcaaacctacacttgatttcaagaaaactgtttctagaccggtccaggggattcccacttatgtcctgcttaatacttctgggatctcaacgcccgctcggatagaccttcttgaactattaagcatatcgggctcctctttgaagaccatacctgtgaagtattatcctcaccgtaagccctacggcatatggaacatatccgactttgtccctccaaacgaagcattttttctgaaggttacaggatacgataaagacgattatctctttcaacgggtatcctctgtcagcttttctagtatagtgccagatgcccctaaagtgactatgcctgagaagactccagggtactatctccagcccggacaaattccctgttctgttgacagtttgctgccctttactctgagcttcgtgagaaatggcgtaactctcggagtggatcagtacctgaaagaatccgcctcggtgaatctggacattgctaaggtgaccctttctgatgaaggcttttatgaatgcatcgctgtgtccagcgcggggactggcagggctcagacttttttcgacgtgagcgagcctcctcccgtaattcaggtgcctaacaacgtgaccgtcacccccggggaaagggctgtactgacttgtctgatcatcagtgcagtggactacaatctgacatggcagagaaacgatcgagatgtccgcttggccgagcccgcccgaattagaactctagcaaacctgtctctggaacttaagagtgttaaatttaatgacgccggagaataccattgtatggtaagttccgagggaggctcttcagccgcatcagtgtttctgaccgtgcaggagcccccaaaggtgaccgttatgcctaaaaaccagagcttcacgggagggagcgaagttagtataatgtgctctgccacaggctaccccaaacctaaaattgcatggacagtgaatgacatgttcatcgtcggcagccataggtacagaatgacaagcgatgggactctattcatcaaaaatgccgcacccaaagacgcaggcatctacggttgcctcgcatcgaattcagcaggtaccgacaagcaaaacagcaccctgcgctacatcgaggcccctaagttgatggttgtacagtcagagctcctggtggccctcggggatatcactgtcatggagtgcaaaacctccgggattccccccccacaagtaaagtggttcaagggcgatctggagctgcgcccctcaacattcttaatcatagaccctctgctgggtcttctgaagatccaggagacacaggacctggacgcgggggactacacctgtgtagctatcaacgaagccggacgcgccacaggcaagatcacattagacgtggggtcaccacccgtctttatccaggaacctgctgatgtctctatggaaatagggtccaatgtcacactaccttgttacgtacagggctatccggagcccaccatcaagtggaggcggcttgacaacatgcctatatttagcaggccttttagtgtgtccagcatctcgcagctgaggacaggtgcgctgtttatcttgaacttatgggctagtgacaaagggacctacatttgtgaggcagaaaaccagtttgggaaaatacagtctgaaacgacagttactgtgaccggcctggtcgctccactgatcggtattagcccatccgtggctaacgtcattgaaggacagcaacttacacttccgtgtacattgctggccgggaaccccatcccagaaagacggtggattaagaatagcgcgatgttgttgcagaatccctatatcacagtcaggtccgatggaagcctgcatatcgaacgggtacaattacaagacggtggggagtacacctgtgtggccagtaatgtggccggcacaaataataagacgaccagcgtggttgtgcacgtgttacccacaatccaacatggccagcaaatcctgtctacgattgaagggataccagttacactcccttgtaaggcttccgggaaccctaaaccctctgtgatatggagcaagaagggtgagctcattagtacttccagtgcaaaatttagtgcaggtgctgacggttctctgtacgtggtgtctccagggggggaggagagcggagaatatgtctgcacggcaaccaacactgctgggtacgctaagcgcaaggtacagctcaccgtctacgtgagacctagagtgtttggcgatcagcgtgggctcagtcaggacaagccagtcgagatcagcgtcttggctggcgaggaggttaccctgccgtgcgaagtgaagtcactgccaccgcccatcattacatgggccaaagaaacccagttaatctcacccttctctccccggcatacctttctgccgtccggctcaatgaagatcacagaaactaggacctcggacagcggcatgtatctgtgcgtcgcgacaaatatagctggcaatgttacacaagcagtgaaactgaacgtgcacgtgccgccaaagattcagcgcggcccgaaacacctgaaagtgcaggttggacaaagggtcgatatcccctgtaacgcccagggcacccccctcccggtgattacctggtcaaaaggcggtagtaccatgttagtcgatggagaacatcatgtgtctaatcccgacggtaccctgtcaattgaccaagccacacccagtgacgccgggatctacacatgtgttgccaccaatattgccggcactgatgaaacagaaattacgctacacgtgcaggagccccccaccgtggaagatttggagcctccttataataccacctttcaggagcgcgtcgctaatcagcgcattgagtttccctgtccagccaaaggtacccctaaacccaccatcaagtggctccataacgggcgcgagcttaccggacgcgagcctggtatctctattcttgaagacggcacattgttagtaattgcgtccgtcaccccttacgataacggcgagtatatttgtgtggcagtaaatgaggccggtacaaccgagcgtaaatataaccttaaagtgcatgttccaccggtgatcaaggataaggagcaggttactaatgtatcagtgttgctaaatcaactgaccaatctgttctgtgaggttgaaggtacgccctcgcccataatcatgtggtacaaggacaatgttcaggtaaccgagagttcaacgatacagaccgtgaacaatggcaaaatccttaaattgttccgcgctactcctgaggatgcggggcgatatagctgcaaggctattaatattgcgggcacctcccaaaaatactttaacatcgatgtccttgtaccgccaacaatcattggcactaactttcccaatgaagtgtctgtggtactcaatagagacgtggctctggaatgccaggtgaaaggcacacccttccctgatattcactggttcaaggatggtaagcctttgttcttgggagaccccaatgtcgagctcctggaccgcgggcaggtgttgcacttgaaaaatgctagacgtaatgacaaagggcgctaccagtgcaccgtcagcaacgcggctggcaaacaagctaaagacattaagttaacaatctatattcctccttctattaagggtggcaacgttaccaccgatatctccgtgctgatcaatagcctgatcaaacttgaatgcgagacacggggcctgccaatgccagcaattacatggtataaggatggccagcccatcatgtccagctctcaagcgctgtatatagacaaaggacagtatctgcatatcccacgcgcccaggtcagtgatagcgcaacatacacttgtcacgtggccaatgttgctggaaccgcagagaagagtttccacgtggacgtgtacgtcccacccatgatcgagggtaatctcgctacgcccttaaataagcaggtggttatcgcccattccctgactctggaatgtaaggccgcgggaaatccgagtcctatcctgacctggttaaaagatggcgtgcccgttaaggctaacgataacatacgcatcgaggcgggcgggaagaaactggaaattatgtcggctcaggaaatcgataggggccagtacatttgtgtggccacttctgtggctggcgagaaagagatcaaatatgaggtggacgttcttgtgcctcctgctattgaaggtggagacgaaacatcttacttcattgtgatggttaacaacttactcgagctggactgtcacgtgactggatcaccccccccaaccatcatgtggctgaaagacggccagctgatcgatgagagggacgggttcaagattctcttgaatggccgtaagctggtgatagcccaggctcaagttagcaataccggattgtataggtgtatggcagctaataccgcaggcgatcacaagaaggaattcgaggtgacagttcacgtgccgccgaccatcaaaagtagtgggttgtccgaacgggtggtcgtgaagtacaagcccgtggctcttcagtgtatagctaatggcattcctaaccccagcataacgtggttgaaagatgaccaaccagtgaataccgcccaggggaatctgaaaattcagtcctcaggtcgggtactccagatcgccaagaccctccttgaggatgccgggcgatacacttgtgtggctaccaacgccgcaggagagacccagcaacacattcagttgcacgttcacgagcctcccagtctggaagatgccggcaagatgctcaatgaaaccgtgttggtgtctaaccccgttcagttggaatgcaaagccgctggaaatcccgtgcccgtgatcacttggtataaagataatcgtttgttatctggctcaacaagcatgacctttctgaaccggggacagataattgacattgaaagcgcccaaataagtgacgccggtatttacaagtgtgttgctatcaatagcgccggcgctaccgagcttttctacagtctgcaggttcatgtggccccatctatatcagggagcaataatatggtcgcagtagtggtgaacaacccagttcggctggagtgtgaagctcggggtatcccggcgcctagccttacctggctgaaagacgggtcccctgtgtcatctttctccaatggactacaggtcctgtctggcggtcgcatactcgcactcacaagcgctcagatcagtgataccggcagatacacctgtgtggccgtgaatgccgccggagaaaagcagagggatatagatttgcgagtgtacgtgccccctaatatcatgggtgaggaacaaaatgtgtctgtgctgatttctcaggcagtcgaactgctgtgccagagcgacgcaattccccctcctacactgacatggctgaaagacggacatcctctcctgaagaagcccggtctttccatttctgagaaccggagtgtcctgaaaattgaggatgcacaggtccaagataccggccgttacacttgcgaagcaaccaacgtggctggaaagaccgaaaagaactataatgtgaatatctgggtgcccccaaacatcggtggatccgacgagttgactcaattgaccgttattgagggaaacctaataagccttctctgcgagagttccggaattccccctccaaatctgatctggaagaagaagggatcacccgttctgaccgattctatgggtcgagtgcgaatcctgtcgggggggagacaattacagatcagtatcgccgagaagtcggatgcagctctgtactcttgcgtcgcctcaaacgtggctggcaccgcaaaaaaggagtacaacctgcaggtgtatatccgccccactataacaaattccggttctcacccgaccgagatcattgtgacacgggggaagtccattagtctggagtgtgaggtgcagggcatcccccccccaaccgtcacttggatgaaggacggtcacccactaatcaaggccaagggcgtggagatcctagatgagggacatatcctgcagcttaagaacattcatgtttctgacactggacgttatgtgtgcgtggccgttaatgtcgcggggatgaccgataagaagtacgatctctcagtacatgcccccccttctattattggaaaccacaggtcgccagaaaatatttcagtagtggagaagaattctgtgagcctcacctgtgaggcctcaggaatccccctgccttcgattacgtggttcaaggatggctggcccgtgagcctgtctaactccgtgcggattcttagcggcggaagaatgctgagacttatgcagacaacgatggaggacgccggtcaatatacctgtgtggtcaggaatgctgccggcgaagagagaaagatcttcgggcttagtgtccttgttccaccgcacatcgtgggcgagaataccctcgaggatgtgaaagtaaaggaaaagcagagcgtgaccctcacttgtgaagttaccggaaatcctgtgcctgaaattacatggcacaaggacggccagcctcttcaggaagacgaggcccaccatatcatatccggcggccgattcttacaaatcactaacgtgcaggtgcctcataccggtagatatacctgtctcgcatccagccccgccggacacaagagtcgctccttttcactgaacgtattcgttagtcctacgatagcaggcgtcgggagtgatggcaatccagaggatgtgacggtgattctgaattcccccactagcctggtgtgtgaagcctattcttatccccctgcaaccatcacatggttcaaggacgggactcctcttgagtccaataggaacattcggatccttccggggggaagaactctccagatcctcaacgcccaagaagataacgctggtcggtactcgtgtgtggccaccaacgaggcgggggagatgataaagcattacgaggtgaaagtgtatattcctcctatcatcaataaaggagatttatgggggcctggtctctctcccaaggaagtgaaaatcaaggtaaacaatacactgactcttgagtgtgaggcctacgctattccctccgcttccctgtcctggtataaggatggacagcctctcaaatctgacgaccacgtgaatatcgccgcgaacggacacacattacagattaaagaggctcagatcagcgataccggcaggtacacctgcgtggcatccaacatagcaggggaggacgagctcgatttcgacgtgaacatccaagtgccacccagcttccaaaaactctgggaaattggcaacatgctcgacacgggccggaacggagaggccaaagacgtgatcattaataatcctatttcactttattgtgagacaaacgcagcccctccacctaccctcacttggtacaaagatggccatccgctaactagcagcgataaggtgctgattctccccgggggtcgagtgctccaaattcctcgagctaaggttgaggacgccgggagatacacatgtgtggccgtgaacgaagccggtgaggattcgctccaatatgatgtcagagtgcttgtacctcccattatcaagggcgctaatagcgatttgcccgaagaggtaaccgtattagtgaataaaagtgccttgatcgaatgtttaagttcggggagccccgcccctagaaattcctggcaaaaggacggtcagccgctgctcgaggatgaccaccacaagtttctgtcaaatggacggatcttacagatcctgaacactcaaatcacggacatcggcaggtacgtctgcgtcgccgagaacaccgctggttctgccaaaaaatacttcaacttgaatgtgcacgtccctcctagtgtgatcggcccaaaaagcgaaaacctgacggtggtcgtcaacaatttcatcagcttgacttgcgaggtgtcaggattcccacctccagacctctcatggctcaagaatgaacagccaattaaactgaatactaatacacttatcgttccaggtggccgcaccttgcagattatccgtgccaaagtttccgatggcggggaatatacttgcatcgctatcaatcaggctggcgaaagcaaaaagaagttcagtttaactgtttacgtccctccctccattaaggaccatgacagtgaatcacttagtgtggtgaacgtgagggagggcactagtgtgtccctcgaatgtgagagcaacgccgtgcccccacccgtgatcacatggtataagaacgggaggatgataacagagagtacacatgtggagatcctcgccgatggccagatgctccatattaagaaagctgaggtgagtgatacaggtcagtatgtctgtcgagctatcaacgtcgcgggacgagacgataaaaacttccacctaaatgtgtatgtgccaccaagcatagagggaccagaacgtgaggtgatcgttgagacaatttccaaccccgttacgctgacctgcgacgccaccggtattccgccccccaccatagcttggcttaagaaccataagaggattgaaaacagtgactctctggaagtgaggatactgtctggtggttctaagctgcagattgcgcgcagccagcattcggactcaggaaattacacgtgtattgcctctaatatggagggaaaagcacagaagtactacttcctgtctatccaggttcctccctccgttgcaggagcagagataccaagcgacgtgagtgtcctgctgggggaaaacgtggagttggtgtgcaacgcaaatggcattcctacgcctcttatccagtggctcaaggacggtaagcccattgcttccggcgagactgaacggattcgcgtgagcgcgaacggatctacactgaacatatatggcgcgctgacctccgacacaggaaaatatacctgcgtggcaacaaaccctgcaggggaggaggacagaatcttcaaccttaatgtttatgttactcctacaattcggggcaataaggacgaagcggagaagttgatgaccttggtggacacgtctatcaatattgagtgtagagcaacgggcacacctcccccgcaaattaactggttaaagaatggcctgccgcttccactgtcctcacacatccggcttttagctgcagggcaagtaatccgtatcgtgcgtgcacaggtttccgatgtggcagtgtacacctgtgtggcctctaacagagccggagtggacaataaacactacaatctccaggtgttcgcgcctcctaatatggataactccatggggacggaagaaattaccgtcttaaagggctcttctacgagcatggcttgtataacagacggcaccccagcgccctctatggcctggctgcgtgacgggcagcctctgggattggacgcacacctcaccgtgagcacccacggaatggtgctgcagttgcttaaagctgaaaccgaggacagtggaaaatacacctgcattgcctcaaacgaagcaggtgaagtgagcaagcacttcatccttaaagttctggagcccccgcatattaacggatctgaagagcacgaagagattagtgtgatcgtgaataatccgttggagttaacgtgcatcgcatctgggattcccgcccctaagatgacctggatgaaagacggtcgccccctgcctcagaccgaccaggtgcaaacgttaggaggtggcgaggtcttacgcatatctaccgcacaggtggaagatacaggtaggtacacctgcctagcctcctctcccgcaggtgatgatgataaggaatatctggtacgggtgcacgttcctcccaatattgccgggactgatgagccgcgagacatcacagtgcttcggaatcggcaagtgacgctcgaatgcaagtccgacgcagttcctccaccagtgatcacctggctcaggaatggcgagaggctgcaagctaccccgagagtgaggatcctatcgggggggcggtatctacagattaacaacgcagatcttggcgacacagcaaactacacttgcgtcgcctccaacatcgccgggaagacaactcgagaattcatcttaacagtaaatgtgccccccaacatcaaaggcggcccccaaagtctggttatactcctaaacaagtcaactgtgctggagtgcatcgccgaaggcgtcccgaccccacggattacttggcgtaaggacggagccgttctggcaggaaaccacgccaggtactcaattttagagaacggcttccttcatatccagagcgcacacgtaacggacaccggtcgatacttgtgcatggccacaaatgcagctgggaccgataggcggagaatagacctccaagtacacgtgcccccaagtatcgcacctggacctacaaatatgacagtcatcgtgaatgtgcaaactaccttggcatgcgaggccacagggataccaaaaccgagtatcaactggcggaagaacggacatctgctcaacgtggaccagaatcagaattcctaccgcctgctgagttcagggagcctagttattataagtccatccgttgacgacacagcgacttacgaatgtactgtcaccaacggcgcgggcgatgacaagcggacggttgatctaacagttcaggtgcctcccagcatcgccgatgaaccaaccgacttcctggtgacaaaacatgcaccagccgttataacgtgtaccgcctcaggggttccatttccgtccatacactggaccaaaaacgggattcgactactcccccgcggtgacggctaccgcatcctgtcatccggcgcaatcgagattctcgccactcagctgaatcacgcgggccggtatacatgcgtcgcacgaaatgctgccggatcggcacaccgccatgtcacacttcacgtgcacgagcccccagtgatccaacctcagcccagtgagctacatgtgattctgaacaacccaatcttgctgccctgtgaggccaccggaacccctagtccgttcatcacctggcagaaggaaggtatcaacgtgaacacaagcggaagaaaccacgccgttctgccttccggagggctgcagatctcccgggcggtgcgtgaggacgctgggacgtatatgtgtgtagctcagaatccagccggcacagccctcggaaagattaagctgaacgtgcaggtcccccccgttatcagcccccatctcaaggagtacgtgattgctgtcgataaacctatcactctgtcctgtgaagctgacgggctgccacccccagacattacttggcacaaggacggtcgtgctatcgtggaaagtattcgccagagggtcctgtcatcgggaagcctgcagatcgcctttgtccagccaggagacgcaggccattacacatgcatggcagctaacgtcgccggcagcagttccactagtaccaagctcaccgtccacgtgcctccacgcatcagatctacagaaggccactacacggtcaacgaaaattcgcaagcaatattgccgtgcgtggctgatggcatccccacacccgcgataaattggaagaaagacaacgttttgctggcaaatctacttggcaaatataccgctgaaccctacggggagctgatactagaaaacgtggtactggaagatagtggcttttacacttgcgtggccaacaacgccgcaggggaggacacgcacactgtatccttgactgtccacgtgttgccaacgtttactgagctgcctggggatgtctccctgaataagggcgagcagctccggcttagctgcaaggccacgggcatacctcttcctaagctgacatggacatttaacaataatattatcccagcacattttgattccgtgaatgggcactccgaactcgtgattgagagggtcagtaaagaggatagtgggacttatgtctgtacagcggaaaattcggtaggctttgttaaggccatcggcttcgtttatgtcaaggaaccacctgtgttcaagggggactacccatctaattggattgagccactgggcggcaacgcaatactgaattgtgaggtcaagggtgaccccacccccacaattcagtggaacaggaaaggagtggatatcgagatctctcatagaatccgccagctgggcaacgggtcattggccatctacggcaccgtgaatgaagacgcaggcgactatacctgtgttgcaaccaacgaagctggcgtggtggagcgctctatgagcctcactttacagtctcctcccatcattaccctggagccagtagagactgtgattaatgcaggaggcaaaattatccttaactgtcaggctacaggggagccccagcccactattacgtggagccgtcaaggacatagcatctcttgggacgaccgggtgaatgtcctctccaataactctctctacatagcagacgcacagaaggaagatacaagtgagttcgaatgtgtggctaggaatctaatgggatccgtgctggtccgcgtgcccgttattgtccaggtacacgggggctttagtcaatggtccgcctggcgggcgtgctctgtgacctgcggcaaagggattcagaagcggtccaggctgtgcaaccagccactgccagcaaacggaggcaagccctgccaaggatcggatctcgaaatgcggaactgccagaataaaccatgtcctgtggacgggtcttggtcggagtggtccctgtgggaggagtgcacccgtagttgcgggcgaggcaatcagactcggaccagaacatgcaacaacccctcagttcagcacggcggtagaccatgtgagggtaacgcagtcgaaataatcatgtgcaatataaggccctgccctgttcacggagcttggtctgcctggcagccttggggaacttgctccgagtcttgcggaaaggggacccagacccgggcaagattgtgcaacaaccccccacccgcctttggcgggtcctattgtgacggcgctgagacgcagatgcaggtttgcaatgaacgaaattgtcccattcacggaaagtgggcgacctgggccagttggtcagcatgtagcgtctcatgcggcggaggggcaagacaacgcactaggggctgcagcgacccagttccacaatatggcggcaggaaatgcgaaggctcggatgtacagagtgacttctgcaacagtgatccttgtcctactcacggtaactggagtccatggtccgggtggggcacctgcagtcggacgtgcaatggagggcagatgagaaggtaccggacttgcgacaatccaccccctagcaatgggggacgtgcatgtggtggaccagatagccaaattcaaaggtgcaacaccgacatgtgtccagtggacggctcgtggggatcatggcactcatggagccagtgctcagcaagctgtggagggggtgagaaaaccaggaagcggctgtgtgaccaccccgtgccagtaaagggaggtaggccatgtcccggcgacaccacacaggtcacccgctgtaacgtacaagcatgccctggcggacctcagcgagctcgtggcagcgtcattggtaatattaacgatgtcgagttcgggatagcttttctaaacgcaactatcacagattcaccaaactctgacaccagaatcataagagctaagatcactaacgttcccagatccctaggaagcgctatgaggaagatagtgtccatcctgaatccgatttactggactactgccaaggagatcggcgaagcagtgaatggattcactctgacgaacgccgttttcaaacgggagacccaagtagaatttgcaactggcgagatcttacagatgtcacatatagcacgagggttggactccgatggttccctgctgttagatatagtggtgagcggatacgtgcttcagctgcagagtccagcggaggtcactgtgaaggactacactgaggactacatccagaccggaccagggcaattgtatgcatatagcacaagattattcactattgacgggattagcatcccttacacctggaatcatacagtgttctatgaccaagctcagggacggatgccgtttctggtggaaacactgcacgccagtagcgttgaatctgactataaccagatcgaagagaccctcggctttaaaattcacgccagcatctctaaaggcgaccggagcaaccagtgtccaagcggcttcactctggattccgtcggccccttttgcgctgatgaagacgaatgtgccgctggtaacccctgtagccactcatgtcataacgctatgggaacctactattgttcctgccccaaaggtctcacaatcgccgcggatggacgaacctgtcaggatatagacgaatgtgcactaggcagacatacatgtcacgctggccaagattgcgacaataccatcggcagttataggtgcgtggtgaggtgcggttcggggtttcgccgcacttcagatgggttgtcttgtcaggatataaacgagtgccaggagagttccccttgtcatcaacgctgctttaatgccatcggatccttccactgcgggtgtgagcctgggtatcagttgaagggacgtaaatgtatggacgttaatgagtgcagacagaatgtgtgtcggcccgaccaacactgtaaaaatacccgcggaggttacaagtgcattgacctgtgccctaatggcatgaccaaagccgagaatgggacatgtattgacatcgatgagtgtaaagacggaactcaccagtgtcgatacaaccaaatatgtgaaaatacgcgaggatcctaccgctgcgtttgtccacggggttaccgttcccagggtgtgggacggccttgtatggacatcgatgagtgcgagaatacagacgcttgtcagcacgaatgcaagaatacatttggttcctaccagtgcatatgcccccctggatatcagctcacccataacggtaagacgtgtcaagatattgacgagtgcctggaacagaacgtacactgcggaccaaacaggatgtgctttaatatgcgaggcagctatcagtgcattgacactccttgtccaccaaactatcaaagagacccagtctcgggcttttgtctgaaaaactgccctccaaacgacttagaatgtgctttgtctccctatgctctagagtataagttagtgagcctccctttcgggatcgccacaaaccaagacctgattaggttggtggcgtacacgcaagatggcgtaatgcacccccgcactacattcctgatggtggatgaggaacagactgtcccgtttgctctgcgggatgagaacctgaaaggggtcgtgtatactacccgccccctgagagaggccgagacttatagaatgcgcgtgcgggcatcgtcctattccgccaatggcaccattgagtatcagacgacctttattgtgtatattgcggtaagtgcttacccgtattag

SEQ ID NO: 190472 - DNA, 723 bp, synthetic construct
  misc_feature 1..723: note = Description of Artificial Sequence: Synthetic coding sequence
  source 1..723: mol_type = other DNA
gccatcggcagcttccactgcggctgcgagcccggctaccagctgaagggacgaaagtgcatggatgtgaacgagtgtcgccagaacgtctgtcggcccgatcagcactgcaagaacaccagaggtgggtataagtgtattgacctctgccccaatggcatgacaaaggccgagaacggcacgtgtattgacatagacgagtgtaaagacgggacacaccagtgtcgttacaaccagatatgcgaaaatacccgggggtcataccgctgcgtgtgccctagggggtatcggagtcagggcgtggggagaccctgtatggatattgatgaatgcgaaaacacagatgcttgccagcatgagtgcaaaaatactttcgggagctaccagtgcatctgtcctccaggataccagctcacgcacaacggaaaaacctgtcaggatatcgacgaatgtctggagcagaacgttcactgcggccccaaccgaatgtgctttaatatgcgcgggagttaccagtgcatcgataccccctgcccacccaactatcaacgggacccagtgagcgggttttgcctgaagaactgtccacctaatgatctggaatgcgcacttagcccttatgccctcgaatataaactggtgtcactccctttcggcatcgccactaatcaggacctcatccgcctggtcgcatatactcaggacggagtgatgcacccatag

SEQ ID NO: 190473 - DNA, 1455 bp, synthetic construct
  misc_feature 1..1455: note = Description of Artificial Sequence: Synthetic coding sequence
  source 1..1455: mol_type = other DNA
atggacctgggcaaggaccagagccacctgaagcaccaccagacccctgatcctcaccaggaagagaatcactctcctgaggtgatcggtacatggtctctgcgaaaccgtgagctcctgaggaagcgcaaagcagaggtccacgagaaggaaacctctcagtggctcttcggagaacagaagaaacggaaacaacagaggaccggaaaggggaataggagggggcgaaaacgccagcagaataccgaattgaaagtcgagccccaacctcagatcgagaaggagatcgtcgagaaggcattagcccccattgagaaaaagactgagccaccagggagtatcaccaaggtcttcccctccgtagctagtccccagaaagtggtgcctgaggagcatttttcagaaatctgccaggaatcaaacatctaccaggaaaatttctctgaataccaagaaatagcggtccagaaccatagtagcgaaacctgccagcacgtgtccgagccagaggatctgtccccaaaaatgtaccaggaaatttcagtgctacaagacaacagctcaaaaatctgtcaggacatgaaggagcctgaggacaacagtccaaatacctgtcaggtcatctccgtcatccaagaccatcctttcaagatgtaccaggatatggcaaaaagagaagacttggccccgaagatgtgtcaagaggccgccgtccccaaaatcctcccttgcccaacctcagaagatacagctgatttggcaggatgctcacttcaggcttaccctaagcctgacgtccccaaaggctatattctggacacagaccagaatcctgctgaaccagaagagtacaacgaaactgaccagggcattgctgagactgaaggactgtttcctaagattcaggaaatcgccgaacctaaagatctatcaaccaagacccatcaggagagtgcagaacccaagtacttgcctcacaaaacttgcaacgaaatcatcgtccccaaggctccttcccataagaccatccaggagacgccacactcagaagattactcaatcgaaattaaccaagagactccagggagtgaaaagtactctcctgagacgtaccaggagattcctgggctcgaagagtacagccccgaaatctatcaggaaacctcccagctggaagagtactccccagaaatttatcaagaaacccccgggcctgaggacctgagcaccgagacatacaaaaacaaggacgtgccaaaagagtgcttccccgaaccacaccaggaaaccggaggcccacagggacaggaccccaaggcccatcaggaagacgcgaaagacgcctacacattcccacaggagatgaaggagaagcctaaggaggaaccagggatacctgccattcttaacgaatcccaccctgagaatgatgtttatagttacgtgctgttttag

SEQ ID NO: 190474 - DNA, 1455 bp, synthetic construct
  misc_feature 1..1455: note = Description of Artificial Sequence: Synthetic coding sequence
  source 1..1455: mol_type = other DNA
atggacctgggcaaggaccagagccacctgaagcaccaccagaccccggaccctcaccaggaggagaatcattctccagaggtgatcgggacctggtcccttagaaatcgtgagttgctgcgcaaaagaaaagccgaggttcatgagaaggagacctctcagtggctgtttggggaacagaagaaacgcaagcagcagcgaaccggcaagggaaacaggcgggggcgtaaaaggcagcaaaacacagagctgaaggttgaacctcagccacagattgagaaggagatagtggaaaaggctctggctcccatcgagaaaaaaaccgaacccccaggcagcatcacaaaggttttcccttccgtcgctagtccacaaaaagtggtcccagaggaacacttcagtgaaatctgtcaggagtcaaatatctatcaggagaattttagtgagtaccaggagatagccgtgcagaaccatagttccgagacatgtcagcacgtaagtgaaccagaagacttatcgcctaagatgtatcaggagatctctgtcctgcaggacaactctagcaagatttgccaagatatgaaggagcccgaggataatagtccgaatacctgccaggttattagcgtgattcaggaccacccattcaaaatgtaccaagacatggcaaagcgggaagacttggcacccaagatgtgtcaggaggccgctgtgcccaaaatactgccctgtcccacgagcgaagacacagctgacttagccgggtgctctcttcaggcttacccaaagccagacgttccgaaggggtatattctggacaccgatcagaaccccgcagaacctgaggagtataatgaaactgatcagggcatcgctgagacagagggcctattcccaaaaattcaggaaatagcagagcctaaggatctgtcaaccaagacccatcaggaaagcgccgaaccaaaatacctaccccacaagacttgtaacgagattatcgtcccaaaagcgccatcccacaagacgattcaggaaactcctcacagcgaagactatagcatagagataaatcaggaaacaccaggctccgaaaaatattcccccgagacgtaccaggagatccccggcctcgaagagtacagtccagagatctaccaggagacctcgcagctggaggaatatagcccagaaatttatcaggaaacgccaggccctgaggacttaagcaccgagacttataagaataaggacgtacccaaggagtgctttccagagcctcatcaggagaccgggggcccacagggccaagatcctaaggcacaccaggaggacgcaaaggacgcctatacattcccacaggaaatgaaggagaaacctaaagaagagcccggtatccccgcaatactgaacgaatcgcacccagaaaatgatgtttattcatatgtgttgttctag

SEQ ID NO: 190475 - DNA, 429 bp, synthetic construct
  misc_feature 1..429: note = Description of Artificial Sequence: Synthetic coding sequence
  source 1..429: mol_type = other DNA
atggtgctgagccccgccgacaagaccaacgtgaaggccgcctggggcaaagtgggtgcccacgctggagaatacggggccgaggctttagagcgaatgtttctgtcttttccgacaaccaaaacatactttcctcacttcgatttgagtcacggcagcgcccaggtgaaggggcatgggaagaaagtcgccgatgccctgacaaacgccgtcgcgcatgtggatgacatgcctaatgccctatcagcgttgtcagaccttcacgcgcacaagctgcgtgttgatccagttaactttaagttactgagtcactgtctcttggttacccttgctgcccatctgcctgccgagtttactccagcggtccacgcctcccttgacaagttcctggcttccgtgtcaacagttctgaccagtaaatacagatag

SEQ ID NO: 190476 - DNA, 429 bp, synthetic construct
  misc_feature 1..429: note = Description of Artificial Sequence: Synthetic coding sequence
  source 1..429: mol_type = other DNA
atggtgctgagccccgccgacaagaccaacgtgaaggccgcctggggaaaggtgggggcccacgcgggcgaatacggcgccgaggccctcgagaggatgttcctgagctttcccactactaagacctacttcccccatttcgacctttcccacggcagcgcgcaggttaagggccatgggaaaaaggtagcagatgctctcactaacgctgttgctcacgtagacgacatgccaaacgctctgtcagctctttccgacctgcatgcccataagttacgggtggacccagtgaatttcaaattgctaagtcactgtttgcttgtgactcttgcggcccatctacccgctgagttcacccctgctgtgcacgccagtctcgacaagtttctggcctccgtcagtacggttctgacaagtaagtaccggtag

SEQ ID NO: 190477 - DNA, 333 bp, synthetic construct
  misc_feature 1..333: note = Description of Artificial Sequence: Synthetic coding sequence
  source 1..333: mol_type = other DNA
atgttcctgagcttccccaccaccaagacctacttcccccacttcgacttatctcatggctcagcacaagtgaaaggtcatggcaaaaaggtggctgacgccctaacaaacgccgttgcacacgtggatgacatgcccaacgccttatcagcactgtcggacttacatgcgcacaaacttagggtggacccggtgaactttaaactgctgtctcattgtttactcgtcacactcgcggcgcatcttccagcggagtttacaccagctgtgcatgcgagtctcgacaagttcctggcgtctgtcagtactgttctgaccagtaaatataggtag

SEQ ID NO: 190478 - DNA, 444 bp, synthetic construct
  misc_feature 1..444: note = Description of Artificial Sequence: Synthetic coding sequence
  source 1..444: mol_type = other DNA
atggtgcacctgacccccgaggagaagagcgccgtgaccgccctgtggggaaaagtgaacgtggatgaggtgggcggggaggctctgggccgcctacttgttgtgtatccatggactcaacggttcttcgagtcctttggcgatctaagcacgcccgatgctgtcatgggaaacccgaaagttaaagcccacggaaaaaaggtactgggggctttctccgatgggctggctcatctcgataatttaaaggggacattcgctaccctgtctgagctccactgtgacaaactgcatgtcgacccagagaactttaggcttctgggaaatgtgctagtgtgtgtgctggcccaccacttcggtaaggaatttactccaccggtgcaggctgcttatcagaaagttgtggctggagtagctaacgccttggcacacaagtatcactag

SEQ ID NO: 190479 - DNA, 273 bp, synthetic construct
  misc_feature 1..273: note = Description of Artificial Sequence: Synthetic coding sequence
  source 1..273: mol_type = other DNA
atggtgcacctgacccccgaggagaagagcgccgtgaccgccctgtgggggaaagttaacgtggatgaggtggggggagaggcattgggccgcttgctagtagtgtacccttggacgcagcgattcttcgagtcatttggagatctttccactcctgatgccgtgatgggaaacccaaaggtgaaggcccatgggaagaaggtcttgggcgccttcagcgatgggctggcacaccttgataaccttaaaggcacttttgcaacgcttagttag

SEQ ID NO: 190480 - DNA, 426 bp, synthetic construct
  misc_feature 1..426: note = Description of Artificial Sequence: Synthetic coding sequence
  source 1..426: mol_type = other DNA
atggtgcacctgacccccgaggagaagaccgccgtgaacgccctgtgggggaaggtgaatgttgacgccgtgggcggggaagccctaggaaggctgctggtagtgtacccgtggacccaacggttctttgagtcttttggcgacctgtctagtcctgatgccgtcatgggcaacccaaaggtgaaggcgcatggcaagaaggtgcttggggctttctcggatggccttgcccatctggacaacctaaaggggactttctctcagctgagcgaactgcattgcgacaagctacacgtcgaccccgagaacttccgcgtgtgtaagaaggtcccggaggctttacagatcggctctacatgtctgttctacaaggagtatatgggcaaggaaaaaagcaagggtacagttcagggaataaatgggtag

SEQ ID NO: 190481 - DNA, 444 bp, synthetic construct
  misc_feature 1..444: note = Description of Artificial Sequence: Synthetic coding sequence
  source 1..444: mol_type = other DNA
atggtgcacctgacccccgaggagaagaccgccgtgaacgccctgtgggggaaggtgaacgtggatgccgttggaggtgaggcactcggacggctgcttgtggtctacccgtggacacagcgtttcttcgagagctttggagatttgagttcacccgacgcagtgatgggaaaccccaaagtgaaggctcatggtaaaaaggttctcggagcctttagcgacggactggcgcatctggacaatctgaaggggacattctcccagcttagtgaactgcactgtgacaaattgcacgtagaccctgaaaactttcggctgctgggaaatgtcctggtgtgtgtgttagccaggaattttggaaaagaattcactccccaaatgcaggcagcataccaaaaggtggttgctggcgttgccaatgccctggcgcataagtatcactag

SEQ ID NO: 190482 - DNA, 315 bp, synthetic construct
  misc_feature 1..315: note = Description of Artificial Sequence: Synthetic coding sequence
  source 1..315: mol_type = other DNA
atggtgcacctgacccccgaggagaagaccgccgtgaacgccctgtggggcaaagtgaacgtcgacgctgtgggaggcgaggctttgggcaggctgctggttgtgtacccctggacacagcgtttttttgaatcctttggagacctgagcagccccgatgcagtgatgggcaatcccaaagtgaaagcgcacggtaagaaggtgctcggcgcctttagtgacggactggcacatctcgacaatcttaaaggaaccttttcccagttgtcagaactccattgcgacaagctgcatgtggatcccgagaatttttag

SEQ ID NO: 190483 - DNA, 444 bp, synthetic construct
  misc_feature 1..444: note = Description of Artificial Sequence: Synthetic coding sequence
  source 1..444: mol_type = other DNA
atggtgcacttcaccgccgaggagaaggccgccgtgaccagcctgtggtcaaagatgaatgtagaagaagccggtggagaagcccttggaaggttgttggtggtgtacccatggacccagcgcttcttcgattcctttggaaatctgtcctcccccagcgcaattctcggcaacccaaaagtgaaggcgcacgggaagaaagtacttacttcttttggagacgccataaaaaacatggacaatctaaaaccggcttttgcaaaactctctgaacttcactgcgataaattgcatgtcgaccctgaaaatttcaaactgttgggaaacgtgatggtaattattctagcaacccacttcgggaaagaatttacgccagaggtgcaggccgcctggcagaagttggtcagcgctgtggcaattgccctggcccataaataccactag

SEQ ID NO: 190484 - DNA, 444 bp, synthetic construct
  misc_feature 1..444: note = Description of Artificial Sequence: Synthetic coding sequence
  source 1..444: mol_type = other DNA
atggtgcacttcaccgccgaggagaaggccgccgtgaccagcctgtggtcaaagatgaacgtggaagaggctggcggagaagcgctgggccgcttactggttgtgtatccctggactcagagatttttcgacagtttcggaaatctttctagcccctcagccatcctgggtaaccccaaggttaaagcacacggcaaaaaagtgctcaccagtttcggcgacgctataaaaaacatggataatcttaagcctgcttttgcaaaattgtccgaattgcactgcgacaagttgcacgtagatcctgagaactttaaactgctcggaaacgtgatggtgatcatcctggccacccactttggcaaggagttcacccctgaggtgcaggctgcctggcagaagctcgtctcagctgtagctatagccctcgcacacaaataccactag

SEQ ID NO: 190485 - DNA, 264 bp, synthetic construct
  misc_feature 1..264: note = Description of Artificial Sequence: Synthetic coding sequence
  source 1..264: mol_type = other DNA
atggtgcacttcaccgccgaggagaaggccgccgtgaccagcctgtggagcaagatgaacgtcgaggaggccggtggcgaagccctgggcagactactggtggtgtatccttggacgcagaggttttttgattcttttggaaatttgtcatctcctagcgctatcctgggtaatcccaaggtgaaggcacacggtaagaaagttctgacatcttttggggacgctattaagaacatggataatttgaaaccagccttcgcctag

SEQ ID NO: 190486 - DNA, 444 bp, synthetic construct
  misc_feature 1..444: note = Description of Artificial Sequence: Synthetic coding sequence
  source 1..444: mol_type = other DNA
atgggccacttcaccgaggaggacaaggccaccatcaccagcctgtggggcaaagtgaatgtcgaagacgcaggaggtgagaccttggggcgcttactagtggtgtatccctggactcaaaggttttttgattcattcggaaatctatccagcgcaagcgccatcatgggaaaccccaaggtgaaagcccacggcaaaaaggtgctcacctctctgggagatgcaacgaagcacctggacgatttaaagggaaccttcgcccagctgtcagagttgcattgtgacaagttacatgtcgacccagaaaattttaagctactcgggaacgtgctggtgacagtactggccattcatttcgggaaagagttcacccccgaagtgcaagccagttggcagaaaatggtgactgcagtggcttccgcgcttagttcccggtatcattag

SEQ ID NO: 190487 - DNA, 444 bp, synthetic construct
  misc_feature 1..444: note = Description of Artificial Sequence: Synthetic coding sequence
  source 1..444: mol_type = other DNA
atgggccacttcaccgaggaggacaaggccaccatcaccagcctgtggggcaaggtaaacgttgaggacgcaggtggtgaaactctgggtcgcctgctggttgtctacccatggacccaacgctttttcgactccttcgggaatcttagtagtgcatccgccatcatgggaaaccctaaggtgaaggcacatgggaagaaggtacttacaagtctgggcgatgccatcaaacatctcgacgatctcaaaggaaccttcgcccaactttcggagctgcactgtgataagcttcacgtggatccagaaaactttaaactgctgggtaatgtccttgttactgttctcgcaattcattttggtaaggagtttacaccagaagtgcaggccagttggcaaaaaatggtgaccggggtagctagtgccctttccagtcgatatcattag

SEQ ID NO: 190488 - DNA, 477 bp, synthetic construct
  misc_feature 1..477: note = Description of Artificial Sequence: Synthetic coding sequence
  source 1..477: mol_type = other DNA
atgggccacttcaccgaggaggacaaggccaccatcaccagcctgtggggcaaagtgaatgtggaggatgctgggggggagacactcgggcgcctcctggtggtgtatccctggactcagcgatttttcgattccttcggcaatctctcttccgcaagcgctattatggggaatcctaaggtgaaggctcatggaaaaaaggtgctgaccagccttggcgatgcaatcaagcacctcgacgacctgaagggtacttttgctcagcttagcgagctgcattgcgacaagttacatgtggatcccgagaacttcaaactgcttggcaatgtcctggtgaccgtgctggccatccacttcggcaaagaattcacaccggaggttcaggcatcatggcagaagatggactggagtggtcaatgtccagtacttcagatccctctgtcttcattgcccatgatgcagagctttcaaggatag

SEQ ID NO: 190489 - DNA, 414 bp, synthetic construct
  misc_feature 1..414: note = Description of Artificial Sequence: Synthetic coding sequence
  source 1..414: mol_type = other DNA
atggtggtgctgggcgagatgaagcggaaggtgctgcccctgcactttctgcctttcatgcggctgctggtcgtgtacccatggacccaaaggttttttgactccttcggcaaccttagcagtgcaagtgctatcatgggaaatcccaaagtcaaggctcatgggaaaaaagtcttgacatcgctgggtgatgccattaagcacttggacgatttaaagggaacgttcgcccagctgtccgagctgcactgtgataaattacatgtggatcctgaaaactttaaactgcttggaaacgtattggttaccgttctggcgatccactttggcaaagagtttacccccgaggtccaagctagttggcagaaaatggttaccggggtggcatcagccttatcctccagatatcactag

SEQ ID NO: 190490 - DNA, 444 bp, synthetic construct
  misc_feature 1..444: note = Description of Artificial Sequence: Synthetic coding sequence
  source 1..444: mol_type = other DNA
atgggccacttcaccgaggaggacaaggccaccatcaccagcctgtggggtaaagtcaatgttgaagatgctggcggagagaccctcggacgcctcctggtggtttacccctggacacagaggtttttcgacagttttgggaatcttagttcagcttccgctatcatgggaaatcctaaggtgaaggctcatggtaagaaagtcctgacctctctcggcgatgctattaagcacctcgatgatctgaaaggcacgtttgcgcagctcagtgagctgcactgcgacaagctgcatgtggaccccgaaaatttcaagctgctgggaaacgtcctggttacagtactggccattcacttcggcaaagagttcacccctgaggtgcaagccagctggcagaagatggtaacgggcgtagcctccgctctttcctctcggtatcattag

SEQ ID NO: 190491 - DNA, 426 bp, synthetic construct
  misc_feature 1..426: note = Description of Artificial Sequence: Synthetic coding sequence
  source 1..426: mol_type = other DNA
atgctgagcgcccaggagcgggcccagatcgcccaggtgtgggacctgatcgctgggcatgaagcccagttcggagcggagttgctcctgcggttgttcaccgtttacccatccactaaagtctactttccccacctgagtgcctgtcaggacgcgacccagcttctttctcatggacagcgcatgttggccgcggtaggagccgctgtccagcacgtagataatctgagggctgcactctcccccctggcggacctgcacgcactagtactgcgcgtagacccagccaacttccccctgctaattcaatgttttcacgttgtcctggcatcccatctccaagacgagtttaccgtgcagatgcaagccgcttgggacaaattcctgacgggggtcgctgtggtgttgacagaaaaatatcgatag

SEQ ID NO: 190492 - DNA, 429 bp, synthetic construct
  misc_feature 1..429: note = Description of Artificial Sequence: Synthetic coding sequence
  source 1..429: mol_type = other DNA
atggccctgagcgccgaggaccgggccctggtgcgggccctgtggaagaagttaggtagcaacgtgggggtgtacaccaccgaggccctcgagaggacgttcctcgccttcccggcaactaaaacctattttagccatttagacctaagtccaggaagcagccaggtgcgagcgcatggacagaaagtcgccgatgcactatccctcgccgtggagcggctcgacgacctgcctcatgctctcagcgccctgagccacctacacgcctgccagttaagggttgaccccgcttcattccagctgcttgggcactgtctgctcgtcaccctggctcgccactaccctggagatttctcacccgccctgcaggcttccctggacaagttccttagtcacgttattagtgccctggtctcagagtataggtag

SEQ ID NO: 190493 - DNA, 429 bp, synthetic construct
  misc_feature 1..429: note = Description of Artificial Sequence: Synthetic coding sequence
  source 1..429: mol_type = other DNA
atgagcctgaccaagaccgagcggaccatcatcgtgagcatgtgggccaagatcagtacccaggccgacaccattggcaccgaaactttggagaggctgtttctcagtcacccacagaccaaaacatattttccacattttgacctgcacccagggagtgctcagctgcgggcacacgggtcaaaggtggttgccgccgttggagacgctgttaaatctatcgatgacataggcggagcgctcagcaagctctctgaactccatgcttacatccttcgggtggaccctgtgaactttaaattgctctctcactgtctgctagtgacccttgcagctcgcttcccggccgattttaccgcggaggcacatgcagcttgggacaagtttcttagcgtcgtgagtagcgtgctcacagaaaagtaccggtag

SEQ ID NO: 190494 - DNA, 1389 bp, synthetic construct
  misc_feature 1..1389: note = Description of Artificial Sequence: Synthetic coding sequence
  source 1..1389: mol_type = other DNA
atggcccgggtgctgggcgcccccgtggccctgggcctgtggagcttgtgctggtccctcgcgatcgcaacaccactgccccctacctcagctcacggaaacgttgcagaaggagagaccaagccggaccccgacgtcacggaaaggtgcagcgacggctggtcattcgatgctaccaccctagacgacaatggcaccatgctcttctttaagggggagttcgtgtggaagtctcacaagtgggaccgcgagcttatctcagaacgttggaagaatttccccagtcctgtggacgctgctttcaggcagggccacaattccgtgttcctcattaagggagacaaagtgtgggtgtatccacctgaaaaaaaggaaaagggctaccctaagcttctccaggatgaattcccaggcataccaagccctctggatgctgccgtagagtgtcatcgcggggaatgtcaagcggaaggggtgctcttctttcagggagatcgcgagtggttttgggacttggccactggcactatgaaggaacgaagttggcctgccgtggggaactgttcttcagctcttcgctggctcggccgctattactgcttccaagggaaccagttcctccgtttcgatcctgtacgcggcgaagtccctccaagatacccacgggacgtgagggattattttatgccttgtccaggcaggggacacggccaccgtaatggcaccggccacgggaacagcactcaccacgggcctgagtacatgagatgcagccctcaccttgtcctgagcgccctgacttccgacaatcacggcgcaacctacgcgttcagcgggactcattattggcgattggacacctctcgcgacggctggcactcctggcccatcgctcaccagtggcctcagggacccagtgccgtcgatgcagcattttcgtgggaagagaaattataccttgtccaaggaacccaggtatacgtgttcctgaccaagggcggctatacactggtatctggttaccccaagaggctggaaaaagaagtcggcactccacatggaataatactcgactcagtcgacgcggcgttcatttgtcccggtagtagccgccttcacatcatggctggacgccgactttggtggctcgatctgaaaagcggcgcacaggccacctggacagagctgccctggccccatgagaaggtagacggcgcgctgtgtatggaaaagagcctcggccccaactcctgcagcgccaatgggcccggactgtacttgattcacggaccgaatctctactgctactcggatgtggagaagcttaatgccgccaaggccctaccgcagccacagaacgtgacaagtttgctgggatgcacccactag

SEQ ID NO: 190495 - DNA, 765 bp, synthetic construct
  misc_feature 1..765: note = Description of Artificial Sequence: Synthetic coding sequence
  source 1..765: mol_type = other DNA
atggcccgggtgctgggcgcccccgtggccctgggcctgtggagcctgtgttggtcactggcgatcgccacgcccctgcctcctaccagcgctcatgggaatgttgctgagggagaaactaagcctgaccctgatgtgaccgagaggtgttctgatggttggtcattcgacgccactacattagatgataacggaaccatgctgttctttaagggcgagtttgtatggaagagccataagtgggacagagagctcatctctgagagatggaagaatttccccagtccagttgatgcagcctttcgtcaagggcacaattccgtcttccttatcaagggagataaggtttgggtgtacccaccagaaaagaaggaaaaaggttatcccaagctgctccaggacgaatttcctgggataccgagccccctcgatgccgctgtggagtgccaccgcggtgagtgtcaggctgagggtgttctcttttttcaaggagacagagaatggttttgggacctggccacaggaaccatgaaagaaaggtcctggcctgctgtggggaactgcagcagcgctctcagatggttggggcgatattactgcttccagggtaatcagttcctgcgctttgatcctgttcggggcgaggtcccgcctcgctacccccgggacgtgcgggattacttcatgccttgccccggccgagggcatggccaccgaaacggcaccggtcatggcaattcaatttgcgcagtcgcccacatttag

SEQ ID NO: 190496 - DNA, 1353 bp, synthetic construct
  misc_feature 1..1353: note = Description of Artificial Sequence: Synthetic coding sequence
  source 1..1353: mol_type = other DNA
atgtggctgaaggtgttcaccaccttcctgagcttcgccaccggcgcttgcagtggattaaaagttaccgtcccaagccatacagtgcacggggtgcgtgggcaggcactatatctcccagttcattacgggttccacacgccagctagcgatatccagatcatttggctttttgagcggccgcatacaatgccgaagtatttgctgggtagcgtgaacaaatctgtcgtgcctgacctcgaataccagcataaattcaccatgatgccgccaaatgcctcactgctgattaacccattgcagttccccgatgagggcaactacattgttaaagtcaatatccagggcaacggtacactgagcgcctcccagaagatccaggtcacagtggatgatcctgtgacaaagccggtggtccagattcaccccccatctggcgccgtggaatacgtcggcaacatgacactcacatgccatgttgagggtggtacaaggctggcttatcagtggttgaaaaacggacgtccagttcacaccagttccacatacagtttcagtccgcagaataacactctccacattgctccagttaccaaagaggacattggaaactactcatgcctcgtgcgtaatcccgtctcagagatggagtcagatataattatgcccattatttattatggcccatacggtttacaggtaaactctgacaaggggctgaaggtgggagaggtttttaccgtggatcttggggaggccatccttttcgattgcagcgctgacagccacccacccaatacatacagctggattcgtcgaacagacaatactacatacataatcaagcacggcccccgcctcgaggtggcttcagaaaaggtagcccaaaaaactatggactacgtgtgctgcgcctacaacaacatcaccggaagacaggacgaaacgcacttcacagtaattatcacctcagttggcctggagaagctcgctcagaagggtaaatcactatctcccctggctagtatcaccgggatctccctcttcctgattattagcatgtgcctactgtttctttggaaaaagtaccagccttacaaggtgatcaagcagaagttggaggggagaccagaaacagagtacaggaaggcccagacattttccggacacgaggatgccttggatgatttcggtatttacgagtttgtcgcattccccgacgtcagcggcgtgtcacggatccccagcaggtcagttcctgccagcgattgcgtgtctgggcaggaccttcactccactgtgtacgaggtcattcaacacattcccgcccaacagcaggatcatccagagtag

SEQ ID NO: 190497 - DNA, 1389 bp, synthetic construct
  misc_feature 1..1389: note = Description of Artificial Sequence: Synthetic coding sequence
  source 1..1389: mol_type = other DNA
atgggccaggacgccttcatggagcccttcggcgacaccctgggcgtgttccaatgcaaaatttacctcctgctgttcggggcttgctctgggctgaaggtgactgtgccctcccacactgtgcatggcgtcagaggtcaggcattgtacctgcccgtgcactacggatttcacacacctgcatctgatatacagattatctggctctttgaacgacctcatacaatgccaaagtatctacttggaagcgtgaacaaaagtgtggttcctgatttggaatatcagcacaagtttactatgatgcctcccaatgctagtttgctcattaaccctttacagtttccggacgagggaaactatattgttaaggttaacatacaggggaacgggactctgtccgcttcccagaagatccaggtcacggttgacgaccctgttaccaaaccagttgtacagatccaccctccttctggtgcagtcgagtacgtaggaaacatgactcttacatgccatgtagagggaggaacaagactcgcataccagtggctaaaaaatggtcggcccgtccacacatcatctacgtactcattctctccgcaaaacaatacgctgcatattgcacctgtcacaaaggaagacatcggcaattactcttgtctagtgcgcaaccctgtgtccgaaatggagtccgacatcatcatgcccattatctactacggaccctacggcttacaagtgaacagtgacaagggtctgaaggtgggggaggtttttaccgtcgacctgggtgaggcaatcctttttgactgctctgctgacagccacccacctaacacttactcttggatccgcaggaccgataatacgacctatatcatcaagcatggacctagactcgaagtggcttcggagaaggttgcccaaaagaccatggactatgtgtgctgcgcctacaataatatcactggacgccaggacgaaacacattttactgtgattatcaccagtgtgggactcgagaaactcgcccaaaagggcaaatctctttcacctttagcctcaataactggaatatctctgtttttgattatctcaatgtgtctgctgtttttgtggaaaaagtaccagccttacaaggttattaagcagaaacttgagggtcgtcccgagaccgaatatcgtaaagcccaaactttctctgggcatgaagacgcgttagacgattttggaatttatgagtttgtcgctttccctgatgtctcgggcgtgagtcgcattccaagtcggtccgttcctgcttctgactgtgtttcgggacaggacctccatagtaccgtctacgaagtgattcaacacattccggcccagcagcaggatcaccccgagtag

SEQ ID NO: 190498 - DNA, 1104 bp, synthetic construct
  misc_feature 1..1104: note = Description of Artificial Sequence: Synthetic coding sequence
  source 1..1104: mol_type = other DNA
atggcctaccgggtgctgggccgggccggccccccccagccccggcgtgctaggcgcttgcttttcgccttcacgctctctttaagttgcacatacctctgctatagctttctatgctgctgcgacgatctgggccgcagcaggctgctaggggcaccccgctgtcttaggggcccctctgcggggggacagaagctgttgcagaagtccagaccctgcgacccatccggacctactccatctgagcctagcgcccccagtgcacccgccgccgctgtgcctgctccccggttatcagggtccaatcactccggatctcctaagctggggactaagcggcttccacaggcactgattgttggggtaaaaaaaggtggcacacgagcagtgctggaatttataagggtacaccccgatgttcgagccttgggaacggagccccatttctttgacagaaactatggccgcggcctcgattggtatcgcagccttatgccacgaacgctcgaaagccagatcacactggaaaaaacccctagctattttgtcactcaagaggctcctagaagaatatttaatatgagcagagacaccaagctgattgtggtggttaggaatccggtaactcgggctataagtgattatactcagacattgtctaaaaagccagatatccctacctttgaggggctttcttttagaaatcgaaccctcgggttggtggacgtatcttggaatgctattcggatcggcatgtacgtcttacatctggaaagctggttacagtacttccctctggcccagattcacttcgtgtcaggggaaaggctgattacagaccccgcaggcgagatgggaagagtgcaggattttttgggcatcaaacgctttataacagacaagcacttttacttcaataagacaaaaggctttccctgcctgaaaaagaccgaatccagtttgcttcctcgctgtctgggcaaatccaaggggaggactcatgtgcagatagatcctgaagttatagatcagctgagggagttttacagaccttacaatatcaaattctatgagacggtgggtcaagatttcaggtgggaatag

SEQ ID NO: 190499 - DNA, 1035 bp, synthetic construct
  misc_feature 1..1035: note = Description of Artificial Sequence: Synthetic coding sequence
  source 1..1035: mol_type = other DNA
ccccccgcccgggcccacggcgccatggcctaccgggtgctgggcagagccggcccccctcagcctcgtcgggctcggcgcttactgttcgcattcacactgagcctgtcctgtacatatctttgctattcatttctgtgttgctgtgacgatttgggcagatccagacttcttggggcacctagatgtctgaggggcccaagtgccggcggtcaaaagctacttcagaaaagtcgcccctgcgaccccagcgggccaactccttcggagccatcggccccgagcgcccccgcagccgctgttcccgccccccgcctcagcgggtcaaatcactcgggcagtccaaagttgggaaccaaacgcctcccccaggccctgatcgtcggagttaaaaaggggggtacccgggccgtcctagagtttatacgagtgcatcctgatgtgagagcattggggacagaacctcattttttcgaccggaactacggtagagggctggattggtacaggagcctgatgccccgcacactcgaatcccagatcacactggagaagactccttcctacttcgtgacgcaggaggcgcctaggagaatcttcaatatgtcaagagacacgaagctgatcgtcgttgtccggaacccggtcacccgggccatttctgattatacacagactctcagcaaaaaacccgatatcccaactttcgagggcttaagctttcggaacagaaccttaggactggtcgacgtgtcttggaacgccataaggattggaatgtatgttttacatctggaaagctggcttcagtatttccctctggcgcaaattcattttgtgtcaggggaaagactgattactgacccagctggcgagatgggaagagtccaagactttcttggtattaaaagattcatcaccgacaaacatttttactttaacaagaccaaaggtttcccctgcttaaaaaacagaatcgaaccacccgcctccatgctcgggcagattaaacgagagaactcttgcactgactag

SEQ ID NO: 190500 - DNA, 1221 bp, synthetic construct
  misc_feature 1..1221: note = Description of Artificial Sequence: Synthetic coding sequence
  source 1..1221: mol_type = other DNA
atggccccccccggccccgccagcgccctgagcaccagcgccgagcccctttccaggtctatcttccgaaagttcctgctgatgctgtgcagccttctcacatcactgtacgtcttctattgtctcgccgagaggtgccagacgctgtcaggacccgtggtgggattgtccggcggcggagaggaagccggggcgcctggagggggggtcctggcaggtggcccccgagagttggcagtatggcctgctgctgctcagcgcaagcgcctcttacaactccctcaatggaggcgtcggaggcctccggcacctagggatgacggcgaagaagcagcctgggaggaagagagcccaggtctctcaggcgggcctgggggcagcggtgcgggtagcacagtggcagaagctccgccaggcacactcgccctgctgttggatgaaggcagcaaacaactcccccaggccatcatcatcggcgtgaagaagggggggacccgagcactgttagaatttctgagagtacacccggacgtccgagcagtcggcgctgagccccatttcttcgaccgcagctatgataaaggacttgcctggtacagagacctcatgccaagaactcttgatggtcagattactatggaaaagactccatcctactttgtgaccagagaagcccctgcccgcatttctgccatgtcaaaggatacgaagctcatcgtggtcgtccgagaccccgtcactcgggctatttccgattacacccagacactcagcaaaaggcccgatataccgaccttcgagagcctcaccttcaaaaatcgaacagcgggattgattgacacgtcttggtcagcgattcaaattggcatctacgccaaacacctggagcactggttgaggcactttcctatcaggcaaatgctcttcgtgagcggggagaggctcatcagtgatcccgcaggcgaattgggcagggtccaggattttctaggcctgaagcgcataattacggataagcacttttattttaataagacaaaggggtttccatgtctgaaaaaggccgagggcagttcaaggccacactgtctggggaagactaaggggaggactcacccagagattgaccgggaggttgtgagacgcctccgtgaattctacaggccttttaatctgaagttttatcagatgaccggacatgatttcggctgggatggctag

SEQ ID NO: 190501 - DNA, 1173 bp, synthetic construct
  misc_feature 1..1173: note = Description of Artificial Sequence: Synthetic coding sequence
  source 1..1173: mol_type = other DNA
atgggccagcggctgagcggcggccggagctgcctggacgtgcccggccggctcctgcctcaaccccccccgccccctccccctgtgaggagaaagctcgctcttttattcgcaatgctgtgcgtttggctttatatgttcctgtacagctgcgctggctcttgcgccgcggctccaggtctcctgctgctggggtcaggctcccgcgcggcccacgatccacccgcgctcgccacagctcctgatggaactcccccacgcctgccatttcgggctccacccgctacccccttggcctccggcaaagaaatggcggagggagccgcgagcccagaggaacagtccccagaggtcccggattcgccctcaccaatttcttccttcttctccggctcggggagcaaacagctcccccaggccatcatcattggggttaagaaaggtggcacccgcgcgttgctggaattccttcgagttcatccggacgtccgcgcagtgggggctgaaccacacttcttcgaccgctcttatgataaaggtcttgcatggtacagagatctcatgccacggacgcttgatggacaaattacaatggagaagaccccttcatattttgtaaccagggaagcccccgctaggattagtgccatgtctaaagacaccaagctcatcgttgtggtgagggatccggttacaagggctatatctgattacacacaaacactttctaagcggccagacatcccaactttcgaatctcttacattcaaaaaccgaactgcaggtctgattgatacatcctggtcagccattcagatcggcatctacgccaagcatctggagcattggcttagacatttccccatacgccagatgctctttgtgagcggggagcgcctgatcagcgacccagctggagagctcggacgagtccaagacttcttaggcttaaaaaggatcatcactgataagcacttctatttcaataagactaagggatttccgtgtttaaagaaagcagaaggaagcagtcgacctcattgtctagggaaaaccaaaggccgtactcacccggagatcgatagggaagtcgtgcgaaggctccgagagttctataggcccttcaatttaaagttctaccaaatgaccgggcacgacttcgggtgggactag

SEQ ID NO: 190502 - DNA, 1173 bp, synthetic construct
  misc_feature 1..1173: note = Description of Artificial Sequence: Synthetic coding sequence
  source 1..1173: mol_type = other DNA
atgggccagcggctgagcggcggccggagctgcctggacgtgcccggtcgccttctcccacagcctcctccccctccccctcccgtgcgtaggaagcttgccctcctgtttgcaatgctttgcgtctggctctacatgtttctgtactcttgcgccgggagttgcgcagccgcgcccggacttctgctcctcgggtctgggagccgcgcagcacatgatcctccagcccttgccaccgcccctgacggcacaccccccaggctgccgttcagggcccctcccgctacgcctctcgctagcgggaaagagatggctgaaggggccgcctccccagaagaacagtctccagaggttcccgactctccttcaccgatctcctcattttttagtggttcgggctcaaaacaacttccacaggccattataattggcgtgaagaagggcggcactagggctcttttggagttcctcagagtccaccctgacgtgcgggctgtcggcgctgagccccatttcttcgacagatcctacgacaaggggctcgcctggtatcgggatttgatgccacggacacttgacggacagatcacaatggagaaaacacctagctacttcgtaaccagagaggctcctgcccgtatatctgctatgtcaaaggatacaaagctcatagtggtggtccgtgaccccgtgactagggcaatctctgattacacacagaccctctctaagcggcccgacatcccaacctttgagtcactgactttcaaaaatcgaaccgccgggcttattgacacctcctggtcggcgatccaaatagggatttacgctaaacatcttgagcactggctgcgacactttcccatcagacagatgctgttcgtttctggggaacgactgatctcagaccccgctggtgaattagggagagtgcaggattttctgggtctgaaacgaattatcactgacaaacatttctacttcaacaaaaccaaggggttcccctgtctcaagaaggctgaggggtcctcaagacctcattgccttggaaagacgaagggacgcacccatccagaaatcgaccgggaggtagtgcggaggctccgcgagttctataggcccttcaacctcaagttctaccagatgacaggccacgacttcgggtgggactag

SEQ ID NO: 190503 - DNA, 1371 bp, synthetic construct
  misc_feature 1..1371: note = Description of Artificial Sequence: Synthetic coding sequence
  source 1..1371: mol_type = other DNA
atggcccggtggcccgcccccccccccccccccccccccccccccccattggctgctcctcccccaccaggggcaagcgctaaaggacctcccgcacgtaaactgctctttatgtgtaccctttcccttagcgtgacatacctttgctattcactgctgggaggcagcgggtctttgcagtttccactggcattgcaggagtccccaggcgcagcagccgagcctcctccgtccccaccacccccttcactgctgcccactccggtgagactgggagccccatcacaacctcccgcccctccaccccttgataacgcttcacacggtgagcccccagagccaccagaacagcctgcagctccgggcacagacggttggggtctaccatcagggggaggcggcgcgcaagatgcatggctcaggactccactcgctccgagcgaaatgatcaccgcgcagtccgccttgcccgagcgcgaagcacaggagtcctcaactaccgacgaagacctggctggcaggcgggccgcaaatggatcttccgaacggggaggagcggtgtccacacccgactacggggagaagaaactaccccaggccctgattattggggtgaagaaggggggcacccgtgcgcttttggaagctatccgggtgcacccagacgtgagagccgtcggggttgagccccacttttttgaccgaaattacgaaaaaggactggagtggtacagaaatgtcatgcccaagaccctggatggacagatcactatggagaagaccccatcgtacttcgtgaccaacgaggcgccaaaacgcatccactctatggcgaaagatatcaagctaattgtcgtggtcagaaatcccgtaaccagagccatttcagattatacacagacactgagcaagaagcccgagatacccaccttcgaggtcttggcatttaagaatcggaccctggggctaatagacgcaagttggagtgctattcgaatcggcatctacgctttacatttagaaaactggctacagtatttcccactttctcagatcctgttcgtgtccggagagagattgattgtagaccctgcgggagagatggccaaggtccaggactttcttggtctgaagagagtcgtgaccgagaagcatttttatttcaataagaccaaaggcttcccttgtttgaagaagcccgaagactcatccgctccgcgctgcttaggtaagtccaaaggacggacccaccccaggatcgatccagatgtgatccaccgactccgtaagttttacaagcccttcaatctgatgttttaccagatgaccggccaagacttccagtgggaacaggaggagggcgacaagtag

SEQ ID NO: 190504 - DNA, 1041 bp, synthetic construct
  misc_feature 1..1041: note = Description of Artificial Sequence: Synthetic coding sequence
  source 1..1041: mol_type = other DNA
atgctgttcaagcagcaggcctggctgcggcagaagctgctggtgctgggatccttagccgttggctcactgctgtacctggtggcccgagtgggttcccttgatcggctacagcccatctgtccaatcgaaggaaggctgggcggtgcacgaacgcaggccgaattccccctccgggctttgcagttcaagcgtggactcctgcatgagttcaggaagggaaatgcatcaaaggagcaggtaaggctccacgacctggtgcagcaacttccaaaggcaatcatcataggagtgcgcaagggcggaacccgagctctcctcgagatgctgaacctccaccctgcagtcgttaaggcctcgcaggagatacacttttttgacaacgatgagaactacggtaaaggcatcgagtggtaccgaaagaagatgccttttagttaccctcagcagattacaattgaaaaaagcccagcttattttatcacggaagaggtgccagagcgaatttataaaatgaattccagcatcaagctgctgatcattgtgagagagcctacgacgcgagctataagtgactatacccaggtgctcgagggtaaagagaggaagaataagacctactacaagtttgagaaactggccattgatccaaacacctgcgaggtgaacaccaaatataaagccgttcgtactagtatttatactaaacacctggaacgctggctgaaatattttcctatcgaacagttccatgtcgtcgacggagaccggctcatcacagagccccttccggagctgcagctggtcgaaaaattcttgaacctaccccccagaatctcccagtataatctgtacttcaacgctacaagagggttttattgcctaagatttaatatcattttcaacaaatgcctggcagggagtaaaggtagaatccatccggaggtggacccgtccgttatcactaagctgcggaaattcttccaccccttcaatcagaaattttatcaaattacggggcgaaccctgaactggccgtag

SEQ ID NO: 190505 - DNA, 1041 bp, synthetic construct
  misc_feature 1..1041: note = Description of Artificial Sequence: Synthetic coding sequence
  source 1..1041: mol_type = other DNA
atgctgttcaagcagcaggcctggctgcggcagaagctgctggtgttgggcagtttagcagtcggcagtctgctctaccttgtggcacgagtgggatccttagaccgcttacagcccatctgcccaattgagggccgattgggtggcgcccgcacacaggcagaattccccctgcgggccctccagtttaagagaggactgttgcatgagttcaggaaggggaacgcgtcaaaggaacaagtgcggttacatgacctggtccagcagctccccaaagcaattataattggcgttcggaaggggggaactcgcgccctgttagagatgctaaatctacatcccgctgtggtcaaagcatctcaggagattcatttttttgataatgatgaaaattatggcaaaggaatcgagtggtaccgcaagaagatgcctttttcctaccctcagcaaataaccattgagaagagccccgcatacttcattactgaagaagttcccgaacgcatatacaagatgaatagctctatcaagctcctcattatcgtgagggagcccacgacgcgggccatctcagactatacacaggtcctagaagggaaagagcggaaaaacaaaacctactacaagtttgagaaacttgccatcgacccaaacacatgtgaagtaaatacgaagtacaaggccgtgagaacaagtatctacacaaagcacttagaaaggtggcttaaatattttcccatcgagcagttccatgtcgttgacggagataggctgataacagagcccctgccagaactgcagctggtggaaaagttcctgaacctgccccctaggattagccaatacaacctgtactttaacgcaactagggggttctactgtcttcggtttaatattattttcaacaagtgcctggcaggtagcaaggggcgtattcatccggaagtggatcccagcgtaattaccaagctacggaaattctttcacccctttaatcagaagttctatcagattaccgggcgtacattgaactggccttag

SEQ ID NO: 190506 - DNA, 969 bp, synthetic construct
  misc_feature 1..969: note = Description of Artificial Sequence: Synthetic coding sequence
  source 1..969: mol_type = other DNA
atgctgttcatcaagttcatccacctggaggtgttcagcatgcccgaacgcgccatcgctagacatgaagttcgcgaaattgaacagcgccacactatggacgggccgaggcaggacgcaaccctggacgaggaggaggacatggtcataatctacaacagagttcctaagaccgcctctacttcattcacaaatatagcttatgatctatgcgccaaaaacaagtaccatgtgctccatatcaatactaccaagaataaccctgtgatgtctctccaggatcaggtcagattcgtaaagaacataaccagttggaaagagatgaaacctggcttctatcacggacacgtgtcctaccttgatttcgctaagttcggtgttaaaaagaaaccaatctacatcaatgttataagggatccaatcgagagactggtctcatattattattttcttaggttcggcgatgattacaggcctggactgcgtaggcggaagcagggagacaaaaagacctttgacgaatgtgtggcagaaggtggcagcgattgtgccccagaaaaactgtggttacaaataccatttttctgcggacactcttccgagtgttggaacgtcgggagtcgttgggccatggatcaggccaagtacaacttgatcaacgagtactttctggtaggagtcactgaggagctcgaagatttcattatgttgctggaggcagcactgcctcgtttcttccgcggagccactgagctgtacaggactgcacctgatacagccactccatcccatagacacggtcctatctgtgggtccaaatccattagttcactccttgtcaaagtgtctcctgtgtgcaaggacagccattgccactgtagaaggggaacaggaacaccaaaaggcgaaacccttgccacgttggctccttgctcccagagctggagttcagtgacacaccgctggtag

SEQ ID NO: 190507 - DNA, 912 bp, synthetic construct
  misc_feature 1..912: note = Description of Artificial Sequence: Synthetic coding sequence
  source 1..912: mol_type = other DNA
atgctgttcatcaagttcatccacctggaggtgttcagcatgcccgagcgagcaattgccaggcacgaggtcagagaaattgaacagaggcacacgatggatgggcctagacaggatgcaacactggacgaggaggaggacatggtcatcatttataatcgggttcctaagacggcctctacatcattcactaatattgcctatgacttgtgcgctaagaacaaatatcatgtgctgcacatcaacaccaccaagaacaaccctgtcatgtccctgcaggaccaggttcgcttcgtgaagaacataacaagctggaaagagatgaagccgggcttttaccatggccacgtcagttacctggatttcgctaagttcggtgtgaagaaaaagccaatctatatcaatgtcatacgcgatcccatagaacggctggttagctactactactttctgagatttggtgatgactaccggccaggactcagacggcgaaagcagggagataagaaaacattcgatgaatgtgtggcggagggcggctccgattgcgcacccgagaagctgtggctgcagataccttttttctgtggccacagtagcgagtgttggaatgtaggaagtagatgggccatggaccaggctaaatataacctgattaatgaatactttttggtaggtgttactgaggagttggaggacttcatcatgctgctggaggcagcgctccctagattcttccgaggggctacagaactatataggacagcccccgataccgccacaccgtcccaccgtcatggtcccatctgcggctcgaagagtatctccagcctcctagtgaaggtctcccccgtgtgcaaggacagtcattgcctcggaaagtgctcgagaaacggcctgagcgctgtttag

SEQ ID NO: 190508 - DNA, 1071 bp, synthetic construct
  misc_feature 1..1071: note = Description of Artificial Sequence: Synthetic coding sequence
  source 1..1071: mol_type = other DNA
atgggcctgctgcggatcatgatgccccccaagctgcagctgctggccgtggtggcctttgccgtcgccatgctttttttggagaaccagattcagaaattggaggagtctaggtctaaacttgaaagggctattgcccgccatgaggtacgcgaaatcgaacagagacacacaatggatggccctagacaagatgccacactagacgaggaggaggacatggtgatcatttataatcgcgttccaaagacagcgtctaccagcttcactaatatcgcttacgatctgtgcgcgaaaaacaagtaccacgtgctccacattaacaccactaagaacaaccctgtgatgagcctccaggaccaagttcgctttgtcaagaatatcaccagctggaaagagatgaaacccgggttttatcatggtcatgtgtcctacttagatttcgccaaatttggagtgaaaaaaaagccaatctacatcaacgtaattcgggaccccatagaacgattggtgagctattactacttcctgcggttcggcgacgactaccgacctggcctgaggcggcgtaagcaaggagacaaaaaaacgttcgacgaatgtgttgccgagggcggctccgattgcgctcctgagaaactgtggcttcagatacctttcttttgcggacactccagtgagtgctggaatgtcggctctcgctgggccatggatcaggcaaaatacaacctcattaatgagtacttcctggtcggggtgactgaggagctggaggattttataatgctgttggaggctgccctaccccgcttcttccgcggcgccaccgaactctacaggacgggtaagaaatcacacctgcggaagaccacagaaaagaagctgccaacaaagcagacaattgcaaaactccagcagtccgacatctggaaaatggaaaatgagttttacgagtttgctctcgagcagttccaattcatccgggctcacgctgtacgcgagaaagatggcgacctgtatatcctggcacagaactttttctatgagaaaatatacccaaagtccaactag

SEQ ID NO: 190509 - DNA, 690 bp, synthetic construct
  misc_feature 1..690: note = Description of Artificial Sequence: Synthetic coding sequence
  source 1..690: mol_type = other DNA
atgggcctgctgcggatcatgatgccccccaagctgcagctgctggcagtcgtggccttcgcagtcgcgatgctgttcctcgagaaccaaattcaaaaattggaagagtcccggtcaaaactagaaagggcaattgcacggcatgaggttcgggaaatcgagcaacgccacaccatggatggaccaaggcaagatgcaactttagacgaagaggaggatatggtgatcatctataatcgggttccgaaaaccgcatctacatctttcactaacatcgcctatgacctgtgtgccaaaaataaatatcatgttctgcatattaatacaacaaaaaataatccggtgatgtccctccaggaccaagttagattcgtcaaaaatattactagctggaaggagatgaaaccgggtttttatcatggacatgtcagttacctggactttgccaaattcggggttaagaagaaacccatctacattaatgtcattagagatccgatcgaacggctagtgtcgtattactatttcctgcgtttcggcgatgactaccgccccggccttcgtcggagaaagcagggggataagaaaactttcgacgaatgcgtggcagaaggaggttccgactgcgcacccgaaaagctatggctacagattcccttcttctgcggccatagttcggaatgctggtag

SEQ ID NO: 190510 - DNA, 1236 bp, synthetic construct
  misc_feature 1..1236: note = Description of Artificial Sequence: Synthetic coding sequence
  source 1..1236: mol_type = other DNA
atgcggcggcggcgggccggcggccggaccatggtggagcgggccagcaaattcgtcctcgtcgtcgccggcagcgtctgcttcatgctcatcctgtaccagtacgctggtccagggctgagcttgggcgccccaggtggtagagccccaccagatgacctggacttgtttccaacccctgatcctcactacgaaaaaaagtactatttccccgtccgggagctggagagatcactgcggttcgacatgaagggggatgatgtaatagttttcttacatatccagaagacaggaggaaccacttttggcagacatctggtacagaacgttcggctggaggttccgtgcgattgtcgacccggtcagaagaaatgtacatgttacagacctaatcgcagagagacctggctgttttcccgattcagtactgggtggtcctgtggcctgcacgctgattggaccgaactcaccaattgcgtgccaggagtgctggatagacgcgacagtgcggccctgagaacaccgcgcaagttttattatatcacactgctgcgcgaccctgtttcaaggtaccttagcgaatggcgacacgttcagagaggagccacctggaagacctccctacatatgtgtgacggcagaacccccactcctgaggagttgcctccctgctatgaaggaaccgactggtctgggtgcaccctgcaggagtttatggactgcccttataatctggccaataatcggcaggtgcggatgctggctgacttgtcattggtgggctgttacaacttgagtttcatcccggaggggaagagggctcaactcctcctggagtcagccaaaaagaacctgcgtgggatggccttttttgggctgaccgaattccagaggaagacacagtacctgttcgagcggaccttcaacttaaagtttatcagacctttcatgcagtacaattcaaccagggctggtggcgttgaggtcgatgaggatactattagaagaattgaagagctcaacgacctggatatgcagctatacgattacgccaaggacctgttccagcaacggtaccagtataagcggcagctagagcgaagggaacaacggctacggtcgagagaggaacgcctgctgcaccgcgccaaggaagccctcccccgggaggatgcagatgagccgggtagggtgcctactgaagattatatgtctcatattatcgagaagtggtag

SEQ ID NO: 190511 - DNA, 831 bp, synthetic construct
  misc_feature 1..831: note = Description of Artificial Sequence: Synthetic coding sequence
  source 1..831: mol_type = other DNA
atgctgttcctgttcgccgtgatcgtgctgcagtacgtgtgccccggcactgaatgccagctactgagactccaagcgttttcttcaccagtccccgatccctaccgctcagaagatgagtcgagcgccagatttgtgccacgctacaacttcactagaggcgaccttctccgcaaggtggattttgacatcaagggtgatgacctgattgtgttcctgcacatccagaagaccgggggtaccacattcggccgacatctggtgaggaatattcagctagagcaaccttgcgaatgtagggtgggccagaagaaatgtacatgccacaggccgggaaaacgggaaacatggctgttttcaagattcagcaccggctggagctgcgggctccatgccgactggactgaactgacaagctgcgttccatcagtggtggatggtaaaagagacgcacggcttcggccctcccgctggcgtattttccagatcctggacgccgcctccaaagacaagcgcggctcacctaataccaacgccggtgcgaattccccaagcagcacgaaaacccggaacacatccaaatccggcaagaacttccactacattactatcctcagagacccggtaagcaggtacctcagtgagtggcgccatgtccagagaggagccacttggaaggcctcgcttcatgtttgtgatggtagaccccccacatccgaggaactgcccagctgctacactggggacgactggtccggttgcccactgaaggaattcatggactgtccatacaacctcgcaaacaatcgatgtgcatgcagccccacatag

SEQ ID NO: 190512 - DNA, 1389 bp, synthetic construct
  misc_feature 1..1389: note = Description of Artificial Sequence: Synthetic coding sequence
  source 1..1389: mol_type = other DNA
atggacgagaagagcaacaagctgctgctggccctggtgatgctgttcctatttgcggtgatagtactccaatatgtgtgtccagggaccgagtgccagttattgcgcctccaggcattctcctccccggtgcctgatccttatcgctctgaagacgaatcctcggcgaggtttgttcccagatataactttacccgtggggacttactacgtaaggtcgattttgatatcaaaggagacgatctcatcgttttcctccatatccagaagacaggcggaactacctttggccggcacctcgtgcggaacatccaactggagcagccttgcgagtgccgtgttgggcaaaaaaagtgtacatgccataggcccgggaaaagagaaacctggttgttctcacgcttcagtactgggtggagctgtggtctccatgcagattggactgagctcacttcatgtgtcccttcagtcgtcgacggcaagagagacgctcgcctgagaccatccagatggaggatattccagatcttggacgcagcaagtaaagataagcgtggaagccccaacacaaacgccggcgcgaactctcccagctccactaagacaaggaacaccagtaaatccgggaaaaacttccattatatcaccattctccgtgaccctgtcagccgatacctgtcagagtggcggcacgttcagcggggagctacctggaaggccagtctccacgtgtgcgatggtagaccccccacatctgaggagctgccctcatgctacacaggcgatgattggtctggttgccccttaaaggagttcatggactgcccttacaacctggccaacaaccggcaggtccggatgctgtccgatctcactctggtcggttgttataacctgtctgtgatgcctgaaaagcagcggaacaaggtccttctggaaagcgcaaaatccaacctgaagcacatggccttcttcggactgactgagttccagcggaaaacacagtatctctttgagaaaaccttcaacatgaattttatcagccctttcacgcagtacaacacaacaagagcgtcgtccgtcgaaattaatgaagagatccagaagcgtattgaagggctgaattttctcgatatggagctctattcctacgccaaggatttattcttgcaaaggtatcagttcatgcgccagaaagagcaccaagaagcccgacggaaacggcaggagcagaggaaattcttaaagggaaggctcttgcaaacgcattttcagtcacagggccagggtcagtctcagaatcccaatcagaaccagtctaaagaacagaacgataacacgtccaatggcactaatgattacatcggaagcgtggaaaagtggcggtag

SEQ ID NO: 190513 - DNA, 1818 bp, synthetic construct
  misc_feature 1..1818: note = Description of Artificial Sequence: Synthetic coding sequence
  source 1..1818: mol_type = other DNA
atggccctgcccgcctgcgccgtgcgggagttcgagcccccccggcaaccggaaaggggagccccagtccggaccacctgtcctcgacgacacagtagagtggaggccgaactggcggcttcacgccccgggtcggtcgccgcctctgtccgcgccggcccccccagaggggtctctcatgggttccacacaagaccactccttgataaacctaggaaggcgtccagttctctggccggggctgcatgcgctcccctttttgccttactctccagaggacgccgaagaaggatgcatgtgctccggagacggtgggatcttggaagcctgtgcagggcgctgcttacacgagggctggccgcccttggccatagcttgaaacatgtactcggcgccatctttagcaagatcttcggccctatggcaagcgtggggaatatggacgagaaatccaacaagctccttctggcactcgtgatgttgtttctgtttgcggttattgtcctccaatacgtttgtccagggactgagtgtcagcttctccgactacaagccttttcctcccccgtgccagatccctaccgctctgaagatgaatcatctgcccggtttgtgccgcgctacaactttacccgcggagacctgctgaggaaagtcgactttgacatcaaaggcgacgatctgattgtgtttcttcacatccagaagacaggagggaccacattcggtcgacatctggtccggaacattcagctcgaacaaccttgcgaatgccgagtgggccaaaagaagtgtacatgccaccggccagggaagcgggaaacgtggctgttctcaaggtttagtaccggatggagttgcggactgcacgctgactggaccgagcttacaagctgtgtcccttctgtcgtggatggcaagcgagatgcacgcttaagaccctctagaaacttccactatatcacaatcctgcgggacccggtgtctagatatctatctgagtggcgacacgtgcagagaggggctacatggaaggccagcttacacgtgtgtgacggcagacctcctacctcagaggaacttccatcatgttacaccggagacgattggagtggttgcccgctgaaggagtttatggactgcccttacaacctggccaataacaggcaagttaggatgctgagcgatctcactctcgtgggatgttacaatttgtcagtcatgcccgagaagcagcggaacaaagtcctactcgagagcgccaaatccaacttgaaacatatggctttcttcggactgacggaatttcagaggaagacacagtatctcttcgagaaaacctttaatatgaactttataagccccttcacacaatacaataccacccgcgcctcctctgtggagattaacgaagagatccaaaagcgcatagagggtttgaacttcctggatatggagctttactcttatgccaaggacctgttcctccagaggtaccagttcatgagacaaaaggaacaccaggaagctcgcagaaaacgccaggagcagagaaaatttctgaaaggtcgcctacttcagacccattttcagtcacaggggcagggccagagtcagaaccctaaccagaatcaaagccagaatcctaatcccaacgccaatcagaaccttactcagaacctcatgcagaacctgactcagtctttgtctcagaaggaaaatcgcgagtcccctaagcagaacagcggaaaggagcagaacgataatacatccaatggaactaatgattacattggtagcgtggagaagtggcggtag

SEQ ID NO: 190514 - DNA, 1380 bp, synthetic construct
  misc_feature 1..1380: note = Description of Artificial Sequence: Synthetic coding sequence
  source 1..1380: mol_type = other DNA
atggacgagaagagcaacaagctgctgctggccctggtgatgctgttcctattcgccgtcatcgtgctccagtatgtttgccccgggacagaatgccagctgctcagattgcaagcgttctcgagcccggtgcctgacccttatagatcggaggacgagtccagtgcgcgcttcgttcctaggtacaacttcaccagaggcgatttgctgcggaaggtggactttgacatcaaaggcgacgacctcatcgtcttcctgcacattcagaaaactggcggtacaactttcggtagacatttggtccgcaatattcaactcgaacaaccttgtgagtgcagagtcggccaaaagaagtgcacttgtcatcgtcccggtaagcgagagacatggctcttctctcgttttagcaccggctggtcttgcgggttacatgcagattggacggaacttaccagctgtgtgccatccgttgtggatggcaagagggacgctcgtcttagaccctcgcgaaacttccactacattaccattttgagggaccctgtgagcaggtacctaagtgagtggaggcacgtccagcggggcgcgacatggaaagccagcctccacgtttgtgacggtcgccctccgacctccgaggaacttccttcttgttacaccggcgacgactggagcgggtgccccctgaaggaattcatggactgcccttacaatctcgccaacaaccgtcaggtcagaatgctaagcgatctgactctcgttggctgctacaatttatcagtgatgccagaaaaacagagaaataaagtcctcctcgaaagcgcaaagtccaacctgaagcatatggccttctttggcctgactgaattccaaaggaaaactcagtatctgtttgaaaagacatttaatatgaattttatctcccccttcactcagtacaatacaacgagagcctcttccgtggagatcaatgaggaaattcagaagcgcattgagggacttaacttcttggatatggagctgtattcctacgccaaggacttgtttctgcagcggtatcagtttatgaggcaaaaggaacatcaggaagctcgcagaaagcgacaggagcaacgtaagttcctgaagggtagactgttgcagacccactttcagtctcaaggtcagggccagtcccagaaccccaaccagaatcagagccagaacccgaacccaaacgccaatcagaacctgacgcaaaacctcatgcagaacttaacccagtccctgagccagaaggagaatcgggagtctcctaaacagaatagcggaaaagaacagaacgataacaccagtaacggcaccaacgattatatagggtcagtggagaaatggaggtag

SEQ ID NO: 190515 - DNA, 996 bp, synthetic construct
  misc_feature 1..996: note = Description of Artificial Sequence: Synthetic coding sequence
  source 1..996: mol_type = other DNA
atgctgctgaagcacaacggcaagctgctgctgttctacctgctgtcttaccaggcccttgcttccgactggttctattgctccttcaacagatggcgaatatttcagattctcgatgcagcccgcaatttccattacatcacaatcctcagagatcccgtgtcgaggtacctgagcgaatggagacacgtgcagcggggagccacatggaaggcgtccctgcacgtctgcgatgggcgcccgccgacttcagaggagcttccctcttgttatacaggcgacgattggtccggatgccccttgaaggagtttatggattgtccctataacctggccaataataggcaggttagaatgctctctgatttaacactggtgggctgctacaacctcagcgtcatgcccgaaaaacagcggaataaagttctgttggagtctgcaaagagcaatcttaagcacatggccttcttcggtcttacggagttccagcgcaagacccaatacctctttgagaagacgttcaacatgaactttatttctccgtttacacagtacaatacaacacgagcttcatcagtggagatcaacgaggagattcagaagcggatagaaggtctgaactttctcgatatggagttgtactcctatgcgaaagacttattcttgcagagataccagtttatgcgtcagaaggagcatcaggaagccagaaggaaacgtcaggaacagcggaaattcctgaagggtcggcttctacagacccactttcaaagtcagggtcaaggccaaagccagaaccccaaccagaatcagtcacagaatcctaaccccaatgccaaccagaacctgacgcaaaacctgatgcaaaacctgactcagagcctctcccaaaaagaaaatagggagagtcccaagcagaacagcggcaaggagcaaaacgacaacacttccaacggtactaatgactacataggctcagtagagaagtggcgttag

SEQ ID NO: 190516 - DNA, 1938 bp, synthetic construct
  misc_feature 1..1938: note = Description of Artificial Sequence: Synthetic coding sequence
  source 1..1938: mol_type = other DNA
atggccctgcccgcctgcgccgtgcgggagttcgagcccccccggcagccagagcgcggggctcctgtccgcaccacttgcccgagaaggcatagcagggtggaggcggagctagctgcaagccgcccaggctccgtcgcagctagcgttagggcagggcctccccgcggtgtgagccacggctttcacaccagaccgcttctcgacaaaccacgcaaggcctcttcctcattggctggcgccgcctgtgctccgctgtttgcgctactgagccgcgggaggcgtcgcaggatgcacgttttgcgcaggaggtgggatctcgggagtttgtgtagagcactgctgacaagaggtctggcagccctcggtcactctctcaagcacgtgctgggcgcaattttcagtaaaatttttggcccgatggcatccgttggcaacatggatgagaagtccaacaaactgctcctggctctggtgatgctattcttgtttgcggtaattgtgttgcagtatgtctgcccgggaacagagtgtcaactgttacgacttcaggccttcagcagtccggtgcctgacccctacagatccgaagatgagtcgagcgcaaggtttgttccacgttataacttcactcgaggagaccttctgcggaaagtcgacttcgatattaagggggacgacttgatcgttttcctacacattcaaaagactggcggaacaaccttcggcaggcatctggtcagaaacatccagctggagcagccatgcgaatgccgggtggggcaaaagaaatgcacatgccacagacccggcaagagggagacatggctttttagccgcttctctacgggttggagttgtggactccacgccgactggacagagctcaccagctgtgtcccctctgtcgtggacgggaagagagatgctagacttcgtccgtcccgctggcggatatttcagatcctggatgccgcgtctaaagacaagcgcggcagccctaacactaacgccggcgcgaactcacctagcagtacaaagaccaggaacacctccaagagcggcaaaaactttcattatattacaattctacgggatccggtttcgcggtacctgtctgaatggcggcatgttcaaaggggggcaacatggaaggccagccttcacgtgtgcgatggtaggcccccaacatccgaggaactgccaagctgttataccggcgacgactggtcaggctgcccattaaaagaattcatggactgtccttacaacctcgccaacaacaggcaggtgcggatgctgtctgatctgaccctggtgggatgctacaacttatctgttatgcctgagaagcagagaaacaaagttctattggaaagcgccaagagcaatctgaagcacatggcgttcttcggtttgacagaatttcaacggaagacacagtacctgttcgagaagacttttaacatgaacttcatctcacccttcacccaatacaatacaacgagagcatcctccgtggagatcaatgaagagatccaaaaaagaatcgaaggcctaaacttccttgatatggagctgtattcatatgctaaggatctgttcctccagaggtatcagtttatgcggcagaaggagcaccaggaggcgcggagaaagcggcaggagcaaagaaagtttctgaagggccgactgctccagacccactttcagtcacagggccaggggcagtcccagaaccctaatcagaaccagagccagaatccgaaccccaatgcaaaccagaatttaacccagaaccttatgcagaacctcactcaatctctgagtcagaaagagaatcgtgagagccccaagcagaactccggaaaagaacagaatgacaatacatccaacggcactaacgactacatcggaagtgtcgaaaagtggcgttag

SEQ ID NO: 190517 - DNA, 1416 bp, synthetic construct
  misc_feature 1..1416: note = Description of Artificial Sequence: Synthetic coding sequence
  source 1..1416: mol_type = other DNA
atggacgagcggttcaacaagtggctgctgacccccgtgctgaccctgctgtttgtagtgattatgtaccaatacgtctcaccctcctgcacaagtagttgcacgaatttcggggagcagcccagggccggcgaggctggccctccggctgtacctggccccgctcggagagctcaggctccgccagaggagtgggaaaggagaccacagttgccgccaccgcctcgaggccctcccgagggaccaaggggcgcggccgctccagaggaagaagatgaggaaccgggtgatccccgcgaaggggaggaagaggaggaggaggatgagccggatccggaagctccagagaatgggtctctaccacgcttcgtgcctcgctttaacttcagtcttaaagatcttacacggttcgtcgatttcaacattaagggcagggatgtgatcgtcttcctccacattcaaaaaaccgggggaacaacatttggcagacacctggtgaagaacattaggctcgaacagccatgctcatgcaaagctggccaaaaaaagtgcacatgccatcgccccgggaaaaaagagacttggcttttctctaggttctccacaggatggtcctgcggactccatgccgactggacagaactaaccaactgcgtgcctgccataatggagaagaaagactgcccgagaaatcattctcatacaagaaacttttattacatcaccatgctccgagaccctgtgtcccgctacctctccgagtggaaacacgtgcagagaggcgccacctggaagacaagtcttcatatgtgcgacggacgctccccaactcctgatgagctaccaacttgctaccccggcgacgattggtcgggtgtgtctctcagggagtttatggactgtacatacaatttggcaaataaccggcaggttcggatgctggcggatctgagcctcgtgggttgctacaacctgaccttcatgaacgaaagcgagcgcaacaccatattattacagagcgccaaaaataatttaaaaaacatggcattcttcggcctgacagagtttcagaggaagacccagttcttgtttgagcgcaccttcaatctgaagtttatctctccgtttactcaattcaatatcaccagggcaagcaatgtggagatcaatgagggcgctcgccagaggatcgaagacctgaattttctggatatgcagctatatgagtacgccaaggacctgtttcaacagcgctatcaccatactaagcaacttgagcaccagagggaccgtcaaaagagacgcgaggagcggagactacagcgtgaacaccgggaccatcagtggcccaaggaagatggggctgcagagggaaccgtcaccgaggactacaactcacaggtggtccgctggtag

SEQ ID NO: 190518 - DNA, 543 bp, synthetic construct
  misc_feature 1..543: note = Description of Artificial Sequence: Synthetic coding sequence
  source 1..543: mol_type = other DNA
tgagcccagacccccccccccccccccgccgccgtggccgtggccgtgaccccagtgccccagttcccccgggcttgtactgaggcagagttcgcatgccattcatataatgagtgcgtcgctctggaatatagatgtgaccgcaggcccgactgtagggatatgagcgacgaactgaactgcgaggagccagtgctaggaatatcgcctacttttagcctcctcgtggagaccactagcctgcccccccgtcctgaaacaaccatcatgagacagccccccgtcacacacgctccacagcccctgcttccaggatcggtgcgacctctaccctgcggtccacaggaagcagcatgccggaatggccactgcataccacgcgactatttatgtgatgggcaggaggactgcgaggacggcagcgatgagctcgactgcggaccaccccctccatgcgagcccaatgagttcccctgtggaaacgggcattgcgcactgaaactttggcgctgtgatggtgactttgactgtgaagatcgctag

SEQ ID NO: 190519 - DNA, 285 bp, synthetic construct
  misc_feature 1..285: note = Description of Artificial Sequence: Synthetic coding sequence
  source 1..285: mol_type = other DNA
tgaggccacccccacagccccagcagcggcgccgcctgggccgccgctttcttgggaggacgcccgccaggtacctcttgttgcaccttgagtgttcagccattgagaacacaggctgccactgccgccggtagtccgactcggtgggcccagcccagaccattacccagctgctccagtaaaaatcctgagctgggtccagaactgccgcgggacgtgtacatgccggggccatggactctcggagagggacctggccagtgcccggcaggctatccccgctag

SEQ ID NO: 190520 - DNA, 13176 bp, synthetic construct
  misc_feature 1..13176: note = Description of Artificial Sequence: Synthetic coding sequence
  source 1..13176: mol_type = other DNA
atgggctggcgggccgccggcgccctgctgctggccctgctgctgcacggccggctgcttgccgtcacacacggtctacgcgcatacgacgggctttcccttccggaagatatcgagactgtgacagcaagtcaaatgcggtggacacactcctacctcagtgatgacgaagacatgttggcagattccataagtggggacgacctgggctcaggagaccttggatctggcgactttcagatggtgtactttagggcgctggtgaactttacgagaagtatcgagtattccccccagcttgaagatgcaggctcgagagagtttagagaggtgtctgaggccgtggttgacaccctcgaaagtgagtacctcaagatccctggcgaccaggtcgtgagcgtggtgtttattaaagaactggacggatgggtttttgtcgagcttgacgtcgggtccgaagggaacgccgatggcgcacagatccaggagatgttattgagagtgatttcaagtggttccgtggcatcttacgtgaccagtccacagggcttccagtttaggcgtctcggcaccgtgccacagttccccagggcctgcacggaggcggagtttgcctgccactcatacaacgagtgcgttgcactcgagtacaggtgcgaccggcgaccagattgcagagacatgtctgacgagctcaattgcgaagagcctgttctgggaatttcacctactttcagcctcctcgttgagaccacttccctgcccccccgccctgaaaccactattatgaggcagccccccgtcactcatgccccgcagccactcttgcctggatccgtgcgacctcttccctgtggtcctcaagaagctgcttgccgaaatggccactgtatccccagggactacctgtgcgatgggcaggaggattgcgaggacgggtcagacgagctcgattgtggtcccccaccaccatgtgaacccaacgagtttccctgcgggaatggtcactgcgcgctgaagctgtggcggtgcgacggtgactttgactgtgaggaccgcactgatgaagctaattgtcctacaaagagacccgaagaagtgtgtgggcccactcagttccgctgcgtctctacgaatatgtgcatccccgctagcttccactgtgatgaggagagcgactgtcccgataggagcgatgaatttgggtgcatgcccccacaggttgtgactccgccaagagagtcaattcaggcctctagaggccagactgtcacttttacctgcgtggctatcggagtgccaactcccattatcaactggagactgaactggggccacatccctagccatccccgagtgacggtcacctcagaaggcggccggggcaccctgatcattagggatgttaaggagtctgaccagggggcatacacgtgtgaagccatgaacgccagggggatggtattcgggattccggacggcgtgctggagctagtgccccaacggggaccctgtcccgatgggcatttctatctggaacacagcgcagcttgcctgccatgtttctgcttcggtatcacaagtgtttgtcagtctactcgacgcttccgcgatcagatccggctgaggtttgaccagcctgatgacttcaagggagtgaacgtgactatgccagctcagcccggaacgccacccctgagcagcacccagctgcagatcgaccccagcttgcacgaatttcagctggtggacctcagcaggcgtttcctggtgcacgactccttttgggcattgcctgagcaatttcttggtaacaaggtcgacagttacggcggatccctcaggtataatgtgcggtacgagctggcaagggggatgcttgaaccagtgcaacgccccgatgtcgtcctgatgggcgccggctatcgtctgctaagcagagggcacactcccacacagccaggcgcgctcaaccagagacaggtgcagttctctgaggaacactgggtgcatgagtcaggccgccctgtccagcgagctgagttattacaggttctccaatctcttgaggccgtcctgattcagaccgtctataacacaaaaatggcaagtgtaggccttagcgacatcgcaatggacaccaccgttacgcacgcaacaagtcacggtcgggcacattccgtggaagagtgccggtgtcccatcggctactcgggcctctcttgtgaatcttgcgatgcacactttacacgcgtacccgggggtccctatctgggcacctgtagcggctgtaattgcaacggacatgcatccagctgcgatcctgtatatggacattgcttgaattgtcagcataacaccgaggggccgcaatgcaacaaatgtaaggcaggctttttcggcgatgccatgaaagctactgcaacatcctgccgcccgtgtccctgtccatacatagacgcgtcgcgtcgcttcagtgatacatgtttcttggacacagacggtcaggctacctgcgatgcctgcgcccccggttacaccggccgcagatgcgagagctgcgctcccggctacgagggaaaccccatccagcccggcggcaagtgccgacctgtgaaccaagaaatcgttcgatgtgacgaaaggggcagcatgggcaccagcggtgaagcatgtagatgcaaaaacaatgtcgtgggcagactttgtaacgaatgcgcggacggttcattccatttgtccacaagaaatcctgacggctgtctgaagtgtttttgtatgggcgtctcccgtcattgcacctccagctcttggtccagggctcagctccatggtgccagcgaagagcccggtcacttcagcctaacgaatgctgcctccacacacaccacaaatgagggcattttctctccaacccccggcgaattagggttttcttcttttcatagactgttgtcaggtccatatttttggagcttgccatctcgcttcttgggtgataaggtgacctcgtacgggggggagctgaggttcactgtgacccagcgctctcagcctggcagtacgcccctacacgggcagcctctggtcgtcctccaggggaataacataatacttgaacaccatgtcgcacaggaacctagccctgggcagccatccacattcattgtcccgtttagggagcaagcctggcagcgtcccgacggacagccagcgactagggaacacctgctaatggcccttgcagggatcgataccctcctgatccgcgcgagttacgcccagcagcctgccgaatccagagtttccggcataagcatggacgtggcagtccccgaagagactggccaggatcctgcactggaggtcgagcaatgctcatgccctcctggataccgaggacccagttgtcaggactgcgacacaggatacacacggacgccatctggcctttatctgggaacttgtgagcgctgttcttgccatggacacagtgaggcatgtgagccagagacaggggcctgtcaaggctgccagcatcatactgagggacctcggtgtgagcagtgtcagccaggctactacggcgatgctcagagaggcactccacaggattgtcagctgtgtccctgttatggcgatcccgcggctggacaggctgcccatacgtgttttctggacaccgatggccacccaacctgcgacgcttgtagcccagggcactcggggcggcattgtgagcggtgcgcccctggctactatggtaacccatcccagggccagccttgccaaagggacagtcaggtgcccggacccatagggtgtaactgtgacccacagggaagtgtctcatcccagtgcgacgcagccggtcagtgccagtgcaaggcccaagtagagggcttgacctgcagccactgcaggccccatcactttcacttgagcgcaagcaatcccgacggctgcctgccttgcttttgtatgggcatcacgcaacagtgcgcaagctccgcatacactcggcatctgattagcacccattttgcgcctggtgacttccaaggctttgccctggttaatccacagcgtaacagcagactgaccggggaattcacagtcgagccggtgccagagggggctcagttatcttttggcaattttgcacagctcggccatgaaagcttctactggcagctgccggaaacataccagggcgataaagtggctgcctacggtgggaaacttagatatacgctatcatacacagctggccctcaaggaagccccctgtccgacccggacgtccagatcaccggcaacaatatcatgctggtggcctctcagccagcgctgcagggcccagagcgtaggagctatgaaatcatgtttagagaggagttctggagaagaccagatggccagcctgcaaccagggagcatcttcttatggctctagctgacctggacgagctactgatacgggccactttttccagcgtccctctggccgcatctatttcggccgtgagcttggaagtggcccagcccggcccgtcaaatagaccaagagcgctagaggttgaagaatgcagatgcccccctggttacatcggattgagttgtcaggactgtgctccggggtacaccaggacaggttccggactttacctaggacactgcgaactgtgtgaatgcaacggccacagcgacctttgccatccagagaccggagcatgcagccaatgtcaacacaatgcagcaggcgagttttgcgagctgtgtgcgccaggttattatggagatgccacggccggcacgccagaggattgtcagccatgtgcatgcccactcaccaatccggaaaacatgttctccaggacttgtgaatcgcttggagcagggggatatagatgtacagcgtgtgaaccaggctacaccggtcaatactgtgaacaatgtggacctggctatgtaggtaacccctcagtgcagggtggccaatgtctgcctgagacaaatcaggcacctctagtggtcgaggtccaccctgcgcgttccattgtcccgcagggcgggagccactcactgaggtgccaggtgtccgggagccccccccattacttctactggtccagagaggatggacgtccggtcccctctggcactcagcaacgacaccagggaagtgagttacactttccctcagttcaaccatcagatgccggagtgtacatctgcacctgtcggaatttgcaccaaagtaacacatcacgggccgagcttcttgtcactgaggctccttccaagcccatcactgtcacggtggaggaacagcgttcccagtcagtccgacccggcgctgacgtgacttttatctgcacggccaagtcaaagagtcctgcctatacactcgtttggacccgtctgcataacggtaagctgccaactcgggcaatggatttcaatggtatcctcactattcgtaatgtccagctgtctgacgccggtacatatgtgtgcacgggcagtaatatgtttgcaatggatcagggaaccgccaccttgcatgtccaggcttctgggaccctgtccgcccccgtagtgtccatccacccaccccagctgactgttcagcccgggcaactggctgagttccgctgcagtgccaccggctctccgacccctaccctggagtggactggaggtccaggcgggcagctgcccgctaaggcacaaatccatggaggaatccttaggttgccagctgtggaaccaaccgatcaagctcagtacctgtgtagagctcatagctcggcaggtcagcaggtggctagggctgttctccatgtccacggcggcggcggaccacgggtgcaagtgagccccgaacgcacccaggtgcatgccggcaggaccgtgaggctctactgtagagccgcgggggtaccatccgctaccatcacttggcgaaaggagggcggttccctcccaccacaggctcgttccgaacgtaccgacattgcaactcttctgataccagccattactacagccgatgccggattttatctgtgcgtggccacatcacccgcaggtacggctcaggcacgaattcaagtggtcgttctgagcgccagcgacgcatcgcccccacctgttaaaatagagtcatcttctcctagcgttacagaaggccagacactggatctgaactgcgttgtcgcgggttcagcacatgcacaggtcacgtggtaccgaagggggggtagcctccctcctcacactcaggtccacggcagccggctgcggctgccgcaggttagccccgctgacagcggggagtatgtgtgccgagtagaaaacggaagcggccccaaggaggcctccattacggtgagtgtgctgcatgggacccactcagggccatcatacaccccagttccgggcagcacacggcccatacggattgaaccaagcagcagtcacgtcgctgaagggcagaccttggacttaaattgtgtggttccaggccaggcccatgcacaggtgacctggcacaaaagaggtggatccctccctgcacgtcaccaaacacacggatccctcctgcggctgcaccaggtaacacccgctgattcaggcgaatacgtttgccacgtggttggcacgtctggacccctggaagcatccgtgctagtgactattgaggcatctgtgattcccggacccattccaccagtaagaattgaaagctcatcttccacagtggctgagggccagaccctggatttgagttgcgtggtagccgggcaagcacacgcccaggtgacatggtacaaaaggggcggatcgctgcccgcccgacaccaggtgagaggaagtagactttacatttttcaggcaagcccagccgacgccggccaatacgtgtgcagggcatccaatggtatggaggcctcaattacagtcacagtgacgggcacacagggtgccaacctggcctaccctgccggcagtacccagcctattagaattgagccaagcagctcccaggttgcggaaggacaaacactagatctgaattgtgtggtcccagggcagagtcatgctcaggttacatggcataaacgtggcggatcacttcctgtccgccatcagacccatggctccctactgcggctataccaagcttcgcccgctgatagcggcgagtacgtgtgccgggtgctgggcagcagcgtgcctctggaggcgtctgttttggtgactatcgagccggcaggctccgtgccggctttaggggtgaccccaactgtgcggatagaaagttcttccagccaggtcgccgagggccagacgctggacctgaattgcctcgtggctgggcaagcccatgctcaggtgacatggcataagcgcggtggcagcctgcccgcccgccaccaggttcatgggtcgcgcctccgcttgttgcaagttacgcccgccgattcaggcgagtacgtttgtcgagtcgtggggtcgtctggcacccaggaggcctctgtgctggttacaattcaacagagactgtccggcagccactcacagggggtggcctatcctgttagaattgagtcttcaagcgcttccttggccaatggacataccctggaccttaactgcctggtagcaagccaagccccccacacgattacctggtacaaacggggtggcagcctgcccagtcgacaccagattgtgggttctaggctcagaattcctcaagtaacccccgctgacagcggtgaatacgtgtgccacgtgagtaatggcgcaggttcccgagaaacctccctcatagtcactatccagggatcaggttcctctcacgtcccttctgttagtcccccaattaggattgaatcttcgagccccaccgttgtggaggggcagacactggatctgaattgcgtggtcgccagacagccacaggccataatcacttggtataaacggggtgggtcactgcccagtcggcaccagacacatggcagccacctcagattgcaccaaatgagcgttgctgacagtggcgaatacgtctgtcgcgcaaataataatatcgatgccctagaggcaagcattgtgatctctgtgtccccttccgctggaagcccctccgcacctggctcctccatgcctatcaggatagagtcatcttcatcccatgtcgctgagggggagactctagacttgaactgcgtggtgcccgggcaggcgcacgctcaggtgacgtggcacaaaagaggcggatcactcccttcccaccatcagacacggggttccagactcagactgcatcatgtcagtcccgctgactcgggtgaatatgtttgccgtgtcatgggctctagcggccccctagaagcatctgtgctcgttacgatcgaggcaagtggtagttccgccgtacacgtgcccgcaccaggtggcgcccccccgatccggattgagccctcatctagtcgggtagctgaagggcaaaccctggatcttaagtgcgtggtaccgggacaggcccacgcccaggttacatggcataaaaggggagggaacctgccagcacgccatcaggtacacggacctctcctgagactgaatcaggttagcccggccgacagcggggaatatagttgtcaggtgactgggagcagcggaactctggaagccagcgtactggttacaatcgaaccgtccagtccagggcccatccccgcacccggactggctcagcccatttatattgaggcctccagtagccatgtgacggagggacagaccctggatctaaactgtgtggtgcctggtcaagctcatgctcaggttacttggtataagaggggtgggagtctgcctgcccggcaccaaacccacggatcacagctccggcttcacctcgtgagccctgctgattctggagagtatgtgtgcagggccgccagtggccccggccctgaacaagaggcatcctttacggtcacggtccccccatctgaaggcagctcctaccgcctgagaagccccgtcatttctattgacccgcctagctctacggttcagcagggccaggacgcatcctttaagtgcttgattcacgacggagcggcccctatttcgctggaatggaaaacacgaaaccaggagcttgaggataacgtccacattagtcctaatgggtcaatcatcaccatcgtcggaacccgtccctcgaaccatggcacctaccgctgcgtcgcaagtaatgcctacggcgtcgcccagtctgtagtgaatctttcagttcacggaccacctacagtttcagttctgcctgaaggccccgtctgggtaaaagttggcaaggccgtgacactggagtgcgttagtgcgggcgagccacgctcatccgcgcgatggactcgaatctcatcaacaccagcaaagcttgagcaacgtacctatggcctaatggacagtcacgccgtcctgcagattagttctgccaagccctccgatgccggcacatacgtctgcttggcccagaatgccctaggcacagcccaaaaacaggtagaggtgatcgtcgacactggcgctatggcccctggcgccccccaggtacaggcagaggaggcagagctgaccgtagaggcagggcacacagctacactgagatgctccgcaactgggagccctgccccaacgatacattggtctaaactgaggtccccactcccctggcagcacaggttggaaggcgacaccctgataattccacgcgttgcccagcaggattctggtcagtatatctgcaacgctacatctcctgccggacacgcagaggccaccatcatacttcacgtcgagtcccctccttacgctaccaccgtgccagagcatgccagtgtgcaggccggtgaaactgtacaactgcagtgtctggcccatgggaccccacccttgacgttccagtggagtagagtgggaagctctcttcccggtagggccaccgcccgaaatgaactgttgcactttgagcgggccgcccctgaagatagcgggcgctatagatgtcgcgtaactaataaggttgggtctgcagaagcatttgcacagctgttggtgcaaggtcctccgggaagccttccagctaccagcatccccgcaggatccaccccaaccgtgcaagtgacacctcagctggaaaccaagtcaattggcgcatcagtggagtttcactgcgcagtgcccagcgatcgggggactcagttacgatggttcaaagaaggaggtcagttgcctcccggccactccgtgcaggacggagtgctccgaattcagaatctggatcagagctgccaagggacctatatctgccaagcccacgggccttggggaaaggcgcaggcgagtgcacagctggtgatccaggccctgccgtcagtgctgattaatattcggactagtgttcaaacagtagtagtgggtcacgctgtagagttcgaatgccttgccttgggcgatcctaaaccacaggtgacgtggagtaaagtgggaggacacctgaggcccggcatagttcagagcggcggcgtagtgcggattgcccacgtcgagctcgccgatgccgggcagtaccgctgcacagctactaatgcggcggggacaactcagagtcacgttttactactcgtacaagcgctcccccagatctccatgccacaggaggtgagagtgccagcgggctcggccgctgtgtttccctgtatagcctcagggtacccaacaccggatatcagctggtctaagttggacggttctcttcctcctgatagcaggctggaaaataatatgctcatgctgccaagcgtgcggcctcaggacgctggaacatatgtgtgtactgccaccaatagacaaggtaaagtgaaagcatttgctcatcttcaggttccggagcgtgtggtcccttacttcacacagacgccatactcatttctgccactccccacaatcaaagacgcctatcgaaaatttgaaatcaaaatcactttcagacctgattctgctgatggcatgctgctttataacggccaaaaacgggtccctgggagtcccaccaatctcgctaacaggcagcctgacttcatctccttcggcctggtagggggcaggcccgagttcagatttgatgcagggtctggaatggctacaattcgtcacccgacccccttggcactgggacatttccatactgtgaccttgttgaggagtctgacccaggggtcccttatcgtcggcgacctggctccagtgaatggaaccagccagggtaaattccaggggctggacttaaatgaagaactctatctgggaggatacccagattatggagctatcccaaaagctggcctatcttccggattcattgggtgcgtccgagaactgagaatccagggcgaagagattgtgttccacgatcttaacctgactgctcacggcatctcccattgtcccacctgtcgagaccggccatgccagaacggtggacaatgtcacgattccgagtcttcctcctatgtgtgtgtctgcccagccggctttacaggcagtcgttgcgaacatagccaggcacttcattgtcacccagaagcctgcggcccagatgctacgtgcgtcaatcggcccgatggtagaggctacacttgtcgttgccatcttggcaggtcaggactccggtgtgaggagggagtgacagtcaccacacctagccttagtggagccggctcatacctggccctacccgccctgactaatacacatcatgagcttaggctcgatgtcgagttcaagcctctggctcccgatggcgtgctcctgtttagtggagggaaaagcggtcctgttgaagattttgtaagtttggcaatggtgggaggacatctggagtttcgctacgagctcggttccggacttgcagttttgcgctctgccgaacctctggcactgggcagatggcatcgggtgtcggcagaaaggctgaataaggacggaagcttacgggttaacgggggccgccccgtgttgcgcagtagccctggcaaaagtcagggccttaatctgcatacccttctatacttaggtggcgtcgaaccatctgtgccattgagccctgcaactaacatgagcgctcattttcggggctgtgtaggagaagtgtccgtgaatgggaagagacttgatctcacttatagttttctgggcagtcagggcattggccagtgctacgattcctctccttgtgaacggcagccatgtcagcatggggcaacatgcatgcctgcaggcgagtacgaatttcagtgcttgtgccgcgacggcttcaaaggggatctgtgtgagcacgaggagaatccatgtcagctgagggaaccttgtctgcatggagggacgtgccaaggtacgcgatgcctctgtctccccggtttctccggcccgcgatgtcagcaggggagtggacacggcatcgcagaatcggattggcacttggagggatcaggaggaaacgacgctcctggccagtatggcgcttattttcacgacgacggcttcctcgccttccctggccatgtattctcccgctccctccctgaggttccagaaacaatagagcttgaagtaaggacctctactgccagtggcctgctgctttggcagggcgtcgaggtgggggaggctggccaaggaaaggattttatcagcctcgggctgcaagacgggcaccttgtttttagatatcagttgggtagtggcgaagcacgactcgtgagcgaggaccccataaacgatggcgaatggcaccgtgtgacagctctgcgcgagggcagacgaggatcaatacaggtcgacggggaagagctcgtatctggcagaagccccggaccgaacgtggcagtgaatgccaagggatctgtctacataggtggggctccggatgtagccaccttgaccggcggcagattcagttccggcattaccgggtgcgtgaaaaacctggtgctgcactcagctagacccggcgcccctcctccacagcccctggacttgcagcatcgcgcccaggcgggggccaatactcgtccatgcccatcatag

SEQ ID NO: 190521 - DNA, 720 bp, synthetic construct
  misc_feature 1..720: note = Description of Artificial Sequence: Synthetic coding sequence
  source 1..720: mol_type = other DNA
gtgacccacggcctgcgggcctacgacggcctgagcctgcccgaggatatcgagacagtgacggcctctcagatgcgctggacccattcctacctatcagacgacgaggacatgttggcagacagtatcagcggggatgatctgggctcaggcgatctggggtccggggacttccagatggggagttggatggccggcttcctgtggtcctggatgtgggcccggaagggcatgagaatgggtctccgctttagacggtgttgctcaggcagcagccctgcagccctctggccgcccacctcgcctctccctagggattcaagcagcgacgcctgggcacagtgcccctcctcccaggaacctgctcgaagaccatccctgccagccacagcaactatgtcagtgtggccttggagcatcgctgttacaggtggcccaactgccggcacgtgcttaatgagtagcatcgtgaggagccagagctgggtgtctgctccgcactctctgtccctgtggcgcaggcatctgtaccgccctggtcagcgacaaccctcatgcgacagccaccagtcgcctaccttactgagcccctgtttccccgtgccgagtggtccatgccctgtcggcccgcgccgtcctcatgcggctatggggaccgcctcccctgaaaccactagcgccaccgacaggcgtactgcccgtaccgctgctatgtcttag

SEQ ID NO: 190522 - DNA, 567 bp, synthetic construct
  misc_feature 1..567: note = Description of Artificial Sequence: Synthetic coding sequence
  source 1..567: mol_type = other DNA
atgaacgccggcgccagcgtgctgaccttcccctgggccgtgtacggcctgcctagagctaggcctgccgtgactgacctgaccggacccctaccaccatcaagccctgccctgccatccgtacttatcaacataaggacttctgtccaaaccgtcgtagtcggccatgccgttgaattcgagtgcctagcactgggcgaccctaaaccacaagtcacatggtcgaaagtgggcggccatctgcgaccaggtatagtgcagtcaggaggagtagtgaggatcgcccacgtggagctggctgatgctggccagtatcgctgcacagctacaaacgccgcaggaactactcagagccacgtacttctgctggtccaggccctgccccagatttcaatgccgcaggaagtccgcgtgcccgccggctcggcagcagtcttcccgtgtattgcatctgggtatcccactcctgacattagctggtccaagctggatggctccttgcctccagatagtcgtttagagaataacatgctcatgttgccttccgttagacctcaggacgcatag

SEQ ID NO: 190523 - DNA, 594 bp, synthetic construct
  misc_feature 1..594: note = Description of Artificial Sequence: Synthetic coding sequence
  source 1..594: mol_type = other DNA
tgaacccccagcggcctgtacctgggcacctgcgagcggtgcagctgtcatgggcactctgaagcttgcgagcccgagacaggcgcttgtcaaggctgccagcaccacacggaagggcccaggtgcgagcagtgccagcccggttattatggcgacgcccaaagaggtactcctcaggattgtcaactttgtccgtgctatggcgatcctgcagctggacaggcggctcatacttgctttcttgatactgatggtcaccccacctgtgatgcatgctcaccaggccattccggccggcattgtgaacgctgtgctccgggctactatgggaacccttctcagggccagccctgccagcgagacagccaggtgcccggacccataggctgcaattgcgacccccagggttcagtctcttcccaatgcgacgctgccggccagtgccaatgtaaagtgtcccccaatccctgcccgtgtggcgcctgttccgctcctctgccgcgcccatgcggagagatcaggcagcacctggtcgaagccgagacctgggcatggggcgccggacacgggggtcaggggagaggatgcccgtag

SEQ ID NO: 190524 - DNA, 492 bp, synthetic construct
  misc_feature 1..492: note = Description of Artificial Sequence: Synthetic coding sequence
  source 1..492: mol_type = other DNA
ccccccgtgaagatcgagagcagcagccccagcgtgaccgagggccagaccctggatctgaactgcgtggtggctgggagcgctcacgcccaggtcacctggtacagacgcgggggatccctgcctccgcacacccaggtgcatgggagtagattacggctcccacaggtgagccctgctgattccggagaatatgtgtgtagagtcgagaatggatctggccccaaagaggcatccatcacggtgagctattgtccccccgcctggtcctggtgcgtgccagggagcacccgccctataaggatcgaaccctcctcgagtcacgtcgcggagggacagaccttggatctcaactgcgtagtaccaggccaggcacatgcacaggtgacctggcacaagcgcggtggttcactgcccgcgaggcatcaaacacacgggagcttgctccgattgcaccaggttaccccagccgacagtggagaatatgtctag

SEQ ID NO: 190525 - DNA, 573 bp, synthetic construct
  misc_feature 1..573: note = Description of Artificial Sequence: Synthetic coding sequence
  source 1..573: mol_type = other DNA
cccgaggacatcgagaccgtgaccgccagccagatgcggtggacccactcttacctgtccgacgatgaagatatgctggcagatagcatctcaggcgatgacctgggaagtggagatctgggatcaggcgatttccaaatggtctacttccgcgcgctggtgaactttactcgctccattgagtactcgccacagttagaggatgctgggtctcgagagttcagggaggtaagcgaggctgttgtggacacgctggagagcgaatacttaaagatcccaggcgaccaggtggtgtctgtggtttttattaaggagctggacggttgggtgttcgtcgagctggacgtcggatcagaaggcaacgcagatggtgcccagattcaagagatgctgttacgggtcataagtagcggaagcgttgctagctacgtaacaagccctcaaggattccaattcaggcgcctcggcaccggtgaacccattctggtctctgggatcgcaagcagcagactcgtgggctcaccctttagcgtgagcgcaatcggttctcagttaggactagctcaccactag

SEQ ID NO: 190526 - DNA, 624 bp, synthetic construct
  misc_feature 1..624: note = Description of Artificial Sequence: Synthetic coding sequence
  source 1..624: mol_type = other DNA
ggcgagagccgggagggccggggctaccggcaggtggcccagcgggtggcagagcgctctcccgttccatccttactgagccattctggctgcgtggtgcatacaagactgagccccgtgccttctgttagccctccaattcgaattgaaagctcctctcccacagtggtcgaggggcagacactcgatctcaattgcgttgtcgcaaggcagccacaagctataataacctggtataagcggggcggatccctcccgtccagacaccagacacacggcagccaccttcggttacaccaaatgtccgtggctgacagcggcgagtacgtgtgccgcgcgaataacaatatcgacgccctcgaagcaagcatcgtcatctccgttagtccatcagctggttcaccctcagcccccggatcctctatgcctatcaggatcgagagttccagcagccatgttgccgaaggcgagaccctcgacctgaactgtgtggtcccaggccaagcccacgcacaggttacatggcataaaagaggtggtagtctacctagtcatcaccagacacgtggttcacgcctgaggctccaccatgtttccccggccgactctggagagtacgtttag

SEQ ID NO: 190527 - DNA, 1104 bp, synthetic construct
  misc_feature 1..1104: note = Description of Artificial Sequence: Synthetic coding sequence
  source 1..1104: mol_type = other DNA
atgggctggcggcggggccggggcgccccccggttccccgacggcatggctgctggccagaggcgttcctctctgagcaggttgggctctcaggccgagggtctgctcaccagccagaccatggggggccaggcagagacgttactgacgtcgcaaaccggctggctccttggcaggggatgcaacttagggtccccaggcggacaggtctcttgggacaaggtaagaatccctggtgtccttcagagactgggggtaacctatttcgttgtcgccgtgctggagctgcttttcgccaagcctgtgcctgagcactgtgcctcagagcgctcatgtctttccctgagggacatcacctccagctggcctcaatggctactgatcctagtcctggagggattatggctgggactgacttttttgctacctgtcccgggatgtcccactggctatttaggtccagggggcatcggagattttggtaagtatccaaactgcacaggcggcgccgcaggatatatagatcggctgctcctcggcgacgatcacctttatcagcacccaagttctgcagtgttgtatcacacggaagtggcatacgaccccgaggggatcctgggtacaatcaattcgattgttatggcctttctcggagtccaagctggcaagatcctgctttactacaaggcccgcactaaggacattctcattcgcttcactgcttggtgctgcatcctgggactcatatctgttgccttaactaaagtgagcgagaatgagggattcattcctgttaataaaaacctgtggagtctttcttacgtgactactctttcatcttttgcattcttcatccttttggttctttatccggtagtcgacgtgaagggtctgtggactggaacccctttcttctaccccggaatgaacagcatcctggtgtacgttgggcacgaggtatttgagaactacttccccttccaatggaaactcaaagacaaccaatcgcacaaggaacacctgacacagaatattgtggcgactgccttatgggtacttatagcctacatcctgtaccgcaaaaaaatcttctggaaaatttag

SEQ ID NO: 190528 - DNA, 669 bp, synthetic construct
  misc_feature 1..669: note = Description of Artificial Sequence: Synthetic coding sequence
  source 1..669: mol_type = other DNA
atgagcggcgccggccgggccctggccgccctgctgctggccgcctctgtcctgtctgctgctctgctggccccaggaggatcgtccggcagagatgcccaagccgctcctccacgtgatttagacaagaagcggcacgccgagctgaagatggatcaagctctcctgcttatacacaatgaacttctgtggactaacttgacagtctactggaagtcggaatgttgctatcattgcttgttccaggtgctggtgaatgtcccccagagccccaaggctggtaagcccagcgcagccgccgctagtgtgtccacacagcacgggtccatcctgcagcttaacgacaccctcgaagagaaggaggtgtgtcgtcttgagtataggtttggcgaattcggtaattatagccttttagttaagaacatacacaatggcgtgtctgagatagcgtgcgatctggcggtgaatgaagatccagtcgactctaacttgcccgtttctatcgcgtttttgatagggctggctgttatcatcgtgatcagtttcttgcgactgctgcttagggtgctcctatgtcacccggggtggagtgcggtcgcaccatcaaggctcaccccatcaagtgctagtcgggtacacacaatcctacttccccagccccctgagtag

SEQ ID NO: 190529 - DNA, 1908 bp, synthetic construct
  misc_feature 1..1908: note = Description of Artificial Sequence: Synthetic coding sequence
  source 1..1908: mol_type = other DNA
atgagcggcgccggccgggccctggccgccctgctgctggccgccagcgtcctctctgcagcactgctggctcccggcggtagctcgggccgggacgctcaagcagcccccccgagagacctagataagaagcgccatgccgagctgaagatggaccaggcccttctgctcatccataacgagttgctatggacaaacctcaccgtgtactggaagagtgagtgttgctaccactgtctattccaggtgctagttaacgtgccacagtctcccaaggccggaaaaccaagtgccgctgcagccagcgtgagcacacagcacggctccatcctccagctgaacgataccctggaggagaaggaggtctgccgactagaatataggtttggggaattcggaaattactccctgttagtgaagaatatccataacggtgtgagcgagattgcctgcgacctggccgtcaatgaggacccggtggattccaacctgcctgtgtcgattgcttttctgatcggcctggcggtgataattgtgattagctttctgaggctgctgttgtctttagacgattttaacaattggatttccaaagctatctcctccagagagactgaccgccttatcaatagcgaactcggatcaccgagtcgcaccgaccctcttgatggggacgtccagccagccacatggcggctgtcggccctgcctccccgcctgcgctcagttgatacctttagaggcatcgcgcttatcctgatggttttcgtgaactatggcggtgggaagtattggtacttcaagcacgctagctggaatggcctgacagtcgccgatctggtgttcccctggtttgtctttatcatgggctcttctatcttcctgagcatgacttccatacttcaacggggctgctcaaagtttcggctgctcgggaaaatcgcttggcgtagttttctcttgatttgcataggtatcatcatcgtcaacccaaattactgtcttgggcctctcagttgggacaaggtgcggatccccggcgtgttacagcgcttaggcgtgacctactttgtggtcgctgtgctggaactcctgtttgccaaaccagttccagagcactgtgcaagtgagcgttcctgtctgagccttcgtgatattacttctagttggccccagtggttactcatactggtgcttgaggggctgtggctgggcctgacctttttactgcccgtaccagggtgtccaacagggtatctggggcctggaggaatcggcgatttcggcaagtaccctaattgcaccgggggggccgccggctatatcgacagactgctcctcggggatgaccacctatatcaacacccatctagcgctgtgctttatcatactgaggttgcatacgatcctgaggggatcctcggcactattaacagtatcgtaatggcgtttttgggcgtgcaggcaggcaaaatccttctgtactataaagcacgaacgaaggacatattgatccggttcacagcttggtgttgtatcttaggactgatatccgttgcattaacgaaggttagcgagaacgagggttttatccctgtgaataagaatttatggtccctatcttacgtcaccaccctttcttcctttgcattttttattctgttagtattgtaccccgttgtggacgtgaaggggttgtggaccgggacccctttcttttatcctggaatgaacagtattctggtgtacgtgggacacgaggtcttcgagaattacttccctttccaatggaagctaaaagacaaccagtctcacaaagaacacttgactcagaatattgttgcaacagccctctgggtcctaatagcctacatcctttaccggaagaaaatattttggaagatttag

SEQ ID NO: 190530 - DNA, 1992 bp, synthetic construct
  misc_feature 1..1992: note = Description of Artificial Sequence: Synthetic coding sequence
  source 1..1992: mol_type = other DNA
atgaccggcgcccgggccagcgccgccgagcagcggcgggccggcagatctggccaagctcgggccgcagagcgcgccgccggcatgtccggcgccggcagggccttagcagcgttactgctggctgccagtgtcctgagtgctgccctcctggctccaggaggctcctccggtcgcgatgcgcaggctgcacctcctagagacctcgataaaaaaagacatgccgaacttaaaatggatcaagcactgctcctgattcataacgaactgctgtggaccaacctgaccgtgtactggaagagtgagtgttgttatcattgtctcttccaggtgctggtgaacgtgccccagtctcccaaggctggaaagccgtccgctgccgctgctagcgtaagcacacaacacggaagcattctacagttaaacgacaccctcgaagagaaggaggtttgccggctcgaatacagatttggagaattcgggaattactctttactggtgaaaaacatccacaacggggtgtccgagatcgcctgcgacctcgccgttaatgaggatccagtggatagcaacctgcccgtgtcgatcgcattcctgattggtctcgccgtaatcattgtgattagcttcttacggctgctgctaagcttggacgacttcaataactggatatctaaagctatttcttcaagggaaaccgaccgtctgattaatagcgagttagggagtccctctcgcactgaccccctagacggtgacgtacagccagccacatggaggctgtctgcactgccgccacggctgagatcagtcgacactttcagaggcatcgcccttatcttgatggtcttcgtcaattatggtggtggcaaatattggtacttcaagcacgcttcttggaatgggcttaccgtcgctgatctggtatttccttggttcgtctttatcatgggaagctcaatcttcctctcaatgacaagcattttacagaggggatgtagcaaattccgccttctgggaaagatagcttggaggtcatttctgcttatatgcatcggcataatcattgtcaatcccaattattgtctgggaccgctgtcatgggataaggttaggatacctggggtgttgcagcgcctgggagtgacctacttcgtggtggccgttctggaactgctgtttgctaagccagtaccggagcactgtgcttcagagagaagttgcctgtctttgagagacataactagctcatggccacaatggctcttgattcttgtattagaagggctctggctgggactaacattcctcttacccgtgcctgggtgtcctacgggttaccttggtcccggcggaatcggagattttggcaaatatccaaactgtactggaggagccgcaggctatattgatcgccttcttcttggcgacgatcacctgtatcagcatcccagcagcgcagtgctctaccatacggaggtggcgtatgatcccgaaggcatcctagggaccattaacagtatcgtgatggcttttttaggggttcaagctggaaagatccttctatattacaaggccagaaccaaagacatcttgatcaggttcaccgcttggtgttgcatactcgggctgatttccgtggccctcacgaaggtctctgaaaacgaaggattcattcctgtgaacaaaaatctctggtcactgagctatgtaactacgctatcttctttcgcttttttcatcttgttggtcctgtaccccgtagtcgatgtgaagggcttatggacaggaactccttttttttaccctggcatgaactctatcctggtgtatgtggggcacgaggtctttgagaactactttccatttcagtggaagcttaaggacaaccagtcgcacaaggagcacttaacccagaatatcgtggctaccgcgctgtgggtgctgatagcatatattctataccgcaagaagatcttctggaagatatag

SEQ ID NO: 190531 - DNA, 1647 bp, synthetic construct
  misc_feature 1..1647: note = Description of Artificial Sequence: Synthetic coding sequence
  source 1..1647: mol_type = other DNA
atgcgggtgctgtgcgccttccccgaggccatgcccagcagcaactccagacctcccgcttgcctggcccccggagccttatacctcgccttacttctgcacttgagtctctcctctcaggctggagatcgaaggccactcccggtggacagggcagctggcctgaaggagaagacactgatacttctcgatgtctccaccaagaatcccgttcgcaccgtgaatgagaacttcctaagcttacaactggatccatcaattattcatgatggttggcttgacttcttgagttcaaagaggctcgtcacacttgccagggggctttccccagctttcctgaggtttggaggaaaacggacagacttcttacagtttcagaacttgcggaatcctgctaagtctagaggaggccccggccccgattattacttaaagaattatgaagatgatatcgtcagatcggatgtagccctggataaacagaaaggctgcaaaattgcccaacaccctgatgtgatgttggagcttcagagagagaaagctgcacagatgcatctggtattgctgaaggagcagttttcaaacacctactctaacctgatcctgaccgctaggtccctggataagctctataacttcgcggactgttcaggcctgcacctgatattcgcgctgaatgcgctgcgccggaacccaaacaacagttggaactcgagctcagccctcagcctcctgaagtacagtgcttctaaaaaatataacattagttgggagcttgggaacgagcccaacaactataggaccatgcacggccgagccgtaaacggttcgcaactaggcaaggactatattcaacttaaatctctgctacaacctatccggatctattcacgggcctctctctacggaccaaacatcggacggccaagaaaaaacgtcatcgcgctactagatggttttatgaaggtggccggaagtactgtcgacgccgtcacatggcagcactgttacattgacggccgtgttgtgaaggtgatggacttcttgaagacgcggctgctcgacacattatcagatcagattcggaagatccagaaagtggtgaatacttacacgccaggaaaaaaaatttggctggagggcgttgtgaccacaagtgctggcggaacaaacaatttgagcgacagttacgccgcaggcttcttgtggctcaatacgttagggatgctcgcaaaccaggggatagatgtcgtcatcagacacagcttttttgaccatggttataatcacctggtggaccaaaatttcaaccccttacctgattattggttgtcgctcctgtacaagagactgatcggtcccaaggtcctagccgtgcacgtcgccgggctccagcgaaagcccagacccggtagggtcattagggacaagctgcgaatatatgcacactgcacgaaccaccacaatcataattacgttaggggtagcattactctcttcatcattaacctccatcgctcaaggaagaaaatcaagcttgcgggcacgttgcgggataagctggtgcaccagtatctgttacagccttatggccaggagggtctcaagtcaaaaacccaaaggtgccagtattgtggcataatttag

SEQ ID NO: 190532 - DNA, 1605 bp, synthetic construct
  misc_feature 1..1605: note = Description of Artificial Sequence: Synthetic coding sequence
  source 1..1605: mol_type = other DNA
atgcgggtgctgtgcgccttccccgaggccatgcccagcagcaacagcagaccacccgcttgcctggccccaggcgccctgtatttagcactcttgttgcacctatctttgtccagccaggcaggcgatcggagaccgttgcccgttgaccgcgcagcaggactcaaggaaaaaaccctgatactcctggacgtttccactaagaaccccgtccggaccgtaaacgagaattttcttagtctgcagctagacccgtctatcattcacgatgggtggcttgacttcctctctagcaagcggttggtcacactggcccgcggactgagccctgcctttttaaggtttggcgggaaaaggaccgacttcctgcaatttcagaatttacgcaaccccgccaagagcaggggaggccccggcccagactattacctgaagaactacgaggacgacatagttagatctgacgttgcactggataagcagaagggttgcaaaatcgctcaacatcctgacgtgatgctagagcttcaaagagaaaaagccgcacagatgcatttggtgttgctgaaggagcaatttagcaacacatactcgaatcttatactgacagagccaaacaattacaggacaatgcatggccgcgccgtcaatggatctcagctcggcaaagattacattcagctcaaatccctgctgcaaccaatcagaatctactcccgagcaagcttatatgggcctaatataggcaggccccggaagaacgtaattgccttgctggacggattcatgaaggtagccggtagcacagttgacgctgtcacttggcagcattgctatatagacgggagagtggtgaaggttatggacttcctcaagacacgactgcttgacacattgagtgatcagatccgcaaaatacagaaagtggtgaatacgtatacacctggcaagaagatctggctggagggtgtcgtgactacatccgcaggtggaacaaataacttgtccgatagctatgcagccggattcctgtggttgaacactctgggcatgctggccaatcaaggaattgacgtggtcataaggcatagttttttcgatcacggctacaatcacctggtggatcagaatttcaatcctctgccagattactggctgagcctcctctataagcggctgattggaccaaaggtgttagcagtccatgtagcagggctccagcggaaacctcgccccggccgagttatcagggataaactgaggatttacgcacactgtactaatcatcacaaccacaactacgtacgggggtctattacgcttttcatcatcaaccttcaccgatcgcgaaagaaaattaaactggctgggactcttcgggacaagctcgttcaccaatacctgcttcaaccctacgggcaggaaggcctgaagtctaaatccgtccagttgaacggccaacctctggtcatggtggacgatggaacactgcccgagctaaagccacgtcccctgcgtgccggacgcacgctggtaatcccccccgtgaccatgggattttacgtggtgaaaaacgtgaacgccttagcctgccggtatcgatag

SEQ ID NO: 190533 - DNA, 1779 bp, synthetic construct
  misc_feature 1..1779: note = Description of Artificial Sequence: Synthetic coding sequence
  source 1..1779: mol_type = other DNA
atgcgggtgctgtgcgccttccccgaggccatgcccagcagcaactcccgtccgcccgcctgcctggcccccggcgccctttatctggccctcttactgcatctgagcctgagctcccaagccggcgaccgcaggcctctccctgtcgacagagccgccggactcaaggagaaaacgctgattctgctggacgtgtccacaaagaacccagttaggactgtgaatgaaaatttcttgagccttcagctggatccaagcatcatccacgacggttggttggatttcttatcgagtaagcgcctagtgaccctcgccagaggactaagcccggcatttcttagatttggcgggaaaaggactgacttcctgcagttccagaatcttaggaaccccgccaagtcccggggaggccctggccccgactactatttgaagaattatgaggatgacatcgtgaggtctgatgttgcgctggataagcagaaggggtgcaaaatcgcccagcaccctgacgttatgctggagctgcaaagggagaaagccgcccagatgcacctggtcctcctcaaagagcagttttcaaacacatactccaacctcattttgaccgctcgcagcctcgacaagctatataatttcgcagactgttccggactacacctgatattcgccctgaacgcgcttcggagaaacccaaacaactcttggaacagcagtagtgccctgtccctgcttaaatactcagctagtaagaagtataatattagttgggaattgggcaacgaacccaacaattatcggactatgcatgggagagccgttaatggtagccaactgggaaaagattacatacagctgaaatctctgctgcagcctatccgcatttactcccgcgcctctctatacggccccaatataggacgcccccggaaaaacgtgattgcattactcgacgggtttatgaaggtagccggatctaccgttgacgcagtgacatggcagcactgttacatagacggaagagtggtgaaggtcatggattttctaaagaccaggctgttggatacgctctccgatcaaattaggaaaatccagaaagtcgtcaatacctacacccctgggaaaaaaatctggctggagggggtcgtgactacaagtgctggtggaaccaataatctgtctgacagttatgctgcgggattcctgtggctgaacactctaggaatgctggccaatcagggtatagacgtggtgattcgccattccttctttgatcatggatataaccacttagtggaccagaactttaatcctctccctgattattggctctctcttctatacaagcggctgattgggcccaaagtgctggcggtacacgttgcgggcctccagcggaagcctcggcctggccgtgtgatccgggacaagctgcgcatatacgcacactgtacaaatcatcataaccataactacgttcgcggtagcatcaccttgttcattataaatctacatcggagtagaaagaaaattaaacttgccggcactctgcgcgataagctggtgcatcagtaccttctgcagccatacggacaggagggactgaagtcaaagtcagttcagcttaacggtcagccacttgtcatggtggatgatgggactctccctgaactgaagcctaggcctttgagagctggacgaacactcgttattcccccagtcaccatgggcttctacgtggtgaagaacgtcaatgcactggcttgtcgctaccgctag

SEQ ID NO: 190534 - DNA, 1443 bp, synthetic construct
  misc_feature 1..1443: note = Description of Artificial Sequence: Synthetic coding sequence
  source 1..1443: mol_type = other DNA
atgcgggtgctgtgcgccttccccgaggccatgcccagcagcaactctcgccctccagcctgcctcgcacctggggcactgtacttagctctcttgttgcacttatctttgtcctcccaagccggagatcgccggccactgccagttgatcgcgccgctggactgaaggagaagacattaatactgttggatgtgagcaccaagaatcctgtgcgtacagttaacgaaaattttttgagcctccagctcgatccaagtattatccatgacggttggctagatttcctgagcagcaaaagacttgtgaccctagcccgtggactgtctcccgcatttctgagattcgggggcaaaagaacagatttccttcagttccaaaatcttcgcaacccagccaagagccgaggaggtcctgggcccgattattatctgaaaaattatgaagatgagcctaataattacagaaccatgcacggcagggccgttaatggaagccagctcgggaaagattatatacagcttaaatccctgttgcagccaataagaatctactctagagcctcactgtatgggcctaacattggaaggccacggaaaaacgttatcgccctgcttgatggattcatgaaagtcgcgggcagcactgtggacgcagtgacttggcagcattgctacattgatggacgcgtcgtgaaagtgatggactttttaaaaaccagactactcgatacacttagcgaccagatcagaaaaatccagaaggtggttaatacctatactcctggcaagaagatctggcttgaaggcgttgttacaaccagcgccgggggtacgaataatcttagtgactcttatgcagccgggttcctgtggctcaatacattgggcatgctagccaaccagggcatagatgttgtcatacgtcactcctttttcgaccacggctacaaccacctggttgaccagaatttcaaccctctgccagactattggctgtctctcctttataaaaggcttattgggccaaaagtgttggcggtgcacgtggccggtctgcagcgaaaacctagacctggtcgtgtcattcgagacaaacttcgcatatacgcccattgtactaatcaccacaaccacaactacgtgagaggtagtattactctgttcattattaacctgcatcgcagccgcaaaaaaatcaagttagccggtacattgcgtgataagctggtacatcagtatcttctccaaccctatgggcaggagggcctgaagtcaaaatccgtgcaactcaacggacagccgctcgttatggttgatgacggaacactgcccgagctcaaaccaagacctctgcgggctggaagaacactcgtcatcccccccgtgactatgggattctatgtggttaagaacgtcaacgcgctggcttgccggtataggtag

SEQ ID NO: 190535 - DNA, 1251 bp, synthetic construct
  misc_feature 1..1251: note = Description of Artificial Sequence: Synthetic coding sequence
  source 1..1251: mol_type = other DNA
atgaagcgggagcggggcgccctgagccgggccagccgggccctgcgcctggcgccattcgtttatctgctcctgatccagacagacccactcgagggagtcaacatcacttcccctgttcgtcttattcatggtactgtgggcaagtcagctctgctgtctgtgcagtattcaagcacttctagcgatagacccgttgtaaagtggcagcttaagagggataaaccagtcacagtggtccagtctatcggcactgaggttatagggacgctcaggcctgactaccgagatcgaatccgcctgtttgagaacggtagtctccttttgagtgatctgcagctagccgacgagggcacttatgaggttgagatttcgatcaccgacgatacattcacaggcgagaagaccatcaacttgacagtggatgtgcccatctctcgtccacaggtattagttgcatctacaacagtgctcgagctgtcggaagcgttcacgctgaactgctcccacgaaaatggcactaagcctagctacacctggttaaaagacggcaagcctctcctaaatgacagccggatgttgctgagccctgatcagaaggtgctgaccattaccagagtgctgatggaagacgatgacctttattcctgcatggtggaaaaccctatctcccaggggcgctcattacctgtgaagatcactgtgtaccggcggtccagcctgtacatcattctgagtactggaggcatttttttgctcgtgaccctcgtaacagtctgtgcctgctggaagccatccaaacgcaagcaaaaaaagctggaaaagcagaacagtcttgagtatatggaccagaacgatgacagactgaaacccgaggcagacacactgccaagatctggggagcaggaacgcaaaaatcccatggccctgtacattcttaaggacaaggattcgcccgaaacagaagaaaatcctgctccagagccccggtctgccactgaacctggaccccccgggtatagtgtgagccccgctgtgcctggacgctccccaggactccccatcaggtccgccagacggtatccccggtctcctgcccgatccccggccactgggcggacccattcttctccccctagagctccaagcagccctggtcggagtcggagcgcaagtcgaacactgagaaccgctggggtgcatatcattagagagcaggacgaggctggaccggtggagatctccgcctag

SEQ ID NO: 190536 - DNA, 1104 bp, synthetic construct
  misc_feature 1..1104: note = Description of Artificial Sequence: Synthetic coding sequence
  source 1..1104: mol_type = other DNA
atgaagcgggagcggggcgccctgagccgggccagccgggccctgaggctcgcaccattcgtctatctgctcctaatccagactgatcccctcgagggggtgaacatcacctcgccagttcgactgattcatgggaccgtcggcaagtcagctctgctttccgtccagtattcttcgacaagctctgacaggccagtagtcaagtggcagttaaaacgagataagcccgttacggtggtccaaagcatcggaacagaggtgatagggaccctgaggcccgactatcgcgatcggatcagattatttgaaaatggctcactcttgctgtcagacttgcagctggccgatgaggggacgtatgaagtggaaatttccatcaccgacgacaccttcaccggtgagaaaaccattaacctgaccgtcgacgtacctatctccaggccccaagtgctggttgcctcaacaaccgtgctagaactttctgaggctttcacgctcaattgctcacacgagaacggcactaagccaagttacacttggctgaaagatgggaagcctttgctcaacgattcaaggatgctgctgtctcctgatcagaaggtcttgactataaccagagttctgatggaggatgacgatctttatagttgcatggtcgagaaccccatctctcaggggcgttcattacctgtcaagattacggtataccgccggtcttctctgtatattatattgtcaaccggtgggatcttcctgcttgtaacgctcgtgaccgtgtgtgcctgttggaaaccatcaaaacgcaaacagaagaagttagaaaagcagaactcgttagagtatatggaccagaacgatgatagactcaagcccgaaggggagcttccagcaacgcagagtcctattccatcgactattcggtccgtgggctgctgggaaaaggctgagcttggcgataaagaaaactcatccgcggggacactaccctcagacctcggggcctctaaaggcaaggagccagaacccgcctccctcgcgtctagtcattctctcccacgacgccatgcaatgccctctacactctccgtgtctgtccacgagtag

SEQ ID NO: 190537 - DNA, 669 bp, synthetic construct
  misc_feature 1..669: note = Description of Artificial Sequence: Synthetic coding sequence
  source 1..669: mol_type = other DNA
atgagccagaccaagatgctgaaggtgcgggtgaccctgttctgcattctggcaggcattgtgctggccatgaccgccgttgtgacagaccattgggccgttctcagtcctcacatggaacaccataacactacttgtgaagcagcacacttcggactatggaggatttgtaccaagcgcataccaatggacgactctaagacttgtggccccatcacattaccaggcgaaaaaaattgcagctattttaggcactttaatcccggcgagtccagtgagatctttgagtttaccacccagaaagagtactctattagtgcagcagctatcgccatattttcactcgggtttattatactcggctctctctgcgttttgctctctctgggcaaaaagagagattaccttctccgtcccgcatctatgttttacgcatttgccggcttgtgcatcctggtatccgttgaagtcatgaggcagagcgtaaagcgcatgatagatagtgaggacacagtgtggattgagtattactactcttggtcctttgcctgcgcatgtgcggcctttatattactgtttttgggtggactggctctgctgttgttctcactgccgaggatgcctcgaaacccctgggaaagctgtatggatgcagagcctgagcattag

SEQ ID NO: 190538 - DNA, 633 bp, synthetic construct
  misc_feature 1..633: note = Description of Artificial Sequence: Synthetic coding sequence
  source 1..633: mol_type = other DNA
atggacctggaggagttcctgagcgagaacggcatcccccccagcccgtctcagcatgatcactctccacatccacctggattacagccagcttccagcgccgcccctagcgtcatggatttaagtagccgcgcatctgcccctctgcaccccgggattccatctccaaattgcatgcagtctccaattcgtcctgggcagttactgcccgcaaacagaaatacgccaagcccaatcgaccctgataccatacaggtgccagtcgggtatgaaccagaccccgcggatctcgccctgtctagcattccaggacaggaaatgtttgatcccagaaaacgtaaattttccgaggaggaactgaaacctcagcctatgattaaaaaagctcgaaaggtctttatccccgatgatctgaaggatgacaagtactgggcacggagaaggaaaaataatatggcggctaaacgaagtcgcgacgccaggcggctaaaagaaaatcagatcgcaatccgagcctcgttcctggaaaaggagaatagcgcgctgcgacaggaagtcgctgacctgcgcaaggagttgggaaaatgtaagaatattttggctaagtacgaggcaagacatgggcccctgtag

SEQ ID NO: 190539 - DNA, 1095 bp, synthetic construct
  misc_feature 1..1095: note = Description of Artificial Sequence: Synthetic coding sequence
  source 1..1095: mol_type = other DNA
atgcacccccaggtggtgatcctgagcctgatcctgcacctggccgactcagtagcggggagtgttaaggtcggaggtgaggctggcccgtccgttactcttccctgtcactactcaggggctgtgacatccatgtgttggaacagaggctcatgtagcctctttacatgtcagaacggcattgtctggacgaatgggactcatgttacatatcggaaggacacaaggtataagctgctcggcgacctgtccagacgtgatgtcagccttactatcgagaacactgccgtaagcgactcaggggtgtactgttgcagagtcgagcatcggggctggttcaacgatatgaagataaccgtctcattggaaatcgttccacccaaagtcaccaccacccctatcgtcacaaccgtccccaccgttacaacagtgcggacatccaccacagtgcctactaccacaaccgtccctatgactacggtacctacaactaccgtgccaaccacaatgagcatccccacaactactacagtgctgaccactatgactgtgagtaccacaacatcggtaccaactacaacttctattcctaccaccaccagcgtcccagttacaaccacagtatccaccttcgttcccccaatgcctctcccccgccaaaaccatgaacctgtggctaccagccctagttcgcctcagcctgctgaaacgcatcctaccaccctccagggagctattcgtagggagcctacttcctctccactgtactcctacacgaccgatggaaacgataccgtcactgaatcatcagacggactttggaacaacaatcaaacccagctcttcctagagcattccttattaacggccaacaccaccaaaggcatctatgcaggggtgtgcatttcagtgctcgtgctcttagctttattgggagtgatcatcgccaaaaaatacttcttcaagaaggaggtccagcagcttagcgtgtcattcagtagccttcagattaaagccctgcaaaatgcggtggagaaggaggtgcaggccgaagacaacatttatattgaaaattccctgtacgccaccgattag

SEQ ID NO: 190540 - DNA, 1206 bp, synthetic construct
  misc_feature 1..1206: note = Description of Artificial Sequence: Synthetic coding sequence
  source 1..1206: mol_type = other DNA
atgcacccccaggtggtgatcctgagcctgatcctgcacctggccgattccgtggctgggtcagtgaaagtgggtggagaggctggcccaagcgttacactcccttgccattattctggcgcggtgacttcaatgtgctggaaccggggctcctgctctttgtttacatgtcaaaacggcatcgtgtggaccaacgggactcatgtgacatacaggaaggatacccgctataaactgctcggggacctcagtaggcgcgacgtgtccctgacaatcgaaaatacagcggtgagcgacagcggcgtctattgttgccgggtcgagcaccgcggctggttcaatgatatgaaaattaccgtgagcttagaaatagtgcctccaaaggtaaccactactcctatcgtcaccacagtgccaactgtcaccaccgttagaaccagtacaacagtacccaccacgacgaccgtaccgatgacaacagtgcctacaaccacagtacctaccaccatgtccatccccactaccacaacagtgctgaccaccatgaccgtgtccacaaccacatctgttcctacgacaactagcatccctacgactacatcagttcctgtgacgactaccgtgtccacctttgtcccccccatgccactgcccaggcagaatcatgaaccagtggctacatcaccatcatccccgcagcccgctgagacccacccaacaaccctgcaaggggccattcggagggagccaacctctagtcccctctactcttacactaccgacggaaacgacacagtgaccgagagtagcgacggcctgtggaacaataaccagactcagttattcctggagcattcactattaactgctaatacgacgaaaggaatttacgccggcgtgtgtatctctgtgctcgtactgctcgctctcttgggcgttattattgcaaaaatgttccaccttgcagcgttcaagctcaagctgtgtaaaatgcaactgaagaggaaaagtaaacaaaagaccatctcgaccttgcggattgtatttatgccacggacgaagacgcagtggtgttcacttagagtgtacgcccatgaatgtaggagattgaacaggcaccaacatattcgacgactcctggatccaaagaccattttcttgtttcagttccatctagcctttcagcacgtcagcgacacgggatag

SEQ ID NO: 190541 - DNA, 672 bp, synthetic construct
  misc_feature 1..672: note = Description of Artificial Sequence: Synthetic coding sequence
  source 1..672: mol_type = other DNA
atgcacccccaggtggtgatcctgagcctgatcctgcacctggccgattctgttgccggctccgtcaaggtggggggcgaggccgggcccagtgttacgcttccttgtcactactctggcgctgtcacttctatgtgctggaaccgaggaagctgctcgctcttcacttgccagaacgggatagtgtggaccaacggaactcacgttacctacaggaaggatactcggtataaactcttgggagacctctcccgaagagacgtgtctctgacaattgaaaacacagcagtgtctgactctggcgtttactgttgcagggtggagcaccgcggctggttcaacgacatgaagatcaccgtctccttggagattgttcctcctaaagtgaccaccactcccatcgtcacgacagttcccactgtgactaccgtgcggactagcaccaccgtgccaacaacaacgactgtcccaatgacaaccgtgcccacaaccacagttcctactacaatgagcattcctaccaccacaactgttctgacgacgatgactgtgtcaaccactacgtccgtgccaaccaccactagtatcccaaccaccacatcagtgccagtgactacaactgtgtccaccttcgtgcctcccatgcccctgccaaggcagaatcacgagtag

SEQ ID NO: 190542 - DNA, 1095 bp, synthetic construct
  misc_feature 1..1095: note = Description of Artificial Sequence: Synthetic coding sequence
  source 1..1095: mol_type = other DNA
atgcacccccaggtggtgatcctgagcctgatcctgcacctggccgacagtgtggccggcagtgtgaaagtcggcggcgaagccggaccttctgtcactctcccatgtcattactcaggggctgttacctccatgtgttggaaccgcggatcctgctccctgttcacctgccagaacggcatcgtctggacaaatggcactcacgtgacctatagaaaggacactagatacaagttactcggcgatctgagccgccgcgacgtgtctctgaccatcgagaataccgctgtctcagactcaggcgtttactgctgtagagtagaacatagaggctggttcaacgacatgaaaattaccgtgtctcttgagattgtgccacctaaggtgacaaccactcccatcgtgactacagtgccaacagtcaccacagtccgcacatccacgaccgtgcccaccaccactaccgtccccatgaccacagtcccaacaactaccgtgccgactactatgtctatcccaactacaacgacagtgctgacaacaatgactgttagtacaactacctcagtgcccactactacaagcattccaaccactacatccgtgcccgtgaccaccacagtttccaccttcgtacccccaatgccattacctaggcagaatcatgaacctgttgctacatctccatctagtccacagcccgccgagacccacccaaccaccttgcagggcgctatccgtcgcgagcccacctcctcaccgctgtattcgtacaccactgatggtaatgacacagtaaccgaatcctccgacggtctatggaataataaccaaactcaactgtttttggaacattccctcctgactgctaacaccaccaagggtatctacgccggagtatgcattagtgtactagtactgctcgctctgttgggggttatcattgccaagaaatacttcttcaaaaaggaggtgcagcagctttcagtgagtttcagtagtctgcagatcaaagccctccagaatgccgtggaaaaagaggtccaagcggaggacaacatttacatcgaaaacagcttgtacgcaacagattag

SEQ ID NO: 190543 - DNA, 1095 bp, synthetic construct
  misc_feature 1..1095: note = Description of Artificial Sequence: Synthetic coding sequence
  source 1..1095: mol_type = other DNA
atgcacccccaggtggtgatcctgagcctgatcctgcacctggccgatagtgttgctggttctgtcaaggtgggcggtgaagcggggcccagcgtgacactgccctgtcactattctggcgcagtgacttccatgtgttggaaccgtggctcgtgctccctgtttacctgccagaacgggattgtctggactaacggaacccatgttacctacaggaaagatactagatacaaactgctgggcgacttatcccggcgcgatgtgagtttgactatcgaaaatactgccgtttccgattccggagtttactgttgtcgcgtagagcacagaggatggtttaatgatatgaagatcacagtaagcctcgagatcgtgccgcccaaggtaactaccacaccgatcgttacgacagtccccacggtaacgacagtgcgcacgagtaccacggtgcccacaaccaccaccgtccctatgacgacagtcccaaccacgacagttcctacaaccatgtctatacccactactacaactgtgctgacaacgatgaccgtgagtaccacaacaagtgtgccgacaaccacctcgattcccactaccacttccgttcccgtgacaaccacagtttccaccttcgtaccacctatgcccttgccccgccagaatcacgaacccgtcgccacctccccatcaagcccccagccggcggagacccatccaacaactctccaaggagctattcgcagagagccaacttcgtcacccttatatagctacaccacagatggtaacgacaccgtcactgaaagtagtgacggcctgtggaacaacaaccagacccaattatttctcgaacattcgctattaactgctaatacaaccaaaggcatttatgccggagtgtgcatttctgtcctggttttgttggctcttctgggcgtgattattgccaagaagtacttcttcaaaaaggaggtgcagcaactgtcggtgtccttctcttctctgcagattaaagcattacaaaatgcagttgagaaagaggtacaagctgaagacaacatttatatcgagaactccttatacgctactgactag

SEQ ID NO: 190544 - DNA, 522 bp, synthetic construct
  misc_feature 1..522: note = Description of Artificial Sequence: Synthetic coding sequence
  source 1..522: mol_type = other DNA
atggagcccggcgccggccacctggacggccaccgggccggcagcccctctctccgccaggccctgtgtgacgggagtgcggtaatgttctcttctaaagagaggggccggtgtacagtgatcaattttgtgcctctcgaagctcctctaagaagcacaccccgatcacgacaggtaactgaggcctgtggtggagaaggcagggctgtccccctgggctccgaacctgagtggtcagtcggcggcatggaggccaccctggagcagcatttagaggataccatgaaaaaccccagcattgtgggggtgctgtgcacggattctcaagggctcaacctgggatgccgcggcactctgtctgacgaacatgccggcgttatcagcgtgctggcccagcaggccgcaaagcttaccagtgaccccaccgatatcccagtcgtgtgccttgaatcagataacggcaatattatgatccagaagcacgatggcattacagttgcagttcataagatggcctcttag

SEQ ID NO: 190545 - DNA, 267 bp, synthetic construct
  misc_feature 1..267: note = Description of Artificial Sequence: Synthetic coding sequence
  source 1..267: mol_type = other DNA
atgggcaactggggcctgggcatcgccccctgggtggacggcgagtcagaactcgagttccgccgcctaggcatgcaggggcccctggaagccctccggaggagggagtggaatactcaaagggcttcttttagcttttcattcttgatcgctctgagccctcataccgttgattattgccactcatatgagttatttaataggcgttggcacggccacgtcctggctacccagcggcctagcctcttcattctcatgttggtctag

SEQ ID NO: 190546 - DNA, 2334 bp, synthetic construct
  misc_feature 1..2334: note = Description of Artificial Sequence: Synthetic coding sequence
  source 1..2334: mol_type = other DNA
atgggccggggcagcggcaccttcgagcggctgctggacaaggccacgagccagctgctgctggaaacggattgggagagcatcctgcagatctgcgatctgatcagacaaggggatacccaggccaaatacgcagttaattctattaaaaagaaggtaaatgataagaacccacacgtcgccctatatgcactagaggtgatggagagcgtagtcaagaattgcgggcagaccgtccacgacgaagtagctaataagcagacaatggaggaactcaaggatctgttaaagcgccaagtagaggtcaacgtgcggaataaaattttatatctgattcaggcctgggcccatgctttccggaatgagcccaagtacaaagtggtccaggatacctatcagatcatgaaggtggaagggcacgttttccccgaatttaaggagtcagatgccatgttcgccgcagagagagcgccagattgggttgacgccgaggaatgtcaccggtgcagggtgcagtttggagtgatgacacgtaaacaccactgcagggcctgtggacagatcttctgcggcaaatgttcatccaaatacagcacgatcccaaagttcgggatagaaaaagaggttagagtttgcgaaccatgttacgagcagttaaatcgtaaggccgaaggtaaagccacatccacaacagagctccccccggaataccttacctctcctctcagccagcagtcccagctgccaccaaagagggacgaaaccgccttgcaggaggaagaagagctgcagctggctctagccctctcccagagcgaggctgaagagaaagaacgtctgcgccagaagagcacatatacaagctacccaaaggccgagcctatgccatctgcctctagcgcccccccagcttcatctttgtattcgagcccagtcaactcatctgcaccgctggcggaggatatcgacccagagctggccagatatctgaaccgtaactattgggaaaagaagcaggaggaggcccggaaatcgccaaccccatctgcccctgtgccattgaccgagcccgctgcccaacctggagagggccacgccgcaccaaccaacgtggtagagaacccgctgcccgaaacagacagccagcctattcctccttccggtggaccatttagcgaacctcagtttcacaatggggagagcgaagagagtcacgaacagtttcttaaggcccttcagaacgccgtgacaacatttgtgaataggatgaaaagcaatcacatgcggggtaggtctataactaatgactcagccgtgcttagcttgttccagagcattaacggcatgcatccccagttgctcgaactgttgaatcagctggacgagcgccgcctgtactatgagggcctgcaagacaagctggctcaaattcgcgacgctcggggtgcgctgagtgctctgcgcgaagagcatagggagaagctccgcagagccgcagaggaagccgaaagacagagacagattcagttggcccagaagcttgagattatgcggcagaagaaacaggagtaccttgaagtccaacgacagttggccattcaacgtcttcaggagcaggagaaagaacggcagatgagactcgaacagcaaaagcagacggtgcagatgagggctcagatgcctgcctttcctctgccttatgctcaactgcaggctatgcctgctgctggaggcgtgttatatcagcctagcggacccgcttcattcccttccaccttttcaccggccgggtcggtcgaaggatctccgatgcatggtgtctacatgtcccaacctgcccccgctgccggaccttatccttccatgccttccaccgcagccgatccctcgatggtgagtgcctacatgtaccccgccggggcaacaggagcacaggcagcacctcaggcccaagctggtcctaccgccagtcccgcttatagctcttatcaacccacgcccacagctggataccagaatgtcgcatcacaagctccccagtcactcccggcgatatcgcagcctcctcaatccagcaccatggggtatatggggagccaaagcgtgagtatgggctaccagccttacaatatgcagaaccttatgacaactttaccatcccaagatgcctcccttccaccacagcagccctacattgccggccagcaacctatgtatcagcaaatggccccttctggtggacctccacagcagcagcctcctgtggcccagcagccccaagctcaaggtcccccagctcagggttctgaagctcagctcatttcattcgattag

SEQ ID NO: 190547 - DNA, 2076 bp, synthetic construct
  misc_feature 1..2076: note = Description of Artificial Sequence: Synthetic coding sequence
  source 1..2076: mol_type = other DNA
atgggccggggcagcggcaccttcgagcggctgctggacaaggccacaagccaactcctgcttgagacggactgggaaagcattcttcagatttgtgatcttatccggcaaggagacactcaagccaaatacgctgtgaatagcattaaaaaaaaggtcaacgacaagaacccccatgtggctctgtacgctctggaagttatggagtcagttgttaaaaactgcggacagacagtccatgacgaggtcgctaataagcaaaccatggaagagctgaaggatctgctgaagagacaggtggaggttaatgtgaggaacaagatattgtatctcatccaagcctgggcgcacgccttccgcaacgaacccaagtacaaagtagtacaggatacataccagattatgaaggttgagggccatgtgtttccagaattcaaggaatcagacgctatgttcgctgccgagagggcaccagattgggtagacgccgaggagtgccacagatgtcgagtccagtttggcgtcatgactagaaaacatcattgtcgggcctgtggccagatcttctgtggtaagtgtagtagcaagtactccaccatccccaagttcgggatcgagaaagaggtgagggtttgtgaaccttgctatgaacaactgaatcggaaggctgaaggcaaagctacctccaccaccgagctgccacctgaatatctcacctccccactttctcagcagagtcagctccctcccaagcgcgatgagactgccttgcaggaagaggaggagctgcaattagccctggcgctttcccagtcggaagctgaggagaaggaaaggctgcgacagaagtctacctatacgtcctaccctaaggccgaacctatgcctagtgcttcgagtgcgcctccagcctcttctctgtatagcagtcccgtgaacagttcagcccctctggcggaggacatcgaccctgaactagctcggtatttgaaccgtaactattgggaaaaaaagcaggaggaggcaaggaaatcacctacaccctctgctcctgtgcctctgaccgaacccgccgctcaacctggagagggtcacgccgcccctacaaacgtggtggagaatcctctcccagaaactgactcccagccaattcctccatctggcggcccattcagcgagccccaattccacaacggggagtccgaagagagtcacgagcagttcttaaaggcactgcagaacgctgtcacaacatttgtgaatcggatgaaatcaaaccatatgcgtggccgaagcatcaccaacgactcagctgtactgtccttgtttcagtccatcaacggcatgcatccccaattgctcgaactccttaatcagctggacgagcgccggctatattacgagggtctgcaggacaaattggcccaaatcagggatgcaagaggagctctgagcgctctgagggaagagcatagggagaagttaagacgggccgctgaagaagcggagagacagcgtcagattcagcttgcgcaaaaactcgagattatgatgcatggggtctatatgtcacagccagcacccgccgccggaccctacccttccatgccctcaactgctgctgatccctcgatggtttctgcatacatgtaccccgctggtgcgacgggagcccaggcagcccctcaggcccaggccgggcccactgccagcccagcttactcgtcatatcagccaaccccgactgccgggtatcaaaacgtggcctctcaagcaccacaatctctcccagcaataagccagccccctcaatcttctaccatggggtatatgggatcgcaatccgtatccatggggtaccaaccctacaacatgcaaaacttgatgactacactcccgtcccaagatgcatcacttccaccgcagcagccttacatcgctggccagcagccgatgtaccagcagatggctccctccggcggcccgccacagcagcagcctcctgtagctcagcagcctcaggcacaaggccccccagcccaagggagtgaggcccagctcattagcttcgactag

SEQ ID NO: 190548 - DNA, 324 bp, synthetic construct
  misc_feature 1..324: note = Description of Artificial Sequence: Synthetic coding sequence
  source 1..324: mol_type = other DNA
atgcggctgagcaagaccctggtggacatggacatggccgactactctgctgcacttgacccagcctacacaacactggaattcgaaaatgtgcaggtgctgacaatgggtaacgacttcgtggccgcggcttcccggcaaatagaggccagtccccctacttctctggagcacatttggagagggggccaatttagcaccggacgccacgtccccattcgcaggcatcagccgcagcgagcacagcagcccgggtgtcagcggccagtgtgccatcttcgaggacccgggcacggccagactttgcgctgtctagagctctag

SEQ ID NO: 190549 - DNA, 1425 bp, synthetic construct
  misc_feature 1..1425: note = Description of Artificial Sequence: Synthetic coding sequence
  source 1..1425: mol_type = other DNA
atgcggctgagcaagaccctggtggacatggacatggccgactacagtgccgcacttgaccctgcatacaccactctcgaatttgagaacgtccaggtgctgaccatgggtaatgacacgtctcccagcgagggcacaaatctcaatgcacctaattctctgggcgtgagcgctctgtgtgctatatgcggagatagggccaccggtaaacattacggcgcctccagttgtgatggttgtaaggggttcttcagaagaagtgtgcgcaagaatcacatgtacagctgccgattcagccggcagtgcgttgtggacaaggacaaacggaaccaatgtcgctattgtcggctcaaaaaatgttttcgggcaggcatgaaaaaagaggctgtgcagaacgaaagggaccggatctccacaaggcgcagctcatatgaagacagctcactgccatcaatcaacgcattactccaggccgaggtgttgtccaggcagataactagtcctgtttctggaataaacggtgatatccgggccaagaaaattgcttctattgccgatgtgtgtgaaagcatgaaagaacaacttctagttctggttgagtgggcaaagtacattcccgcattttgcgagctcccgctagatgaccaggtagcgttgttacgcgcgcatgcgggggagcacttactgctcggcgctacaaagcgctccatggtgtttaaggatgtgctactgttgggtaacgactacatagtccctcggcattgcccagagctggcagaaatgtcgcgggtcagcattcgcattctggacgagctggtgctcccttttcaggagttacaaattgacgataatgagtacgcctatctgaaggcaataatcttcttcgaccctgatgcaaagggattatccgaccctggtaaaatcaaacgtctacggagccaggtgcaagtgtcgcttgaggattacatcaatgacagacaatatgacagcaggggccggtttggcgaactactactgctgctccccactcttcagagcattacatggcagatgatcgagcaaatccagtttataaagcttttcggcatggctaaaattgacaacttgctgcaggaaatgctcctgggtgggtctccatccgatgcccctcacgctcaccatccactgcacccccaccttatgcaggagcacatgggtaccaatgtcatagtggccaacactatgcctacccatctgtcgaacggccagatgtgtgaatggccccgcccgagagggcaggctgccacacccgaaactccgcagccttctcccccgggaggaagtgggagcgaaccatataaactcctgcctggggcggtagcgacaatcgtcaagccgctcagcgcgatcccacagccaaccataacaaagcaggaagtcatctag

SEQ ID NO: 190550 - DNA, 1359 bp, synthetic construct
  misc_feature 1..1359: note = Description of Artificial Sequence: Synthetic coding sequence
  source 1..1359: mol_type = other DNA
atggtgagcgtgaacgcccccctgggcgcccccgtggagagcagctacgacacctccccctccgaggggaccaacctgaatgctccgaatagccttggcgtgagtgctctttgtgcaatctgcggagatcgggccacagggaagcattacggcgccagtagctgtgacgggtgcaaaggattctttcggcggagcgtcaggaagaatcacatgtacagctgtaggttttcccgccagtgtgtggtagacaaagacaagagaaatcaatgtaggtattgcagactgaagaaatgtttccgggccgggatgaagaaggaggccgtgcagaacgaacgcgatcgcattagtacaaggaggtcctcttacgaggattcctcattgccttctataaacgctctgttgcaagccgaggtactctcgcgccagatcaccagccctgtcagcggaattaacggagatatacgagctaagaagattgccagcatagccgacgtctgtgagtctatgaaggagcagctgctcgtgctggtggaatgggccaagtatatacccgctttttgcgaattgcccctggacgaccaggttgccctgcttcgggcccatgctggagaacatctgttactgggagcaactaaacgctccatggtcttcaaggacgtgctgctgcttggtaacgactacatcgttccaagacactgtccggagctggccgaaatgtcccgcgtctccatccggatcctagatgaactagttttgccttttcaggagctgcagattgatgacaacgagtatgcctacctgaaagctattatttttttcgatcctgacgctaaaggcctaagtgatcccggtaagatcaaaaggctgaggtctcaggtgcaggtctcactcgaagactacataaatgaccgtcagtacgactctcgaggccgttttggggagctcctgctcctgttacctacgcttcaaagtatcacatggcaaatgattgagcagatccagttcattaagctctttggcatggccaaaatcgacaacttgctgcaggagatgctgttaggtggaagcccaagcgacgcccctcatgcacatcaccctctgcatcctcacctaatgcaggagcatatgggtacaaacgtgatcgtggctaacactatgcccactcacctctcaaatgggcaaatgtgcgagtggccaaggccccgaggacaagccgcaacgccggagaccccccagccatcgccaccgggaggctcggggagcgaaccttacaaattgttgccgggcgcagtcgcgactatcgtcaaacccctttccgctataccccagcctacgattaccaagcaggaggtgatctag

SEQ ID NO: 190551 - DNA, 1515 bp, synthetic construct
  misc_feature 1..1515: note = Description of Artificial Sequence: Synthetic coding sequence
  source 1..1515: mol_type = other DNA
atgcggctgagcaagaccctggtggacatggacatggccgactactcagcagctctagaccccgcctatacgactctagagtttgagaatgtgcaagttctaaccatgggaaatgttctgctgcccctgcgtctggccagactgagacaccccttgaggcaccattggtcaatctcaggaggggtagacagttcaccccagggcgataccagcccttcagagggtacaaatctgaacgctcccaactcacttggggtgtcggcgctgtgcgccatctgtggcgaccgggccaccggtaaacactacggggccagtagctgcgatggctgcaaggggttcttccgcagatctgtgcgtaaaaaccacatgtactcctgtagattctcccggcaatgtgtggtggacaaggataagaggaaccaatgtcggtattgtagactgaagaagtgtttcagggccggaatgaaaaaagaggctgtgcaaaatgaaagagatcgtatttcaacacgccgaagctcctacgaagatagcagtttgccttccatcaatgccctactgcaggctgaggttctatcacgccagatcaccagccctgtcagtggaataaacggcgacatccgcgctaaaaaaatcgcaagcatagcagatgtctgtgaaagcatgaaagaacagctgttagtcctcgtcgaatgggccaagtatatacccgcgttctgcgaactgcccttggatgatcaggtggcattattgcgggcgcacgccggtgagcatctgttactgggggctaccaaaaggtcaatggtgtttaaggatgtgcttcttctgggtaacgattatatcgtccctcgccactgtcccgagctcgcggaaatgtcccgtgtttccataaggatccttgatgaactggtgctgccttttcaggagctgcagatcgacgataatgaatatgcttacctaaaagctattattttctttgacccagacgccaaaggactgagcgacccgggtaagattaagcggttacgatcccaggtccaggtttctctggaagattacatcaatgatcgccagtatgattcccgtgggcgatttggcgaactgctcttattgcttccgaccttgcagtccatcacgtggcagatgattgagcaaattcagtttattaagctgttcggtatggctaagatagataacctactgcaggagatgctcttgggaggatctcctagtgacgcccctcatgcccaccaccctttgcatccacacctgatgcaagaacatatgggaactaatgttattgtagctaacaccatgccaacccatttgtcgaacggtcagatgtgtgagtggccacggcctcgcgggcaggctgccacgcccgaaactcctcaaccttcaccacccggtggcagcgggagcgaaccatacaagctgttgcccggcgccgtggctactatcgtcaagccactcagcgccatccctcaaccaaccatcaccaagcaggaggtgatctag

SEQ ID NO: 190552 - DNA, 1395 bp, synthetic construct
  misc_feature 1..1395: note = Description of Artificial Sequence: Synthetic coding sequence
  source 1..1395: mol_type = other DNA
atgcggctgagcaagaccctggtggacatggacatggccgactactcggcagcactggatccagcgtataccacactcgagttcgaaaacgtgcaggtgctcactatgggaaacgatacgtcaccatctgaaggcaccaatttgaacgcccctaactccctgggagtttcagctctttgtgcaatatgtggcgacagagctacagggaagcactacggggccagctcgtgcgacggatgtaagggtttctttcggcggagcgtccgtaagaatcatatgtatagctgcagattctctagacagtgcgttgtagataaagataagcgcaaccagtgtcgctattgccggctgaaaaagtgtttccgcgccggaatgaaaaaagaagccgtgcagaacgaacgagatcggataagtaccaggcggtcaagttacgaagactcctctctgccatcaataaatgctctgctgcaggcagaagttttgtctcgtcagatcacttcccctgtgtcaggtatcaatggagacattagagccaagaagatagcatccatcgcagatgtgtgtgaaagcatgaaggagcagctcctagttctcgtggagtgggctaaatatatccccgctttttgtgaactgccacttgacgaccaggtggcacttctccgcgcacacgccggtgagcatcttctgctcggagccacaaaaagaagtatggtgtttaaagacgtccttttgttaggaaatgattatatagtcccgcggcattgccccgagctggctgaaatgtctcgcgtcagcatccgcattctggatgagcttgtgctgccatttcaggaattacagatcgacgataatgagtacgcctacctcaaggctatcatttttttcgaccccgacgcaaaggggttgtccgatcccggaaaaatcaaacgtctccgctcccaggtccaggtgagccttgaggattacattaatgataggcagtacgactcgagaggccgctttggcgaattactgctccttttgccaacactccagtccattacctggcagatgatcgagcaaattcaattcattaaactctttggcatggctaaaatcgataatctgctccaggaaatgctgctgggggggtctccatccgacgccccacacgcccaccatcctctacacccacacctgatgcaggaacatatggggacaaatgtgatagtagctaatactatgccaacccacttgtccaatgggcagatgtccacaccggagaccccacagccctcacccccaggcggctcagggtcagaaccatacaaactcctgcctggagctgtcgcaacaatagtgaagcctctgtccgctattccacagcccaccataaccaagcaggaagttatttag

SEQ ID NO: 190553 - DNA, 1254 bp, synthetic construct
  misc_feature 1..1254: note = Description of Artificial Sequence: Synthetic coding sequence
  source 1..1254: mol_type = other DNA
atgcggctgagcaagaccctggtggacatggacatggccgactacagcgccgccctcgatcccgcttacactaccctcgaattcgaaaacgtacaagtgttgacaatggggaacgatacctcccctagcgagggaactaaccttaacgctcccaattccctgggggtctccgcattatgtgcgatatgcggggaccgcgccacgggtaagcactatggcgccagttcttgtgatggatgtaagggattctttaggcgtagcgtacgaaagaatcatatgtatagctgcagattctcgcgacagtgtgtcgtcgacaaagacaaaagaaaccagtgccggtactgtcgccttaagaaatgctttagagccggcatgaagaaggaagcagtacagaacgagagggacaggatcagcaccaggaggtcttcatatgaggacagctccctgccatccataaacgcgctactgcaggcagaggttctgtcgagacagatcacatccccagtatctggcatcaatggcgatattcgtgctaaaaaaatcgcttcaatcgcagatgtgtgtgagtctatgaaggagcagctcctggtgctggttgaatgggccaaatatataccagctttttgtgaacttcccttggacgatcaggtggcactgctccgtgctcatgcaggggaacatctgctcctgggggcgactaaacggtccatggtattcaaggacgtcctgcttctcggaaacgactatatcgtaccacgacactgccctgagctggctgagatgagcagggtgtccatccgcatcctggatgagctggtactgccgttccaagaactccagatagacgacaatgaatacgcctatctaaaggcaataatcttctttgaccccgatgccaaggggttgagtgaccctggaaaaatcaaacggcttagatcacaggtccaggtctctcttgaggactatatcaacgacagacaatacgatagtcggggaagatttggggaactactgctgctgctcccaacactgcaatctattacctggcagatgatagaacagatccagttcattaagctgttcggaatggcaaagattgataacctgcttcaggagatgctgctcggcggtccctgtcaggctcaagagggccggggctggtccggtgactcacctggggataggccccacacagttagctcacccctgtcctctctggcttcccctttgtgtcgctttggacaggttgcctag

SEQ ID NO: 190554 - DNA, 1329 bp, synthetic construct
  misc_feature 1..1329: note = Description of Artificial Sequence: Synthetic coding sequence
  source 1..1329: mol_type = other DNA
atggtgagcgtgaacgcccccctgggcgcccccgtggagagcagctacgacacctccccctctgagggcaccaatttgaatgcccccaactccctcggtgtcagtgcactatgtgcaatctgtggagatcgtgccaccggcaagcactatggggcgagcagttgcgacggctgcaaagggttcttccgccgaagcgttcgcaagaaccacatgtatagttgtcgtttcagcagacagtgtgtggttgataaagataagcgcaaccagtgccgctactgtagactgaaaaagtgcttccgggccgggatgaagaaagaggctgtgcaaaacgaacgcgatcgcatttctacaagacggtcatcctatgaggatagctccctccccagcattaacgcattgctgcaggcagaggtgctgagcagacagataacctcccctgtgtccggaattaatggtgatatccgggctaaaaaaatcgcaagtatcgctgatgtgtgtgagagcatgaaggagcagttgctggtgttagtggagtgggccaaatatatacctgccttctgcgaattgcccttggacgaccaagtggcccttttgagagcccatgcaggcgaacacctcttactcggagcgaccaagcggagcatggttttcaaggatgtgctgctactaggaaatgattacatcgtaccgagacactgtccagagttggctgagatgtctcgcgtcagcataagaattctggatgaacttgtgctcccctttcaggagctgcaaatcgatgataacgagtacgcatatctgaaggccataatattctttgaccccgatgccaagggactgtcagatccaggcaaaatcaaacgcttgcgctcgcaggtccaggtgtcactggaggactacattaatgaccgccagtacgattcaagaggtagatttggggagctgctgttgctactgcctacactgcagtctatcacatggcagatgatcgaacagatccaattcattaagctgttcggcatggccaaaatagacaacctgctccaagaaatgctattgggtggtagtccctcagacgcaccacacgcgcaccacccactgcacccgcaccttatgcaggaacacatggggaccaatgtcattgttgccaatactatgcccacacatctgagtaacggacagatgtctaccccggagaccccacagcccagccctccgggcggatccgggagcgagccttacaaactcctgcccggggcggttgccactattgtgaagcccctatccgcaattccgcagccaaccattacaaaacaggaggtgatttag

SEQ ID NO: 190555 - DNA, 1227 bp, synthetic construct
  misc_feature 1..1227: note = Description of Artificial Sequence: Synthetic coding sequence
  source 1..1227: mol_type = other DNA
atgaacaccaccgacaacggcgtgaactgcctgtgcgccatctgcggagacagggcaactgggaagcattatggggcctcctcgtgtgatggatgtaagggctttttcagacggtccattaggaaaagtcacgtctattcctgccggtttagtcgacagtgtgtggtagacaaagacaagcggaaccaatgcaggtattgcaggctccggaagtgctttcgtgccggaatgaagaaagaggccgtccagaatgaacgtgatagaatttccacacgccgctcgactttcgatggctcaaatattcctagcatcaatactctcgcccaggccgaggtgcggagtcgccagatctccgtgagctctccagggagctcaaccgatatcaacgttaagaaaatcgctagcattggtgatgtgtgcgaaagcatgaagcagcagctgctcgtgctcgtggaatgggccaagtatatcccagctttttgtgagcttcctctcgatgaccaggttgccctgctaagggcccatgccggcgagcatctcctcctaggtgcaacaaagcgcagtatgatgtacaaagacatcctactcctgggtaataactatgtgatccatcgtaattcttgtgaggtcgaaatctccagggtggctaacagggttcttgatgaactcgtaaggcctttccaagagatccaaatagacgacaacgaatatgcttgtctgaaagctatagtgttttttgatcccgacgccaaaggcctgagtgaccctgtaaagataaaaaatatgaggttccaagtgcaaatcgggctggaagattatattaacgatagacaatacgatagtagaggaaggtttggagaactgctgctgcttttgcctaccctacaatccattacgtggcaaatgatagagcagatacagttcgtcaagctgttcggaatggtcaaaatcgataacttacttcaggaaatgttgctgggaggcgcttcgaatgacggctcccacttgcatcacccaatgcacccacatctgtcgcaggatcccctaacgggacagacgatactgctgggaccaatgagcactctcgtgcacgcagaccagattagcaccccggagaccccccttccaagtccaccacagggaagtggtcaggagcagtataagatcgcagcaaaccaggcatccgtgatctctcatcagcacctgagtaagcagaagcaactgtag

SEQ ID NO: 190556 - DNA, 1338 bp, synthetic construct
  misc_feature 1..1338: note = Description of Artificial Sequence: Synthetic coding sequence
  source 1..1338: mol_type = other DNA
atggacatggccaactacagcgaggtgctggaccccacctacaccacactcgaattcgagacgatgcagattctctacaacagcagcgattcctccgcacctgagacctccatgaatacgacagataacggcgtgaactgcctgtgtgctatttgcggggatcgggccactgggaagcattacggagcgagcagttgcgatggctgcaagggattcttccgccgctctatccgcaaatctcatgtctactcctgtcgctttagcagacagtgcgtagtagacaaggataagaggaatcaatgccgctactgccgcctccgcaagtgtttccgagccggaatgaagaaggaagcagtacagaatgagagggatcggatttcaacaaggcggagtaccttcgatgggagtaatatcccgtctataaatacgctagcacaggcagaagtccgcagccgtcagataagcgtgagtagcccaggcagcagtacagatataaatgtgaaaaagatcgccagcatcggggatgtatgcgagtctatgaagcagcagctcctggttctcgttgagtgggccaagtatataccagcattttgcgagctccccttggatgatcaggtggcattgcttagggcacacgccggcgagcatctgttgctgggcgctactaagagaagcatgatgtataaggatatcctgctgctggggaataattatgtgatacatcgtaactcttgtgaagttgaaatctccagagtggcaaatagagtgctggatgagctggtgcgtccatttcaggaaatccaaatcgacgacaacgaatacgcttgtctgaaagctatcgtgtttttcgatccagatgccaagggcttgagcgaccctgttaagataaagaacatgaggttccaggtacagatagggctcgaagactacatcaacgaccgccagtacgatagcagaggtcggttcggagaattactgctgctgctgcctacactccaatccattacctggcagatgatcgagcagatccaattcgtgaagctgtttgggatggttaaaatcgataacctacttcaagagatgctgctgggtggagcctcaaacgacggctcccacttgcaccatcccatgcacccacacctatcacaagatcccttgacagggcaaacaatcctgttggggcctatgtcaacgctagtgcacgcagatcaaatcagtacgcctgagacccctctgccctctcccccgcaggggagcggccaggaacagtacaaaatcgcggcaaaccaggcttccgtgataagccatcagcatctcagcaagcagaagcagttgtag

SEQ ID NO: 190557 - DNA, 723 bp, synthetic construct
  misc_feature 1..723: note = Description of Artificial Sequence: Synthetic coding sequence
  source 1..723: mol_type = other DNA
atgagccggagcaaccggcagaaggagtacaagtgcggcgacctggtattcgccaaaatgaaaggatatccccactggccagctcggattgacgagatgcctgaggctgcagtgaagtcaacagcaaacaagtaccaggtcttcttctttggcactcatgagaccgcttttctgggacctaaggatttgttcccttatgaagaatcaaaggaaaagtttggtaagccaaataaacgcaagggtttcagcgagggcctatgggaaatcgagaacaaccctacggttaaagctagcggttaccaaagttcgcagaagaaatcctgtgtcgaggaacccgagcccgaacccgaggctgccgaaggtgatggcgataagaaaggtaatgccgagggcagctctgacgaggaggggaagcttgtaatcgatgagcctgccaaagagaagaacgagaaaggtgccttaaaacgccgggccggggacctgctggaggactccccaaaacgtcctaaagaagccgaaaaccctgaaggagaagaaaaagaggctgctacccttgaagtcgaacgaccgctcccaatggaggtggagaaaaactctaccccttcagagcccggctctggccgcggacctccccaagaggaggaagaagaagaggacgaggaagaggaggcgacaaaagaggatgctgaggcccctggaatccgcgaccatgagagcttgtag

SEQ ID NO: 190558 - DNA, 771 bp, synthetic construct
  misc_feature 1..771: note = Description of Artificial Sequence: Synthetic coding sequence
  source 1..771: mol_type = other DNA
atgcaccccgagggcggccagttcgtgccccagctgctgggccacctgcttgctactaagctgaaacggttcctgctcagcaagggaggccggcgagcacagattcctgatgtcagcagagccacaccccataccatcgatgagatgcctgaggcagccgtcaagtcaaccgctaacaaataccaggtgtttttctttggtacacatgagacagctttcctgggtcctaaggatctgttcccttatgaggagagtaaggagaagttcggtaagcccaacaagagaaaagggttttcggagggcctctgggagatcgaaaataaccctacggtaaaagcatccggctatcagagttcccagaagaagtcttgcgtagaagaacccgagcccgagccggaggccgccgaaggagacggtgataagaagggcaacgccgagggtagctccgatgaggagggcaagcttgtaattgatgaacctgcaaaagagaagaacgagaagggggccctgaagcgacgagccggggatttgctggaagatagccctaagcggccgaaggaagctgagaaccctgagggtgaggagaaggaagccgccaccctcgaagtcgagcgcccattgccaatggaagtggaaaagaactctacgccaagtgagccggggtctgggaggggcccgcctcaggaagaggaggaagaagaggacgaagaagaagaggccactaaagaagatgcagaagcacccggaatcagagaccacgaatctctgtag

SEQ ID NO: 190559 - DNA, 702 bp, synthetic construct
  misc_feature 1..702: note = Description of Artificial Sequence: Synthetic coding sequence
  source 1..702: mol_type = other DNA
atggagcagcgggccggcggcaaccgggtgcagaccagcaccctgaactgtgcaggtgccgctgtgattgatgaaatgcccgaagccgctgtcaaatccaccgcaaataaataccaggtgtttttctttggaacgcatgaaacagccttcctgggaccaaaggacctgttcccctacgaggagagcaaagagaagttcggaaagcccaataaacgtaaaggtttcagcgaggggctttgggagatcgaaaacaacccaaccgtcaaggccagcgggtatcagagcagtcagaaaaagagctgcgttgaagaaccagagccggaacccgaagcagcagagggcgatggggacaaaaaagggaatgccgagggctccagtgacgaagagggcaagttggtcatcgatgaaccggctaaagaaaagaacgagaagggagccctcaaacgtagggcgggagacctgttggaagactctcctaaacgccccaaggaggctgagaacccggaaggggaggaaaaagaagctgctacactggaggtggaacggcccctacctatggaagtggagaaaaattctacaccctcagaacccggtagcggccgtggtcctcctcaggaggaggaagaagaagaagatgaggaggaagaagcaacaaaagaggacgccgaggcccccggtatccgcgatcacgagagtctgtag

SEQ ID NO: 190560 - DNA, 789 bp, synthetic construct
  misc_feature 1..789: note = Description of Artificial Sequence: Synthetic coding sequence
  source 1..789: mol_type = other DNA
atgagccggagcaaccggcagaaggagtacaagtgcggcgacctggtattcgccaagatgaaggggtacccgcactggcccgctagaatcgatgaaatgccagaagccgcggtcaaatctacggccaacaaataccaagtttttttttccggtcccacccgcagacattcctgggcccccaaaactagctcactgaccagaaacccaagacgctccctcgctagccctaccagaggtaaaggctctgctcggggctgcggacgatcaaggacaacattgttatcacggctgcccgccatcagtcccccgccatcctgcaccgaaccttgcttgcctggtcagtgggtttatccgggcgcgaaccccacggagagctctcagaaaaaaagttgcgtcgaggaacccgaacccgagcccgaagccgcagagggagacggcgataagaaaggcaatgctgaggggtctagtgatgaggagggcaagctagttatcgacgagcctgctaaagaaaaaaacgagaaaggtgccctcaagaggagagctggcgacctgctggaagattcacccaaaaggccaaaggaggcagaaaaccctgagggtgaggagaaggaagctgcgactctggaggtcgaacgaccgctgccaatggaggtggaaaagaattcgaccccctcagagccaggcagcggacgggggcccccccaggaggaagaagaggaagaagatgaagaggaagaggctactaaggaagacgctgaggcgcccggaatccgcgaccacgaaagatag

SEQ ID NO: 190561 - DNA, 627 bp, synthetic construct
  misc_feature 1..627: note = Description of Artificial Sequence: Synthetic coding sequence
  source 1..627: mol_type = other DNA
atgcccgaggccgccgtgaagagcaccgccaacaagtaccaggtgttctttttcgggacacacgagacagcattcttggggccgaaagacctctttccctacgaagagtcaaaagaaaagtttggaaagccgaacaaaagaaagggcttttccgaaggcctttgggaaatcgaaaacaatcccaccgttaaggctagcggttatcaatcttcacaaaagaaatcttgcgtagaggagcctgaaccagagcctgaggccgcggagggagatggcgataagaaggggaacgccgagggcagcagcgatgaggagggcaaactggtaattgatgaaccagcaaaggagaagaacgagaagggtgcacttaaacgccgcgccggagacctgctcgaggattcccccaaacgacctaaggaggccgagaaccccgagggcgaggagaaggaggctgcaaccctggaagtggagaggcccctgcccatggaggtagagaaaaacagcacgccctcagaacccggctcgggaagagggccaccacaggaagaagaggaggaagaggacgaggaggaggaggcgacaaaagaagatgccgaggcacctgggatcagggaccatgagagcctgtag

SEQ ID NO: 190562 - DNA, 723 bp, synthetic construct
  misc_feature 1..723: note = Description of Artificial Sequence: Synthetic coding sequence
  source 1..723: mol_type = other DNA
atgagccggagcaaccggcagaaggagtacaagtgcggcgacctggtgttcgcaaaaatgaagggttacccacattggcccgcccggatcgacgagatgccggaagccgcggtcaagtctactgccaacaagtatcaagtcttttttttcggcacccatgagacagcatttcttgggccaaaggatctgttcccttacgaagaaagtaaggaaaaatttggaaagcccaataaaaggaaggggtttagtgagggcctgtgggaaattgagaacaaccccaccgttaaggccagcggataccagtcctcccaaaaaaagagttgcgtggaggaacctgagccggagcccgaggcagcagaaggcgatggcgacaaaaaaggtaacgccgaggggtcctctgacgaggaaggaaaactagtgattgatgaacccgccaaggagaagaacgagaaaggagcattgaagcgccgcgccggcgatctgctggaagactcacctaaacggcctaaggaggctgagaaccccgaaggagaggagaaagaagcggcaacacttgaggtggaaaggccactgccaatggaagtcgaaaagaacagtaccccatcagagcctggctccggacgtggaccccctcaggaagaagaggaggaggaggatgaggaggaggaggccaccaaagaagacgccgaggctcccggcatcagggaccacgaaagcctatag

SEQ ID NO: 190563 - DNA, 2676 bp, synthetic construct
  misc_feature 1..2676: note = Description of Artificial Sequence: Synthetic coding sequence
  source 1..2676: mol_type = other DNA
atgcacgccatcaacggcttcgtgttcggcaacctgcccgagctgaacatgtgcgcacagaaacgggtggcttggcatctatttggtatgggtaatgagatcgacgtccacactgcattcttccacggccaaatgctaactactcgtggccatcatacagatgtggccaatatatttcccgcaacttttgttaccgccgaaatggtcccctgggaaccagggacatggcttatctcctgccaagtgaactctcacttcagggacgggatgcaggcactgtacaaggtcaagtcttgctcaatggcccctccagttgacttgctcactggaaaggtccgccagtactttattgaggcgcatgagatccagtgggattatgggcccatgggacacgacgggtcaacagggaaaaacctccgagaacccgggtccatcagcgacaaatttttccagaaatcatctagccgtattggcggcacgtactggaaagttcgatatgaagccttccaggatgagacttttcaggaaaaaatgcatttagaagaagaccgacacctgggaatcctgggacccgtgatccgcgcagaagtgggggacaccatccaggtggtattttataacagagcgagtcaaccattttcaatgcagccacacggggtgttctatgaaaaggactacgaggggaccgtgtataacgatggttcaagctaccccgggttggtggcaaaaccctttgagaaggtgacataccgatggacagtgccccctcacgctggcccaacagctcaggatcccgcatgtttgacttggatgtacttttccgcggcggatccaatccgcgataccaacagtggcttggtaggaccattactcgtctgccgcgctggcgccctgggggcagatggtaagcaaaagggggtggacaaggaatttttcctgctctttacggttttggatgaaaataaatcctggtattcgaacgctaaccaggccgctgccatgctggatttccgcctgctgagcgaggatattgagggttttcaggactctaacagaatgcatgccattaatggttttctgttcagcaatctgccacgcctcgacatgtgtaagggtgacaccgttgcctggcatctgcttggcctgggaactgaaacggatgttcatggtgtgatgtttcaagggaataccgtacaactgcaaggcatgagaaagggagcagccatgttgtttccccatacgtttgtcatggcaataatgcagcctgacaatttagggaccttcgagatctactgtcaggccggctcccaccgcgaggctggcatgcgggccatttataacgtcagccagtgtccgggacatcaagcaactcctcgtcagcggtaccaggccgcccggatctactacataatggcagaggaggtggaatgggactactgtcctgaccggtcatgggaaagggaatggcacaatcagtcagaaaaggacagttatgggtacatattcctatcaaacaaggatgggctgttgggatcgcgctacaaaaaagccgtgttcagagaatatactgatggaacctttcggatcccccgtccgcggaccgggccagaagagcatctcggaatcctggggccactgatcaagggtgaggtgggggacatcctgacagtcgtcttcaagaataacgcctcaagaccatattccgttcatgcccacggtgtcctggagtccacaaccgtgtggcccctggctgctgaaccaggggaggtcgtgacatatcagtggaacatccccgagaggtcaggcccagggccaaatgactccgcctgcgtgtcctggatttactacagcgccgtggacccaataaaggatatgtactcaggcctagtggggcccctggcaatctgtcaaaaaggtatcctggagccccacggaggccgctctgatatggaccgggaattcgccttgctctttcttatcttcgacgaaaataaatcttggtaccttgaagaaaatgtggcgacgcacggatctcaggatccaggttccattaatctgcaagatgagactttcctagagtctaacaagatgcacgcgatcaacgggaagctgtacgccaatctaagaggtctgactatgtaccagggcgagcgcgttgcttggtatatgctggctatggggcaagacgttgacctgcataccatccatttccacgctgagagctttttatacaggaacggcgagaattatagagcagatgtcgttgacctttttcctgggacttttgaggtggtggagatggtcgcttccaatcccggcacctggctgatgcactgtcacgtcactgatcacgtgcacgccggcatggaaaccctcttcaccgttttttcccggaccgagcacctgtctccattgactgtcattaccaaggaaaccgagaaggctgtcccccccagggatattgaggagggcaatgtgaagatgcttggaatgcagataccaatcaagaacgtagaaatgctcgcgtccgtgctggtggctatatccgtaaccctgctgctcgtcgtcttggccctggggggcgttgtctggtatcagcaccgacaacggaaactgaggaggaatagacgttctatcctagacgactctttcaaactgctgtcatttaaacaatag

SEQ ID NO: 190564 - DNA, 3477 bp, synthetic construct
  misc_feature 1..3477: note = Description of Artificial Sequence: Synthetic coding sequence
  source 1..3477: mol_type = other DNA
atggagagcggccacctgctgtgggccctgctgttcatgcagagcctctggccccaactcactgacggcgcaactagagtgtattacctgggaatccgggatgtccagtggaattacgccccaaaagggaggaatgtgatcacaaaccaaccgttagatagcgacattgtggccagcagctttttaaaatccgacaaaaacagaatcgggggcacatacaagaagacaatctacaaagagtacaaagacgactcctacacagatgaggtggctcagcccgcctggctcgggttcctcggccctgttctccaagccgaggtcggtgatgtgatcctgatccatctgaaaaactttgcaacccgcccatatactattcatccacacggagttttttacgagaaggactcagagggctctttatacccagacgggtccagcggccctcttaaagcagatgactctgtgcctcccggcgggtcacatatctacaactggacgattccagagggccacgcccccacagatgctgatcctgcttgcctgacctggatctaccactcccacgtcgatgcacctagagacattgctaccggactgatcggacctctgatcacctgcaagaggggtgctctagacgggaattctcctccgcagcggcaggatgtggaccatgactttttcttgctgttctcagtcgtggatgagaatctgtcttggcacctgaatgaaaatatcgcaacctattgctccgatcccgctagtgtggacaaggaagacgaaactttccaagagtcaaatcgcatgcatgctataaatggctttgtgtttggcaatctgccagaacttaatatgtgcgcccagaagcgcgtcgcttggcacctgttcggaatgggaaatgagatcgacgttcatacggctttcttccacgggcaaatgctgactacccgtgggcaccataccgatgtggccaacatattcccggcgactttcgtgactgccgagatggtgccctgggagcccggcacttggttaatctcatgtcaggtaaacagccatttccgagatggaatgcaagctctttacaaagtgaaaagctgttccatggccccccctgtcgacctgttgactgggaaagtcaggcagtactttatcgaagcacacgagatccaatgggactatggtcctatggggcatgatggatctacagggaagaatttgcgggaacctggcagcattagtgataagtttttccagaaatccagctccagaatcggaggaacttactggaaagtgaggtacgaagcttttcaggacgagacgttccaggagaaaatgcacctcgaggaggaccgccacctgggaatcttgggtcctgtgatccgggccgaggtaggagacactatacaggtggttttctacaatcgcgcctctcaaccattctccatgcagccccacggagtgttttatgagaaggattacgagggtacagtgtataatgatgggagctcctatcctggtctcgtggccaagccgtttgaaaaagtgacctacaggtggacagtgcccccccacgctggcccaacagcccaggatccagcatgtcttacctggatgtacttttctgcagccgacccgatccgggacacgaacagtggcctggttggccccctcttagtgtgtagggctggagctctgggcgccgacggaaagcagaaaggagtggataaagagtttttcctgctgttcaccgtcctcgatgaaaacaaatcttggtacagcaacgccaaccaggccgctgcaatgttggacttccgcttgctttccgaggatattgaaggattccaggatagcaatcggatgcacgctatcaatggatttctcttctcaaacttgcctcggctagatatgtgcaagggggatacagtggcttggcacttattaggcttaggcaccgagacagacgtccacggtgtgatgtttcagggtaatacagtgcaattacagggcatgcggaaaggcgcagctatgctgtttccgcatacttttgttatggcaattatgcaaccagacaacctggggactttcgaaatttattgtcaggctggctctcatcgggaggccggcatgcgcgccatttacaacgtttcccagtgccctggacaccaggcaacccctcggcagaggtatcaagccgctagaatttactacatcatggctgaggaagtggaatgggactattgtcctgatagatcctgggaaagagagtggcacaaccagtcagaaaaagattcttatggctacatcttcctttccaataaagacgggctattgggctcaaggtacaaaaaggccgtgttccgtgaatatacagacggcacatttagaattcctagacccagaactggaccggaagagcacctgggtattctcggccctctgatcaaaggcgaggtgggggatattctcaccgtagtattcaaaaataatgcctcacgcccttatagtgtgcacgctcacggcgtcctcgagtccacaacagtctggcccctagcagctgagcccggcgaagtggttacgtatcagtggaacatcccagaacggtccggcccaggacctaacgatagcgcttgtgtctcgtggatctactacagtgcagtcgatcccattaaggacatgtacagcggcctagtaggcccccttgctatatgccagaaaggaatcctcgagccccacgggggacgcagtgatatggacagagagttcgccctgctcttcctgatctttgatgaaaacaaatcatggtacctcgaggagaacgtggccacacacggttcgcaggatccaggatctattaacctccaagacgagacctttttagaatccaacaagatgcacgccatcaacggtaagctgtatgctaacttacgaggccttacaatgtaccaaggagagcgggttgcatggtacatgctcgcaatgggacaggacgtggacttacatactattcactttcacgccgaatcctttttatacagaaatggcgagaattaccgggctgacgtcgtcgacctattccctggaacatttgaggtagtggaaatggtcgcttccaatcctggcacgtggctgatgcactgccacgtgaccgaccatgtgcatgccggcatggagaccctctttacagtcttctctcgtacagagcatctgagtcctctcaccgtaatcaccaaagaaaccgaaaaggcggttcctccacgggacatagaggaaggtaatgttaaaatgctgggcatgcaaatccccataaaaaatgtcgaaatgcttgcgtcagtcttggttgctatttcagtgacgttactgctcgtggtcctcgccctgggcggagtggtatggtaccagcaccgacagcggaagcttcgaagaaaccgcaggagcattctggatgacagcttcaaactgctctccttcaaacagtag

SEQ ID NO: 190565 - DNA, 3486 bp, synthetic construct
  misc_feature 1..3486: note = Description of Artificial Sequence: Synthetic coding sequence
  source 1..3486: mol_type = other DNA
atgtgggccatggagagcggccacctgctgtgggccctgctgttcatgcaaagcctttggccacagcttacagatggtgccacccgcgtgtactacttggggattcgcgacgtccagtggaactatgctcccaagggtagaaatgttattactaatcagccgctggactcggatattgtagctagcagtttcctcaagtctgataaaaaccgcataggcggtacatacaagaaaacaatctataaggagtataaggacgactcatataccgacgaggttgcccagcccgcctggttgggcttcctcggacctgtgctgcaggccgaagtaggagatgtgatccttatccatctcaagaatttcgcaacccgaccatatacaatccacccccatggagtcttttatgagaaggatagcgagggcagcttgtatcccgatggcagttccgggcccctgaaggccgatgactcagtgccaccaggtggcagccacatttacaactggactatccccgaagggcatgctccaacagacgcagatcccgcctgtctcacatggatttatcacagccacgtggacgctccaagggatattgccaccggactgatcggacccctgatcacatgcaagcggggcgcattggacggcaacagcccccctcagcggcaggatgtggatcacgatttcttcctcctattttccgtggtcgatgagaacctgtcctggcatctgaacgaaaatatcgccacatactgctccgaccccgcatccgtggataaggaggacgagacattccaagagtccaatagaatgcacgcaattaacggattcgtgtttggcaacctgccggaattgaacatgtgtgcgcagaagcgagtagcatggcatctgtttggcatggggaacgaaatcgatgtccatactgccttctttcatggacagatgctgacaacccgcggccaccacaccgatgtcgcaaacatattcccagcaaccttcgtgacagcagaaatggtgccatgggaaccagggacgtggttgattagttgccaggtaaattctcatttccgggacggcatgcaggctctttataaggtcaagtcttgtagcatggctcccccagtggatctgcttaccggaaaagtgcgccaatacttcatcgaggcacacgagatccagtgggactacggaccaatgggccatgacgggtccactgggaagaatttaagagaaccgggtagtataagcgacaaattttttcagaaaagcagtagcaggatcggaggaacctattggaaagtgcggtatgaggcctttcaggatgaaacttttcaagaaaagatgcaccttgaggaggacaggcaccttgggattctcggcccagtcatcagggctgaagtcggcgacacaatccaggtggttttttacaacagagcgtcgcagccctttagcatgcagcctcacggggtgttctatgagaaagactatgaaggcactgtgtataatgatggatcctcgtaccccggccttgtggcaaaaccattcgagaaagtgacctaccgttggacagttcctccacatgccggccccaccgcccaggatcctgcttgcctgacatggatgtacttctccgccgctgatcctattcgggacacaaactccgggctggtgggtcccttgctggtctgtcgcgcaggagccctgggtgccgacggcaagcaaaaaggcgttgacaaggagttcttcctgctgttcacagtacttgatgaaaataaatcctggtattcgaacgcaaaccaggctgccgcgatgctagacttccggctgctctctgaagacatcgaggggttccaggattccaatagaatgcacgccatcaatggatttttgttctctaacctgccaaggctggatatgtgcaagggtgacactgtggcttggcacctgctggggctggggaccgaaaccgatgtccacggggtgatgttccaggggaataccgtccaactgcaaggaatgcgaaaaggagccgcgatgctctttccacacacttttgtaatggctatcatgcagccagataaccttggcaccttcgagatttattgccaggccggttctcacagagaagcgggaatgcgcgcaatctacaatgttagccagtgcccagggcatcaggccacccctaggcaaaggtaccaggcagcgcgcatttactatatcatggctgaagaagtggaatgggattactgtcctgataggagctgggaaagggaatggcataaccagagcgagaaagactcctatggatatatttttttgtctaacaaggacggcctgctggggtccagatacaagaaggccgtattcagagagtacacggacggcacctttagaattcctcgaccaaggacaggcccagaggaacatctgggaatccttggacctctgattaaaggcgaggtgggcgacatactcactgtagtgttcaaaaataatgcttctcgtccctattcagtgcacgcccatggggtgctcgagtctacaactgtgtggcccctagccgcagagcctggggaggttgttacttatcagtggaatatcccggaacgcagcggcccagggcctaatgattccgcgtgtgttagttggatttattactctgccgttgatccaatcaaggatatgtattcagggctggtgggtcccttggccatctgccaaaaagggatcctggagccgcacggcggtcggtcagacatggatagagaattcgcacttttattccttatatttgatgagaacaagtcatggtatctggaagaaaatgttgccacccacggttcacaggatcctggctcaataaacttgcaggacgaaacctttctggagagtaataaaatgcacgctatcaatggcaagttatacgccaacctgaggggacttacaatgtaccagggagaaagggtggcatggtacatgctggcgatgggacaggatgtcgacctgcatactatccacttccacgccgagtcctttctgtatcgcaatggcgagaattatagagcggacgtggtcgatcttttcccaggcaccttcgaagtggtggaaatggtggccagcaatcccgggacatggttgatgcattgtcatgtaacagaccatgtgcacgcagggatggaaactctgtttacagttttctcccgaactgaacacctctcccccctcactgtcattaccaaggagactgaaaaagctgtgccaccaagagacattgaggaaggtaacgtcaaaatgctgggcatgcagattccgataaagaatgttgaaatgctggcatcagtccttgtggccatctcagtcacgttactcctggtagtcctcgctctcgggggtgtggtgtggtaccagcacagacagcgtaagcttagaagaaacaggcgttctatcctagatgattccttcaagctattgtccttcaagcagtag

SEQ ID NO: 190566 - DNA, 2910 bp, synthetic construct
  misc_feature 1..2910: note = Description of Artificial Sequence: Synthetic coding sequence
  source 1..2910: mol_type = other DNA
atgtgggccatggagagcggccacctgctgtgggccctgctgttcatgcagtctctgtggcctcaattgacggacggtgcaaccagagtctactatctggggataagggatgtgcagtggaactatgcaccaaaggggcgcaacgttattactaaccagcccttggattctgatatagtggcctcgtcattcctgaagtctgacaaaaaccgcattggaggaacctacaaaaagacgatttacaaagaatataaagatgactcctataccgacgaagtggcccagcccgcatggctgggtttcttgggccccgtgctacaggcagaggtgggagatgtgattctgattcacctaaagaatttcgcgactagaccgtacacgatccatcctcacggggtattctatgagaaagacagcgagggatccctttacccggatggctctagtgggccacttaaggccgatgactccgtgcctccgggtgggtcacacatttacaattggactataccggaaggtcacgcacctacggatgcggatcccgcttgcctaacctggatttaccacagccacgtagatgcccctcgcgacatcgctacaggcctgatagggccgctcatcacctgcaaacggggagctctcgatggaaactcccccccacaacgtcaggacgtcgatcacgatttctttctgttgttcagcgtggtcgatgaaaatctgtcctggcacttaaacgagaacatcgctacatattgttcggatcctgcgagcgtggacaaggaggacgagacatttcaggaatcaaatcgtatgcacgccatcaatggattcgtcttcgggaatctgccagagttgaacatgtgcgcccaaaaaagggtggcttggcacctttttggcatgggaaatgaaatagatgtccataccgcattttttcatggccagatgctgacaaccaggggtcaccatacggatgtagccaatatttttccggccacctttgtaacggcagaaatggtgccctgggagccggggacatggctgatcagctgccaggtgaattctcattttagggatggcatgcaggccctgtataaagttaagagctgctcaatggcacctcccgtagatctcctgacaggaaaagtgaggcaatatttcatcgaggcacacgagatccagtgggattacggcccaatgggtcacgacggtagcacaggaaagaaccttcgcgaacccggtagtataagcgataaattttttcagaagagctcctcaaggatcggggggacctattggaaggtgagatacgaagccttccaggacgagaccttccaggagaagatgcacctcgaggaagacagacacctgggcattctgggacctgtcattcgggcagaagtgggggacacaatacaagtggtgttttacaatagggcctcgcaaccattcagtatgcagccacacggggtcttctacgaaaaggattatgaagggacagtgtataacgacggcacattcgaaatctactgtcaagccggttcacaccgtgaagcaggaatgcgggccatttataacgtctcccagtgccctgggcatcaggcaaccccccgccagcggtatcaggctgcccgcatttactacataatggccgaggaggtcgagtgggattactgccccgaccgatcatgggaaagggaatggcacaatcagtctgagaaagactcatacgggtatatctttctctccaataaggacggcctcctggggtccagatataagaaagccgtcttcagggaatacacagatggcaccttcaggatcccacgcccccgtacagggccagaggagcacctcggaatcttggggcctttgattaagggggaggttggcgacattctaaccgtagtcttcaagaataatgcctcacggccctatagcgtgcatgcccatggggtgctggagtctacaacagtctggcctctggcggcagagcccggggaggtggtcacatatcagtggaacatccccgaacgctctggacccggacctaacgactctgcctgcgttagttggatttattattcggccgtggacccaattaaggacatgtactcgggcctggtaggcccacttgcgatctgccagaagggtatactggagccccatggcgggaggagcgacatggatcgcgaatttgcactcctgtttttaatatttgatgaaaataagtcctggtacctggaggagaacgtggcaacccatggctcccaagaccccggctccatcaacctgcaagacgaaactttcctagaatcaaataagatgcatgctattaacggaaaactgtacgctaacctgcgcgggctgactatgtatcaaggtgagagggtggcctggtatatgttggcgatgggccaggacgtggatctgcacaccatccatttccatgccgagtcattcctctacaggaatggcgagaactaccgagctgatgttgtggatctgttccctggcacattcgaggtcgttgagatggtggcctccaaccccggtacatggctcatgcattgtcatgttaccgaccatgtgcacgcaggcatggaaacactgttcaccgtgttcagtcgcaccgagcatctgtctccgctaactgtcatcacaaaggagaccgagaaggctgttcctcccagagacattgaggaaggcaacgtaaagatgctcgggatgcagatccctattaagaacgtcgagatgcttgcttctgtgttggtagctatatctgttacactgctgcttgtggttctcgctctcggcggtgttgtctggtatcagcatcgacagcgcaagcttcggaggaaccggcggtccatcctcgacgatagcttcaagctgctgtcctttaagcagtag

SEQ ID NO: 190567 - DNA, 2436 bp, synthetic construct
  misc_feature 1..2436: note = Description of Artificial Sequence: Synthetic coding sequence
  source 1..2436: mol_type = other DNA
atggagagcggccacctgctgtgggccctgctgttcatgcagagcttgtggcctcagcttactgacggagcgaccagagtgtattaccttggtatccgggatgtgcaatggaattacgcccctaagggtcgtaacgtgattaccaaccaaccattggattccgatatcgtcgcttcttctttcctgaagtcagacaagaataggattggggggacttataaaaagaccatttacaaagagtataaagatgactcctacacagacgaagttgctcagccagcatggctgggatttctgggccctgtgcttcaggccgaggtaggcgacgtcatcctgatccacttaaaaaatttcgctaccagaccatacaccatccatccccatggcgtattttatgagaaggactccgaaggttctctgtaccccgacggtagttccggccctctcaaggccgacgattccgtgccgcccggaggtagccacatttacaactggactattcccgaaggccacgctcctaccgacgccgaccccgcctgtctcacctggatctatcactcacacgtagacgcccctagggatatcgcgaccggcctgatcggtcctctcataacttgtaagaggggagcactcgatggtaattcgccccctcagaggcaggacgtagatcacgactttttcctcctgttttcagtggtcgacgaaaatctgtcttggcatcttaacgagaatatagcaacatattgctcagatcccgcttccgtggataaggaagacgaaactttccaagagtctaaccgcatgcacgccataaacggctttgtgttcgggaacttgcctgagctgaatatgtgtgcccagaagagagtggcatggcacttgttcggcatgggtaatgagatcgatgtccataccgcctttttccatgggcagatgcttacaactcgggggcatcacactgatgttgccaacatcttccctgctaccttcgtcaccgccgaaatggtcccttgggagcctggaacatggttgatttcctgccaagtgaactcccacttcagagacgggatgcaagccctctacaaggtgaaaagttgttccatggctccaccggttgatcttctcacaggtaaagttcgccagtacttcattgaagctcatgagattcaatgggattacggtcccatgggacacgacggctccacaggcaagaatttaagggagccaggcagtattagcgacaaattctttcagaagagctcttcgcgcatcggggggacctactggaaagtaagatacgaggctttccaagatgagactttccaggagaaaatgcatctggaagaagacaggcacctgggtatcctgggacccgtcatccgggcggaggtgggtgatactatacaggttgtcttctataatagggccagccagcccttttcaatgcaacctcatggcgtgttctatgaaaaggattacgaggggactgtctacaatgacgatcccatccgggacactaattccggcctggtgggtcctctcctagtgtgtagggccggagcattgggtgcggatgggaagcagaagggtgtcgacaaggagtttttcctgctctttacagtgctggacgaaaacaaatcttggtatagcaatgctaaccaggccgccgcgatgctggacttccggctcctgtccgaggatatagaaggatttcaagactccaatcggatgcacgcaataaacggttttcttttttcaaatctcccccgccttgatatgtgtaaaggagacaccgtcgcctggcatctcttaggacttggcactgagacagatgttcatggggtcatgtttcaggggaacactgttcagctgcagggcatgcgcaaaggagcggctatgctatttccacatacgttcgtgatggcgatcatgcagccggataatctgggcacatttgagatctattgtcaagctggctcgcaccgcgaagcgggcatgagggccatttacaacgtttctcagtgccccggccaccaggcaaccccccggcagcgctaccaagctgcgaggatctactacataatggccgaagaagtcgaatgggactattgccctgacaggtcatgggaacgtgagtggcataaccagtctgaaaaagacagctatggctacatcttcttgtccaacaaggacggattgttgggcagcaggtacaaaaaagccgtgtttagggagtacaccgatggcaccttccggataccccgcccacgcaccggacccgaggagcatctcgggatactggggccgttaataaaaggagaagttggggacatactgacggtggtctttaaaaacaacgctagtcgcccatacagtgtgcacgctcatggggtgctggaaagtaccacagtttggcccctggctgctgaaccttag

SEQ ID NO: 190568 - DNA, 3483 bp, synthetic construct
  misc_feature 1..3483: note = Description of Artificial Sequence: Synthetic coding sequence
  source 1..3483: mol_type = other DNA
atgtgggccatggagagcggccacctgctgtgggccctgctgttcatgcagagcctatggccccaactcactgatggcgcaaccagggtgtattatctggggatacgcgatgtccagtggaattacgctccaaaaggtagaaatgttatcactaatcaaccactggattcagacatagtcgcttcgtccttcctcaagtcagacaagaaccggattggcggtacatacaagaaaacaatttacaaagagtacaaagatgactcctacaccgatgaggtggcacagcccgcatggctgggattcctgggtcccgttctccaggcagaggtgggagacgtgattctgattcacctcaagaattttgctacgcgtccatacaccatccatccacacggcgtgttctatgaaaaagattccgaaggcagcttatacccagatggctcatcaggccctctgaaggccgatgattcagttcctccaggaggtagtcatatctacaactggaccattcctgaagggcacgcacccaccgatgctgacccagcatgtctgacctggatctaccactcacacgttgacgcccctcgcgacatcgccactgggctgatcggcccacttataacttgcaaaaggggtgcactggatggcaactccccaccccagcgccaggacgtcgatcacgactttttcctgctctttagcgtggtggatgagaatctgtcatggcacttgaacgaaaatatcgctacctactgttccgaccccgccagtgtggataaggaagacgagacattccaggagagcaaccgcatgcacgccattaatggcttcgtctttggcaatcttcctgaactgaacatgtgcgctcagaaaagggttgcatggcacctgttcggcatgggaaacgaaatagatgtccacacagctttcttccacgggcaaatgctgacaacgcggggtcaccacaccgatgtcgccaatatctttcctgccacgttcgtgacagccgaaatggtaccatgggaacccggtacgtggcttataagctgccaggtgaattcacactttagagatggcatgcaggccttgtataaggtgaagtcctgtagcatggctccccctgttgatcttctcaccggaaaagtgcggcagtactttatcgaagctcatgaaatccagtgggattacgggcccatgggtcacgacgggtccacagggaaaaacctcagagaaccaggaagcatttcggacaagttcttccaaaagtcatcctcacggattggtggtacgtattggaaggtccggtatgaagctttccaagacgagacctttcaagaaaagatgcatctcgaggaggataggcacctaggcatcctgggaccagttatccgagctgaggttggagatacgatccaggttgtcttttacaacagagcaagccagccattcagcatgcagccccacggggtcttttatgagaaggactatgagggcacagtgtataatgatggctcgtcctaccctggtcttgtggcaaagccttttgaaaaggttacataccgttggactgtcccaccacatgctgggcccacagcacaagatccagcatgcctgacgtggatgtacttcagcgctgctgaccctatcagggacaccaacagtggtctggtgggtcctctcctcgtttgccgggcaggagccctcggagccgacgggaaacaaaagggggtcgataaggagttctttttgctgtttactgttctggatgagaataaaagttggtacagcaatgccaatcaagctgcggccatgctggactttagactgctgtccgaggacatcgagggatttcaagactccaacagaatgcacgctattaatggcttcctcttttccaacttaccaagactggatatgtgtaaaggggacaccgtggcctggcatctgctgggcctgggaactgaaacggacgtgcacggagtcatgttccagggcaatactgtacaattgcagggcatgcgtaaaggcgcggctatgctgtttccccacacctttgtgatggccattatgcagcctgataatctcgggaccttcgagatctattgccaggctggatctcatagagaagccggcatgagggcaatctacaatgtgtctcaatgtccgggtcaccaagccaccccacggcagcgatatcaagccgctagaatttactacattatggccgaggaggtggagtgggattactgtccagatcgaagctgggaacgggagtggcataaccagagcgaaaaggacagctacgggtacatctttctgtcaaacaaggacggactgctcggatcacggtataaaaaagctgttttccgagagtacactgacggaacattcaggatacctcgccccagaacggggccagaggaacacttaggcattctaggaccactcatcaaaggggaggttggggacatcctgactgttgtcttcaagaataacgcctcccgcccctactccgtccatgctcacggcgtcctcgagagcacaacagtatggccactcgccgccgaacctggcgaggtagtaacataccaatggaacatccccgaaaggagcggccctggccccaacgactctgcctgtgtatcgtggatttattatagcgccgttgaccctatcaaagatatgtactcaggactggtcggcccgctcgccatctgccagaagggcatcctcgagccacatggtggccgctcagacatggatcgcgagtttgcactgctgttcctgattttcgatgaaaacaagtcctggtacctggaagagaacgtggccacgcatggctcgcaggatccaggctctataaatctgcaggacgagaccttcttggaatccaacaagatgcatgccattaatgggaagctctatgcaaacctgcgcggattaacaatgtaccagggggaaagagtggcatggtacatgctcgccatggggcaggacgtggatctccataccatccacttccacgcagaaagtttcctttacaggaatggcgagaactaccgcgcagacgtggtagacctctttcctggaacatttgaggtggtcgagatggtggcttcaaaccctgggacatggcttatgcactgccacgtaacagaccatgtgcacgcaggcatggaaacgctgttcacggtattctcccggactgagcatctgagtccactgaccgtgattaccaaagagaccgagaaagttcctccacgagatatagaagagggcaacgtcaagatgctgggcatgcaaatcccaatcaaaaacgtcgaaatgcttgctagcgtgcttgtcgcaattagcgtgactctgctattggtggtcctggcccttgggggagtcgtgtggtaccaacatcgtcaaagaaagcttaggcgtaatagacggtctatattagatgattcatttaagttgttgtcatttaaacagtag

SEQ ID NO: 190569 - DNA, 627 bp, synthetic construct
  misc_feature 1..627: note = Description of Artificial Sequence: Synthetic coding sequence
  source 1..627: mol_type = other DNA
atggagagcggccacctgctgtgggccctgctgttcatgcagagcctgtggccacaattgactgacggggcaacacgcgtatattatctgggaatccgggacgtgcaatggaactatgcaccaaagggaagaaatgtgattacgaatcagccactcgattcggacatcgtagcgtcaagttttctgaaatccgacaagaaccggataggaggaacatacaaaaagacaatctacaaggaatataaagacgacagttacactgacgaggtggcccagcccgcgtggctgggcttcttgggccccgtgcttcaggccgaagtgggcgacgtcatcctgatccatctgaagaactttgcaactagaccatatacgatccatccccacggtgtgttttatgagaaagactctgaaggatccttgtatcctgatggaagcagcggaccactgaaagctgatgactctgttccccccggaggcagccatatttacaactggactattcccgaagggcatgccccaacagacgcagacccagcctgcctgacatggatatatcacagccatgtggacgcccccagagatatcgccacagggcttataggtccacttattacgtgcaaacggtag

SEQ ID NO: 190570 - DNA, 3639 bp, synthetic construct
  misc_feature 1..3639: note = Description of Artificial Sequence: Synthetic coding sequence
  source 1..3639: mol_type = other DNA
atgacccagaccctgccctaccacctgagcctgctgaacgtgctgtttcctggaccttgcagtcgccactttaagtttcgcagggggaagtgcgcacagccagcctggaggaaagtatccgctccctcccaggaccttcttatcacaaaggttatgtgggcgatggagagcgggcaccttttatgggcgctgctgtttatgcagagcctttggccccagctaacagatggggccactcgggtgtattaccttggaatcagagacgttcagtggaactacgcccccaaggggaggaacgtgattacaaaccaacctctggatagtgacatcgtggcgtcaagttttctgaagtccgacaaaaaccggatcggaggcacatacaaaaaaacgatctacaaggaatacaaagatgacagctacacggatgaagtggcccagcccgcgtggctgggattccttggcccagttctgcaggccgaagttggcgatgtcatcctcatccacctaaagaatttcgccactcgcccatatacaatacacccacatggggtcttctacgagaaggacagcgaggggagcctctaccccgacggttccagtggtcccctgaaggccgacgattccgttcctcctggcggctcacacatctacaattggacaattccagaagggcatgctcctactgacgcagaccctgcctgcttgacttggatctaccatagccacgtggacgcgcctcgcgatatagcaaccggactgatagggccgttgatcacatgcaagcgtggagctctcgatggcaacagccctcctcaacgacaagacgtcgaccatgacttcttcctcctcttttcggtggttgatgaaaacctatcctggcatcttaatgaaaatatcgccacgtattgctcagatcctgccagcgtggacaaggaggatgaaaccttccaagaaagcaaccgcatgcacgcaataaatggcttcgtgttcgggaacctgccagaacttaatatgtgcgcccagaagagagtggcctggcatctgtttggaatgggcaatgagattgatgtgcacacagctttcttccatgggcaaatgctgacaacacgcggacatcatactgatgtcgccaacatcttcccggctacattcgtcacagctgaaatggtcccgtgggaacccgggacctggcttatcagttgtcaggtgaatagtcatttccgcgatggcatgcaggctctgtataaggttaagagctgttcgatggcaccgccagtggacctcctgactggaaaagttcggcagtactttattgaagcccatgaaatccagtgggattatggtcctatggggcacgacggcagtactggaaagaacttgcgtgaaccaggtagcatcagcgacaaattttttcagaagagctctagtcgcatcggagggacctactggaaggtacgctatgaagctttccaggacgagacatttcaggagaagatgcacctcgaagaggatcgacacctaggaatcctcggcccagtgatcagagctgaagtgggcgacaccatccaggtggtgttctacaaccgcgccagccaaccattcagcatgcagcctcatggcgtattttatgagaaagactacgaaggcactgtttacaatgacggatcatcatatcccggcctggtcgccaaaccatttgagaaggtgacttaccgctggaccgtgcccccccacgccggccctacagcccaggatcccgcctgcctcacatggatgtatttcagtgcagcagacccaattagggataccaacagcgggctagtcggcccgctcctcgtgtgcagagcaggcgccctgggggctgatggcaagcagaagggggtcgacaaagagttctttcttttattcacggtgttggacgaaaataaaagctggtattccaacgccaaccaagccgctgcaatgctggacttccgcctgctcagcgaggatatcgagggcttccaggatagtaaccgtatgcatgccatcaatggatttttgttttcaaatctgccaagattggatatgtgcaaaggtgacacggtggcctggcatctgctaggactggggactgagacagacgtgcatggggtgatgtttcagggcaacactgtccagctacagggcatgaggaagggagccgccatgctgttcccccacaccttcgtgatggctataatgcagcctgacaatctgggaacctttgaaatttattgtcaagccggttctcacagagaggccggcatgcgcgctatttataacgtgtcccagtgcccaggccaccaagccacaccgcgacaacggtaccaggccgccaggatctactatattatggcggaggaggttgaatgggactactgtcctgaccggagctgggaacgggagtggcataatcaaagcgaaaaggacagctacggctacatctttttaagtaacaaagacggcctgttgggatccaggtacaaaaaggcagtgtttagagaatatacagatgggaccttccgaatccctaggccaagaacggggcccgaggaacatttgggcatcctgggacctctgatcaagggggaggtcggtgatatcctcaccgtcgtgtttaagaataatgctagccgtccgtacagcgtccacgctcatggcgtgctcgagagcactactgtgtggcccctagctgccgagcccggggaagtggtcacataccagtggaatatacctgaaagatccggaccaggccctaatgactccgcgtgcgtctcatggatctactatagcgccgtggatcccatcaaagacatgtactccggactggtgggtcctcttgcaatatgccagaagggtatcctggagcctcatggtgggcgatccgacatggaccgggagtttgccctccttttccttatctttgacgaaaacaaaagctggtacctggaagaaaacgtggcaacacatgggagtcaggatcctggatcaatcaatctgcaggacgagacttttttagaaagcaataaaatgcacgctatcaacggcaaactgtatgcaaacctgcggggcttaactatgtatcagggagagcgcgtagcctggtatatgctagctatgggacaggatgtcgatttgcatacaatccattttcatgctgaaagcttcctctacagaaatggcgagaactatcgggctgacgttgtggacctttttcccgggaccttcgaagtggtggagatggtggcttcgaaccctggcacctggctgatgcactgccatgttactgaccacgttcacgccggaatggagacactgttcaccgtgttctctcgcaccgagcacctgtctccgctcaccgtcattacgaaggagactgagaaagccgtaccaccaagagacatagaagaagggaacgttaagatgctgggcatgcaaatccccatcaagaatgtagagatgctggcctccgtgcttgtggcgataagcgtgactctgctgctggtcgtgctcgctctcggcggcgtggtatggtaccaacaccgccagcgaaaactgcgcagaaatcggagaagtatcctggacgacagtttcaagctcctctcatttaagcaatag

SEQ ID NO: 190571 - DNA, 1254 bp, synthetic construct
  misc_feature 1..1254: note = Description of Artificial Sequence: Synthetic coding sequence
  source 1..1254: mol_type = other DNA
atggcccagaaggagggcggccggaccgtgccctgctgcagccggcccaaggtggctgctctgactgccggaactctgctgctgttaacagcaatcggcgcagcctcatgggcaattgtcgcagtgctactgagatcagaccaggagcccctctaccccgtacaagtaagttcggctgatgcgagacttatggtgttcgataagacagaaggtacctggaggctgttatgtagttccagatcaaatgcgagagtagccggtctttcttgtgaggagatgggatttctcagagccctcacccactctgaactggacgttcgcactgctggagccaacggaaccagcggatttttctgtgtggacgaaggaaggctgcctcacactcaacgtctgttggaagtgatcagcgtctgcgattgtccccgtggcaggtttttagccgctatttgccaagattgcggtcgtagaaaactgcccgttgacaggatcgtcggcggcagagacactagcctaggaaggtggccttggcaggtgagcctgagatacgacggtgctcacctatgcggcggtagcctgctgtctggcgactgggtgctcacagccgcacactgcttcccagagagaaacagggtgctgtcacgctggagagtctttgcgggcgcagtggcccaagcctctccacatggattgcagctaggtgtgcaggccgtcgtgtatcacggtggttatttgccatttcgggaccccaacagcgaggagaattcaaacgacatagccttggtgcatctttccagccctctgcctctcactgaatacatccagcctgtgtgtttgcccgccgcgggtcaagccctggtggacgggaaaatatgcaccgtaacaggatggggaaacacccagtactatggccagcaagctggagtgctgcaggaagcccgcgtgcctataatatccaacgacgtctgcaacggcgctgacttttatgggaaccagatcaaaccgaagatgttctgtgctggataccctgagggtggaattgatgcctgccagggtgactctggcggcccgttcgtctgtgaagactcgatttccaggactcctaggtggcggctatgcggaattgtctcatggggcaccgggtgtgcgttggcacaaaaaccgggggtttatactaaagtgtcagattttcgagaatggatttttcaggccatcaagacacatagcgaagccagtggtatggtgacacaactgtag

SEQ ID NO: 190572 - DNA, 1254 bp, synthetic construct
  misc_feature 1..1254: note = Description of Artificial Sequence: Synthetic coding sequence
  source 1..1254: mol_type = other DNA
atggcccagaaggagggcggccggaccgtgccctgctgcagccggcccaaggtggccgcacttaccgccgggacactgctgctcctcacggctataggggcagcttcttgggcaatagtcgccgtgctcctcagatctgaccaggagcccctgtatccagtccaagtaagcagcgcggacgccagactgatggttttcgataaaaccgaagggacttggcggctgctctgctcctccagatcaaacgctcgcgtagccggactgtcgtgcgaggaaatgggatttctcagggcactgacacacagcgaactcgacgtgaggactgccggcgctaatggtaccagtggattcttttgcgtggatgaagggagattgccccatacccagagactcttggaggtgatatccgtgtgtgattgtcctcgcggtcgttttctggccgccatttgtcaggattgtggtcgaagaaaactgcccgttgacaggatagttgggggccgcgataccagtctcggcagatggccttggcaggtctccctgcggtacgacggcgcacacttatgtggtgggtcccttctgagcggcgactgggtgctgactgcagcccattgcttcccagagagaaatagagtgctgtcgcggtggagggtgttcgctggggccgtcgctcaagcctccccccacggccttcaacttggcgtacaagctgtcgtgtatcacggaggctatctaccctttcgtgatccaaattcagaagagaactccaatgatatcgctctggtgcatttatcgagccccttacctttaacagagtatatacagcccgtttgcctcccggcagccggtcaggctttggtggatggcaaaatttgcacagtgaccgggtggggcaatacccaatattacgggcagcaggcgggtgtgctgcaagaagcccgcgttcctataattagtaatgatgtgtgcaatggcgccgacttctacgggaaccagattaaacctaaaatgttctgtgccggctaccccgagggaggcatagacgcctgccagggtgacagtggcggcccgttcgtctgcgaggactctataagcaggacaccgagatggcgcctctgcggcatcgtgagctggggaaccgggtgtgctctggctcagaaacccggcgtgtataccaaggtttccgattttagagagtggatctttcaggccattaagacacattctgaagcctcagggatggtgactcagctgtag

SEQ ID NO: 190573 - DNA, 1182 bp, synthetic construct
  misc_feature 1..1182: note = Description of Artificial Sequence: Synthetic coding sequence
  source 1..1182: mol_type = other DNA
atgtgcaagatgcggacccgggaggacatgcagctgggcaacgagggtccaggcactgctttacggctgatacatctccaggttagttcagccgatgcccgactcatggtcttcgataaaacagagggcacctggagactgctgtgttcctcacgttcaaatgcccgcgttgcaggcttgtcttgcgaagagatgggattcctgcgcgccttgacccactccgaactggacgtccgaactgcaggcgctaatggcacctccggctttttctgcgttgatgaaggtcgacttccacacacgcaaaggcttctggaggtcattagcgtgtgtgactgtcctcgggggagattcctggctgcgatatgccaggactgcggacgccgcaagctccctgtggataggattgttggcgggcgggacacgtccctcggccgttggccctggcaggtaagcttaaggtatgatggggcccacctttgtgggggaagcctgctttctggagactgggtgctgaccgcagcccactgttttcctgagcggaaccgtgttcttagtcgctggcgcgttttcgcgggtgccgttgcccaggcctcgcctcacggcctccagctgggcgtgcaggctgtggtgtatcatggaggttaccttccatttagggatcccaactccgaagagaacagcaacgacatcgctctggtgcacctatcatcccctctgccacttacagagtatattcaacccgtgtgtctgccagctgctgggcaagccttggtcgatggtaaaatctgtacagtcacgggctggggaaacacacagtactatggccagcaggctggagtgctgcaggaggcaagagtgcctatcatatcgaacgacgtgtgcaacggagctgacttctacggcaatcagattaaaccgaagatgttctgtgctgggtaccccgaaggtgggatcgatgcctgtcaaggtgattctggcggcccgttcgtatgtgaggacagcatatctaggactccgcggtggagactctgtgggatcgtgagttgggggacaggatgcgccctcgctcagaagcccggtgtctataccaaagtttccgatttccgcgaatggatcttccaggctatcaaggttaaagtgggatctcggtgggagcctggatggggtagactgggtgtttag

SEQ ID NO: 190574 - DNA, 2103 bp, synthetic construct
  misc_feature 1..2103: note = Description of Artificial Sequence: Synthetic coding sequence
  source 1..2103: mol_type = other DNA
atgaagtgcgtgctggtggccaccgagggcgccgaggtgctgttctattggactgaccaggaattcgaagaatccctcagactcaaattcggacagagcgaaaacgaggaggaagaacttcccgcactggaggaccaactaagcacgttattggcgccagtaattatcagcagtatgactatgctagaaaaactgtctgatacgtacacctgtttctccactgagaatggcaacttcctgtatgtgctgcacctgtttggcgaatgtttattcattgccatcaacggggaccacaccgaaagtgaaggagacttgcggcgaaaattgtacgtcctgaagtacctgttcgaagtgcactttggccttgtaaccgtcgatgggcacctgatcagaaaagagctcaggccgcccgacctggcacagagggtacagctctgggaacacttccagagtctcctctggacttacagtcggttacgagagcaggagcagtgtttcgccgtcgaagctctggagcgcctgatccacccgcagttgtgcgagctatgcattgaagcactcgaaagacacgtgatccaggccgtgaatacaagccccgagcgcggcggcgaggaggcgctgcacgcatttctgctagtgcatagtaaactactagctttctactcaagccactccgccagctctctgcgaccagctgatctactggccttgattttgctggtccaggatctgtaccctagcgagagtacggccgaggacgacatccagccctcccctcgacgcgcccggtcttcccaaaatattccagtacagcaagcgtggtcgccccacagcactggacctactggagggtcaagtgcggagaccgaaacagattccttctctctaccagaagagtacttcacaccagccccttcccctggcgatcagtctagtggtagcacaatctggctggagggcgggaccccacccatggatgcattacagattgcagaagacacactccagaccctcgtgccgcattgtcctgttccctcaggcccgcgtaggatcttcctcgatgccaatgtgaaagagagctactgccccctagtgccccacactatgtactgcctcccattgtggcaaggcattaatctggtcctgttgacacgttcaccttctgcgcctctggctctcgttttatcgcagctgatggacggattcagcatgcttgagaagaagctaaaagagggacccgaacctggggcatccctccgatcacagccactcgtgggcgacctccgacaaaggatggacaagttcgtgaagaatcgaggagctcaggagatccagagcacctggttggagttcaaagctaaggcgttttccaaatcggaacctggaagctcttgggagctcttgcaagcatgtggcaaactcaagcgacagctgtgtgcaatctatcgacttaactttttgactacggcccccagccgggggggtcctcacttaccccagcacctgcaggatcaggtgcaacgcctgatgcgggagaaattgacggattggaaagatttcctgctggttaagagccgacgaaatatcacgatggtgtcctacttagaagatttcccaggcctcgtacacttcatctacgtggatcgtacgacagggcagatggtagccccctccctgaactgtagccagaaaaccagttccgagttggggaagggaccattggcagctttcgtgaaaacaaaggtgtggagtcttattcagctggcccgaagatacctgcagaaagggtacacaacactcctatttcaagagggggacttctattgtagttactttttgtggttcgaaaacgatatgggctacaaactgcagatgattgaagttcctgttttgagcgacgactctgtgcccattgggatgttaggaggagactactatcggaagcttctgaggtactactctaagaaccggcccactgaggcggttaggtgctacgagttactggccctacatcttagcgtgatcccaacggacctgttggtgcagcaagccggtcagctggctaggcggctgtgggaggccagccgcatcccactcctatag

SEQ ID NO: 190575 - DNA, 975 bp, synthetic construct
  misc_feature 1..975: note = Description of Artificial Sequence: Synthetic coding sequence
  source 1..975: mol_type = other DNA
atgaagtgcgtgctggtggccaccgagggcgccgaggtgctgttctactggaccgatcaggagttcgaagagagcctgcgcctgaaatttggtcagagcgaaaatgaggaggaagagcttccagcactcgaggatcagctgtccacccttcttgccccagtgatcatcagtagcatgacaatgcttgagaaactgtcagatacatatacttgcttctcaacggagaacggaaactttctgtacgttttgcatttgtttggtgagtgcctgttcattgccattaatggcgaccacaccgagagcgagggcgatttgagaagaaagttatacgtgctgaagtatctgttcgaagtccatttcggcctcgtcactgtggatggtcatctaatcagaaaagaactcagaccccccgacctggctcagcgagtgcagctgtgggagcatttccagagcctcctttggacctattcacggttgagagagcaagaacaatgtttcgccgtggaggccttagaacgcctcatccacccccagctatgtgagctctgtattgaggcactcgagcggcatgtcatccaggctgtgaatacaagtccagagcgcggtggtgaggaggctctgcatgccttcttactcgtccattctaagctgttggccttctactctagtcactctgcaagctccctccgccccgccgacctacttgcactgatactgctagtgcaggatctctatccatccgaatccactgcagaagatgatatccagccgagccctcgtcgggcccggagttcacaaaacatccccgtacagcaggcttggtccccccacagtaccggtcctacagggggctcaagtgcagagactgagactgattcgttcagcctccctgaggaatactttaccccagctccatcccctggcgatcagtcctccggagaggataggaggaaagccggtggtaataactcctag

SEQ ID NO: 190576 - DNA, 981 bp, synthetic construct
  misc_feature 1..981: note = Description of Artificial Sequence: Synthetic coding sequence
  source 1..981: mol_type = other DNA
cggctgatccacccccagctgtgcgagctgtgcatcgaggccctggaacgccacgtgatccaggctgtcaatacatcaccagaaaggggcggagaggaggccctacacgcttttcttctcgtgcattccaaactgctggcattttattcaagccactcagcctccagcttgcgccctgctgatcttctagcactcatccttctcgtgcaagacttatatccaagcgagagcactgccgaagatgacattcaggaaacggatagtttcagtcttcctgaagagtactttacaccggcgcccagccctggcgatcagtcttctgggagcaccatttggcttgagggaggcacgccccccatggacgcgctccagattgctgaggacaccctccagaccctggtgccacactgtcctgtcccttccgggcctcgtagaatcttccttgatgctaacgtgaaagagagttactgcccccttgtgccccacaccatgtactgtctgcctctgtggcagggaattaacttggtgctcctcacaaggtccccaagcgcacccctggccttagtattaagtcagctgatggatggtttttccatgctggaaaaaaagctgaaggaagggcctgagccaggcgcttcgctgcgatcacagccactcgtgggggatctcagacaacggatggacaaatttgtgaagaaccgtggagcccaggagatccaatctacgtggttggaattcaaagccaaagctttctctaagagcgagccaggaagcagctgggagcttctgcaggcatgtggtaagctgaagcggcaactttgtgctatatatcgcctgaactttctgaccaccgccccctcgaggggaggacctcacctccctcaacacctgcaggatcaagttcagcgtttgatgcgcgagaagcttacagactggaaagatttccttctggtaaagagcagacgaaatattacaatgtag

SEQ ID NO: 190577 - DNA, 2103 bp, synthetic construct
  misc_feature 1..2103: note = Description of Artificial Sequence: Synthetic coding sequence
  source 1..2103: mol_type = other DNA
atgaagtgcgtgctggtggccaccgagggcgccgaggtgctgttctactggaccgaccaagagttcgaagaaagtctacggctgaagtttgggcagtccgagaatgaagaggaagagctacccgcactcgaggaccagttgtcaaccctcctggccccggtgattatatccagcatgacaatgctggagaagttgagcgatacatacacctgctttagtaccgagaatgggaattttctgtacgtcctacacctcttcggggaatgcctgttcatcgccatcaacggggaccacacagagagcgaaggtgaccttaggaggaaactttacgtactcaaatacctgttcgaggtccacttcggcctggtaaccgtggatggccacctgattcgaaaggagctccgaccgccggatctggctcagcgtgttcaactgtgggagcactttcagagcctcctgtggacgtactcccgattaagagagcaggagcaatgttttgcagtggaagctctggaacgactgattcatccccaattgtgcgaactctgtatcgaggccctggagcggcacgtgattcaggcagtgaacacctcaccagaacgcggtggggaggaggcacttcatgcctttctactagtacactccaaacttttagctttctactcaagccatagtgcttcttctctgcggcccgcagatctgctcgctttaattcttctggtccaggatctgtaccctagtgaaagtaccgctgaagatgacatccaaccgtcacctcgcagagcccgctcatctcagaatatacctgtccagcaggcgtggagtcctcattccacgggccctacagggggcagtagcgctgagaccgagaccgactcctttagtctgccagaagagtactttacccctgcgccatcacccggagaccagtcttccgggtcgacaatctggcttgaaggggggacaccacctatggatgccctgcagatcgctgaggataccctgcagaccctggtaccacattgccccgtccctagcggtcctcgcagaatcttcttggatgccaatgtcaaggagagctattgcccactcgtcccccacactatgtactgcttaccgttgtggcagggcatcaacctggtgctgctcaccaggagtcctagtgcccctctggctctggtgctctcccaactgatggacggattcagcatgcttgagaaaaagctgaaagagggccctgaacccggcgccagtctgcgtagccagcccctagttggtgacctgcgccagaggatggataaatttgtaaaaaacagaggcgcccaagaaatccagtccacatggctcgaattcaaagctaaggctttcagtaaatcagaacccggaagttcctgggagctcttgcaagcttgtgggaaactcaagaggcagctgtgtgcaatctatcggctgaacttcctcaccaccgccccctcacggggcggtccccatctgccccagcatctgcaggaccaggttcagaggctgatgcgggaaaagttaaccgactggaaggatttcctcctggtaaaaagccgaaggaacatcacaatggttagttatctagaggacttccccgggcttgtacattttatctacgtcgatcgaacaacgggtcagatggtggccccgtcattgaattgttcccagaaaactagcagcgagttgggtaagggacctttagccgcgttcgtgaagaccaaagtctggtccctcatccagctggctagaagatacctgcagaaaggatacaccaccttgctgttccaggagggcgatttctactgcagttactttctgtggttcgagaatgacatgggatacaagctccagatgattgaagtgcccgtgctgtctgatgactctgtccccattggaatgctggggggcgactactataggaagctactgcggtactattcgaaaaaccgccctaccgaagctgttagatgctacgaactgctggccctgcacctgtccgttatccccacagacttgttggttcaacaggctggccagttagctcgccgtctttgggaagccagcagaatccccctgctttag

SEQ ID NO: 190578 - DNA, 2004 bp, synthetic construct
  misc_feature 1..2004: note = Description of Artificial Sequence: Synthetic coding sequence
  source 1..2004: mol_type = other DNA
atgaagtgcgtgctggtggccaccgagggcgccgaggtgctgttctactggactgaccaagagttcgaggaaagcttaagacttaagttcgggcagagtgaaaatgaggaagaggaacttcccgccctcgaggatcagctgagcacattactggcacccgttatcatatcttcaatgacgatgctggaaaagttgtctgacacatacacctgcttctccacagagaacggaaatttcctgtatgtcctgcacctcttcggcgagtgtctttttattgcaattaacggtgaccatacggaatctgagggggatttgagacgcaagctctacgttctcaagtacctattcgaggtgcatttcgggctggttacagtggacggccatttgatacgtaaagagctgcggcctccggacctggcccagcgagtacagctctgggaacatttccaatcactcctgtggacttattcccgactcagggagcaggagcagtgcttcgcagtggaggcgctggagcgcctaatacatccccaactctgcgagctgtgtatcgaggcccttgaacgacacgtcattcaggcagtgaacacaagtccagagcggggaggcgaagaggccctacatgcatttctgttagtgcactccaagcttctggcgttttactcatctcactctgcctcctcattgcggcccgccgacctgttagccctgattctgctggtccaggacttatacccctcagaaagcaccgcagaagatgatatccaggagacagattcattctccctgcccgaagagtattttaccccagcgccttcacccggggaccaaagttctgggagtaccatctggctggaaggaggaactccccccatggatgcgctgcagatcgcagaggacactctgcagacactggtacctcactgtcccgtgccctctggacccagaaggatttttctggatgccaatgtgaaggaatcttactgcccactggttcctcacacaatgtattgtctgcccttgtggcagggcattaatctggttctcctaacccggtcgcctagcgcgcctctcgcattggtactgagtcaattgatggatggattctctatgttggaaaagaagttgaaggagggaccagagccgggggcttccctgaggtcgcaaccgctcgtgggggatctgcgacagagaatggacaaatttgtgaagaatcgtggtgcgcaggaaatccagagtacatggctcgaatttaaagctaaggccttcagtaagtctgaaccggggtcctcctgggaactgctccaggcatgtggtaaactgaaacggcagttatgcgcgatatacaggttgaacttcctcactactgctccctctagaggcgggccccaccttcctcaacatctgcaagaccaggttcaacggctcatgcgcgaaaaactaactgactggaaggatttcctgcttgttaaaagccggcggaatatcacgatggtttcctacctggaggatttccccggactagttcactttatctacgtggatcgcactactgggcagatggtagccccttcactaaactgttcccagaaaaccagttcagaattgggaaagggcccacttgctgcttttgttaaaacaaaagtgtggagcctgatacagctcgctagacgttaccttcagaaaggctacaccactcttctttttcaggagggtgacttctattgttcatactttttatggttcgagaatgatatgggctacaaactgcaaatgattgaagtaccggttctgagcgacgattccgtcccgatagggatgctaggtggagattactaccgtaaacttttgaggtattattcgaagaaccggcctaccgaagcagtgaggtgctatgagctgcttgcattgcatctgagtgttatccccacggatctgctggtgcagcaggctgggcagctggccagaaggttatgggaggcttcgcggatccctctcttgtag

SEQ ID NO: 190579 - DNA, 480 bp, synthetic construct
  misc_feature 1..480: note = Description of Artificial Sequence: Synthetic coding sequence
  source 1..480: mol_type = other DNA
tgactgcggccccccgacctggcccagcgggtgcagctgtgggagcacttccagagtctcttgtggacttattcgcgattgcgcgaacaagaacagtgctttgctgtggaggctttagagcgtctgatccatccccagctttgtgagttatgcattgaagctctggagcgacatgtcattcaggcagttaacacttctccggagaggggcggtgaagaggcactgcatgccttcttattggtacattcaaagctgctcgctttctacagttcccactctgcctcatcgctacgaccagcagacctcctcgctctgattttactggtgcaggacctgtatccctcagaaagcacagctgaagatgatatccaggagacggacagcttctccctccccgaagaatactttacacccgccccttccccgggagaccagagctccggggaggataggcggaaagctggtggtaacaattcttag

SEQ ID NO: 190580 - DNA, 3015 bp, synthetic construct
  misc_feature 1..3015: note = Description of Artificial Sequence: Synthetic coding sequence
  source 1..3015: mol_type = other DNA
atggtgcagctgtacaacctgcaccccttcggcagccagcaggtggttccatgcaaactggaacccgatagattctgcggcgggggacgggacgccctgttcgtcgctgcaggctgcaaggttgaagccttcgccgtcgcgggccaagagctgtgtcagcctaggtgcgcattctctacattaggaagggtcttgcggctggcctacagtgaggccggagactacctggtggctattgaggagaagaataaagcgacctttctgcgagcgtatgtgaattggcgaaataaaagaaccgaaaacagccgggtgtgcattagaatgataggtcataatgtggagggcccatttagtaaggccttccgggaccagatgtacattatcgaaatgccattaagcgaggcccctttgtgtatctcttgctgtccggtaaaaggcgacttgctggtagggtgcacgaacaaattggtcttattctctcttaaatatcagatcatcaacgaggagttctctctgttggattttgagcggagcctaatcatacatattgacaacattaccccagtcgaggtctcgttttgtgtaggttacgtcgctgtgatgtctgatctggaagtgctgatcgtaaaactggaatccggtccaaaaaacggcgagagagtccaccatcacccccacaaaaccaacaatcgaattagacggactgaagaaggcatcagcaacgaaatcagtcagctggaatctgacgactttgttatatgtcagaaaccactggaattgctgggagaaaaaagcgagcagtctgggctgtcagttaccctcgaatccactggcctcgccgacgagaaacgaaagtattcgcacttccaacatctgctttaccggcggttcgccccagatatctcctcttacgtactctctgatgacattaagctgcattcattgcaactcctccccatctaccagacgggtagcttaacaagtgacggtaagaatctcagtcaagagaaggagctgctctctttattttgtttcttcagcctgcctcatgtggggtatttgtacatggtcgtcaagtcagtggaactgatgtctgtctatcagtaccctgaaaagtcgcagcaggccgtcctcacccctcaatttttacacgtaataacaagtaacaatctgcagtgttttacggtgcggtgtagcgccgccgcagcccgggaggaagatccttacatggacactacgctcaaagcatgccctccggtgagcatggacgtctgcgcactgcggattcagttgttcatcgggctcaaggccatctgtcatttcaagaatcacatcattctactgacaaaagctgaacccgaggctattcccgagagaaggcaatctcctaaacgcttgctgtcccggaaggatacgtctgtgaaaatcaagatccccccagtggccgaggccggctggaacctgtacatagttaacacaattagtccggtgcagctttacaaggaaatggtggattatagtaatacatacaagactgtgaagacacagtcatgcattcacctactcagtgaggcgcacctgcttgtgagagctgcactgatggacgcctctcagcttgaaccaggggagaaagcagaactgctagaggccttcaaggaatcttgcggacatctgggcgattgttattcacgcctcgattcacagcactcccacctcacattaccctactataagatgagtggactatccatggccgaggtgctggctaggactgactggaccgtggaagatggcctgcagaaatatgagcgcggattgattttctacatcaaccattctctgtacgagaatctggacgaggagctgaatgaagagctggctgcaaaggtggtgcagatgttctatgttgctgagcctaaacaggttccccacatactgtgttcccctagcatgaagaatataaatccacttactgccatgagctaccttcgaaaactcgacacttcaggcttcagtagtatattggtgacccttacaaaggctgccgtggccctgaagatgggcgacttagatatgcatcgtaacgagatgaagtcccactctgagatgaaactggtttgcggctttatcctcgagcctaggctcctgatccagcagcggaaagggcagatcgttcccactgaactcgccctacatctaaaggagacacagcctggcttgttagtagctagtgtactggggcttcaaaagaacaacaaaattgggatagaagaggccgatagcttctttaaggtcctgtgcgcgaaagatgaagacactattccccaactgctggtggatttttgggaggcacagctggtggcctgccttccagacgtagttttacaagagcttttcttcaagttgacttcccagtatatctggcggctgagcaagcgccagccgccggacactaccccacttagaacttctgaggatctgattaatgcctgttcccactacggtttaatttacccctgggtgcacgtggtgatttccagcgactcattggccgataagaattacacggaagatctgagcaaattgcagtcactcatctgcggaccgtccttcgatatcgcttccattatccctttcctcgaacccctgagtgaagataccattgccgggttaagcgttcacgtgctgtgtaggacgcgccttaaagagtacgagcaatgtatcgatatccttctagagcggtgccccgaagctgttattccatacgcaaaccacgagctcaaggaggagaatcgcaccttatggtggaagaaactgctgcccgaactgtgccagcggatcaaatgcggcggcgagaagtaccagctataccttagtagcctgaaagagaccctgtctattgtggccgttgagttggaattgaaagacttcatgaatgttctacccgaggacggaacggctacatttttcctgccctacctcctgtactgtagtagaaagaaaccactgacatag

SEQ ID NO: 190581 - DNA, 1587 bp, synthetic construct
  misc_feature 1..1587: note = Description of Artificial Sequence: Synthetic coding sequence
  source 1..1587: mol_type = other DNA
atggccaccagcaccagcaccgaggccaagagcgccagctggtggaactacttctttctatacgacggcagtaaggtgaaggaggagggcgaccctaccagagctggcatctgctacttttatcccagccagacccttttagatcagcaagagctcctgtgcgggcagattgcgggcgtcgtgcggtgtgtgagcgatatctcagattcaccccctacattggttaggctccggaaactcaaattcgctattaaggtcgacggtgattacctgtgggtgttgggttgcgccgttgagctacccgacgttagctgcaagagattccttgatcagctggtagggttttttaatttctacaatggcccagtaagcctggcatacgagaattgctcacaggaggagctgtccaccgagtgggatacctttatcgagcaaatacttaaaaacacttctgatctccacaagatttttaactccctctggaatctggatcagaccaaggtggagcccttgttgttgcttaaggcagccaggatcctacagacttgtcaacggagcccgcacattctcgcagggtgtattctttacaaggggctcatagtgtctacccaactgcctccttccctgactgccaaggtgctgctacaccgcacagctcctcaggaacagcgcctacccaccggtgaagacgccccgcaggagcacggtaagtggatgctgtggtcctttaagaaccgtgtgacccatcaaaatcctaacggcgcagccctcccaccaaatgttcagatcatccctgtgttcgtaacaaaggaggaagcaatttccttacatgagtttcctgtcgaacagatgactagaagccttgcctctccggctggcctccaggatggcagcgcacagcatcacccgaagggaggctccacatcggcactcaaagagaatgctacggggcacgttgaaagcatggcatggactacccccgacccaacgtcccctgatgaggcttgccctgacgggaggaaagagaacggttgcctcagcggacatgatctggagtcaattagacctgcagggctgcataatagcgcacgaggggaagtgctagggctgtcctcctccctcgggaaggaacttgtgttcctgcaggaggaactcgacctctccgagatccacatcccggaggcacaggaggtggaaatggcatctgggcacttcgctttcctgcacgttcctgttcctgacggacgtgccccttactgtaaggcgtccctgtcagcctccagcagtctcgaacctacgccgccagaagatacggcaatctcctctctaagaccgccatcagctcccgagatgctgactcagcatggtgctcaggaacaactggaggatcatccggggcattcttcccaagcacccattccacgagctgatccactcccgaagtcaactgttctgttcagtggagggtgcgtgaaggggagcgatacccagttatgcgttcctggactggtttggtatcttgaaccccagttctactacgtgattgtcaggcatttctttgactccatgcgacaaaccgctgggtag

SEQ ID NO: 190582 - DNA, 2127 bp, synthetic construct
  misc_feature 1..2127: note = Description of Artificial Sequence: Synthetic coding sequence
  source 1..2127: mol_type = other DNA
atggccaccagcaccagcaccgaggccaagagcgccagctggtggaattacttttttctgtatgatgggtcaaaggtgaaggaggaaggcgacccaactagagccggtatttgttatttctacccatcccagacgctgttagaccagcaggaactgctctgcggccagatcgcaggagtcgtaagatgcgtgtcagatatttccgacagccctccgacattggtccgcctgcgtaaactgaaattcgccatcaaggtggacggcgattacctttgggtgctcggctgcgccgtcgaactccctgacgtctcatgtaagcggttccttgaccagctggtgggcttctttaatttttacaacggaccggtgtccctggcctacgagaactgttcacaagaggagttgtccaccgagtgggataccttcatagagcagattctgaaaaacacctccgacctgcacaaaatatttaacagcttgtggaaccttgatcagacaaaagtagagccattactgttactcaaagcggctaggattctccaaacatgtcaaaggtcaccgcatatcctggctgggtgcatcctatacaaaggacttatcgtgtcaactcagttaccgcctagtctcacagcaaaggttctgttacaccgcaccgccccccaggaacagcgcctaccgacaggcgaagacgcccctcaagaacatggggccgccctcccccctaacgtacagattatccctgtttttgttacaaaggaggaagcgattagcctccacgagtttccagtagagcagatgacacggtccttggccagccctgcaggacttcaggacggaagcgctcagcatcaccctaagggagggagcacaagcgctttgaaagaaaacgctaccggacatgttgagtcgatggcttggactacacccgatcccactagccccgacgaagcatgtcccgatggcagaaaagagaatgggtgcctttctggccacgacctcgagtccatccggcccgccggcctgcataatagcgctaggggtgaggtactgggtctgagtagctctttagggaaggagctcgtattcctccaagaagagctcgacttatcagagatacacatccctgaggctcaggaagtggaaatggccagtggccacttcgccttcctgcatgtgcccgtccccgacggcagagctccttactgcaaggcctcactgtcagcttccagttcactggaacctactccacctgaagacactgcaatctcatctctcaggcccccatcagcacctgaaatgctgacccagcacggggctcaggagcagctggaagatcaccctggacacagcagccaggcccctatccccagagcagaccccctgccccgccggactagacgcccattactgttgccaaggttagaccccggtcagaggggaaataagctccctacgggtgagcaaggtttggacgaagatgtagacggagtttgtgaatcgcacgccgcaccaggactcgagtgtagcagtggctcagccaattgccaaggagcgggaccctcagcggacggtatttcaagtcgcttgacaccagcggaaagttgtatgggtctggtgcggatgaacctatacacccactgcgtcaaagggctcgttctcagccttcttgcagaggagcctctcctgggggacagcgcggcaattgaagaagtctatcactcctcgttagcctctcttaatggattggaagttcatttaaaagagaccctgcctagggacgaggccgctagcactagcagcacctataattttacccactacgatcggattcaatctctgctgatggccaatcttcctcaggtggcaaccccccaggatagacggttcctccaggccgttagcttgatgcactctgaatttgcccagctgcctgcgctttacgagatgactgtaagaaatgcttccactgccgtgtacgcatgctgtaacccgatacaggagacttatttccagcagctggctcctgcagccagatcaagcggctttccaaatccccaggatggcgcatttagcttgtcaggcaaagccaaacagaaacttttgaaacatggggtcaacctgctctag

SEQ ID NO: 190583 - DNA, 2166 bp, synthetic construct
  misc_feature 1..2166: note = Description of Artificial Sequence: Synthetic coding sequence
  source 1..2166: mol_type = other DNA
atggcccccctgtgcagcctggcccggtggaactacttcttcctgtacgacgggtctaaggtgaaagaagaaggggaccccacacgggcggggatctgttacttttatccttctcagaccctgcttgatcagcaggagctgttatgcggccagatcgcaggagtggtgagatgcgtgtctgacatctcggatagtccaccaactctggtgagactgaggaaactcaagttcgccattaaagttgatggggactatctgtgggtgctcggatgcgccgtcgagctccctgacgtgtcttgcaaacggttccttgaccaactggttggtttctttaacttttacaacggtccagtgagtctagcatatgagaactgttcgcaggaagaactgtcaacggagtgggatacgtttatcgaacagatactgaaaaatacctccgacctgcacaaaatctttaactccttatggaacctggatcagacaaaggtagaacccctcttactccttaaggccgctaggatcctgcagacttgccagaggtcgccacacattctagccggctgtattctgtacaagggcctcatagtgtccacccagctcccgcctagcctgaccgcgaaggttctgctccatcggacggcgccacaggagcagcgacttcctacgggggaagacgcccctcaggagcatggcaaatggatgctctggagctttaaaaaccgggtgacacaccaaaaccccaacggagctgctctgccaccgaacgtgcagatcattccagtcttcgtaacaaaagaggaagcaattagtttacatgagtttcccgtggaacagatgactcggagtttggcctccccagcaggtttacaggacggctctgctcagcaccatccaaaaggaggctccacatccgccctcaaagaaaatgctactggtcacgtcgaatcgatggcttggacaacaccagatcccacgtctcctgacgaagcctgccccgatggccgcaaggagaatgggtgcctcagtgggcacgacctggaaagcatccgcccagctggcttgcacaattctgcacgtggcgaggttctggggcttagttcttcgttggggaaagaattggttttcttgcaggaagaactcgatctctccgaaattcacattccggaggctcaggaagtcgaaatggcctcaggacactttgcgttcctccacgtccccgtgcctgatggaagagcgccttactgcaaagcctcattgagcgcttcatcatctttggaacctactccacctgaagataccgcaatctcatcgctgcgtccgccttctgctcccgagatgctcacacaacacggtgcccaggagcagctggaagatcaccccggtcacagttcccaggcacccattcctcgcgctgatcctttaccgcgaaggacccgccggccactcctgcttccgagactggacccaggccagcgcgggaacaagctgccaacaggtgaacagggacttgatgaggatgtagatggcgtctgtgaaagccacgctgctcccggcttagagtgtagctcaggtagtgctaactgtcagggagcaggcccttccgccgacggtatcagcagcagactcacacctgccgagtcatgcatgggactagttagaatgaacctgtacacgcattgcgtaaagggcctcgttctgtcactgctggcagaggagccactcctgggtgattcagctgcaattgaagaagtataccactcatctcttgcaagcctcaatggcctggaggtacatctgaaagagactctgccacgggatgaagccgcaagtaccagttccacatacaacttcacccattatgatcgaattcagtccctcctgatggccaacctaccccaggtagctaccccacaggatagacggtttcttcaggcggtatcgctaatgcacagcgagttcgcccagctgccagcactctatgaaatgacagttcgaaatgcctctaccgccgtctacgcctgctgtaaccccatacaggaaacttattttcaacagctggcccctgctgcacggtcctccggctttccgaatcctcaggacggggctttttcactgagtggcaaagcaaaacagaaattattaaaacacggcgtgaacctgctgtag

SEQ ID NO: 190584 - DNA, 2127 bp, synthetic construct
  misc_feature 1..2127: note = Description of Artificial Sequence: Synthetic coding sequence
  source 1..2127: mol_type = other DNA
atggccaccagcaccagcaccgaggccaagagcgccagctggtggaattatttttttttatacgacgggtctaaagtgaaagaagagggtgatcccacgcgcgctgggatctgctatttttacccttctcagaccctgttggaccaacaggagcttctgtgtggacaaatcgctggagtcgtccggtgcgtctccgacatcagtgactccccccccacacttgtaaggttgagaaaactgaaattcgctatcaaggtggacggggattacctctgggtactaggatgtgctgtggagctccctgacgtatcatgtaaacggttcctcgatcaactggtggggtttttcaacttctataacggtcccgtttctctcgcatacgaaaattgctcacaggaggaactgagcaccgagtgggatacattcatagaacagatcctcaagaatacttccgacctccacaagatctttaattctttgtggaatctagaccagactaaagtggaaccactcttactcctaaaggctgctcgaatcctacagacttgccagaggtctcctcatattttggccgggtgtattctctacaagggcctcatcgtctccacccaacttcccccttccctaaccgcaaaggtgttgctccatcgcactgcacctcaagagcaaagattacctacaggagaggacgccccacaggagcacggtgctgccctgccacccaatgtgcaaattatcccagtgtttgtgactaaagaggaggcgatcagtcttcacgagtttcccgtggagcaaatgacaagatctctagccagtccagccggacttcaggacggaagtgcgcaacatcacccaaaaggagggtctacgtcagcattgaaggagaacgcgaccggtcacgtagagtccatggcgtggacaacgccggatcccaccagtcccgatgaggcctgtccggatggaaggaaggaaaatggctgtctgtccgggcacgatcttgagtcaattcgtcccgccggcctgcacaacagtgctcgcggagaagttctgggactgagcagctcgcttggcaaggaactggtgttccttcaggaagagttagatctgtcagaaattcacattccggaagcacaagaagtcgagatggcatccggtcactttgcttttctgcacgtgccggtgcccgacgggagagccccttactgcaaggcctccttgagcgcgagctcaagtcttgagccaactccccccgaggacacagccatctcttccctcaggccgcccagtgccccggagatgctaacacagcatggagctcaggagcagctggaggatcacccaggacactccagccaggcacctatccctcgcgctgatccattgccaaggcgcactcgcagaccccttctcctgcctagactcgatccgggacaaagagggaacaagctccctactggagagcaggggctggatgaagacgttgacggagtgtgtgaatcccatgccgcgcctggtctcgagtgttcatcaggaagcgcaaattgtcagggagcaggaccaagcgccgacggcatatcctcccgcctgacgccagccgagagttgtatgggtctcgttagaatgaatttgtatacccactgcgtcaagggtcttgtgctctctctcctggctgaagagcctctcctcggggattctgccgcaatagaggaagtatatcactctagcttggccagtttgaacgggctagaagttcatctgaaagagactctgccccgggacgaggccgcaagcaccagcagtacctacaacttcacacattacgataggattcaatccctcttgatggctaatcttccacaagtcgccacaccccaggatagaagatttctgcaggctgtatccctgatgcattccgagttcgcccagttgcccgccctatacgaaatgacggttcgcaatgctagcacggcagtgtacgcatgctgcaatcctattcaggaaacctatttccagcagttagctccagcagcacgcagcagtggattccctaacccacaagatggagcatttagtctgagcggaaaagcgaaacagaaactcctgaagcacggagtgaatttgttatag

SEQ ID NO: 190585 - DNA, 2112 bp, synthetic construct
  misc_feature 1..2112: note = Description of Artificial Sequence: Synthetic coding sequence
  source 1..2112: mol_type = other DNA
atggcccccctgtgcagcctggcccggtggaactacttcttcctgtatgatggctcaaaggtcaaagaagaaggagaccccactagagcggggatctgttatttctatcctagccagacactgctagatcaacaggaactgctctgtgggcaaatcgctggcgtggtgcgttgtgtctccgatattagcgattcacctcccaccttggtgcggctccggaagctaaagtttgcaatcaaggtggacggggactacctgtgggtgcttggatgcgcagtcgagctgccagacgtgagttgtaagaggtttctggatcagctcgttggattttttaacttttacaacgggccggtgtcactggcttatgagaactgctcgcaggaggagctgtccacagaatgggatacgtttatagagcagattctgaaaaacactagcgatctccataagatttttaactccctgtggaaccttgatcaaaccaaagtggagccgctgctgctgctcaaggcagccaggattttgcaaacatgtcagagaagcccgcatattctcgctgggtgcattctctataaggggttaattgtgtcgacccagctaccgccctcattaaccgctaaggtgttgttacaccgaacggcacctcaggaacagcggctgccgacaggagaggacgccccccaggaacacggagctgccctgcccccgaatgtgcagataattccagtgtttgtcacaaaggaggaagccattagcctccatgagtttcctgtcgagcagatgacccgcagtctcgctagccctgctggcttgcaggacgggagcgctcaacaccatccaaaagggggaagcacaagcgctcttaaggagaacgcaacaggccatgtggaatccatggcctggaccactccagatcctacaagccctgacgaggcatgtcctgatggccggaaagaaaacggttgcttgtccggtcacgatttagaatccataaggccggccggactgcataattcagcccgaggcgaggtgcttggattgtcttcatctctgggcaaagagttggtcttcctgcaggaggagctagacctctcagaaatacacattccggaggcccaggaggtggagatggcgtctggtcatttcgcattcttgcatgtgccggtgcctgatggtagggctccttactgtaaagcgtcactgagcgcatcctctagcttagagcctacaccacctgaggatacagcgatctctagcctgagacccccttccgcacctgagatgctgacccagcacggcgcacaagagcagctggaggaccaccccgggcactcatcacaggctccaattccgagggcagatccattaccccgaagaacacggaggccactcttgcttcccagactggatccaggacagaggggtaataagctgcctacaggggaacagggactggatgaggacgtcgatggggtctgtgagtcacacgcagctccaggacttgagtgctcaagtggatccgctaattgccagggagctggcccctctgcggacggtataagctctaggctgacaccggccgaatcttgcatggggctcgtgcgtatgaacttgtatacgcactgcgttaaggggttagtgttaagcctgctggcagaggagccacttctgggagattccgccgcaatagaggaggtgtatcattcttccctcgcctccctaaacggccttgaggttcatttgaaggagacactgccaagagacgaggccgcttcgaccagtagtacctataattttacccactacgaccgcattcaatcacttctgatggcaaatctgccgcaggtcgcaaccccccaggacagacgttttctgcaggccgttagtctgatgcatagtgaatttgcacagctgccagcgctctatgaaatgaccgtcagaaatgccagcacagcagtgtatgcctgctgtaatccaattcaggaaacgtacttccagcagctggctccagctgcccgcagttctggatttcctaaccctcaggatggggctttttcactctcaggtaaggccaaacagaaactcttaaaacatggagtgaatctgctttag

SEQ ID NO: 190586 - DNA, 3390 bp, synthetic construct
  misc_feature 1..3390: note = Description of Artificial Sequence: Synthetic coding sequence
  source 1..3390: mol_type = other DNA
atggccttcgtgcccgtgatccccgagagctacagccacgtgctggcggagttcgagagcctcgacccactgctttctgcacttcgcctggactcttctaggcttaagtgcacctctattgcagtttcccggaaatggctcgctcttggctcgagcggtggaggcttacacctgattcagaaagaaggctggaaacatagactcttcctctcccacagagagggcgcaatttctcaggttgcgtgttgcttgcatgacgatgactacgtggcagtggccacatctcaaggactggtggtggtgtgggagctcaatcaggagagacggggaaaacccgagcagatgtacgtaagttcagagcataagggacggcgggttacagctctttgctgggatacagcgattctgcgtgtgtttgtgggagatcatgctggtaaagtctcagccatcaaactgaatacaagcaagcaagccaaggccgccgctgcattcgtgatgtttcccgtacagacaatcaccacggttgattcttgcgtcgtacagttagactatctggacgggcgactgctgatttcttcactgacccggtcatttctgtgcgacactgagcgagaaaagttctggaagattgggaataaggagagggacggggagtatggcgcctgcttctttcccggaagatgcagcggaggccagcagcctttgatatattgcgccaggcccggctcccgcatgtgggaggtgaatttcgacggcgaggttatttcaacgcaccagtttaagaaattgttgtccctacctcccttgcctgtgatcaccctgcgctcagagcctcagtacgatcatactgccggctcatctcagtctctgtcgtttccgaagctcctccatctatccgagcactgtgtccttacttggacagagcgcgggatttatatcttcatcccgcagaacgttcaggtgctgctctggagcgaggttaaggatatacaggacgtcgccgtttgtagaaatgaactcttctgtctgcacctcaacggcaaggtgagtcacctgagtcttatctcagttgagcgctgcgtcgaacggctgctccgccgcggcttgtggaatctcgcagcgagaacatgttgcttgtttcaaaactctgttatcgcctccagggctcggaagactctgacagctgacaagctggagcacctcaaaagccagctcgatcatggcacatacaacgatttaatttctcaactcgaggagctaatcctcaagttcgagccgttagacagtgcctgcagcagccgacgatcaagcatcagttcccacgagagcttttcaatactggatagtggtatttatcgaattatttctagccggaggggctcacaaagtgatgaggactcctgctctctgcacagccaaaccctgtctgaagacgagagattcaaagagtttacctcacagcaagaggaagatctccctgatcaatgctgtggaagccatggcaacgaagataatgtctcgcatgctccggtgatgttcgagacagataagaatgaaacattcttgccattcggaataccactcccattccgatccccctcccccctggttagtctgcaagcagtgaaggagagcgtgagctcctttgttcgaaagacaactgagaagattggaacactgcacaccagccctgatctgaaagtgcggcctgagctgagaggagatgaacagtcctgtgaagaagatgtgtcgtccgatacctgtcctaaagaggaggatacagaggaggagaaagaggtaacatcccctccccccgaggaggaccgatttcaggagttgaaggtcgccaccgctgaggccatgacaaagctgcaggatcccctggtactctttgagtccgaaagcttgcggatggtgctgcaggagtggctgtcccacctggagaaaaccttcgccatgaaagacttttcgggagtatcagacactgacaattctagcatgaagctcaaccaggacgtcctactggtcaacgagtcgaagaaaggcatactcgacgaggacaatgagaaagagaagcgcgactccctcggtaacgaagaaagtgtcgataaaactgcctgcgagtgtgtcaggtcaccccgggagagccttgacgatctatttcagatttgttcaccctgcgccatagcatcaggtctgcgtaacgatctggccgaattgaccacgctttgtctggaactaaatgtgctgaactccaaaattaagagcacaagtggccacgtcgaccacaccttgcagcagtacagcccagagattctcgcctgtcagtttttgaaaaaatacttctttctgctgaacctgaagcgagctaaggaatcaataaaacttagctattctaactccccgtctgtctgggatacttttattgagggactcaaagagatggccagcagcaacccagtttacatggagatggagaagggagatctaccaaccagactcaagctcctcgatgacgaagtgccttttgactcacccctgctggtcgtgtacgccacccgcctgtacgaaaagttcggcgagagcgcgctgcgctcactgattaaattttttccgagcatcctgccatcagatattattcagctgtgccaccaccatccggccgaatttcttgcttatcttgacagcttggtgaaaagcagacctgaagaccagagaagttctttcctagagagcttgttgcaaccagaatctttaaggctggattggctgttactggctgttagtcttgatgcacctccttccaccagcactatggacgacgaggggtacccgcgtcctcactctcacctcttgtcctggggttatagtcagcttattctccatctaattaagctgcccgctgatttcattacgaaggaaaaaatgacagacatctgccgctcatgcggcttttggccaggctacttgattctctgtttggagcttgagcgacgcagagaggcattcactaatatcgtttacctcaacgacatgagtctgatggagggagacaatggatggattccagagacagttgaagagtggaagctccttctccatctgatccagagtaagtccactagacctgccccgcaggaatcacttaacggctccctgagtgacggaccctcaccaattaatgtcgaaaacgtcgccctgctactggctaaggctatgggccccgatagagcttggtccctacttcaggaatgtggcctggccctggaactcagcgagaagtttacaaggacctgtgacatcctcagaattgcagaaaaacgccagcgggctctgatccagtcaatgttagagaaatgcgaccggttcctttggtcacaacaagcctag

SEQ ID NO: 190587 - DNA, 3048 bp, synthetic construct
  misc_feature 1..3048: note = Description of Artificial Sequence: Synthetic coding sequence
  source 1..3048: mol_type = other DNA
atgtacgtgagcagcgagcacaagggccggcgggtgaccgccctgtgctgggacactgctatcctgcgagtgttcgttggcgatcacgccggtaaagtgtcggcaatcaaactcaatacaagcaagcaggccaaggccgcagctgctttcgtcatgttccctgtgcagacgatcacgaccgtggacagctgtgtagtccagctggattacctcgatgggcgactgctgatttccagcctaaccagatccttcctctgtgacaccgaacgagagaaattttggaagatcggcaacaaagagcgagatggcgagtacggcgcatgttttttccccggccgttgcagtgggggccagcaacccttgatctattgcgcccgcccaggcagtcgaatgtgggaagtgaacttcgacggcgaagtgattagtacccaccagttcaaaaagttgctatcacttcccccgttgcctgttattacgctccggtccgaaccacagtacgaccacaccgccggctcgagtcaaagtctttcatttcctaagttgctgcacttgtcagagcactgcgtgctgacatggaccgaacgggggatatacattttcattccacagaatgttcaggtgctgctttggagcgaggtcaaggacatccaggatgtggcggtctgccggaatgagttgttttgcctgcacctgaacggaaaagtcagccatctctccctgatcagcgtagagcggtgcgtcgagcgtctgctccgacggggtctctggaacctggcagcgcgcacttgctgtctgttccagaactccgtaatcgcaagcagagctcgtaaaactttgaccgctgataaactggaacacctgaagtcccagctggaccacggcacctataacgaccttatcagtcaactcgaggagctgattctgaaatttgagcccttagacagtgcatgcagtagcagaagatcgtccatcagctctcacgagagtttttccatcctggattcaggcatctaccgcatcatttcctcaaggcgcggatcacagtcagatgaagattcctgttcactgcacagccagaccttgtccgaagatgaaagattcaaggaattcacctcacagcaagaggaggacctgccggaccagtgttgtgggtctcatggcaacgaagacaatgtatcgcatgcccctgtgatgtttgagaccgacaaaaacgagacattcctgccatttgggattcccctccccttcagatccccttcaccactggtcagtttgcaggccgtaaaggaaagcgtgtcaagcttcgtccgcaaaacgactgagaaaatcggcaccctgcacacatcacccgacctaaaggttaggcctgagcttcgtggagatgaacagtcctgcgaggaagatgtgagctctgacacttgccccaaggaagaagatacagaagaggaaaaggaggtgacctcacctcctcccgaggaggacaggtttcaggaactgaaggtggctaccgcagaagctatgacaaaattacaggatcctttggtgctgttcgaatccgaatctctccggatggtgctccaggaatggctctcacacctcgaaaagacattcgctatgaaagatttttctggtgttagcgacacggataattcctccatgaaacttaatcaggacgtgttgttggttaacgaatccaagaagggtattctggacgaggataacgagaaagaaaagcgcgactcattaggaaatgaagagtccgtggacaaaaccgcttgcgaatgtgtaagaagcccgcgggaatcccttgacgacctctttcagatctgttccccgtgtgccatcgcttccggtctgcgcaacgacctggccgagctgactacactttgcttggagctgaacgtgcttaactcaaagatcaagtcaacatccggccacgtggatcacaccctccagcagtattcaccggaaattcttgcttgccagttcctaaagaagtatttttttctgctgaatctgaaaagggctaaggagagtatcaaactgtcctacagtaactcgccgagcgtttgggacacgtttatagagggactgaaggagatggccagctccaatcccgtgtacatggagatggaaaaaggtgacctgcctacacgcctcaagctcctggacgacgaggttcctttcgactcccctctgttggttgtgtacgccactaggctttatgaaaagttcggcgagtctgcactcagatctttgattaagttcttcccttctatcctgcctagcgatatcattcagctctgccatcatcacccagccgagtttctcgcttaccttgactcgctggttaaaagcaggccagaggaccagcggtcaagcttcctggagtcactgttgcagccagaatctctacggctagattggctgcttctagccgtgtccctggacgccccacctagcacctcaaccatggacgatgagggctatcctagaccccactcccacttgcttagttggggatacagtcagctcatactgcacctaatcaagctgcccgccgactttattaccaaagaaaaaatgaccgacatctgcagatcatgcggcttttggcctggatacctcatcctctgtcttgagctggagagacgccgcgaggcttttaccaatattgtgtatctcaacgatatgtccctgatggaaggagacaatggatggattcctgagaccgttgaggagtggaagctgttactccatctgattcagagcaaatcgaccagaccagcaccccaagaatcactaaatggcagcctgtccgacggcccgagtccaatcaacgtggagaacgtggctctgctgctggccaaggctatggggccagatcgagcttggagtctgcttcaagagtgcggactggctctcgagctgagcgaaaaattcactcgcacatgcgacatccttcgtatcgcagagaagcgacaacgcgccttaattcagagcatgcttgaaaagtgcgatagattcctgtggtctcagcaggcatag

SEQ ID NO: 190588 - DNA, 3048 bp, synthetic construct
  misc_feature 1..3048: note = Description of Artificial Sequence: Synthetic coding sequence
  source 1..3048: mol_type = other DNA
atgtacgtgagcagcgagcacaagggccggcgggtgaccgccctgtgttgggatacggcgatacttagggtgttcgtcggggaccatgctgggaaagtgtccgccatcaagctcaatacaagcaagcaggccaaggccgctgctgccttcgtaatgtttcctgtgcagacaatcacaaccgtcgattcatgtgtagtccaactggactatctggacgggaggctgctgattagctcactgaccagatctttcctatgcgacactgaaagagaaaaattctggaagattggaaacaaggagcgtgatggagagtacggggcctgctttttcccaggcaggtgtagcggcggccagcaacccctaatctactgcgcccgaccaggctcccggatgtgggaggtcaacttcgacggagaagtgatttcaacacaccagttcaagaaattgctgtctctgccacccctccccgtcattacattgaggagcgaaccacaatatgaccacaccgccggctcctcccaaagcctgtccttccccaagctgctgcatctgtctgagcactgtgtactcacctggacagaaagaggtatttacattttcatcccccagaatgtgcaggtcctattgtggtccgaggtcaaagacatccaggacgtggccgtgtgccgcaatgaactgttttgtctgcatcttaatggcaaggtcagtcacctctccctgatatccgtggaacgatgcgttgaacggttattgagacgaggactatggaacctggccgcccggacctgttgcctgtttcagaatagcgtcattgcctctagagccagaaagactctcacagccgataagctggagcacctgaaatctcagctggatcacggtacctataacgaccttatctcccagctcgaggagctgatcctaaagtttgagcctctggactccgcctgttcctcaagacgctctagcatcagctcgcatgaatccttctctattctcgattccggcatctatcgtattatctcatcacggagaggcagccagagcgatgaggactcatgttctctccatagccagaccctctctgaagacgaacggtttaaagagttcacatcacagcaggaggaggacctccctgatcagtgctgtggatctcacggaaacgaggataatgtgtctcatgctcctgtcatgttcgaaactgataagaacgagacctttctgcccttcgggatcccgttaccttttagatccccttccccgttggtttccctgcaagcagttaaagagtcagtctcctcctttgtgcgaaagactacggaaaaaatcggaacgctgcatacttctccagacctgaaagtccggcctgagctgaggggagacgagcagagctgtgaagaagatgtttcatctgatacctgccctaaagaggaagacactgaggaagagaaggaggtgacaagcccccctccggaggaagacagattccaagaactgaaggtagctactgcagaagctatgacaaaacttcaggatccactggtattgttcgagagcgaatccttacgcatggttctccaggagtggctgagccatcttgagaaaacgttcgccatgaaagacttcagtggcgtatctgataccgacaactcttccatgaaactcaatcaggatgtgttactggtcaacgaaagtaagaagggcatcctcgatgaagataacgagaaggagaagcgggactcccttggtaatgaggaatctgtcgataaaactgcttgcgagtgcgtcagatcccctagggagagtctggatgacttgtttcagatctgcagcccttgtgcaattgctagtggcctgaggaacgaccttgcggaactcacgacattgtgtttggagctgaacgtcctgaatagcaagatcaaaagcacttccggtcatgtggatcacactctccagcaatacagtcctgaaatcctggcctgtcagttcctgaaaaagtacttcttcctcctaaatctaaagcgcgcgaaagagtctattaagttgagttactccaattccccttctgtatgggacacctttattgaaggtttgaaagaaatggctagttcaaatcccgtctatatggaaatggagaagggcgatctgcctacccgactgaagctcctagatgacgaagtgccttttgattcccctctgttagtggtatatgctacccggttgtacgaaaaatttggcgaaagcgcacttcgctccctgataaaattcttccccagtatcctcccctccgatataattcagttatgccatcaccacccggctgagtttttagcgtatcttgactcactggtcaagagtcgccccgaggaccagagatcgagtttcctggaaagtttactgcagcctgaatcactgagactcgactggcttcttcttgcagtgagtctcgatgcgccaccgagtacatccactatggatgatgaaggatacccacgcccacacagtcacttactgagctgggggtacagtcagcttatactgcaccttattaaattacctgcagactttatcacaaaagagaagatgactgatatttgtcgcagctgcggtttctggcctggatacctgatactgtgcctcgagttggagcggcggagggaggcatttaccaatatcgtgtatttgaacgatatgagtcttatggagggagacaatggatggattccagagacagtcgaagagtggaagctgctgctccacctgattcagagcaaatcgaccaggcctgcgccacaggaaagcctaaatgggagcctcagcgatgggcctagtccaatcaacgttgagaatgtggcgcttctccttgccaaggccatgggtccagatagggcatggtctctgttgcaggagtgcggtttggccctcgagctgagtgaaaagttcacacgcacgtgtgatatcctgcggattgccgagaagagacagagagctctgatccaatcaatgttggagaaatgcgataggttcctgtggtcccagcaggcatag

SEQ ID NO: 190589 - DNA, 2328 bp, synthetic construct
  misc_feature 1..2328: note = Description of Artificial Sequence: Synthetic coding sequence
  source 1..2328: mol_type = other DNA
atgaagcggagcggcaccctgcggctgctgagcgacctgagcgcctttggcggagcagcccgactgcgagaactggtcgctggtgatagtgccgtgcgagttagaggctcaccggatggccggcaccttctcctgttaagacccccaggcgccgttgccccacagctactggttgcctcgagagggccaggggctgagctggagagagcatggcccgctggccagccttcccccctcgacgcgttctttcttccttggcctgccagacccgcactggtgctggtctgggagagcggactagccgaggtgtggggggcgggtgttggtcctggatggcgccctttacagagtacagaattatgtccaggcggcggagcccgggtggtggccgtggcagctctgcgagggcgcctggtttggtgcgaggaaagacaagcccgggccgagggtcccagtgggtccccagctgctgcattctcgcactgcgtgtgcgtccgtacgttagaaccgagcggcgaggcatccacatcgctgggtcgaacacatgtgctgctgcaccactgcccggctttcggtcttctggcctcatgcaggcagctgttcttagtgccgaccgccacaacgtggccgggggtcgcacatgttctgttgatctggtccccaggcaagggcaaggttatggtcgccgctcctaggcttgggctctcttactcaaagtccctgaatcccggaagaggcgacacgtgggattttcggactttgctgagaggactccccggactgttgtccccacgagagccactggccgtgcacacctgggctcccacacctcagggactgttactgctcgacttcggaggtacggtgtcattattgcagagtcacgggggaacacgagccgtcgggactcttcaggaggccccagtagggccatggggctcagctgcgctcggtacctttcaggggacgctagcgtgtgtcctgggtagtactctcgagctcttggatatgggatcaggccagctccttgagaggaaagtgttaagcactgatcgggtacatttactggagccgccagccccaggaatggaagacgaggaggagctggagacaagagggaaccttcggttactgagtgctctggggctattctgcgtcggatgggaggccccccaaggtgtagaactgccctccgccaaagatctcgtctttgaagaagcttgtggatactatcagcggcggtccctccgaggtgcccagcttactcctgaagaactccgccacagctctaccttcagagcaccccaggcattggcatcaatattacaagggcatcttcctcccagcgcacttctgaccatgctgcggacagaactgcgcgactacagaggcctagagcaactgaaagcgcagcttgtggctggggatgatgaagaggctggctggacagagctggccgaacaagaggtggcacggctgttgcggaccgagctcatcggggatcagctcgcccagctgaatactgtgtttcaggccttgccgaccgccgcttggggggcgacattacgggcactgcagctgcaattagacggtaacggaaaactgaggtcccaggctccacctgatgtctggaaaaaggttctaggtggtatcactgctggtaaggagccgcctaatggcatcctgccccctttcgagctgctgtgccagtgtctgtgccagctggagcccagatggcttccccctttcgtggagctggctcagcaacaggggggacccggttggggcgcaggtgggcccggccttcccctctatcggagggctctggccgtgctgggtgaggaaggcacaaggccagaagccctggaactcgagctcctgctgtccagtggccgcccaaaggcggtcctgcaggccgtgggtcagctcgttcaaaaggagcagtgggacagggcgctggatgcgggattagctctggggccatcatcacctttactccggtcagagatctttaagcttctacttgccgaattcgcacagcacaggcggctggatgcacatctgcccctactttgcaggctgtgcccccctgaactcgcacctgcggaacttctcctcctactacgaacttacttgcctgacgaggtcggtccgcctacaccgtttccagaacccggggccgaaccccccctgactgtgggccttctgaaggccttgcttgaacagactggagcccaggggtggctgagcggaccagttctgagcccctatgaggacatcttgtgggatcccagtactccaccgcccacacccccaagggatctttag

SEQ ID NO: 190590 - DNA, 1596 bp, synthetic construct
  misc_feature 1..1596: note = Description of Artificial Sequence: Synthetic coding sequence
  source 1..1596: mol_type = other DNA
atgctgggcttcctgagccggggccccagcatgaagctgtgcatgggcctcgcctgtgtcctcagcctgtggaatacggtaagtggcataaaaggagaagccaagaaggagaagggcatgacttttctaccgacaacagtttcgggtctgagagaagaggaacgcaaggagaagggagtggcctttttggctacaaccgagctgcccgccaggagcatcgatctgtctgcactgaacctgacagagcttgttaatggtatgttatcccgggccctgaaagactctaaaaagttcttctccttgctgtcggtaacttcttattcgtcgttcgcgttccacaagtttagcgtggcggtgtacaatatcagtaatttgaaaaccgtcgatcctgcgaaatttcccactagatactgctactgcctcaacaaccgaactaacgatctgtccgattttacagctctgctggttgacatcatcggcaactccaccagttacctgacagagattttcaagagtaccagtatccttagtgtgaatcagtcgaatgagagcgattgtatattcatctgcgtgatgacaggcaagtcgggaagaaatctgagtgatttctgggaaatagaggaaaagtacccaattatcaactacacatttacgtccggtctctctggagtgctgggcgctgccactcggggcacagccagaaccagtaagccgacgaccaagagtcaaaagaccctccccagcactagccctggccactggacacaatctacaccttgggctagtgcgctgcgatcctccccctggactgagacagccgctccttccgagacggaggagaccctgaatactggcaggccacctgagctgcccgctcgcgcgaccgcgacctggttctccgcatcgcacacattgccagccttagccacccggcgcgtcgctcgtactcagtggctgactgctgatcgccagacttgggctagcataagctctgtgccatgggcgcaaaccatttcggaaaagaagcctggcggtagtctttgggaaactcgctccagccctcccaccacagcaggcacagaagaagccatgaataccacaagtttgctggccccagccgcagagatcatggccaccccgggttccccctcgcaagcttccccaacacttggcgccttcactcatgggactcagacaccctctccgactaaggctacagcacctcgctatccgcagaccggcgacctgtccgccgagtggcctttcacagcaggtgaggaaccagtgctagtccctcgccctcatcaggtatctcgctgtccacaacctctgttcaaggtgggagccatggctgctgctccccttaccctggcgatacagcggctgaacccttgcctgatggagctatgccagttcttccagcagtgcctttgcatgagccaacgctcgccgcggacggaggatatgcgttactgcctggagtattactcttggtttctgaagaacgccacctatatatgccaacgagtcaaacgagtgtcgcattcacatacgctcaagcagaagtgtttggagaatatttgcaagtcagtgtag

SEQ ID NO: 190591 - DNA, 558 bp, synthetic construct
  misc_feature 1..558: note = Description of Artificial Sequence: Synthetic coding sequence
  source 1..558: mol_type = other DNA
atgagccccagcctgcaggagggcgcccagctgggcgagaacaagccttccacctgctcgtttagcattgaaagaatcctgggtcttgaccagaagaaggattgcgtcccgctgatgaaaccccacaggccctgggccgacacttgtagttcttcaggtaaagacggaaatctctgtttgcacgtccctaacccccccagtggcatttcttttcccagtgtggtcgatcaccccatgcccgaggagcgggccagcaagtacgaaaactacttttccgcgagtgagagactttcccttaagagggagctgtcttggtaccgcggccggcgaccacgaaccgcctttacacaaaaccagattgaagtgcttgaaaatgtgtttagagtaaactgctatccaggcattgacatcagagaggatctagcccagaagctgaatctggaagaggaccgcattcagatttggtttcagaatcgacgggccaagcttaaacggtcccacagggaatcacagtttctaatggccaaaaaaaattttaacactaacctcttggagtag

SEQ ID NO: 190592 - DNA, 324 bp, synthetic construct
  misc_feature 1..324: note = Description of Artificial Sequence: Synthetic coding sequence
  source 1..324: mol_type = other DNA
atgagccccagcctgcaggagggcgcccagctgggcgagaacaagccctctacatgcagcttctccatcgagcggattctcgggctggaccagaaaaaagattgtgtgcccctgatgaaacctcatcgaccctgggcagatacgtgtagctctagcggcaaagatggaaacttgtgtctgcacgtgccaaacccaccttccgggattagtttcccctcagttgtggatcaccccatgcctgaggagcgcgcgagcaagtatgaaaattacttcagtgcttccgagcgcttgagtttgaaaagagagctgtcttggtacaggtag

SEQ ID NO: 190593 - DNA, 1263 bp, synthetic construct
  misc_feature 1..1263: note = Description of Artificial Sequence: Synthetic coding sequence
  source 1..1263: mol_type = other DNA
atggaggtgcccccccggctgagccacgtgcccccccccctgttccccagcgcgccagcaaccctcgccagtcggagcttgtcccattggaggccgcggcctcctagacagcttgcccctctcctcccttctctggcaccttcctctgcccgccaaggggccagaagggctcagagacatgtgacagctcagcagcccagtcgacttgcgggaggggctgctatcaagggcggaaggcgccgccgcccagaccttttccggaggcatttcaagagttcatcaattcaacggagtgccgccgccgcagcagctacgcgcactgcccgccagcatccacctgccgatagttccgtaacaatggaggacatgaatgaatatagcaacatagaggagtttgccgagggatcaaaaatcaatgcttccaaaaatcagcaggacgatggaaaaatgtttatcgggggactctcgtgggatacctccaagaaggatctcaccgagtacttgtctaggtttggcgaagtcgtcgactgcacaatcaaaactgaccctgtcacaggcagaagtcgcggctttggcttcgtcctgttcaaagacgccgcaagcgtggacaaggttctagagttaaaagagcacaaactggacggcaagctgatagatcccaaaagggccaaagcactgaaaggcaaagaacctccaaaaaaagtgtttgtgggtggcctatcgcccgacacaagtgaggagcagatcaaagagtatttcggcgccttcggcgaaatcgaaaatattgagctgccaatggacacaaagaccaacgaaaggagaggcttttgcttcattacgtacacagacgaggagccggtgaaaaaactgctcgaatctcgataccaccagatcggatctggcaaatgtgaaatcaaagtagctcagcctaaagaagtctaccgccagcagcagcaacaacagaaggggggccgcggcgcggcggctggtgggcgcggcgggaccagaggccgaggcagagggcagggacagaactggaatcagggattcaacaattattacgatcagggttacgggaactataactccgcctacggaggtgatcagaactactctgggtatggaggctatgattatacaggctataattatggcaactatggctatggccagggctacgccgactattcgggacaacagtccacttacggcaaagcatccaggggcggcggtaaccaccagaacaactaccagccatattag

SEQ ID NO: 190594 - DNA, 735 bp, synthetic construct
  misc_feature 1..735: note = Description of Artificial Sequence: Synthetic coding sequence
  source 1..735: mol_type = other DNA
atggaggacatgaacgagtacagcaacatcgaggagttcgccgagggctccaagatcaatgcttccaagaatcagcaagacgatggtaagatgtttatcggcggactgtcctgggacacatccaaaaaagatctaactgaataccttagtcgattcggcgaggtggtagattgcactattaagaccgaccctgtgaccgggcgctccaggggctttgggtttgttcttttcaaggacgcagcatctgtagacaaggttttagagttaaaggaacacaaattggatgggaagctcattgatcccaaacgggcaaaagctctgaaaggcaaggagcctcccaagaaggtctttgtgggaggtctgagtccggacacctctgaagaacaaatcaaggaatactttggcgctttcggcgagattgaaaacatcgaactgccaatggacaccaaaacaaacgaacgcagaggattttgttttataacctataccgacgaagaaccagtgaaaaagcttttagagagtcggtaccaccaaattggttctggcaagtgcgaaattaaggtggcccagcctaaggaggtgtacagacagcagcaacagcaacagaagggcggccgaggcgcggccgctggcgggagagggggtacacgcggccgcggcagggggcagcagagcacctatggaaaggccagccgcggcggggggaaccaccaaaacaactaccagccatattag

SEQ ID NO: 190595 - DNA, 1263 bp, synthetic construct
  misc_feature 1..1263: note = Description of Artificial Sequence: Synthetic coding sequence
  source 1..1263: mol_type = other DNA
atggaggtgcccccccggctgagccacgtgcccccccccctgttcccaagcgccccagcgactttggcatcgcgaagcctgtctcattggagaccccgacctcctaggcagctggcgccattgctaccctctttggccccttcgagtgccaggcagggtgcccgccgggctcagaggcacgtcacagcacagcagccctccagactcgcggggggagcggccatcaagggtggcagaagacggaggccagacttattccgacggcatttcaagagctcttcgatccagaggtccgcagccgcagccgctgctactcggacagcgaggcaacatccacccgccgactcttctgtgacaatggaagatatgaacgaatactctaacatcgaagaatttgccgagggctctaaaatcaacgcaagtaagaaccagcaggacgacgggaaaatgttcattggagggttgtcctgggatacttccaagaaagatctgactgaatacctctcgcggttcggagaggtggtggactgcacgatcaagaccgatcctgtaactggaaggagcagaggttttgggttcgtgttgttcaaggacgccgcctccgtggataaggttcttgaacttaaggaacataagctggatgggaaactgatcgatcctaagcgtgccaaagcactgaaaggcaaggaaccacccaaaaaggtgtttgtgggcggcctatcccccgacacaagtgaggagcagattaaggaatattttggggcatttggtgaaatcgaaaatatcgaactcccgatggacacaaagacaaatgagcgaagaggattttgcttcatcacctataccgacgaggagcccgtaaagaaactgctggagagcaggtaccaccagattggaagtggtaagtgtgaaatcaaggtggcccagcccaaagaagtgtatagacagcagcagcagcagcagaagggcgggcgcggagcggcggccggcgggcgcggggggacaagaggccgcgggaggggccaagggcagaactggaatcagggtttcaataactactatgaccaggggtatgggaattataattccgcttatgggggggaccagaattatagcggttacgggggttatgactacaccggatacaattatggtaattatgggtatgggcagggatacgccgactattccggccagcagtcgacttatgggaaggcctcacggggaggcggcaaccaccagaacaattaccagccatattag

SEQ ID NO: 190596 - DNA, 1902 bp, synthetic construct
  misc_feature 1..1902: note = Description of Artificial Sequence: Synthetic coding sequence
  source 1..1902: mol_type = other DNA
atggccaaccaggtgaacggcaacgccgtgcagctgaaggaggaggaagaaccaatggacaccagctccgtaactcacactgaacattacaaaacattgatagaggccggactgccccagaaagtggcagagaggctagatgagatcttccagacagggctggtggcctacgttgacctagatgagagagccatcgacgccctccgtgagtttaatgaggaaggcgccctttccgtccttcaacagtttaaggagtcagatttaagtcacgtgcagaacaaaagtgcttttctgtgcggcgtgatgaaaacctacagacagagagaaaagcaagggagcaaggtgcaagagtctaccaaagggcccgatgaggccaagatcaaggcactcctggaacggacaggctataccctggatgttacgaccgggcagcggaagtacggcggacccccaccagatagcgtgtactccggcgtacagcctggcataggtactgaggtttttgtagggaaaatcccacgtgatctgtacgaagacgagttggtccccctgttcgagaaggccggaccaatatgggacctccggctgatgatggatccacttagcggccagaaccgaggctatgctttcattacattctgtgggaaagaagccgctcaggaggcagtgaagctgtgcgatagttacgaaatcagacccggcaaacatcttggagtgtgcatttcggtagcgaacaaccggctattcgtgggcagcattccaaagaacaaaactaaggagaatatacttgaggagttttccaaggtgactgaggggctggtggatgtcatactttatcaccaaccagatgataagaaaaagaaccgcggcttttgctttttggaatatgaagaccataaaagcgcagcccaggcccgccgccgactgatgtcaggcaaagttaaggtgtgggggaacgtggtcacagtggagtgggccgaccccgtggaagagccagaccctgaggtgatggccaaagtgaaagtcctgttcgtccgaaatcttgcaactaccgttacggaagaaatccttgaaaagagttttagcgaattcggaaagcttgagcgcgtcaagaagcttaaagattacgcatttgtccatttcgaggatcgtggagctgcagtgaaagccatggatgagatgaatggtaaggaaatagagggagaggagattgaaatagtcctagctaaacctcctgataagaagcgcaaggagagacaggccgcccgccaagctagtagatccacagcttacgaagattattattaccacccccccccacggatgccgccgccaattcgtggaagaggacgtggggggggacgaggaggctatggatatccgccggactattatgggtatgaagactactacgatgactattatgggtatgattatcatgactacagaggggggtatgaggacccctactacgggtatgatgatgggtacgctgtccgcgggagggggggcggcagaggagggcgaggcgccccacctccccccagggggcggggcgctccacctccgagaggcagggcaggctactcccagcgaggcgcaccgcttgggcctccccgcggtagtaggggaggaaggggcggacccgcacagcagcagcgggggagaggttccagaggttcccgaggaaaccgcggtggcaacgtcggaggtaagcgcaaagccgatggctataatcagccggatagcaagcgtcgccagactaacaatcaacaaaattgggggtcgcagccaattgcacagcagcctctgcagcagggcggagactacagtgggaactacggctacaacaacgataatcaggagttctaccaggatacgtatgggcagcagtggaagtag

SEQ ID NO: 190597 - DNA, 1902 bp, synthetic construct
  misc_feature 1..1902: note = Description of Artificial Sequence: Synthetic coding sequence
  source 1..1902: mol_type = other DNA
atggccaaccaggtgaacggcaacgccgtgcagctgaaggaggaggaagaacccatggacactagctctgttactcataccgaacattacaaaaccctgattgaggccgggcttccccagaaagttgccgagcgccttgacgagattttccagacaggcctggttgcgtatgtcgatttggacgaaagagcaattgacgccttgagggaatttaacgaggagggagccctgagtgtacttcagcagtttaaagaatccgatctgtcccacgttcagaataaatcagcatttctatgcggcgtgatgaagacctatcgtcagagagagaagcagggatcgaaagtccaggaatccaccaagggccccgatgaggcaaagatcaaggcgttattggagagaaccggatatacccttgacgtgacaacaggtcaacgtaaatatggcggcccccccccagattccgtgtattccggggttcagcccgggattggcacagaagtgttcgtgggtaagataccgagggacctctacgaggacgagctggtgcctcttttcgaaaaagctggccccatttgggatctgagactgatgatggatccgttgagtggtcaaaaccgcgggtacgccttcatcaccttctgcggaaaagaggctgcgcaggaggctgttaaactttgtgactcctacgagatcagaccaggcaagcatttgggcgtgtgtataagcgtggcaaacaacaggttgttcgtggggtctatccccaagaataagactaaagaaaacattctagaggagttctcaaaggttacggaaggactggtggacgtaattctgtaccaccaacctgatgacaagaaaaagaaccgcggattttgcttcctggaatacgaggaccacaagtcagcagctcaggccaggcgacgtctgatgagtggaaaagtgaaggtctggggcaatgtggtcactgttgagtgggccgatcctgttgaggaacctgatcccgaggtgatggctaaagtcaaagttctgtttgtcaggaatttggccacgactgttaccgaagagattctggaaaaatcattctcggaattcgggaagctggagagagtcaaaaagctcaaggactatgctttcgtccactttgaggaccggggggccgctgtgaaggctatggacgaaatgaacggcaaggaaattgaaggggaggaaatagagatcgtgttagcaaagcctcccgataaaaaacgcaaagagaggcaagctgctagacaagcgagtcggagcacagcttacgaggactactactatcatccaccgccccgaatgccccctcccatacgcggccgtggacgaggaggagggcgaggcggttatggttaccctcccgattactatggctacgaggactactatgacgattattacggatacgactaccatgactaccgcggaggctacgaggacccatactatggctacgacgacggctacgctgtgagaggacgtgggggaggcagagggggccgtggcgcaccaccaccgcccaggggccggggtgcaccccctcccaggggccgggccggttacagccagcggggtgctccactgggaccacctaggggaagtagagggggccgtggcggtccggctcagcagcagaggggcagaggctctcgaggaagccgtggaaatcgaggcggaaacgtgggtggaaagcgaaaagccgatggctacaaccaaccggatagtaaacggaggcagacgaacaaccaacaaaactggggcagtcagcccatcgcccagcagccactgcagcaggggggggattactctgggaactatggctacaataacgacaatcaagagttttaccaggacacctatggtcaacagtggaagtag

SEQ ID NO: 190598 - DNA, 1911 bp, synthetic construct
  misc_feature 1..1911: note = Description of Artificial Sequence: Synthetic coding sequence
  source 1..1911: mol_type = other DNA
atggccaaccaggtgaacggcaacgccgtgcagctgaaggaggaggaggagccaatggacacatcctccgtgacccacacagagcactataaaactttaattgaagcaggcctgccacagaaagtggctgagcgcctcgatgagatttttcaaaccggccttgtggcatatgtggacctggatgaaagagccattgatgctttgagggaatttaatgaggagggggccctgtccgtcttacagcagttcaaggaaagcgatctttcacatgtgcaaaacaagtcggcgtttttatgtggcgtcatgaagacataccggcagcgagaaaagcagggtagcaaggttcaggaatccactaaaggcccggatgaagccaagataaaagcgctgctcgagagaacgggttacactctggatgtcaccaccggacagcggaaatacggcggaccgccaccagattctgtgtattcaggggtgcagcccgggattggcaccgaggtttttgtgggaaagataccgcgcgacttgtatgaagacgagttggtccccttgtttgaaaaggctggacctatttgggatcttcgactaatgatggaccccttgtcagggcagaacaggggctacgctttcatcactttttgcggcaaggaggcggcccaagaggccgtgaaactatgcgactcctacgaaattcgcccaggaaaacaccttggagtttgcattagcgtcgctaataatcgcctgtttgtcgggtctattcctaagaataaaacaaaagagaatattctggaagaattttcaaaagtgacaggcctgactgaaggacttgtcgatgtcattctctatcaccagccagacgacaaaaaaaagaatcgcgggttctgctttctggaatacgaagatcacaagtccgctgcgcaggcgcggcgacggctgatgtccggaaaggtgaaggtgtggggcaacgtcgtgacagtggagtgggccgatccagtcgaggagccagaccctgaggtgatggcaaaggtaaaggtgctctttgtgcggaatctggcgactactgttacagaagagatcctagagaaatcattctccgagttcggcaagctggagcgggttaaaaagctgaaggactatgcttttgtgcatttcgaggaccggggcgccgcagtgaaagccatggatgagatgaacgggaaagagatagagggggaggaaatcgagatcgtcctggccaagcctccagacaagaagcgcaaagaacgccaggctgctagacaggcttcgcggagcaccgcctacgaagattactattaccatccccctcctcgcatgccaccacctattcggggccgcggaaggggtggtggtcgaggggggtatggctacccccccgactactacggctacgaggactactacgatgactactatggctatgactaccacgactatagagggggctacgaagacccttactacggatacgatgatggctatgccgtgagaggccgtggtggcgggcgcggaggtcgtggggcacctccacccccgcgcgggcggggcgcccctcctcctcgggggagggccggatactcgcagcgcggcgcaccactgggccctccccggggaagccgaggtgggcggggcggaccagcacagcagcagcgagggcgcggatcacgaggatcccgaggcaacagaggcggcaatgtgggcggtaagagaaaggcagatggctataatcagccagatagcaagcgaagacagactaataatcagcaaaactggggtagtcaaccaatcgcccagcagcccctgcaacagggaggcgattattcgggtaactacggctataataacgacaaccaagagttctaccaagatacctatggccagcagtggaaatag

SEQ ID NO: 190599 - DNA, 1422 bp, synthetic construct
  misc_feature 1..1422: note = Description of Artificial Sequence: Synthetic coding sequence
  source 1..1422: mol_type = other DNA
atgaagacctaccggcagcgggagaagcagggcagcaaggtgcaggaatcaacaaagggaccagacgaagctaagattaaagccttactggagcgtactggctataccctcgacgtgactacaggacagagaaaatatgggggcccaccacccgacagtgtatactccggcgtacagcctgggattggcactgagtgtgactcatatgaaatccggccgggcaagcacttaggtgtgtgcatctccgtagccaataaccgactcttcgtgggaagcatacctaagaataaaactaaggaaaatattttggaggaattctcaaaggtcactgaggggttggtggacgtgatcttataccaccagcccgacgataagaaaaagaatcggggcttttgtttccttgaatacgaagaccacaagtctgccgcacaagctaggagacgattgatgagcgggaaagtgaaggtttggggaaatgtggttactgtcgagtgggctgaccctgtcgaggaacctgacccagaagttatggccaaagttaaggtcctttttgtccgaaaccttgcgacaacagtgacggaagagatcctcgagaagtcattttctgagtttggcaagctggaacgcgtaaaaaagctaaaggattacgccttcgttcatttcgaagaccgtggagccgcagtgaaggcgatggatgagatgaacggtaaagaaattgaaggggaagagatcgagatagtgctggccaagccccccgacaagaagcggaaggaaagacaggcagctcgccaggcgtctaggagcactgcgtacgaggactactactaccacccaccacctagaatgcccccccccattcgcggcagaggacggggagggggccgagggggatacggatatcccccagactattacggctatgaagactactacgatgactactatggctatgactatcatgattatagaggagggtatgaggacccctattacggctacgatgatggttacgccgtacgagggcgaggcggtggaagggggggaagaggcgctccacctccacctagggggcggggcgctccccccccaaggggacgcgcgggttactctcagaggggggcaccgttaggcccccctcggggctcaagaggagggcgcggtggaccagcccagcagcagcgcgggcggggcagtcgcggatccaggggcaaccgtggaggaaatgtaggggggaaacgcaaggccgacggctacaaccagcctgactcaaaacgacgccagaccaataaccagcagaactggggctcccaaccaattgcgcagcagcccctccagcaggggggcgattactccggaaactacgggtacaacaatgacaaccaggagttctatcaagacacctacggccagcagtggaaatag

SEQ ID NO: 190600 - DNA, 1788 bp, synthetic construct
  misc_feature 1..1788: note = Description of Artificial Sequence: Synthetic coding sequence
  source 1..1788: mol_type = other DNA
atggccaaccaggtgaacggcaacgccgtgcagctgaaggaggaggaagaacctatggatacctcaagcgtgactcacacagagcactacaagacccttatcgaagctggcttaccacagaaagtcgcggaacgtctcgacgaaatcttccaaacaggacttgtcgcatacgtcgacctggatgagcgggcaatcgatgcacttagagaatttaatgaagagggagcactgagcgtactgcagcagtttaaggagagcgacctcagtcatgtccagaacaaatctgctttcctgtgcggcgtcatgaaaacttatcgccagcgggagaaacaaggctccaaggttcaagagtcaacaaaaggtcctgacgaagcgaagattaaggtgttcgtgggcaaaatcccgcgggacttgtatgaagatgagctggtcccgctgtttgagaaggctggccctatttgggatctccgcctgatgatggatccgttaagtggacagaacaggggttacgcatttatcaccttctgtgggaaagaagcagcccaagaagccgttaaactctgcgacagctacgaaatccgacccggtaagcacctgggggtgtgcatctccgttgccaataatcgattgttcgtgggaagcattcccaagaacaagaccaaagaaaatatcctggaggagttttctaaggtaactgaaggactggtcgatgtaatcctgtaccatcaacccgacgataaaaagaaaaatcggggattctgctttctagaatatgaggaccacaaatcagcagcgcaggcccgaaggcggctgatgagcggtaaggttaaggtttggggcaatgtggttacagtcgaatgggctgaccccgttgaagagcccgacccagaggtcatggctaaggtcaaggttttatttgtgcggaacctggctaccaccgtgacagaggagattctggagaaatcatttagtgagtttggcaaacttgaacgggtgaagaaactaaaggactatgccttcgtgcacttcgaggaccgcggagcggctgtgaaagcaatggatgagatgaacggaaaagaaatcgaaggcgaggagatcgagattgttttggcgaaacctccagataagaagagaaaggagcgccaagccgccaggcaggcatccaggtcaaccgcttacgaggactactattaccacccccccccacgaatgcctccaccgatcaggggacggggccgcggcgggggccgaggaggatacggctacccccctgattactacggctacgaggattactacgacgattactacggatacgattaccacgactaccgagggggttacgaggatccctattacggatacgatgatgggtatgccgttagaggcagaggaggtggcagggggggcagaggggcaccgcctcccccacgaggacgaggagcaccccctcccagggggagagcgggatacagccaacgcggagctccactggggccacctcgaggaagcaggggcgggcgaggcggcccagctcagcaacagagaggcaggggaagtcgaggtagcagagggaatagaggcggcaacgttggggggaaacggaaagccgacggatacaaccagcccgatagcaagagacgacagacgaacaaccagcagaattggggctcccagcccatcgcacagcaaccgttacaacagggcggcgactatagcggcaactatgggtacaacaatgataaccaggaattctatcaggatacttacgggcagcaatggaagtag

SEQ ID NO: 190601 - DNA, 2304 bp, synthetic construct
  misc_feature 1..2304: note = Description of Artificial Sequence: Synthetic coding sequence
  source 1..2304: mol_type = other DNA
atgcggagctgggccttcagctacctggacgccatggacaacatcacacggcagaatcagttttatgacacccaagttattaaacaggagaatgagtcgggttacgagagacggcctctggagatggagcaacagcaggcatataggcccgaaatgaaaacagagatgaaacagggtgcccccacttctttcctgccacctgaagccagtcagctcaagccagacaggcagcagtttcagagccgcaaaaggccgtatgaggagaatagaggaaggggctactttgagcatagagaagaccggcgcggtcgatccccgcaacctcctgcagaggaagacgaagatgattttgacgatacactagtggctatcgatacatacaattgcgacctgcacttcaaggtagcgcgagatagatcctccggttatccactcacaattgagggcttcgcttacctctggagcggcgctagagcctcatacggagtgcggagaggacgagtatgctttgaaatgaaaattaatgaggaaatcagcgtgaaacacttacccagtacagagcctgacccccacgtagtacgtattgggtggagcctggacagctgcagcacacagttgggtgaagagcctttctcttacggctacggaggtaccggtaagaagagcacgaactctcggttcgagaactacggtgataagtttgcggaaaatgatgtcatcgggtgtttcgccgactttgagtgcggtaatgatgtagaattgagtttcacaaaaaacggtaagtggatgggaatcgctttccgtatccaaaaagaagccctgggaggacaagccctgtacccccatgtgctggttaagaactgcgccgtggaattcaattttggacagcgggccgaaccctattgctccgttttacctggtttcacgttcatccaacatctgccgctttctgagaggatacgcggaaccgttgggcccaagagtaaggcagaatgtgagatactaatgatggtggggctgcccgcggccggcaaaacaacatgggctatcaaacacgcggcaagcaatccctccaagaaatataatatactcggaacaaacgccatcatggacaagatgcgggtgatgggcctccggcggcagagaaactacgccggtcggtgggacgtgctcattcagcaggctacccagtgtcttaacagactgatccagatcgcagccagaaagaaaaggaactatatcctggaccagactaacgtgtacgggagcgctcaaaggagaaaaatgagaccatttgagggcttccagcggaaagccatcgtgatctgcccaacggatgaggatcttaaagatcgcaccatcaagcgtacagatgaggaagggaaagacgttcctgatcatgcagtcctcgagatgaaggctaactttacgctgccagatgtgggtgacttcctagacgaggtccttttcatcgagctgcagcgcgaggaagcggataagcttgttcggcagtacaacgaggagggccggaaagccggaccacccccagagaaacgattcgataatcggggaggtggaggcttccggggtagggggggtggtggaggatttcagcgatatgagaatagagggccccctgggggtaaccgaggtggttttcagaatcggggcggcggtagcgggggcggcggcaactatcggggtggctttaaccggtcaggcgggggtgggtatagccagaatcgttggggaaataacaacagggataataataatagtaataaccgaggatcatacaacagggcgccgcagcagcaaccaccgccacagcagccccctccaccccagcctccaccccaacaaccgccgccacctcccagttacagccccgctagaaaccctcctggagcctccacttataataaaaactcgaacatccccggttcctccgctaacacttccacccccaccgtatcgtcctattcccctccccagcccagttacagccagcctccatacaatcagggtggttactcccagggctataccgcgccacctccgcccccccccccccctccagcctacaactacggtagctacgggggctataaccccgcaccctatacgccccctccacctccaaccgcccagacatacccacaaccttcctataaccaatatcagcagtacgctcagcagtggaatcagtactaccaaaatcaggggcaatggcctccttactacgggaattatgactatgggagctattccggcaacacacagggcggtacctcaacacagtag

SEQ ID NO: 190602 - DNA, 369 bp, synthetic construct
  misc_feature 1..369: note = Description of Artificial Sequence: Synthetic coding sequence
  source 1..369: mol_type = other DNA
atggacgtgcggcggctgaaggtgaacgagctgcgggaggagctgcagaggaggggccttgatacgcgaggcctcaaggccgagcttgccgagaggttgcaagctgcgttagaggccgaggagccagacgacgaacgagagctcgacgcagatgatgagccaggcagacctggccacataaacgaagaagcagagctgcagcccgccacactgcagccgggacgcctgcagcccggattgcactcgccgaccgcctctacttccaccaccacctgtctgcagttgtgggagctccggaggctgcagccaggaccgctgtacccaacggccacaccgcattgcaccgatctcccttccgctcagctatag

SEQ ID NO: 190603 - DNA, 2271 bp, synthetic construct
  misc_feature 1..2271: note = Description of Artificial Sequence: Synthetic coding sequence
  source 1..2271: mol_type = other DNA
atggacaacatcacccggcagaaccagttctacgacacccaggtgattaagcaagaaaatgaatctggatacgagcgccgtccactcgagatggagcaacagcaggcctatcggcccgagatgaaaaccgaaatgaagcagggtgcccccacctcctttttgcccccggaggcctcccagttgaagcctgacagacaacagtttcagagtcgaaaacgcccatatgaggaaaaccgtgggcgaggatatttcgagcacagggaggatcgtaggggaagaagtccccaacctcctgctgaagaggacgaggacgactttgatgatacgctggtcgctatcgatacctacaactgtgacctgcatttcaaggtggctagagacaggtcttcgggctatcctctcacaatcgaggggttcgcatatctctggagcggagcccgtgccagctacggggtgcgcagaggtagggtgtgttttgaaatgaagattaatgaagagattagtgtgaagcacctcccttccaccgaaccggatccccatgttgtcagaattgggtggtcccttgattcctgctcaactcagttaggtgaagagccattttcatacggctacggggggacgggaaagaaatccactaacagtagatttgaaaactacggggataaattcgcggaaaacgacgtgatcggctgctttgcagacttcgagtgcggaaacgacgtcgaactctcattcacaaaaaacggcaagtggatggggatagcctttagaatacagaaggaggcattaggcggccaggctctgtacccccacgtccttgtgaaaaattgtgccgtggaattcaacttcggccagcgcgctgaaccatactgttctgtcttgccagggttcaccttcatccagcacttgccgttgagtgagaggatcagagggacagtcggccccaagtcaaaggccgaatgcgaaatcctgatgatggtgggactgcctgctgccggcaaaacaacatgggccatcaagcacgctgcgtccaacccctctaaaaaatacaacattctgggaaccaacgccataatggataaaatgagggtgatgggcctgaggaggcagcgcaactacgcaggtcgctgggacgtgctaattcaacaagccacccagtgtcttaatcggctgatccaaatcgccgctagaaaaaagagaaactacatcctggatcagacaaacgtgtatggttcggctcagcgccggaaaatgcggccctttgagggctttcagcgaaaagctatagttatttgtcccactgacgaggatctaaaagatcggaccatcaaaaggacagatgaagaggggaaggacgttccggaccacgctgtcttggagatgaaggctaatttcaccctgccagacgtcggggactttctcgatgaggtgttgtttatcgagctgcagagggaggaggcagataagttagtgcgccagtataatgaagagggcaggaaagccggccctccgcctgagaaacgatttgacaatcggggcggaggcggttttagaggacgcggcgggggcggcgggtttcagagatacgagaaccgcggcccacccggcggaaaccgcgggggatttcagaatcgcggtggtggaagcggaggtggcgggaattataggggagggttcaaccggtccggaggagggggatattcacagaaccgatggggtaataataatcgggataacaataactccaataatcgggggtcttataatagagcacctcagcagcagccccctccacagcagccaccccctccacaacctccaccccagcagccgcctcctccccccagttatagtcccgctagaaatccacccggtgcgtcaacttacaacaagaactctaatatacccgggtcttctgcgaacacatcaactccaaccgtttcgagctactcccccccccaacctagttattctcaaccgccctataatcagggcggatacagtcagggctatacagcaccaccacctcctcccccacctccacccgcgtataattacgggagttatggggggtataatcctgctccatatacccctccacctccgcccaccgctcagacctaccctcagccgtcctataaccagtaccagcagtacgcccagcaatggaatcagtattaccagaaccagggacaatggccgccatactatggaaactacgattacgggtcctatagcggaaacacacagggaggaacatccacccagtag

SEQ ID NO: 190604 - DNA, 2259 bp, synthetic construct
  misc_feature 1..2259: note = Description of Artificial Sequence: Synthetic coding sequence
  source 1..2259: mol_type = other DNA
atggacgtgcggcggctgaaggtgaacgagctgcgggaggagctgcagcggaggggtttggatacacgaggactcaaagctgaactggctgaacggcttcagcctccaccgccaggtctacagcctcacgctgagccaggcggatacagcggacctgacggccactatgcgatggacaatattacacgccagaatcagttttacgacacgcaggtgattaaacaggagaatgaatccggctacgaacggcgcccacttgagatggaacagcaacaagcatatcgaccggaaatgaagaccgaaatgaagcagggcgctccaaccagctttctccctcctgaagccagccaactcaaaccggataggcagcaatttcagagcagaaagagaccctacgaggagaatcggggacgcgggtatttcgaacaccgcgaagatcgccgcgggcgttcacctcagccccccgcagaggaagatgaggatgacttcgatgacaccctcgtcgccattgatacatataactgtgatctgcacttcaaggttgctcgggatagatccagtgggtatccactgacaatcgagggcttcgcttacctctggagcggggccagagcaagttatggcgtccgtcgtggccgggtgtgtttcgagatgaaagacttcgagtgcggtaatgacgtggaactgtccttcacaaagaacgggaagtggatggggattgcatttagaatccagaaagaagctctgggtggtcaggccctgtaccctcacgttcttgtgaaaaattgcgccgttgagtttaactttgggcagcgggcagagccttattgcagtgtcctcccggggtttacctttatccagcacttgcctctcagcgagaggattcggggcacagtggggcccaagtcaaaagccgaatgtgaaatcctgatgatggtcggattacccgcagcgggaaagacgacctgggcaatcaagcacgcggcatccaaccccagcaaaaagtacaatatactgggaacgaacgccattatggacaagatgagagtgatgggcctgaggaggcagagaaattatgccggtcgctgggacgttctgatccaacaggcaacacaatgtttgaatcgactcatccaaatcgctgctcgtaagaaacgcaactatatcctcgatcaaacaaacgtttatggtagtgcacagcgtcgcaagatgcgcccttttgaggggtttcaacgaaaagccatcgtgatctgccctaccgatgaggaccttaaagatcgtaccatcaagcgcaccgacgaggaaggcaaggacgtgccagatcacgctgtgctggaaatgaaggccaacttcaccctgcccgatgtgggcgacttcctggacgaggtgcttttcattgagctgcaacgcgaagaggccgataaattggtgcgacagtacaatgaggagggccggaaagcaggccccccacccgagaagcggtttgacaatcggggaggtgggggatttagaggacggggcggcggtggggggttccagcgctatgaaaacagggggccacctgggggcaatcgcggcggttttcagaaccgtggaggtggttccggcggcggagggaattaccggggtggatttaataggagtggaggaggcggatactctcagaacagatggggcaacaacaatagagataataacaactccaacaatcgcggttcatataaccgggctcctcagcagcagccacctccgcagcagccacctccaccacagcccccacctcagcagcctccacctccaccctcctacagtccagcccgtaacccccctggggccagtacttataataaaaacagcaatatacccggcagctcagcaaacaccagcaccccgactgtgtcctcttattcccctcctcagtcatttggctttttccctagtaccttccagccttcttactcccaaccaccctacaatcagggaggttattcgcagggatataccgcccctcctcctccccctcctcccccccccgcgtataactacggatcttatggaggatataatccggcaccctatacacctcccccaccaccaacggcccagacatacccacagccttcatataaccaataccaacagtacgcccagcagtggaaccagtattaccagaatcagggccaatggccaccatattacggaaactacgactacgggtcgtactccggcaacacccagggaggcacaagcactcagtag

SEQ ID NO: 190605 - DNA, 2571 bp, synthetic construct
  misc_feature 1..2571: note = Description of Artificial Sequence: Synthetic coding sequence
  source 1..2571: mol_type = other DNA
atggacgtgcggcggctgaaggtgaacgagctgcgggaggagctgcaacgacgtgggctggatacacgcggcttgaaggcagaactggctgagcggcttcaggccgcacttgaagcagaggagccggatgacgagagagagctggacgcggacgatgagcctggcaggcctggacatatcaacgaagaagtcgagaccgagggtggaagcgaacttgagggcacagcacagcccccccctcccgggctgcaaccacacgctgagcctggcggctatagcggccctgatggacactacgccatggataatatcaccagacagaatcagttctacgatacacaagtcattaaacaagagaacgagtctggctatgaaaggcgccccttagagatggaacagcagcaggcttatagacctgaaatgaagaccgagatgaaacagggtgccccaacgtcctttctgccacctgaggcatctcagcttaaacccgacaggcaacagttccagtctcgaaaacgaccctatgaagagaatcgggggcgcggatattttgaacaccgggaagatagaagaggcaggtccccccagccaccagcggaggaggatgaagacgatttcgacgataccctggtggccattgatacctataactgtgacttgcactttaaagttgcccgcgatcgtagtagtggatatcccctgaccattgagggattcgcctacctgtggagcggagcccgggcgtcttatggcgttaggcgaggccgagtttgctttgaaatgaagatcaacgaagaaattagcgtcaagcaccttccttccaccgagcctgatccacacgtggtacggatagggtggtctttggactcctgctcaacccaactcggagaagagccctttagctacgggtatggaggcacaggcaagaagagcaccaacagccgatttgagaactacggtgataagtttgcagaaaatgacgtgattgggtgctttgccgacttcgagtgtggcaatgacgtagagctgtcctttactaagaatggtaaatggatggggattgcattccgtatacagaaggaggccttaggggggcaggctctctacccccacgtgctggtgaagaactgcgccgtcgagttcaacttcggccaaagagccgaaccctactgtagtgttttaccgggattcacattcatccaacacctgccgctttccgaacgcatacgcggtacggtaggccctaaatccaaggccgagtgcgagatcctgatgatggtaggcctcccagctgcagggaaaacaacctgggccatcaaacacgctgcctcgaacccttcaaaaaaatacaatatactgggaactaatgccatcatggataaaatgagggtgatgggactccgacggcaaaggaattatgcaggtcggtgggacgtgttgattcagcaagctacccagtgcctgaatcgattgattcagattgcggcccgaaaaaaacgtaactacatactcgaccaaaccaatgtgtatggaagcgcacagcgtcgcaaaatgaggccattcgaggggttccagagaaaggctattgtcatctgcccgacagatgaagatctcaaagatcggaccatcaaacggactgacgaagagggaaaagacgtccccgaccacgccgttctggagatgaaagcaaattttaccctccccgacgtgggtgacttcctcgacgaagtgttgttcattgagctgcagagggaggaggcagacaaattggtgagacagtataacgaggagggaaggaaagcggggccaccacctgaaaaacggtttgacaaccgcggagggggcgggttccgcggccgtggcggtggaggtggattccagcgctatgagaacaggggcccgcccggaggcaaccggggcggatttcagaatcgcggtggtggttcaggaggcggggggaattacagaggcgggtttaacaggtcaggcgggggagggtacagtcagaacaggtggggcaacaacaatagagacaataacaatagtaataacagaggatcctataatagagccccccagcagcaacctccaccccagcagcccccaccaccacaaccgccacctcagcagcccccgccccccccttcatattcgcccgcccggaatccccctggagccagcacctacaacaagaactcaaatattccgggaagctctgcaaacactagcacccctacagtcagctcctatagtccaccccagcccagttattcacagcccccatacaaccagggcggctatagtcaaggttacacggccccaccccccccaccgcctcccccacctgcttacaactacggtagctatggcgggtacaatccagctccctatactccacccccgcccccaactgcgcagacctacccacagccgtcatataatcagtaccagcagtatgcacaacagtggaaccagtactatcagaatcaaggccagtggccaccctactacgggaactatgactatggtagctattcaggcaatactcagggaggcacatccacccagtag

SEQ ID NO: 190606 - DNA, 2751 bp, synthetic construct
  misc_feature 1..2751: note = Description of Artificial Sequence: Synthetic coding sequence
  source 1..2751: mol_type = other DNA
atggactgcgagcacagcctgagcctgccctgccggggcgccgaggcttgggaaatcggaatagataagtatctctatgccatgagactttctgatgaaaccctaatagacatcatgacgagatttcgcaaagaaatgaaaaatgggttgagtcgcgatttcaatcctaccgcaacagtcaaaatgcttccaaccttcgtgcgctccataccggacgggagcgagaagggggactttatagcattagatttgggtggttcatcctttcggatcctgcgagtgcaggtgaatcacgaaaagaaccagaatgtccatatggaaagtgaggtgtacgataccccggaaaatatagtgcacgggtcaggctcccagctcttcgaccatgtcgccgagtgtctgggagacttcatggaaaaaaggaaaataaaagacaagaagctgcccgtagggttcaccttttcgtttccctgccagcagtcgaagatagatgaggccatcctcataacatggacaaagcgctttaaagcttcaggcgtcgaaggggcagacgtggtcaagctgctgaataaggccattaagaagagaggcgattatgacgccaacatagttgctgtcgtgaacgacaccgtgggcacaatgatgacgtgtgggtatgatgaccagcattgcgaggtgggactcatcatcgggactggaactaacgcttgctacatggaagagttgcgccatatcgatctcgtggagggagacgagggaagaatgtgcatcaacactgaatggggggcctttggagatgacggatctcttgaggacatccggaccgagttcgatagggagattgaccgtggttccctaaacccaggcaagcagctttttgagaagatggtttcagggatgtacctgggggagctggtgcgtctcatcctcgtgaaaatggccaaagagggtctgctgtttgaaggacgaatcactcctgagctgttgactagggggaagttcaatacaagtgacgtctcggcaattgagaaaaataaggaagggctgcataatgccaaggagattctgactcgcctgggtgtcgaaccatcagatgacgactgtgtctccgtgcagcacgtatgtaccatcgtgtcattcagaagcgcaaatctcgttgcagcaaccctgggggctattctgaacagactgcgggataacaagggtacacctagactgagaaccactgtgggcgtggacggcagcctgtacaagacacacccccagtattcaaggcgcttccacaagacattaaggagactggtccctgactcagatgtgaggttcctgctttccgaatcgggcagtggcaagggcgcagccatggttaccgctgtagcctatcgccttgcagagcagcatcgtcagattgaggagaccctggctcacttccacctcaccaaggatatgttacttgaggtgaagaaacgaatgcgagcagagatggagctcggactccggaagcagacccacaacaatgctgtggtgaagatgctcccatccttcgttagacgcactccagacggaactgagaatggcgactttttagcgctcgatctgggcggcacgaatttcagggtgttactagtgaagatccgtagcggtaaaaagcggaccgtggaaatgcacaacaagatctatgcgatcccaatcgagatcatgcaagggaccggcgaggaattgttcgaccacattgtcagctgtatatctgacttcctggactatatgggtataaagggtccccgtatgcccctgggattcactttcagtttcccatgccagcaaacgtcgctggacgcaggaattctgattacttggacgaaggggtttaaggcaacggactgcgttggacacgacgtggtaaccctgttaagagatgccataaagagacgcgaagaattcgatttagacgttgtcgcagtggtcaatgatacagtggggaccatgatgacatgtgcatatgaagagcccacttgcgaagtagggcttatcgtcgggacaggcagcaacgcgtgctacatggaagagatgaagaacgtggaaatggtcgagggcgatcaaggccagatgtgcataaatatggaatggggagccttcggggacaatggctgtttggatgatattcggactcactatgaccggctggtggatgaatattctctcaacgcgggcaaacagagatatgagaagatgataagcggaatgtatctgggcgaaatcgtaagaaacatactgatcgactttaccaagaagggcttcctgtttagaggccagatttctgaaactcttaagacacgaggtatctttgagaccaaatttctctctcaaatcgaaagcgaccgactggcccttctacaagtgagggccattcttcagcagctcggcttgaattccacttgcgacgacagcattctcgttaagacagtgtgtggtgtggtgagtcgacgggccgctcagctgtgtggggcagggatggcggcagtagttgacaaaattcgggaaaaccgggggttggaccgactgaatgtgacagtaggcgtagatggcactctgtacaaattgcaccctcatttttcccgcattatgcaccagacagtaaaggaactctcacccaagtgcaacgtctcttttctgttgtcagaagatgggtccggcaaaggagccgccttgatcacagcggtcggtgtgagattgcgaaccgaagcgtccagttag

SEQ ID NO: 190607 - DNA, 2754 bp, synthetic construct
  misc_feature 1..2754: note = Description of Artificial Sequence: Synthetic coding sequence
  source 1..2754: mol_type = other DNA
atgatcgccgcccagctgctggcctactacttcaccgagctgaaggacgatcaggttaagaagattgacaagtatctgtatgctatgcggctctctgacgaaactctcatagacattatgactagatttaggaaggagatgaaaaacggcctgtcacgtgattttaatcccacagcaaccgtcaagatgctgcctacattcgtgcggtccattcctgacggttccgagaagggagactttatagcactggaccttgggggctccagcttcaggattcttagagtgcaggtcaatcacgagaaaaatcagaacgtgcatatggagtccgaggtgtacgatacgccggagaacattgtgcatggaagcgggagccagttgtttgaccatgtagcagaatgcctcggggactttatggaaaagaggaagattaaggacaagaagctgcccgttgggttcaccttttcctttccgtgccagcaatccaagatcgatgaggctatattaatcacgtggactaagaggttcaaagcgagtggagtcgaaggcgctgatgtggttaaactgctgaacaaagcaattaagaagagaggcgactacgatgccaatatagtggctgttgtaaacgacacagttggaacaatgatgacctgcggctatgacgaccaacactgcgaagtgggcctcataatcgggacaggcaccaatgcgtgttacatggaagagttgcgacacatcgatctggttgagggagatgagggccggatgtgtataaacacagaatggggggcttttggggatgacggcagccttgaagacataagaaccgaatttgatagagagattgaccgggggagtctgaatcctgggaaacaactctttgagaagatggttagtggtatgtatttaggcgaactcgtgaggttgatcttggtcaaaatggccaaagaaggcttactcttcgagggacgtatcacccctgaactcctaacgcggggcaagtttaatacttcagacgttagcgctatcgagaaaaataaggagggactgcataacgctaaggaaatcttgactcgactgggagtggagcccagcgacgatgattgtgtgagcgtgcagcatgtctgcacaatcgtcagcttccgctcggcgaacttggtcgctgctacactcggtgccattttaaacaggttgagagacaataaaggcacccctcggttaagaaccaccgtgggtgtagacggcagtctatacaagacacacccccagtattcccggaggttccataaaacactcagacgcttggtcccagatagcgatgtgagattcctcttgagcgagagcgggagtggtaaaggggctgcaatggtgaccgcagtggcttaccgcctggctgagcagcacagacagatagaagaaaccctcgcccacttccaccttacgaaagacatgctgcttgaggtaaaaaagcggatgagagctgaaatggaacttggcctgcgcaaacagacacataataacgccgtagtaaaaatgttgccctcttttgtgaggaggactcccgacggtacggaaaacggtgatttcttggccctcgacttaggaggcacgaacttccgagtcctgctggtgaaaatccggtctgggaagaaaagaactgtagaaatgcacaacaagatttacgctataccgatagaaatcatgcagggcacaggagaagaattattcgatcacatcgtgagttgcatctccgacttcctggactacatgggcataaagggaccccgcatgcccctgggattcacattcagctttccgtgccagcagactagcctcgacgctgggatcttaattacgtggacaaagggattcaaagccacagactgtgtgggacatgacgtcgtaacattactacgcgacgcaattaaacgccgggaggagtttgaccttgatgtcgtggcagtggtcaacgatactgtcggcactatgatgacttgtgcgtacgaagaacctacgtgcgaagtggggctgatagttggtacaggctccaatgcatgttacatggaagaaatgaaaaacgtggaaatggtagagggagaccaaggacaaatgtgtatcaacatggagtggggggcctttggagataacggctgcctcgatgatatccgtacacattacgataggctcgttgacgagtacagcctgaatgccggtaaacagcgatatgaaaaaatgatcagcgggatgtatctgggagaaattgttagaaacatcctgatcgactttactaagaagggattcctgtttcggggccagattagcgaaactctgaagacccggggaatttttgaaaccaagtttttatctcagatagagagcgataggctcgcgctgctgcaggtgcgtgcaattttacagcagctgggcctgaactcaacctgcgacgattcgattctcgtgaagactgtttgtggcgtggtgtccaggagggctgctcagttatgtggcgcaggtatggctgctgtggtggacaaaatccgggaaaacagagggctggataggttaaacgtgaccgtgggcgttgacggaactctgtacaaactgcacccacatttttctcgtatcatgcaccaaactgtgaaagaacttagtccaaagtgtaacgtcagttttctgttgagcgaggacggttccggcaagggtgcggctcttatcactgctgtgggtgtgcgcttacggactgaggctagctcctag

SEQ ID NO: 190608 - DNA, 2718 bp, synthetic construct
  misc_feature 1..2718: note = Description of Artificial Sequence: Synthetic coding sequence
  source 1..2718: mol_type = other DNA
atggccaagcgggccctgcacgacttcatcgacaagtacctgtacgcaatgcgtctctccgacgaaacactgattgacatcatgacaaggtttcggaaagagatgaaaaacgggctgagccgcgacttcaatcctacggctactgtaaagatgctgcccaccttcgttaggtccattcctgacgggagcgaaaaaggagatttcattgcccttgatctagggggctcctcatttcggatcttgagggtccaggtgaatcacgaaaagaatcagaatgtgcatatggaatctgaagtttacgacaccccggagaatatcgtgcacggatcaggaagtcaattatttgatcacgttgccgaatgcctgggagatttcatggagaagaggaaaattaaagacaaaaagctacctgtcggatttaccttcagttttccatgccagcagtccaaaatcgatgaggccatactgattacatggactaagcgatttaaggcttctggggtagaaggggctgatgttgtaaagctgctgaacaaagcgataaaaaagaggggagactatgatgctaacattgtcgccgtggtaaacgacactgttggcactatgatgacatgtggctacgacgaccagcactgtgaagtgggactgatcataggcacaggaacaaacgcctgttacatggaggaactccgacacatagatcttgttgagggggacgaaggccggatgtgcattaacactgagtggggtgcctttggagacgatggaagccttgaggatattaggactgagttcgacagggagattgacagagggagcctgaaccccggcaaacagttgtttgagaagatggtttcggggatgtatctgggagagctcgttcgcctaatcctggtgaaaatggccaaggaaggcctgcttttcgaaggaaggataactccagagctgctgactaggggcaagtttaacacctccgatgtctcagcgatagagaaaaataaagagggtcttcacaacgctaaggaaatcctcacccgtctgggagtggagccaagcgatgacgattgtgtcagtgtgcaacacgtgtgtaccatcgtgtcatttcgtagcgccaatctggtggctgccacgctcggcgcgatcctgaacagattaagagacaacaaaggcaccccacggctgcggaccaccgtgggagtggatggttcactttataaaacccatcctcagtactccaggcgcttccacaaaacgctgaggaggctggtgcctgatagcgatgtgagattccttctgtccgaatccggttctggtaaaggcgcagctatggtgactgccgtcgcctaccggctggcagaacaacaccgccagatagaggagacgctggcgcactttcacctcaccaaggatatgctgttggaagtcaaaaaacggatgagagctgagatggagttggggcttcgcaagcagacccacaacaatgctgtggtaaaaatgctaccctcgtttgtgcggagaacacccgacggtactgagaatggcgacttcttggccctggaccttggaggcacaaatttccgggttcttttggtgaaaatcaggtctggcaaaaaacggacagttgagatgcataacaagatttatgcgatccccattgagattatgcagggaacaggagaggagctgttcgaccacattgtgagttgtatttcagacttcctggactacatggggattaaaggacctcgcatgcccctgggcttcacttttagcttcccctgtcagcaaacatctctggacgctggcatactgattacgtggaccaagggattcaaggcgactgattgcgtgggacatgacgtcgttaccttgcttcgagatgctattaaaagaagggaagagtttgatctggacgtcgttgctgtggtgaacgacaccgtggggacaatgatgacatgcgcctatgaagagccaacctgtgaggtaggcctaatcgtgggaaccggatcaaacgcttgctatatggaggaaatgaagaatgtggagatggttgagggcgatcagggacagatgtgtattaatatggaatggggagcttttggcgataacgggtgcctggatgacatacggacgcactacgacaggctggtggacgagtatagtctcaacgctggtaaacagcgctatgagaaaatgatcagcggcatgtaccttggggagatcgttcggaatatcctgattgacttcactaaaaaagggtttttgtttcgcggccaaatctctgaaacgctgaaaactcgtggtattttcgaaactaagtttctttcacagatcgagagcgataggctcgccctactgcaggtacgagcgattctccagcaacttggtctcaatagcacctgcgacgattctatactagtcaagacagtctgcggcgtggtctctaggcgggccgctcagctctgtggtgccggcatggccgccgtggttgataaaatccgcgagaaccggggattggacagactcaacgtgacagtgggagtggacggcacattgtataaactccatcctcatttctctcggatcatgcatcagaccgttaaggagttatcacctaagtgcaatgtgagcttcctgttgagcgaggacggttcaggcaagggagccgctctgatcaccgcagtgggtgttcgtttgcgtactgaggcatcatcctag

SEQ ID NO: 190609 - DNA, 2766 bp, synthetic construct
  misc_feature 1..2766: note = Description of Artificial Sequence: Synthetic coding sequence
  source 1..2766: mol_type = other DNA
atgggccagatctgccagcgggagagcgccaccgccgccgagaagccaaaactgcacctgctggcagaaagcgagattgataaatacctgtacgccatgagactgtcggacgagactctgatagacatcatgacccgcttcaggaaggagatgaagaatgggctctcccgtgactttaaccctacggccaccgtaaagatgctccctacattcgtgcgatccatccctgacggaagtgagaaaggagatttcatcgctttagacttgggcggttccagcttcagaatcctacgcgttcaggtgaaccatgagaagaaccaaaatgttcacatggagtcagaggtgtacgacaccccagagaatatcgtgcatggctctggatctcagctgtttgaccacgtggcggagtgcctgggggatttcatggaaaagagaaagatcaaagacaagaagctgcccgtcggattcacttttagtttcccatgtcagcagtctaagatcgatgaggcaattttgatcacctggaccaaacggtttaaggccagtggggttgagggggccgacgtggttaaactgctgaataaggccatcaaaaaacgcggcgactatgatgcaaatatcgtggcagttgttaatgacacggtgggcactatgatgacttgcgggtatgatgaccagcattgcgaggttggattgatcatcgggaccgggacgaacgcttgctacatggaagagctgaggcacatagatctagttgagggggatgaaggccgcatgtgcataaacacagagtggggtgccttcggagatgatgggtctctagaggatatcaggacagaattcgacagagagattgaccggggatcactcaaccctggcaagcagctctttgaaaagatggtgagcggcatgtatctcggggagctggtaagacttattctggtcaaaatggctaaagaagggctgttatttgaagggaggattacaccagagctcctcactaggggtaagtttaacacctcagacgttagtgccatcgaaaagaacaaggagggtttacataacgccaaagagattcttactcgtcttggagtcgaaccatccgacgacgactgtgtatcagtacagcacgtgtgtaccatcgtttcttttcgcagtgccaacctcgtcgccgccacattgggcgcaatacttaaccgtctcagggacaacaagggaacacctcgactaaggacaacggtgggggtcgatggctctctttacaagactcatccacaatattcaaggagattccacaagacccttcgacgtctggtgccagatagcgacgtgagattcctgctgtctgagtccggcagtggaaagggagccgcaatggtcactgccgtcgcatatcgtctggcagagcagcatcggcaaatcgaggagacacttgcacatttccacctgacgaaggacatgctccttgaagtgaaaaagcgtatgagagccgaaatggagctcggactgaggaaacagacccataataatgcggttgtgaagatgctgccatcattcgtgagaaggacacctgacggcaccgaaaacggggactttctggcactggacctggggggcacaaatttcagggtgctactggtgaagatccgcagtggcaagaagcgcacagtggaaatgcataacaagatctacgctatccctatagaaattatgcagggaacgggggaggaactcttcgaccacatagttagctgtatcagtgattttcttgactatatgggaatcaaaggcccacggatgccccttggctttaccttcagctttccatgtcagcaaactagcctggatgccgggattttaatcacttggacaaagggattcaaagcaaccgactgtgtgggccacgatgttgtcaccctcctacgcgacgctattaagagaagagaggaatttgatctggatgtcgtcgctgtggtgaacgataccgtgggaacaatgatgacttgcgcatacgaggagccgacttgtgaagtcgggctcatcgtgggtacagggtcgaatgcttgctacatggaggagatgaagaacgtagaaatggtggagggggaccagggtcaaatgtgcataaacatggagtggggagccttcggggacaatggttgcctcgatgacatacggacccactatgaccggctggtagatgagtattcacttaatgcaggcaagcagcgttacgaaaaaatgatatctggaatgtatctgggcgaaatcgtccggaacattctcattgatttcaccaaaaagggattcttatttagaggccagataagcgagacactgaagacccgcggcatctttgaaacaaaattcttgagccagatcgagtctgataggctagccttactgcaggtccgcgccatcctccagcagctggggctcaattctacatgtgacgattcaatactcgttaagacagtgtgtggggtggtttctagacgtgccgctcaattatgcggcgccggcatggcggcggtggtcgacaaaataagagagaacaggggcctagatcgcctcaacgttacggtgggtgtggatggcacgctgtacaagctgcatccgcatttctcccggattatgcatcaaactgtgaaagaattatcccccaaatgtaatgtttccttcctgctgtcagaggacggctcgggcaaaggtgccgccctcattaccgcggttggagtgcggctgagaacggaagcctccagctag

SEQ ID NO: 190610 - DNA, 2748 bp, synthetic construct
  misc_feature 1..2748: note = Description of Artificial Sequence: Synthetic coding sequence
  source 1..2748: mol_type = other DNA
atgatcgccgcccagctgctggcctactacttcaccgagctgaaggacgaccaagtgaaaaagatcgacaagtacttgtacgcaatgcgattgtcagacgaaacccttatagatataatgacgcgtttcaggaaagagatgaaaaacggactgtctcgcgactttaacccaacagctactgtaaaaatgcttcctacattcgtccggtcaatccccgatggctcagaaaagggggatttcatcgccctggatctgggcggatcgtcatttcgtattctgcgcgtgcaggtgaatcatgaaaagaatcagaatgtgcacatggaaagcgaggtttatgatactcccgagaacattgtgcacggtagtggaagccagttattcgatcacgtggccgagtgcttaggcgactttatggaaaagcggaagatcaaagacaagaagctgcctgttggattcaccttcagtttcccttgtcagcagtcaaaaatcgacgaggctatcctgatcacttggactaaaaggttcaaggcctctggggtcgagggcgccgatgtggtcaaactgctcaacaaggctataaaaaaacggggcgactatgatgccaacatagtcgctgtcgtgaatgacaccgttgggaccatgatgacttgcggttatgacgaccagcactgcgaggtgggtttaattattggcaccggcacgaatgcatgttacatggaagaactacgccacatcgaccttgttgaaggggatgagggcaggatgtgtattaatacagagtggggtgcctttggggacgatggaagtcttgaggatattcggacagagttcgatagagaaattgatagggggtcacttaaccccggaaagcagctgtttgagaagatggtatctggaatgtacctaggggagcttgtgagactgattctcgtgaagatggctaaggaaggtctgttattcgagggtcgcataacccctgaactactgacgcgcggtaagttcaatacatctgatgtgtcagcaatcgagaagaataaggaggggctgcataatgctaaagagatcttgaccaggcttggagtagagcccagcgacgacgattgcgtgagcgtccaacacgtgtgcaccattgtttccttccgatcggccaatctggtggcggcaacgctgggcgcaatccttaatcgcttgcgtgataataagggaaccccaagactcaggactaccgtaggcgtggatgggagcctgtataaaacacaccctcagtacagtcgccgttttcacaaaacactgaggagactagtcccggactccgatgtaaggtttctcctgtccgagagtggatctggtaaaggtgctgcaatggttaccgccgttgcttatagattggccgagcaacaccgccagatcgaggaaaccctcgcgcacttccacctgaccaaggacatgctcctggaggtcaagaaaagaatgagggcagaaatggagcttggcctccggaaacagacacataacaatgccgttgtcaaaatgcttccttccttcgtgcggcgtaccccagacggcacagaaaacggagacttcttagcactggatctgggtggcacaaactttcgtgtgttgctggtgaagattagatctggcaaaaagcgtactgtggaaatgcacaacaagatctacgccataccaattgaaatcatgcaagggacaggcgaagaactgttcgatcatattgttagttgcatcagcgatttcctggactatatggggatcaaagggcccagaatgcctcttggcttcacctttagcttcccgtgccagcaaacatcacttgacgcaggcatactcattacctggacaaagggcttcaaggctaccgattgcgtcggacatgatgtcgtgacactgttacgtgatgccataaagaggagggaggaattcgatttggatgtcgtcgcagtcgtcaatgacaccgtaggcaccatgatgacctgcgcctacgaggagcccacgtgcgaagtcggccttatcgtgggaaccggctctaacgcctgttacatggaggagatgaaaaatgtggaaatggtagagggtgaccaaggacagatgtgcatcaatatggaatggggcgctttcggtgacaatgggtgtctggatgacattcgcactcattatgaccgcctagtggacgagtacagtctcaacgctgggaaacagcgatatgaaaagatgatttccggaatgtatctcggtgagatcgtacgcaacatactcatcgactttactaagaaggggtttctctttagaggacagatttccgagactttgaaaactaggggcatttttgagaccaaatttctgtcacagattgagtcggaccggcttgcccttctgcaggtgagggccatcttacagcagctgggtcttaacagtacctgtgacgatagtattctagtgaaaaccgtgtgcggggtggtgtctagacgagcagcacagctgtgtggagcaggaatggcagccgttgtcgataagatcagggagaaccgcggcctggaccgattaaacgtgacagtgggagtcgacggcacactgtacaagctccatccgcacttctcccgcataatgcaccagaccgttaaggaattatctcccaaatgtaatgttagttttcttctcagcgaagacggctccggcaagggagccgcattgatcacagctgtcggggttagattaagaactgaggcttag

SEQ ID NO: 190611 - DNA, 345 bp, synthetic construct
  misc_feature 1..345: note = Description of Artificial Sequence: Synthetic coding sequence
  source 1..345: mol_type = other DNA
atggccaagcgggccctgcacgacttcatcgacaagtacctgtacgccatgaggctgagtgacgagaccttgattgatatcatgacacgtttccgtaaggaaatgaagaacggattgagtagagattttaacccaactgcgaccgtaaagatgcttcctacttttgtcaggagtatccctgacgggagcgaaaagggtgacttcattgctcttgatctcggcggaagctcttttaggatccttagggtccaagtcaatcacgagaaaaatcagaatgtacacatggaatcggaggtatacgacacgcctgagaacatcgtgcacggctcgggctcacaattatag

SEQ ID NO: 190612 - DNA, 876 bp, synthetic construct
  misc_feature 1..876: note = Description of Artificial Sequence: Synthetic coding sequence
  source 1..876: mol_type = other DNA
atggactgcgagcacagcctgagcctgccctgccggggcgccgaggcctgggagattggaattgataaatacctatatgctatgcggctcagtgacgaaacacttatcgatattatgacccggtttcggaaggagatgaagaatggactgagccgagactttaatcctacagctacggtaaaaatgttgcccactttcgtgcgctctatacccgacgggtcagaaaagggggatttcatagccctggacctcggcggatcttcctttcggatcctccgggtacaggttaaccacgagaagaatcagaacgtccacatggaatcagaggtctacgacactccagagaacattgtccatggaagcggctctcaattatttgaccacgtcgcagaatgtctcggcgactttatggagaaaaggaaaattaaggacaaaaagctgcctgtcggcttcacattctcttttccttgccagcaaagcaagatcgatgaagcaattcttataacatggaccaagcggtttaaggcgtcaggcgtcgaaggagccgacgtagtgaaattgctcaataaggcaataaaaaagcgaggtgattatgatgccaatattgtggcggtggtaaatgacacagttggcactatgatgacctgcggctatgatgaccagcattgtgaggtcggcctcatcattgggacaggtacaaatgcatgttacatggaggaattaagacacattgatctggtggaaggggatgagggccgaatgtgcatcaacaccgaatggggcgctttcggagatgatggcagcctggaggacattagaaccgaatttgatagagaaattgaccggggatcattgaaccccggtaaacaactctag

SEQ ID NO: 190613 - DNA, 2859 bp, synthetic construct
  misc_feature 1..2859: note = Description of Artificial Sequence: Synthetic coding sequence
  source 1..2859: mol_type = other DNA
atgggccagatctgccagcgggagagccggcagggcctggccatgctcccccgcctctttctgaatccgtggagacaggtcattcttctcccgcagccccccaaggtattaggattgcaggccacagcagccgaaaagcccaagctgcacctgctggctgagagcgaaatcgataagtacttatacgccatgcgcctgagcgatgagaccttaatagacatcatgacgcgttttcgcaaggaaatgaagaacggcctgtctagggattttaatcctacagcgacggtgaagatgctccccactttcgtccgttccattccagatggatctgagaagggcgattttattgcgcttgacctgggaggaagttctttccggattctgcgggttcaggttaaccatgaaaaaaatcaaaatgtgcacatggaatctgaagtgtatgacacccctgagaatatcgtacacggctccggaagccaactctttgatcatgttgccgagtgtttgggggacttcatggagaagcgtaagataaaagacaagaagctgccagtgggcttcacattttccttcccttgtcagcagagtaagattgatgaggccatcctaataacctggacaaagcgctttaaagcctcgggcgtggagggagctgacgtggttaaacttctcaataaggccataaagaagagaggcgactatgacgccaatatcgtagcagtggtgaatgataccgtcggcacaatgatgacatgcggatacgatgaccagcactgcgaggtcgggttaatcatcggtactggaacgaatgcgtgctatatggaggagctgaggcacatcgacttagttgaaggggacgaaggccggatgtgtatcaataccgagtggggggcctttggcgacgatggctctttagaagacatccgtacagagtttgatagggagattgataggggctcactcaaccctggtaaacagctgttcgagaagatggtgagcggtatgtatttgggcgaactagtgcggttaatcctggtcaagatggctaaagaagggctgctgtttgagggccggataacaccggagctcctgacacgaggcaagtttaatacctccgatgtttccgctatagagaaaaataaggagggcctccacaacgctaaggagatcttgacacggctcggagtggagccaagtgatgatgactgcgtgtcggtgcagcacgtgtgcacaatcgtgagctttcgcagtgccaaccttgtcgccgctacactcggggctatcctgaatagactgcgggataataagggtactcccaggttacggacaacagtcggtgtggatggttcactgtacaagactcacccacagtatagcaggagattccacaaaaccctgcggcgactcgttccagactcagacgtccgattcctgctttcggagtccgggagtggcaagggagccgccatggtgaccgcggtcgcgtaccggctcgccgagcagcatcgacagattgaagagactctagcccactttcatctgactaaagatatgctccttgaggtcaagaaaagaatgagggctgaaatggaacttgggttgaggaaacagacccataataacgccgtggtgaaaatgcttcctagtttcgtccggaggacgccagacggaacagaaaacggggacttcctggcacttgatctggggggaacgaatttccgggttctgcttgttaagatacgaagtggtaaaaagcgcacagtcgagatgcacaacaaaatctacgctatacctatcgagattatgcagggtacaggagaggaactgtttgaccacatcgtgagctgtatctctgacttccttgattacatgggcattaaaggtccgcgcatgcccttgggcttcaccttttcgtttccctgccagcagacctctcttgacgccggtatactgattacgtggactaagggattcaaagcaactgactgcgtgggacatgatgttgtgactttgctcagggacgcaatcaagcgtcgggaggaatttgatcttgacgtggtggccgtggtcaacgatacagtgggaaccatgatgacctgtgcttatgaagagcctacctgcgaggtcggactgatcgtggggaccgggagtaacgcttgttatatggaggaaatgaaaaacgtagagatggtagagggggatcaaggtcagatgtgcattaacatggaatggggcgcatttggggacaacggttgcttggatgacattcgaacacattacgatagactggtggatgagtacagcctgaacgccggtaaacaacgctatgagaagatgatttctgggatgtatcttggtgaaatcgtacggaacatcctcatagacttcacaaaaaaggggtttctcttccggggccagatttctgaaaccctcaagacacgaggcatttttgaaaccaagtttttgtcccagatcgaatctgacaggctggcgctgttacaggtgcgagctatcctccagcagctgggtctgaactcaacctgcgacgacagcattctggtgaagaccgtatgcggagtggtgtcgagaagagcagcacaactttgtggcgccggtatggctgccgttgtagacaagattcgagagaacagagggctggataggctcaacgtgacggttggcgtagacggcacactgtataaactgcacccgcacttctcccgaatcatgcatcagacggtaaaggagctgtcacccaaatgtaacgtttccttcctgttatcagaagatggatcggggaaaggagcagccctgattacggcagttggagtgaggctgcgcactgaagcgtcctcctag

SEQ ID NO: 190614 - DNA, 420 bp, synthetic construct
  misc_feature 1..420: note = Description of Artificial Sequence: Synthetic coding sequence
  source 1..420: mol_type = other DNA
atgggccagatctgccagcgggagagcgccaccgccgccgagaagcctaaactgcatttgctggcagagtcagagattgacaagtacctatatgccatgcggctatccgacgaaacactcatcgacattatgacccggtttcgaaaagaaatgaagaatggattaagtcgagatttcaaccccacggctaccgtcaagatgctgcctactttcgttagaagtatccctgacggctctgaaaagggcgacttcatcgctttagaccttggtggatcctcatttagaattcttcgtgtacaagtcaaccatgaaaagaaccaaaatgtgcacatggaatcagaggtgtacgatacccccgagaacatcgtgcatggatcaggcagccagctatttgaccatgtcgctgagtgcctgggatag

SEQ ID NO: 190615 - DNA, 2754 bp, synthetic construct
  misc_feature 1..2754: note = Description of Artificial Sequence: Synthetic coding sequence
  source 1..2754: mol_type = other DNA
atgatcgccagccacctgctggcctacttcttcaccgagctgaaccatgaccaagtgcaaaaagttgatcagtacctgtatcatatgagattatccgatgagacgctgcttgagatttctaagcgtttccgcaaggaaatggagaagggccttggagcgacaacccatcctaccgccgccgtgaaaatgctgccaacttttgtgcggtccacccctgatggcaccgagcatggagagtttctagcattagacctgggaggcacgaattttagggtactgtgggtgaaggtaacggataacggattgcagaaggtcgagatggaaaaccagatctacgccatacctgaggacatcatgcgggggagcggcacccagctttttgaccatatcgccgaatgtctcgctaatttcatggacaaattgcagatcaaggataagaagctgcctctcggatttactttcagcttcccatgtcatcagacgaagctcgacgaaagcttcttggtgagctggaccaaggggttcaaatcgagcggagtggaaggccgagatgtcgtggcgctcatccggaaggcaattcagcgtcgcggagattttgacatcgacattgttgccgttgttaatgacacagtgggaaccatgatgacatgcggctatgatgaccataattgtgagattggactgatagtgggcacaggctccaacgcgtgttatatggaggaaatgcgacacattgacatggttgagggagacgaaggacgaatgtgcataaacatggagtggggggcgtttggtgacgacggcagtctgaatgatatcaggacagagtttgaccaagaaatcgatatggggtctttaaaccccggaaagcagctgttcgaaaagatgatctcaggcatgtacatgggcgagctggtaagattgatcctggtgaagatggccaaggaggaactgcttttcggcggaaaactatcgcccgaattgttgaacaccgggcggtttgaaactaaggatatctctgatattgaaggcgaaaaagatggcatcagaaaagcgcgggaggtgcttatgaggctgggactcgatcctacacaagaagactgcgtggcaacacaccgcatctgccaaatagtttcaaccaggagcgcttccctctgcgccgccactctggctgcagtgttgcagcgaatcaaagagaataaaggggaggagcgactccgttcaactatcggcgtcgacggctccgtgtataagaaacaccctcatttcgccaagagattacacaagaccgtccggagattggtgcctggttgcgatgtgaggttcctcagaagcgaggatggcagtggtaagggtgccgccatggtgaccgccgttgcctatcggctggccgatcaacaccgggccagacagaagacgctggaacacctgcagctgtctcatgaccagttgctggaagtgaagcggaggatgaaagtcgaaatggagcggggcttgtcaaaggaaacacacgctagcgcacctgtgaaaatgctgccaacatatgtatgtgccacacccgacgggacagagaaaggagacttcctggcccttgatctcggagggaccaacttcagggtgcttctcgtccgagtccgtaacggcaagtgggggggagtggagatgcataataaaatctatgccatcccccaggaggtaatgcacggtaccggggacgaactcttcgaccacatcgtgcagtgcatcgctgattttcttgaatacatgggaatgaaaggagtctctctgccgttaggctttacattcagtttcccttgccagcagaatagtctggacgagagtatcctgctgaaatggactaaaggtttcaaagcaagtggatgcgagggtgaggatgtggtgaccttgctcaaagaagctatccatcgccgagaggagttcgacttggacgtcgtagcggtggtgaacgataccgtcggtaccatgatgacttgtggattcgaagatccccactgtgaggttggactgattgtgggaacaggatctaatgcgtgctatatggaggaaatgagaaatgttgaactagttgaaggcgaagaagggcgcatgtgtgttaacatggaatggggcgccttcggcgacaacggatgtctggatgacttccgcaccgaattcgacgtggccgtggatgaactaagcctgaacccagggaaacagaggttcgaaaaaatgatcagcggcatgtatctcggcgaaatcgtgcgtaatatcctcatagacttcacaaaacgcggtttactgttcagaggcaggatatcagagcgcctcaagacacgcggtattttcgaaacgaagtttctgagccagattgagtctgactgcctggcacttttgcaggtacgcgcaatcctgcagcatttgggactggaatccacctgtgacgattctattatcgtgaaggaagtgtgtaccgtagtggccagaagagctgctcagctctgcggcgccgggatggctgcagttgtggatagaattcgcgagaatagaggactggatgccctcaaagtgacagtcggcgtggatggaaccctatataaactccatccacacttcgccaaagtgatgcatgagacagtgaaagacttggcccctaagtgtgatgtaagtttccttcagagcgaggacggttcaggcaagggggcagcactgatcacagccgtagcatgccggattcgggaagcagggcagcgctag

SEQ ID NO: 190616 - DNA, 2670 bp, synthetic construct
  misc_feature 1..2670: note = Description of Artificial Sequence: Synthetic coding sequence
  source 1..2670: mol_type = other DNA
atgcggctgagcgacgagaccctgctggagatcagcaagcggttcaggaaagaaatggaaaaaggtctcggggccacaactcaccctacagccgcggtgaagatgcttcccacctttgtcagaagcactcccgacggaactgaacacggggagtttttggcgctagatctcgggggcacgaatttccgggtgctgtgggtgaaggtgaccgataacggcctgcagaaggtggagatggagaaccagatctatgcaattcctgaggatatcatgagggggagcgggacccagctctttgatcacattgcagagtgccttgccaatttcatggataaactccagatcaaggataaaaagctccctctgggctttaccttttcttttccgtgccaccagaccaaactcgatgaaagttttctggtgtcatggactaagggattcaaatcttctggtgtggaggggcgggacgtggtggcgctgatccggaaagctatccagaggagaggcgatttcgatatcgacattgttgctgtggtgaatgacactgttggcaccatgatgacttgcggctacgatgaccataattgtgagatcggattgatcgtgggaacgggctccaacgcatgctatatggaggaaatgcgccacattgacatggttgagggcgatgaaggacgaatgtgtattaatatggagtggggcgctttcggagacgacggatcgctgaatgatatccgtactgaatttgaccaggagatcgatatgggctctctgaatcctggcaaacagctctttgagaagatgattagtggaatgtacatgggcgaactcgtgcgactcatcctggtgaagatggccaaagaagagctactgttcgggggcaaactctcaccagagttactcaacaccggtcgcttcgaaaccaaagacatttctgacatagagggagagaaagacgggatcaggaaggctcgagaggtactgatgagacttggcctcgacccaacccaagaagactgtgttgccacacataggatttgtcaaatagtgtccactcgcagtgcctctctatgtgccgccaccctcgctgccgtcctacagagaatcaaggagaataagggcgaagagcgcctccggagcactattggcgtcgacggctctgtgtacaagaaacacccccactttgcaaaacggttgcacaagacggtgaggcgcctggtgccaggttgtgacgtccggtttctgaggagtgaggatgggagcgggaaaggagccgctatggttaccgccgtggcttaccgccttgccgaccaacaccgcgccagacaaaagaccctggagcatttacaattgagtcatgaccagctgctggaggtcaagcgtaggatgaaggtggagatggaacgcggactctcgaaggagacccatgcctcagcccccgtgaaaatgttgccaacatacgtgtgtgccacaccagacggcaccgagaaaggggacttcctggccctagatctgggcggcacaaattttcgggtactgctcgtccgcgtgagaaatggtaagtgggggggtgtagaaatgcacaataagatttacgccattccccaggaggtaatgcacgggaccggtgacgagcttttcgaccacatagtccagtgcatcgccgactttcttgaatacatggggatgaagggggtcagcttgcccctgggcttcaccttctcctttccttgccagcagaatagtctggatgagagtattttgctcaaatggacaaaggggtttaaggcatctggctgcgaaggggaggatgtggtgacactcctgaaggaggccattcacaggagggaggaatttgacctggacgtagtggcggtggtgaacgataccgttggcaccatgatgacctgtgggttcgaggatccccactgtgaggtgggactgattgtgggcaccggttcaaacgcgtgttatatggaggagatgaggaatgtggaattggtggagggcgaagaaggtaggatgtgcgtgaacatggaatggggagctttcggagacaacggctgtctggatgactttcggactgaattcgatgtggctgtcgatgagctctcccttaaccctggcaagcagagattcgaaaagatgattagtgggatgtacctgggcgagatcgtgcgcaacatcttaattgatttcacaaaacggggactgctctttcgaggacggatatctgagcggctgaaaacacgaggaatatttgaaactaaatttctgagccaaatagagtcggattgtctagccctgcttcaagttcgggcaattctgcagcatttaggtctcgagagcacatgcgatgacagtattatcgtcaaggaggtttgcacagtagtggccaggcgtgctgcccagctgtgtggtgctggaatggcggctgtggtggataggattcgggagaacagaggtctggatgccctgaaggtgaccgtaggagtcgacggaacactgtacaagttacaccctcattttgctaaggtcatgcatgagaccgttaaggatctggccccaaaatgtgatgtttccttcctgcaatctgaggatggaagcggcaagggagctgctttgattactgccgtggcttgcagaattcgagaggccgggcagcggtag

SEQ ID NO: 190617 - DNA, 2754 bp, synthetic construct
  misc_feature 1..2754: note = Description of Artificial Sequence: Synthetic coding sequence
  source 1..2754: mol_type = other DNA
atgatcgccagccacctgctggcctacttcttcaccgagctgaaccatgatcaggtacagaaggtcgatcagtatctgtatcacatgcgcctgagtgacgagactctgctcgaaattagcaaaagatttcggaaggagatggagaaggggctgggcgccacaactcatcctaccgcagcagtgaagatgctgccgacttttgtccgttctacccctgacgggacagagcatggggagttcctcgctttagatctggggggcacaaacttccgcgtcttgtgggtaaaggtaactgataatgggctccagaaagttgaaatggagaatcagatttacgctatccccgaagacataatgcgcggctccggaacccagctgtttgaccacatcgcagaatgtctagccaactttatggataaactgcaaatcaaggacaaaaagcttccattgggatttactttcagcttcccttgtcaccagaccaaactcgacgaatcatttctggtgtcatggacaaagggttttaaaagctctggggttgagggacgtgatgtggtggcgctgatccgcaaagctatccagcggaggggagattttgatattgacatagtagccgtggtcaatgacacagttggcactatgatgacttgcggatatgacgatcacaactgtgaaatcgggcttatcgttgggacaggttccaacgcatgctacatggaggagatgcgacatatcgacatggtagaaggggatgaagggcggatgtgcatcaacatggaatggggggccttcggggacgacggatcactgaatgacatccgcaccgaattcgaccaggagatagatatgggttccctgaatcccggcaagcaactcttcgagaagatgatttctggcatgtatatgggggagttggtgcgcctcatcttggtgaagatggcaaaggaggaactcttatttggaggcaaactaagccccgagctgctgaataccggcagattcgaaactaaagacatctcagacatcgagggggaaaaggacggaatcaggaaggcccgcgaagtgcttatgcgcctaggcctggatcctacccaggaggactgtgtcgccacccaccgtatctgccagatcgtgtctaccagaagcgcctcattatgtgccgctacacttgccgctgttttacaaaggatcaaggaaaataaaggcgaggagagactcagatctactataggcgttgatggctccgtctataaaaagcatccacacttcgcaaagaggctgcataagactgtaaggaggttggttcctgggtgtgacgtcagattcttgcgctcggaggatggcagcgggaagggagccgctatggtaaccgcagtggcctacaggcttgctgaccagcatcgagcccgccagaagactcttgaacacttgcagttgagccatgaccaattgctggaggtcaagcggagaatgaaagtggagatggaaaggggcctctcaaaggagacccacgcctctgcgcccgtgaagatgcttccgacatatgtctgtgccaccccggacgggacagaaaaaggcgactttcttgctctcgatcttggaggtacaaacttcagggtgcttctggtccgggttcggaacgggaaatggggcggggtagagatgcataacaagatatacgctatcccccaagaggtcatgcacggtaccggggatgagttgtttgatcacatcgtccagtgtattgcggactttctggaatatatgggcatgaagggcgtctcactccccctgggattcacgttttcattcccatgccagcagaacagcctcgacgaatcaatacttctcaaatggactaagggtttcaaagcatcagggtgcgagggagaagacgttgtgaccctgctgaaggaagccatacatcgccgtgaggaatttgatctggacgttgtggctgttgtgaatgatacggtcgggactatgatgacctgtggcttcgaagaccctcattgtgaggtgggattgatcgttgggactgggtcgaacgcctgttacatggaggagatgcgtaacgtggaattggttgagggcgaagagggcaggatgtgtgtgaacatggaatggggtgcgtttggtgacaatggctgccttgacgacttccggaccgagttcgatgtcgcagtggatgaattaagtttgaatccgggcaagcagaggtttgaaaaaatgatcagcggcatgtatcttggagagatagtacggaacatcctcattgactttacaaaacgggggctcctgtttcgcggaaggatatcagagagactcaagactaggggcatttttgaaaccaagttcttatcacagatcgagtctgactgtctggcactccttcaagtcagagccatcttacagcatttggggctcgaaagcacatgtgacgactctataatcgtaaaagaagtgtgcacggtggttgcacgccgcgctgcacagctctgcggggctggcatggctgccgtggtggatcgaatacgagagaaccgcggacttgacgctctgaaggtgactgtcggcgtggacggcactctatataagctccaccctcacttcgctaaagtcatgcacgaaactgtaaaagatctagccccaaaatgcgacgtgtccttcctgcagtccgaggacggtagtgggaagggtgcggcgctcatcacagccgtggcatgtagaattagagaggctgggcagcggtag

SEQ ID NO: 190618 - DNA, 2772 bp, synthetic construct
  misc_feature 1..2772: note = Description of Artificial Sequence: Synthetic coding sequence
  source 1..2772: mol_type = other DNA
atggacagcatcggcagcagcggcctgcggcagggcgaggagaccttgtcctgctctgaggagggcttgcctgggccttctgacagttctgagttagtgcaagaatgcctccaacagttcaaagtgaccagagcgcagttgcaacaaatacaagcctccctcctgggatccatggagcaggccctgagaggtcaggcttctcctgcccctgccgttaggatgcttcccacatatgttggctctactcctcatggtactgagcagggcgactttgtagtcctggagctaggtgcgacaggagccagcttaagagtgctctgggtgaccctgaccggtattgaaggccaccgggtggaaccacgcagccaggaatttgtgattcctcaagaggtgatgcttggcgctggacaacagcttttcgattttgcagcgcattgcctgagcgagtttctggacgctcagccagttaacaaacaggggctgcagctgggtttttcgttcagtttcccctgtcatcaaacaggtcttgatcgttctactctgattagttggacaaagggattccgctgtagcggggtggagggccaagatgtggttcagctgttgcgggacgccatccgtcgtcaaggggcctacaatattgacgtggtggccgttgttaatgacacggtgggaactatgatgggatgtgagccaggcgtcaggccctgtgaagttggactggtcgtagacactgggactaacgcgtgctacatggaggaggcccgccatgtggccgtacttgacgaagacagagggagggtttgtgtttcagtggaatggggctcgttcagcgacgatggagcccttgggccagttcttactacatttgatcacaccctcgaccatgagagtctgaatccaggtgcacaacggtttgagaagatgattgggggtctgtacctgggcgaactggtaagactggtactggcccatctggcccggtgcggggtgctatttggtggatgcacgtcccctgccctgctttcacagggtagtatcctgttggaacatgtggccgagatggaggacccatcaacgggagctgccagagtacatgcgatactccaagacctcggcctgagccctggggcttccgatgtggagttagtccagcacgtgtgtgctgctgtttgtaccagagcagcccagctgtgcgccgctgccctagccgcagttttaagctgcttgcagcattctcgtgagcagcaaactctccaggtcgctgtggcaactggaggcagggtgtgcgagcgacacccgcggttctgcagcgtgctccagggaacagtcatgcttttggcacccgagtgtgacgtctcactgattccatccgtcgatggcggcggccggggtgtggcaatggtgactgcggtggcagctagactcgcagcgcatcgacgcctgctagaggagactctggcaccttttcggcttaaccatgatcagctcgctgccgtgcaggcccagatgcgaaaggcgatggcaaaagggcttaggggcgaggcttcgtcacttaggatgcttccaacgttcgtgcgcgctactcctgatggctccgaaagaggagatttcctcgccctcgacctaggcgggacaaactttagggtactactagtgcgtgtgactacaggcgttcagattacctcggaaatttatagtatacctgagacagtggctcaaggtagcggacaacagctttttgatcacatagtggattgcatcgtagatttccagcagaaacagggtctgagtggccagtctctgcccctgggcttcaccttttcattcccttgtcggcagctgggccttgatcagggaatcctcctgaattggacaaaagggttcaaggctagcgactgtgaagggcaggacgtagtgtcactgctcagagaagccatcacaaggcggcaagccgtggagctgaacgtcgtggccatcgtaaatgacaccgtcggaaccatgatgtcatgcggatacgaagacccgcgctgcgagattggtctcattgttggcacggggacaaatgcctgttacatggaagaactgagaaatgtggcaggggtgcccggcgattctggccggatgtgcatcaatatggaatggggcgcattcggcgatgacggatctctcgccatgctgtccaccagattcgatgcctcagtggaccaggcgtccatcaaccctggtaagcagcgtttcgaaaaaatgatctccgggatgtacctgggcgaaattgtcagacatatcctgcttcacttgacgagcctcggcgtcctttttcgagggcagcagatacagaggctgcaaacccgggatatctttaagacgaagtttctttctgagatcgaatctgattctttagctttgcggcaggtgagagctattttggaagacctgggcctgccactcaccagtgacgatgcccttatggtgctcgaggtctgccaggccgtgtcccagagggccgcacagctgtgtggtgctggcgtcgccgcagttgtggaaaagattagagaaaatagagggctcgaggagctagcagtgtccgtgggggtagatggaactctgtacaagctgcatcctagattctcatccctagttgctgccacagtgcgcgagcttgcaccgcgctgcgtggtgacattcttgcagtcagaggacgggtcaggaaaaggagccgctctggtgaccgcagtcgcctgtcggctcgctcaactaacaagggtgtag

SEQ ID NO: 190619 - DNA, 1590 bp, synthetic construct
  misc_feature 1..1590: note = Description of Artificial Sequence: Synthetic coding sequence
  source 1..1590: mol_type = other DNA
atgaccagcagccggctgtggttcagcctgctgctggccgccgcctttgccggccgcgctactgccctttggccatggccccaaaactttcagacttccgatcagaggtatgtactgtatcctaataatttccaatttcaatatgacgtttccagcgcggctcagccagggtgctccgtactggacgaggccttccagagatatagagatctgctatttgggtccggatcttggccccgaccatacctcaccggtaagcggcatactctggagaaaaacgttctcgtggtttccgtcgtaaccccaggttgcaaccaacttccaaccctggagagcgttgagaactatacactcacaattaacgatgaccagtgtttgcttctttctgaaaccgtctggggcgccttacgtggactcgagactttttctcaactggtgtggaagagcgccgaaggtacttttttcattaacaaaactgaaatcgaggactttcctaggttccctcatcgcggtttgctcctcgatacaagtcgccattatttacctctgagctctattctggatactctcgacgttatggcatataacaagctgaatgtgttccactggcacctcgtggatgacccctccttcccgtacgagtctttcacattccctgagctgatgagaaagggctcatataatccggtgacccacatctacacagcacaggatgtgaaggaggtgatcgaatatgcaaggttgcgcgggatccgggtcctcgctgaattcgacactcccggccatacattgtcgtggggccctggcataccaggattgttgaccccatgctactctggaagcgagcctagcgggaccttcggcccagttaatcctagcctgaacaacacgtatgaatttatgtcaacatttttcctggaagtgagcagcgtgttcccagatttttatctacacttggggggggacgaagtggatttcacgtgctggaagtcaaatcccgagatccaggatttcatgcgcaagaaaggctttggcgaagacttcaagcaactggagtccttctatattcaaacactgctcgacatagtgagtagctatggcaagggatacgtggtttggcaagaagtgttcgacaacaaggtcaaaattcaacctgacacaatcatccaggtctggagagaagatattcccgtgaactacatgaaggagctggagctagtgacaaaggcgggattcagagctctgctttcagcaccttggtacctaaacaggatcagttacggtcctgactggaaagatttttacatcgtggagccactcgctttcgagggtacacctgaacagaaggcattggtgatcgggggcgaagcctgcatgtggggggaatatgttgacaatactaacttagtaccacggctctggcctcgagcgggagccgtggccgaacgtctctggtcaaataaactaaccagtgatctcacgttcgcatacgaaaggttatctcatttcagatgcgagttgctgagaagaggtgttcaggcacagcctctaaacgtgggtttctgtgaacaggagtttgagcagacctag

SEQ ID NO: 190620 - DNA, 906 bp, synthetic construct
  misc_feature 1..906: note = Description of Artificial Sequence: Synthetic coding sequence
  source 1..906: mol_type = other DNA
atgatgaccagcgtgtacagcagcctgcggctgagcggcgagctgtccgaggatgtgatggcctataataagttgaacgtttttcactggcacctggttgatgacccaagcttcccctacgagtctttcaccttccctgaactaatgagaaagggcagttataatccagtcactcatatctatactgcacaggacgtgaaggaggtcattgaatacgccagattgcgcggaataagagttctggcagagttcgacacaccgggtcatacactgtcctggggccccggaatcccagggctgcttactccgtgttatagcggatctgaaccttccggcacctttggcccagtcaatccaagtttgaacaatacatacgaatttatgagcacctttttcctggaggtttcttcagtgttccctgacttctacctgcatctgggcggagatgaggtcgacttcacatgttggaagtccaatccagaaattcaggacttcatgagaaagaagggattcggcgaagacttcaaacaactggagagtttttatattcagactctgctggatattgtgagttcctatggcaaggggtacgtggtgtggcaggaggtattcgacaacaaggtgaaaatccagcccgacaccatcattcaggtttggcgggaggatattcctgtgaactatatgaaggagctggagctcgttactaaggcaggattccgagcgcttctgtcagcgccctggtatctgaataggatctcttatgggccagactggaaagacttctacatcgtggagcctctggccttcgaagggacaccagaacaaaaggcacttgtgattggaggtgaagcttgcatgtggggcgagtatgttgataatactaacctcgtgcctcgtctttggtag

SEQ ID NO: 190621 - DNA, 507 bp, synthetic construct
  misc_feature 1..507: note = Description of Artificial Sequence: Synthetic coding sequence
  source 1..507: mol_type = other DNA
atggcctacaacaagctgaacgtgttccactggcacctggtggacgaccccagctttccttacgaatcttttacttttcccgagctgatgagaaaaggctcctacaatccagtgacgcacatttatacggcgcaagacgtcaaggaggtaatcgaatatgcacgcctgcgaggcatacgcgtgcttgccgagtttgacactcccgggcacactctgtcatgggggcccggcatcccgggcctcctgacaccatgctatagcgggagcgagccctcggggactttcggccctgtgaacccgtccctgaataatacttacgagtttatgtcgacattcttccttgaggtttctagcgtattccccgatttctatctgcacctcggcggcgatgaggtagactttacgtgctggaaaagcaatcccgaaattcaggactttatgaggaagaagggcttcggcgaagattttaagcaactggaatccttctacatccaaacttacccctag

SEQ ID NO: 190622 - DNA, 1671 bp, synthetic construct
  misc_feature 1..1671: note = Description of Artificial Sequence: Synthetic coding sequence
  source 1..1671: mol_type = other DNA
atggagctgtgcggcctgggcctgccccggccccccatgctgctggcattactgctggctacactgcttgccgcaatgctcgccctgttgactcaagtcgccctggtggtccaggtcgctgaggctgcgcgtgctccctctgttagcgccaagcctggccccgcgctttggccgctgcctctactcgtgaagatgaccccaaacctcttgcatctggccccggaaaatttttacatcagccactcccccaactctacagctggaccaagttgtaccctgctggaagaggctttcaggaggtatcatgggtacatattcggattttataagtggcatcacgaaccagctgagtttcaggctaaaacccaagtgcaacaactgcttgtatccatcacattacaaagcgagtgcgatgctttccctaacattagttcagacgagtcttatacactccttgtgaaggaacctgttgcagtactgaaagccaaccgggtttggggcgcattgcgcggcctggagacattctctcagcttgtctaccaagacagctacggaacctttaccattaacgagtctacaatcatagactctcctaggtttagccatcgagggattcttattgatacaagcagacactacctgccagtaaaaataattctcaaaacattggatgctatggctttcaacaagtttaatgtactgcactggcatattgtcgacgaccaatccttcccttaccagtctatcaccttccccgagctatctaataaaggctcttattcactcagccacgtctatacccctaatgatgttagaatggtgattgaatacgctcgcctgagaggcatccgcgtactccccgagttcgataccccaggccataccctcagctggggcaaaggccagaaagacttactgactccatgttacagccggcagaacaaactggactcatttggcccaatcaatcccacgcttaacacgacctactcatttctgacaacattctttaaagaaatctctgaagtgtttcccgaccaattcatccacctgggcggggatgaggtcgagttcaagtgttgggagtccaatcccaagattcaggactttatgcggcaaaaagggttcgggacagatttcaaaaagctagaatcattttacatccagaaagtcctcgatatcattgcaactattaataaggggagcatcgtgtggcaagaagtctttgacgacaaggcaaaattagctcctggtaccatcgttgaggtctggaaagactcagcatatcccgaggaacttagccgcgtaacggccagcgggttccccgttattttgagcgctccatggtatctcgacctaatctcttacggtcaggattggagaaagtactacaaggtcgaacctttagatttcggaggcacacaaaaacagaaacagctgttcatcggcggagaggcctgtctctggggggagtatgtggacgctacgaatctgacgcctagactgtggcccagggcgtccgcggtcggcgagcggctatggtcctcgaaggatgttcgagatatggatgacgcttatgaccgactgacccgccataggtgtaggatggtggagcgggggattgctgcgcagccactttatgcaggatactgtaatcacgaaaatatgtag

SEQ ID NO: 190623 - DNA, 996 bp, synthetic construct
  misc_feature 1..996: note = Description of Artificial Sequence: Synthetic coding sequence
  source 1..996: mol_type = other DNA
atggccttcaacaagttcaacgtgctgcactggcacatcgtggacgaccagtctttcccataccagagcattacattccccgagctatcgaacaaggggtcttactccctgtcgcacgtatatacacctaacgatgtcagaatggtcatcgagtatgcacgcttgaggggcatcagagtgctgcctgaattcgatacacctggccatacactgagttggggtaagggacagaaggaccttctgactccttgctactcccgtcagaacaaactagatagttttgggcccatcaatcctacactgaatacaacttacagttttctgaccactttcttcaaagaaatctctgaagtgtttccagatcaatttattcacctcggcggagatgaagtggagtttaagtgctgggagagcaatccaaagattcaggacttcatgaggcagaaaggctttggcacggactttaagaaattggagtcattttacatacagaaggttctcgacatcatcgccacgattaacaagggaagtatcgtctggcaagaggtttttgacgataaggccaaactggcacccgggacaatcgtggaagtgtggaaagacagcgcgtatcccgaggagctctcacgggtcacggcctcaggcttccccgtgatactgtccgcaccgtggtatctcgacctgatatcctacggtcaagactggaggaaatactacaaggtagagccgctggacttcgggggcacacagaaacaaaagcagctgttcatcgggggggaggcttgcctgtggggcgagtacgtagatgcgacaaatttaacaccccggttgtggcctagggcgtctgcagtgggggagaggctctggtcttcaaaggatgtgagggacatggacgacgcgtatgacaggcttaccaggcaccgatgtcggatggtcgaacgaggaatagccgcacagcccctctacgccggatactgtaaccatgaaaacatgtag

SEQ ID NO: 190624 - DNA, 2376 bp, synthetic construct
  misc_feature 1..2376: note = Description of Artificial Sequence: Synthetic coding sequence
  source 1..2376: mol_type = other DNA
atgtggaacatgctgatcgtggccatgtgcctggccctgctgggctgcctgcaggctcaggagcttcagggacacgtttccattatcctgctgggtgcgaccggtgatcttgcaaaaaaatatctgtggcagggcctcttccaactgtaccttgatgaggcaggaagaggacattcgttttccttccatggtgccgctctgacggctcctaagcagggacaggagttgatggctaaagccctagaatctctgtcctgccccaaggacatggcaccatctcactgcgccgagcacaaagatcagttcctgcagcttagccagtatcgtcagttgaagaccgccgaggactaccaagccctcaacaaagatatcgaagctcaactccaacacgccggcttgcgggaagctggccggattttttatttctccgttcctccatttgcctacgaggatattgctagaaacattaactcctcgtgccgacctggcccaggagcctggctgagagtggtcctggagaagccctttggacacgatcacttctccgcgcagcagctagcgactgagctgggcaccttttttcaggaggaggagatgtaccgcgttgatcattacttggggaaacaagccgtcgctcagattctaccctttcgcgatcagaatcgtaaagccctggatggtctctggaataggcaccatgtagaaagagtggaaatcatcatgaaagaaactgtagatgcggaaggaaggacgtccttttatgaagaatacggagtcatacgcgacgttctgcagaaccaccttactgaggtgctgacgttggtggctatggaactgccgcataacgtgagttccgctgaagctgtgctccgccacaaacttcaggtctttcaggctttgagaggtctgcagcgcggaagcgccgtggtgggacagtatcagtcttactccgaacaagttcgtcgggagctccagaagcctgattccttccactccctcacgccgacatttgcagctgtgttagtccatattgacaacctgcgatgggagggcgtacccttcattctgatgtctggaaaggccctcgacgagcgcgtcggctatgctagaatactttttaaaaaccaggcatgctgcgtacagtccgagaagcattgggcggctgcccagtctcaatgcttaccacgtcaattggtcttccatattgggcacggcgacctgggcagtcctgcggtcctggtttcccgtaatctctttcggccctctctgccttcgtcgtggaaggagatggagggacccccgggcctacgcctatttggctcacccctctctgattattacgcctactcacccgtgagagagcgggacgcgcacagcgtgctgctgtctcatatcttccacggcagaaagaactttttcattactacggagaatctcctggcaagttggaatttctggacacccctactggagagcctggcccataaagcgccgcggctctacccgggaggcgccgagaatggccggctattagactttgagttttcaagtgggcgtctctttttctcccagcagcagcctgagcagctggtgccgggtccgggccccgccccgatgccctccgattttcaggtgttgagagcaaaatatcgagaatcaccattagtgtccgcatggtctgaagagctgatttccaagttggccaacgacattgaagcaacggctgtccgagctgtcaggcggtttgggcaatttcatctcgctctatccggtgggagtagtcccgtggcactctttcaacagctagcaacagcgcactatggattcccgtgggcgcacacccatttgtggctggtcgatgagagatgcgtgcccctgtccgaccccgaaagtaactttcagggactgcaagcccatcttttgcagcatgtgagaattccttattataacatccaccccatgcctgtccacttgcagcagcgtctgtgcgccgaggaggaccagggcgcccagatctacgctcgggaaatttccgccctggttgcgaactcctccttcgatctggttctgcttggaatgggcgcagatggacatacagcctcactttttcctcaaagcccaaccgggctagacggggagcagttggtggtcttgacgacttcgccttcgcagcctcatcgccgaatgtctctctccctacctctaattaacagagcaaaaaaagtcgccgtactagtgatgggtcggatgaaacgggagatcaccaccttagtgagtagagtgggccacgaaccaaagaagtggccaatctccggcgtactgccacattctggccaattggtttggtatatggattatgatgccttcttaggatag

SEQ ID NO: 190625 - DNA, 1968 bp, synthetic construct
  misc_feature 1..1968: note = Description of Artificial Sequence: Synthetic coding sequence
  source 1..1968: mol_type = other DNA
atgggccggtgggcctgggtgcccagcccctggcccccccccggcctaggccctttcttactattattactattgcttctgcttctgccccggggattccagccccagcctgggggaaatagaacagaaagccccgaacctaacgccacagcaacgcccgccattccaacaatccttgtcacgagcgtgacatcggagactccagccacatccgctcctgaggccgaggggcctcagagtggtggattgcccccccctccgcgagctgtgccaagctcaagctcccctcaggcacaggcactcaccgaagacgggaggccctgccgattccccttccgatacgggggcagaatgctgcatgcttgtacttccgaagggagcgcacaccgcaagtggtgtgccactactcataattacgatagagatcgggcatggggatactgcgtggaagctactccacctcccggtgggccggccgcactggatccctgtgcttccgggccttgtctcaacggcgggagctgcagtaacacgcaggaccctcagtcgtatcactgctcgtgcccgcgagcattcactggtaaggactgcggaaccgagaaatgctttgacgagaccaggtacgagtatctggagggcggcgaccgttgggccagagtcaggcagggacatgtggaacagtgcgaatgtttcggagggcgcacgtggtgcgaaggtaccaggcacacagcctgcctatcttcaccctgcttgaatggcggtacttgtcatctcattgtggccactggcacgacggtctgcgcatgtcctcccggattcgccggcaggctgtgtaacatagaacccgacgaacgttgttttctcgggaacggtacgggctaccggggcgtcgccagcacttcagcctcagggctatcttgcctggcctggaactctgacctgttgtaccaggagctgcatgttgacagcgtaggcgccgctgccttattgggactggggccacacgcatactgtcgcaatccagacaacgacgagcgtccatggtgctatgttgtgaaagacagcgcactttcatgggagtattgtcggctggaagcctgtgagagcctcactcgagtccagttgtccccggatctgctggccacactgccagaaccagccagcccaggccgccaggcctgtggccgtcggcacaaaaagcgtacatttctacgacctaggatcatcggcggctcctcctcattgccaggcagccatccttggctcgcagcaatttacataggggactctttctgcgcaggcagcctggtccacacctgctgggtggtgtcagccgctcattgtttttctcattccccacctcgcgatagtgtatccgtagtccttggacagcattttttcaaccggaccacagatgtaactcaaactttcgggatagagaagtatatcccctatacattatactccgtctttaatcccagcgaccacgacttggttttgatcaggctgaagaagaagggtgataggtgtgcaaccagatctcaatttgtgcagcctatttgtctccctgaacccggcagtaccttccccgccgggcataaatgtcagatagctggatggggccatttagatgagaacgtgtctggatattcttcttccctgagggaggcccttgtcccacttgttgctgaccacaaatgctcgtcccctgaagtgtatggcgccgacatctcccctaacatgctgtgtgcgggatatttcgattgtaaaagtgacgcctgtcagggcgattcgggcggtccattagcgtgtgagaaaaacggcgtggcctacctatatggcatcatcagttggggagatggatgcggacgacttcataagcctggtgtttacacccgggtcgccaactatgtggattggatcaacgatagaattcgacctcctagacgtctggtcgcccccagttag

SEQ ID NO: 190626 - DNA, 3807 bp, synthetic construct
  misc_feature 1..3807: note = Description of Artificial Sequence: Synthetic coding sequence
  source 1..3807: mol_type = other DNA
atgagcagcgtggccgtgctgacccaggagagcttcgccgagcaccggagtggtctggtgccccaacagataaaggtggccactctgaattctgaggaagagagcgacccccccacatacaaggatgccttccccccactgcctgagaaggcagcctgcttagagtcagcacaggaaccctctggggcttggggaaataaaatccgcccaatcaaggccagcgtgataacacaggtatttcacgtccctctcgaggaaaggaagtacaaagatatgaaccaatttggcgaaggcgaacaggccaaaatttgtctggagattatgcagagaactggcgcccacctggagctctctttggccaaggaccagggcttgagtatcatggtctccgggaaactggacgccgtcatgaaggcccgcaaggatatcgttgctaggctgcagactcaagcctccgccactgtggctatcccaaaggagcatcataggttcgtgatcggaaaaaatggcgagaaactgcaagacttggaactgaaaaccgccacgaaaattcagatcccccggcccgacgaccctagtaaccagatcaagatcactggcaccaaagaaggcatagaaaaagctcggcatgaagtgttactgatctctgccgaacaggacaagcgggccgtggagcgcttggaggtggagaaggcttttcacccgttcatagccggtccttataatagactcgtcggggaaatcatgcaggagaccgggacaagaatcaacattcctcctccctccgtgaaccgcaccgagattgtctttacaggtgagaaggaacaattagcacaagcagtcgccagaataaagaaaatttatgaagaaaagaagaagaagacaaccaccattgcagtagaggtgaaaaagtcacaacacaaatatgtcatcggaccgaaggggaatagcctccaagagattcttgagcgaacgggggtcagcgtcgaaatcccaccgtccgacagtatctccgagacagtgatcctgaggggggagccagagaagcttgggcaggccctgaccgaggtctacgcaaaggccaacagcttcactgtgtcatcagtggccgcacctagttggcttcacaggttcatcatcggcaagaagggtcagaacctggccaaaatcacccagcaaatgcctaaggtgcatatcgaattcacagagggggaggacaaaattactctggaaggtcctacagaggatgtgaacgtggcccaggagcagattgaggggatggtgaaagatctgatcaacaggatggactacgtggagattaacattgaccacaaatttcatcgccatctgataggtaaatctggtgccaacataaaccgcattaaagaccaatacaaggtttccgttaggattcctcctgatagcgaaaagagcaacctgatcaggattgagggagatcctcagggagtccagcaggcaaagcgagagctgttggagctggcctcaagaatggagaatgagcgtactaaggatctcattattgaacagagatttcacagaactattattggccagaagggggagagaattcgtgaaattcgggataaatttcctgaggttataatcaacttccccgatcctgcacagaagtcagatatcgttcaacttcgtgggcctaaaaatgaagtggaaaagtgtactaagtacatgcagaagatggtcgccgacctggtggaaaatagttatagcattagcgtgcccatttttaagcagtttcacaagaacattatcgggaaggggggggcgaatattaaaaaaatccgtgaagaaagcaatacgaaaattgacctgcccgccgaaaacagcaactctgaaaccataatcataacaggaaaacgggctaattgcgaggcagccaggagcaggattctttcaatccagaaagatctggcgaacattgcagaggtcgaggtgtcaatccccgccaaacttcataatagcctaattggaacgaagggtcgattgatccggtccattatggaagagtgtgggggtgtccacatacattttcctgtcgagggatccggaagtgatactgtggttattagggggcctagcagtgatgtcgagaaggctaagaagcagctacttcatttggctgaggaaaaacagaccaaatcttttaccgtcgacatccgggccaagccagaataccacaagttcctgatcggcaaaggcgggggcaagatcaggaaagtccgagacagtacgggcgcacgagtcatcttcccggccgcagaagataaagaccaggatcttatcaccataatcggcaaggaggatgctgtcagagaggcacaaaaagaattagaagccctgatccagaatctggataatgtggtcgaggacagtatgctcgttgacccaaaacatcacagacacttcgtcattcgtaggggccaggtcctgcgtgaaattgccgaagagtatggcggtgttatggttagcttccctaggagtggcacacagagtgataaagtcactttaaagggtgcaaaggattgtgtagaggccgctaagaaaaggattcaagagatcatagaagatctcgaagcacaagtgacgcttgaatgcgccattccccagaaatttcaccgttctgtaatggggcctaaaggatcaagaatccagcagataactagggactttagcgtgcagatcaagtttcctgacagggaggagaacgctgtacattctactgaaccagtcgtccaggaaaacggcgacgaagccggagaaggaagggaggccaaggattgcgacccgggttcccctcggcgctgcgacattatcattatatcaggccgcaaagagaaatgtgaggccgctaaggaggcgctggaggcactagtgcccgttaccattgaagtcgaagtccctttcgacttgcaccgctacgtgattggtcagaagggatccgggatacgcaagatgatggacgaatttgaggtgaacatacacgtgccggccccagaactacaaagcgatataatcgcgatcactggactggctgctaatctggaccgggcaaaggccggtctcttagagcgcgtgaaggagctgcaggcagaacaggaagaccgcgcactgcggtctttcaagctgagtgtgactgtagatcccaagtatcatcccaagatcattggacggaagggggctgtgatcacccaaatacggctcgaacacgacgttaacatccagttcccagacaaagacgatgggaaccaaccccaggatcaaattaccataacaggctacgaaaagaataccgaggctgcgagggatgcaattctccggatcgtgggggagctggaacagatggtgtccgaggacgtccccttggaccacagagtccacgcccgcattatcggagcgcggggtaaggccataagaaagatcatggacgaattcaaggtagacattcggtttccacagagcggtgccccggatcctaattgcgtcaccgtgacgggcctgccagaaaacgttgaagaagccatagaccacatcctgaacctcgaggaggaatacctcgcagatgtggtggattcggaggctctacaggtctacatgaaaccacctgcccacgaagaggcgaaagccccctcccgggggttcgtggttcgtgatgctccttggacagccagttctagcgaaaaagctccagacatgagctcctccgaggagtttccttcgttcggcgcccaagtggcaccaaaaaccctgccgtggggcccgaagcggtag

SEQ ID NO: 190627 - DNA, 3807 bp, synthetic construct
  misc_feature 1..3807: note = Description of Artificial Sequence: Synthetic coding sequence
  source 1..3807: mol_type = other DNA
atgagcagcgtggccgtgctgacccaggagagcttcgccgagcaccgctccgggttggtgcctcagcagatcaaagtggctaccttgaattcagaagaggagagcgatcccccaacctataaggacgctttcccacctctgccagaaaaggcagcctgcctcgagtcagctcaggaaccatcaggcgcttggggtaataagattcgccctatcaaggcctctgtgataacacaagtgtttcatgtccccctggaagagcgcaaatataaggacatgaatcaattcggtgaaggagaacaagcgaaaatttgcttagagatcatgcagcggaccggagcccaccttgaactgtctctggctaaggaccaggggctgtctatcatggtgtcgggcaagctggatgctgtcatgaaggcccgcaaggatattgtggccaggctgcagacccaggcttctgctactgttgcaatcccaaaggagcatcaccgtttcgtgatcggtaagaatggcgagaaactccaagacctggagctcaagaccgccactaaaatccagatccccaggcctgatgatcccagcaatcagatcaagattactggtacaaaggaaggcatcgagaaggcgagacacgaagtcctcttaatctcggccgagcaggacaaacgcgccgtcgaacgattggaggtggaaaaggcgtttcacccctttatcgccggaccgtataaccgcctcgtgggagaaataatgcaggaaacaggcactcggatcaatattcctccaccatccgttaaccgaacagagattgtgtttaccggagaaaaagaacaactagcacaagccgtcgcgcggataaagaaaatttacgaagaaaaaaagaagaaaacgacaaccatcgccgtcgaagtgaagaaatcacaacataagtacgtaatcgggcccaaaggcaatagtctacaggaaatcttggagagaaccggtgtatccgtagaaattcctcctagcgactctatcagtgaaaccgtgattcttagaggggagccagagaagctggggcaggccctgacagaggtgtatgctaaagccaactcttttacagtcagttctgtggctgcccctagctggttgcacagattcatcatcggaaaaaagggacagaatctggccaaaatcacacagcagatgcccaaggtccacattgagtttacagagggggaggacaagattacgctggaaggccctacagaagatgtcaatgtcgcccaagaacaaattgagggcatggtaaaggatctgatcaataggatggattacgtcgaaattaatatcgatcataaatttcaccggcacttgattggcaaatctggagccaacatcaatcggattaaggatcagtataaagtaagcgtgcgcatccctccagattctgaaaagagtaacctgattcggatagaaggcgacccgcagggggtacagcaagccaagagggagctgctggagctggcttcacgcatggaaaatgagagaacaaaagaccttattattgagcagagattccataggactattattggccagaaaggcgagaggatccgcgagatacgcgataagttccccgaggtgatcatcaatttcccagatcctgcccagaagagcgatattgttcagctccgcgggccaaagaacgaagtggagaaatgcactaagtacatgcaaaagatggtggctgaccttgtggagaatagctatagcatcagtgtccctatcttcaaacagtttcataaaaacataattggtaaaggcggcgctaatattaagaagattcgggaggagagcaacaccaagattgatctgcccgctgaaaactctaactctgaaactattatcataactggcaagcgtgcaaactgtgaggccgcaagatctcgtatcctgtctattcaaaaagacttggctaatatcgcggaagtggaagtgagcatcccagccaagcttcacaacagcctcatcggaaccaagggcagactcatccggagcatcatggaggaatgcggaggggttcatattcatttcccagtggaaggtagtggctctgatacagtcgtgattagagggccatcctccgatgttgagaaggcgaagaaacaattgctgcatctggccgaagagaaacagactaaatctttcacggtggacattcgcgccaagcctgaatatcacaaatttctgatcgggaaaggtggggggaaaattcgcaaggtgagggactctactggtgccagagtgatctttcccgccgccgaagataaagaccaggatcttattacgattatcgggaaggaggatgccgtgcgggaagcgcagaaagaattggaggccctgatccagaatctggataatgttgtagaagatagcatgctcgtggatcctaaacaccatagacactttgtaatccgcagggggcaggttttaagagaaattgcagaagaatacggcggagtcatggtgtcctttccacgtagtggaacacaatccgataaggtgaccctcaagggggcaaaggactgcgtagaggccgctaagaaaaggatccaggagatcatcgaggatttggaggctcaggtgactctggaatgcgctattccccagaagttccatagatctgtcatgggtccaaagggatcgcgaatccaacagatcacccgcgatttttcggtacagatcaaatttcccgacagagaagagaatgccgtgcattcaaccgagcccgtagtgcaagagaatggggacgaagccggcgagggccgtgaagcaaaggactgtgatcctggatctccacgcagatgcgatattattatcatctctgggcgcaaggagaaatgtgaggccgctaaggaagcgctggaagctctcgttccagtcaccatcgaggtagaggtgcccttcgatcttcatcggtatgtgattggccagaagggttctggtatcaggaaaatgatggacgaatttgaagtaaatatccatgtgcctgcccctgaactgcaatccgatatcatcgccattacagggctggcggccaacctggacagagccaaggccggactgttggagagagtaaaggagttgcaggccgaacaagaggatagagccctaaggtcattcaagctctctgtgaccgtggacccaaaatatcatcccaaaattatcggcaggaagggagccgtgataactcagattaggttggagcatgacgtcaacatacaattcccggacaaggacgacggcaatcagcctcaggatcagataacgattacaggatatgaaaagaacacagaagccgcacgcgatgccatcctcaggatagtcggcgagttggaacagatggtctcagaggatgtcccgctcgaccatcgtgttcacgccagaattatcggtgcccgaggcaaagcaatccgcaagataatggacgaatttaaagtggatataagatttcctcagtccggcgctcctgaccctaactgcgtcacggttaccgggctgcctgaaaacgtggaagaagcgatcgaccacattctgaatttagaggaggaatatctggctgacgtggttgattctgaggccctgcaggtatacatgaagcccccagcccatgaagaggcaaaagccccatcaagaggatttgttgtgcgcgatgccccttggacagcatccagctctgagaaggcacccgatatgagcagcagcgaagagtttccctcgttcggcgcccaggtggctccaaaaaccctcccatggggccctaaaaggtag

SEQ ID NO: 190628 - DNA, 3807 bp, synthetic construct
  misc_feature 1..3807: note = Description of Artificial Sequence: Synthetic coding sequence
  source 1..3807: mol_type = other DNA
atgagcagcgtggccgtgctgacccaggagagcttcgccgagcaccgaagcggactggttccccagcagatcaaggtagccacattgaactccgaggaggaaagtgacccccctacatataaagatgccttccccccattacccgaaaaggctgcctgtctggagtccgctcaggagccgtcaggcgcctggggtaataagatcagacccatcaaagccagtgtcatcacccaagtcttccacgtgccgcttgaggaacgcaagtacaaagatatgaatcagtttggcgagggcgaacaggccaaaatctgcttggagattatgcagaggactggtgcccacctggaactgtctcttgctaaagaccaaggcttatcaattatggtgagcgggaagctggacgcggtgatgaaagcacggaaggatatcgtggcacgactgcagacccaagctagcgctactgtcgcgatcccaaaggagcatcataggttcgtgatagggaagaacggagagaagctgcaggatttagagttaaagaccgcaaccaaaattcagattccccgacctgacgatcccagcaaccagataaaaataacaggcactaaagagggcatcgagaaggcgcgccatgaggtcttgttaattagtgccgagcaggataaaagggctgtggagagactggaggtcgagaaggctttccatcccttcattgcaggtccttacaaccgcctggttggagaaattatgcaggagactggtacccgaataaatatcccacctccctctgtcaataggacagagatagtttttactggagagaaagaacagctggcccaagccgtggctcgaatcaaaaaaatctatgaagaaaagaagaaaaagactactactattgctgtggaagtgaagaagtcccagcacaaatacgtaatcgggccaaagggcaacagtctgcaggagatcctggagagaaccggtgtgtccgtggaaatccccccttccgacagcatcagtgagaccgtgatcctgaggggcgagccagaaaagctgggccaggcccttactgaggtctacgcaaaggcaaactccttcactgtgagtagcgtggctgccccctcctggttgcacagattcatcataggcaagaagggacagaatctggcgaaaataacgcagcagatgcctaaagtccacatagaattcaccgagggtgaggataagattactcttgaaggccctacagaagatgttaacgtggcccaggagcagattgagggcatggtgaaggaccttattaaccgaatggactatgtggagatcaacattgatcacaagtttcaccgtcatttgattgggaagagcggagctaacattaatcgcataaaggatcagtacaaggtgtcagtgcgcataccacccgactctgagaagtcaaatttaatcaggatagagggcgatcctcagggcgtgcagcaagctaagagagagctccttgagctcgctagcaggatggagaatgagagaacaaaagacctcatcatcgagcaaagattccatcgtacaatcattggccagaaaggggagaggataagagagattcgggacaagttccccgaagtcattattaattttcctgacccagctcagaaatccgacattgtccagctgcggggccctaagaacgaggtggaaaagtgcactaaatatatgcagaagatggttgccgacctggttgagaacagctattctataagcgtgccaatcttcaagcaatttcacaaaaacattatcggaaaggggggtgccaatataaagaaaatcagagaagaaagcaacactaagatagacctaccagcagaaaacagcaacagtgaaactattatcattaccggtaagagagcgaactgtgaggctgctaggagtcggattctaagtatccaaaaggaccttgccaatatcgccgaggtggaggtgagcatacccgccaagcttcacaacagtctgatcgggactaaaggccgactgattcggagtatcatggaggaatgcggcggtgtgcacattcattttcccgtggagggaagcggctccgataccgtagtcatcaggggcccaagctcagacgtcgaaaaggctaagaagcaactcctgcatctcgccgaagagaagcagaccaaaagcttcaccgtggatataagagcgaaacccgagtaccacaaatttctgataggaaaaggtgggggcaagatcagaaaagtgagagactccactggggcaagagtgatttttccagccgctgaggataaggatcaggacctgataaccatcattgggaaggaagatgccgtgagagaggcacagaaggagctggaggcgctgatccagaatctggacaacgtcgtagaggactccatgttagttgatcctaagcaccacagacacttcgtgattaggcgtgggcaggtactcagagaaattgctgaggagtacggcggcgtcatggtatcctttccaagatccggtactcagagtgacaaggttaccctgaaaggagccaaagattgcgtagaggccgcaaaaaagcggatccaagagatcatagaggacctggaggcccaagttaccctggagtgcgctattccacagaaatttcaccggtccgtcatgggacccaaaggctctaggatccagcagattactcgcgacttcagcgtgcaaatcaaatttccggatcgagaggagaatgccgttcattcaaccgagcccgtggtgcaagaaaatggcgacgaagccggtgagggacgcgaagccaaggattgcgacccaggctccccccggcgctgtgatatcattatcatcagtggccggaaagaaaaatgcgaggctgccaaagaagccctcgaagcactggtacccgtcacgatcgaggtcgaggtgccatttgatctccacaggtatgtcattggccagaaaggaagtggcattcgcaaaatgatggacgagtttgaggtcaatattcacgtgcctgccccagagctgcagagtgatatcatcgctatcactgggctggctgccaatctggacagggctaaggcgggtttactcgagcgtgtgaaagaattacaggccgagcaggaggatagggctctcaggtccttcaaactcagcgtaacagtggacccaaagtaccatcccaaaatcattggtagaaagggcgcagtgattactcagatccgccttgaacacgacgtgaatatccaattcccagacaaggatgatgggaaccaacctcaagaccagatcactataaccggttacgagaagaataccgaggcggcaagggatgctatccttcggatcgttggggaactggagcagatggttagcgaagacgtccccctcgaccatagggtccatgcacgtataattggtgctagaggaaaagcaatccgcaagataatggatgagtttaaagtggacatccgctttccccagagcggggcccccgatccgaactgcgtgaccgtcaccggactgcccgagaatgtggaagaggctatcgatcatattctcaaccttgaggaagagtacctcgctgacgtggtggacagcgaggccctacaggtgtacatgaagccacctgcacacgaagaagccaaggcgccctccagaggcttcgtcgtgagggacgccccttggaccgcctcgtcctctgagaaggcacctgatatgtcgtcctccgaagagttcccttcttttggggctcaggtggcaccaaagactttgccttggggccctaagagatag

SEQ ID NO: 190629 - DNA, 249 bp, synthetic construct
  misc_feature 1..249: note = Description of Artificial Sequence: Synthetic coding sequence
  source 1..249: mol_type = other DNA
atgagcagcgtggccgtgctgacccaggagagcttcgccgagcaccggtcaggcctagtgccccagcaaataaaagtggccacactgaacagcgaagaagagtccgatccgcctacctacaaggacgcgttcccaccattaccagagaaggccgcatgtttggaatccgcccaggagcctagtggagcttgggggaataagatccgaccaatcaaagcttccgtgatcacccaggtttttcacgtgtag

SEQ ID NO: 190630 - DNA, 45 bp, synthetic construct; identical to SEQ ID NO: 84436
  misc_feature 1..45: note = Description of Artificial Sequence: Synthetic coding sequence
  source 1..45: mol_type = other DNA

SEQ ID NO: 190631 - DNA, 210 bp, synthetic construct
  misc_feature 1..210: note = Description of Artificial Sequence: Synthetic coding sequence
  source 1..210: mol_type = other DNA
atgagcagcgtggccgtgctgacccaggagagcttcgccgagcaccgcagcggcctagtcccccagcaaatcaaggtcgctacactcaattctgaagaggagtctgacccacctacctataaggacgcattcccccctttgccagaaaaagccgcttgtctggagtccgcccaggaacctagtggggcatggggtaacaagattcgttag

SEQ ID NO: 190632 - DNA, 165 bp, synthetic construct
  misc_feature 1..165: note = Description of Artificial Sequence: Synthetic coding sequence
  source 1..165: mol_type = other DNA
atgagcagcgtggccgtgctgacccaggagagcttcgccgagcaccgaagtggcctggttccacagcagatcaaagtggctactcttaacagtgaagaggagtccgaccccccaacatacaaggatgcctttccaccccttccagagaaggcagcttgcctatag

SEQ ID NO: 190633 - DNA, 675 bp, synthetic construct
  misc_feature 1..675: note = Description of Artificial Sequence: Synthetic coding sequence
  source 1..675: mol_type = other DNA
atgagcagcgtggccgtgctgacccaggagagcttcgccgagcacagatccggcctggttccccaacagataaaggtggccacgttaaacagtgaggaagaaagtgacccccctacctacaaggatgcctttccacccttaccagagaaagcggcttgcctggaaagtgcccaggaaccaagcggggcctggggaaacaagattaggcctatcaaagcctcggtgatcacccaggtgttccacgtacctctagaggagcggaagtacaaggacatgaatcaatttggagaaggagagcaggccaagatctgcctggagataatgcaacggacaggcgcacatctagaactgagtttggcaaaagatcagggtctgagtataatggtgagcggcaaactggatgctgtcatgaaggcccgcaaagacatcgtcgcccggttgcagacacaggcgagcgccaccgtcgccatccccaaggaacaccataggtttgtcatcggaaagaatggcgagaagctgcaggacttagaactgaaaacagcaacaaagattcagataccccgcccagacgacccgagcaatcagattaagattacagggactaaggaaggtatagaaaaagctcggcatgaggtcctgctaatatcagcagaacaggataaaagagcagtgtag

SEQ ID NO: 190634 - DNA, 246 bp, synthetic construct
  misc_feature 1..246: note = Description of Artificial Sequence: Synthetic coding sequence
  source 1..246: mol_type = other DNA
atgagcagcgtggccgtgctgacccaggagagcttcgccgagcaccgcagtgggcttgtcccgcaacaaatcaaggtggccactctgaattcagaggaggagagcgacccgcccacatacaaggatgcgttccctccactgcctgagaaggccgcctgcctcgagtccgcccaggagccaagtggggcatgggggaacaaaatacggcccattaaggcgagcgtcattacccaggtctttcactag

SEQ ID NO: 190635 - DNA, 240 bp, synthetic construct
  misc_feature 1..240: note = Description of Artificial Sequence: Synthetic coding sequence
  source 1..240: mol_type = other DNA
atgagcagcgtggccgtgctgacccaggagagcttcgccgagcacagatctggactcgtgcctcagcagatcaaggtggcgaccctaaactcagaggaggaatcagatcccccgacctacaaagacgccttcccgcctctgcctgagaaggcagcctgtctggagtcagctcaggagccctctggcgcatgggggaataagattcgaccgatcaaggcctctgtgatcacgcaggtctag

SEQ ID NO: 190636 - DNA, 291 bp, synthetic construct
  misc_feature 1..291: note = Description of Artificial Sequence: Synthetic coding sequence
  source 1..291: mol_type = other DNA
atgagcagcgtggccgtgctgacccaggagagcttcgccgagcaccgatctggcctggttccccaacagatcaaagttgccactctgaacagcgaagaggagtcggatccccctacctataaggacgcctttccccccctccccgagaaagcggcctgtctggaaagcgcccaggaacctagcggggcatggggtaacaagatccgaccaattaaggcatccgtcatcactcaggtcttccacgttcctcttgaagagcgaaaatacaaggatatgaatcaatttgggtag

SEQ ID NO: 190637 - DNA, 60 bp, synthetic construct
  misc_feature 1..60: note = Description of Artificial Sequence: Synthetic coding sequence
  source 1..60: mol_type = other DNA
atgagcagcgtggccgtgctgacccaggagagcttcgccgagcacagaagtggcctatag

SEQ ID NO: 190638 - DNA, 3708 bp, synthetic construct
  misc_feature 1..3708: note = Description of Artificial Sequence: Synthetic coding sequence
  source 1..3708: mol_type = other DNA
atgcacctggccgagcgggaccggtggctgttcgtggccaccgtgatgatgcattttgtctctatcaaatccggtttccccggactttgtgtcggcgtccgctcgaccatgagcagcgttgccgtactgactcaagaatcttttgccgagcatagatcgggtctggtccctcagcagatcaaggttgccacattgaattcggaagaggagtctgacccacctacctacaaagatgcgttccccccgctgccagagaaggcagcttgtctagaaagtgcgcaggagccaagcggggcctggggaaataagattagaccaataaaggccagcgttattacacaggtgtttcatgtgcctctcgaggagagaaagtacaaagacatgaaccagtttggcgagggcgagcaggctaagatatgtctcgaaatcatgcagcgcacgggtgcacacctggagctctccttggctaaagaccagggcctgagcattatggtgagcggaaagctggacgccgtcatgaaagccagaaaggatatagtcgctagactgcagacccaggcttccgccacagtcgccatccccaaagagcaccataggttcgttataggtaaaaacggcgaaaagctacaggatctggaactgaaaacggcaactaaaatccagatcccacgacctgacgatccctcaaaccagataaaaatcacagggacaaaggagggaatcgagaaagcacgacacgaagtactgctaatttctgcagaacaggataagcgggccgtagaaaggctggaggtggaaaaagcattccatccctttattgccggcccctataataggttggtgggcgaaatcatgcaggaaaccggcactagaatcaatataccccctccatcggtgaaccgcaccgagatcgtgttcacaggggagaaagaacaattggctcaagctgtcgctcgaattaagaagatctacgaggagaaggccaatagtttcaccgtttcctccgttgccgcaccgtcgtggctgcatcgctttatcattggtaagaaaggacaaaacctagctaagataacacagcaaatgcctaaagtgcatattgagtttaccgagggagaggacaagattacactcgaagggcccacggaggacgtgaacgttgctcaggaacagattgaaggcatggtcaaggacctgattaaccgcatggattatgttgagatcaatattgatcataaattccaccgacaccttatcggcaaaagcggcgcgaacatcaaccgcatcaaagaccagtacaaagtgagcgtgcggatcccaccagactccgagaaatctaacctcatccgcatcgagggagacccccagggggtgcaacaggcaaaaagggaactattggaattggcgtcccgaatggagaatgagaggacaaaggatctgatcattgaacagaggttccaccgaaccatcatcggccaaaaaggtgagcggattagggagatacgcgacaagttccccgaggtgatcatcaactttccagatcccgcacagaagagcgacatcgtgcaattacgaggacctaagaacgaggtagagaagtgcacaaagtacatgcagaagatggtggccgacctcgtggaaaactcatactctatttcagtgccaatattcaagcaattccacaagaacatcatcggcaaaggaggagccaatatcaaaaagatccgcgaggagtccaatactaagattgatttgcctgctgaaaattccaattccgagaccattattattacaggaaaacgggctaattgtgaggccgcccggtcacgtatactgtctattcagaaggatctggcaaatatcgcagaagtcgaagttagcatacctgcaaaactacacaattctttaatcgggaccaagggtcgcctcattcggagtattatggaagagtgtggaggcgtacacatacactttcccgtggaaggatcaggatccgacacagtagtgatccgggggcctagctcggatgtagagaaagcaaaaaaacagctcctccacctggctgaagaaaagcagaccaaatccttcaccgtcgacattagagccaaaccagaataccacaagtttctgattggcaagggcggggggaaaatccgcaaagtgcgggacagtactggcgcaagagtgatattccccgctgccgaggacaaagatcaagacttgatcaccattatcgggaaggaagacgccgtcagggaagcacagaaagaactggaggctctcatccagaacctggacaatgtggtggaggactctatgcttgtggatcccaaacatcacagacacttcgtaataagaaggggacaggtgctgcgcgagatagccgaggagtacggaggcgtaatggtctcgttcccaagatctggcacacagtctgacaaagttaccttgaagggcgcaaaggattgcgtggaggcagcaaagaagaggatccaggaaatcattgaagatctggaggcccaggtcacgcttgaatgcgccatcccccaaaaattccatagatccgtgatgggacctaagggaagcagaattcagcagatcacacgggacttttctgtgcagatcaaatttcccgaccgagaggagaacgccgtgcacagcaccgagccagtggtgcaagaaaacggggatgaggcaggggaggggcgggaggccaaagattgtgaccccggctctcctcggcgctgtgacataataatcatttcaggcaggaaggagaagtgtgaggcagccaaggaggcgctcgaagcgctggtcccagtgacaatcgaggtcgaagtgccattcgatctccatcgttacgttattggtcagaaggggtcaggcatccgaaaaatgatggacgaattcgaagtcaatattcacgtgccagcgcccgagttacaatcagatataatagctattacaggactagccgccaacttagaccgggctaaggcagggttactggaacgggtcaaagagctgcaggctgagcaggaggatcgagcattacggtctttcaagctgtccgttacggtcgaccctaagtaccatccaaaaatcatcggacggaagggcgctgtgatcacacagatcagactggagcacgacgtcaacatacaattcccagacaaagacgatggcaatcagccccaggatcaaataacgatcaccgggtacgagaagaataccgaagccgccagagatgccatcctgcggattgtcggggaattggaacagatggtgtctgaggatgtgcctctagatcaccgtgtgcatgccagaattattggggcacgcggcaaagcgattagaaagataatggatgagttcaaggtcgacatcaggttcccacagagcggagccccagacccgaactgtgtgacggtgacaggtctgcctgaaaacgtggaggaagccatagaccatatacttaacctggaggaggaatacctcgccgacgtcgtcgactccgaagccttgcaagtctacatgaagcctccggcacacgaggaagctaaagcaccctctcggggcttcgtggtccgcgatgccccatggacagcctccagcagcgagaaggcgccggatatgtctagtagtgaggagtttcctagctttggggcacaggtcgcaccaaagactctcccttgggggccaaagcgatag

SEQ ID NO: 190639 - DNA, 666 bp, synthetic construct
  misc_feature 1..666: note = Description of Artificial Sequence: Synthetic coding sequence
  source 1..666: mol_type = other DNA
atgagcagcgtggccgtgctgacccaggagagcttcgccgagcacaggagcggtttggtgccccagcagatcaaggtggccaccctgaattctgaggaggaatccgaccctcctacctacaaggacgcttttccccctctacctgagaaagctgcctgtctggaaagcgcccaggagccctccggagcttggggaaataagatcagaccgatcaaggccagcgttatcacccaagttttccacgtccctctggaagagcgtaaatacaaagacatgaatcaattcggggaaggagagcaggccaagatttgcctggagattatgcaacggacaggtgcgcatctggaactttcccttgcaaaggaccagggcctgtcaattatggtgtccgggaagctcgatgccgtgatgaaagcacgaaaggatattgtggccagactgcagacccaggcctcagccacagttgcgatccctaaagagcatcataggtttgtgattgggaagaacggggagaagttacaggatttggaactcaaaaccgccacaaagattcagattccacggcctgatgacccctccaatcagatcaagattaccggtactaaggagggcattgagaaggcccggcatgaggtgctactgatttctgccgaacaagataaatag

SEQ ID NO: 190640 - DNA, 426 bp, synthetic construct
  misc_feature 1..426: note = Description of Artificial Sequence: Synthetic coding sequence
  source 1..426: mol_type = other DNA
atgagcagcgtggccgtgctgacccaggagagcttcgccgagcaccgatccgggctcgtgccacagcagatcaaagtggcaactctgaatagcgaggaggagtccgacccaccaacttataaggacgctttccctcctctgccagaaaaggccgcatgtctcgagagtgcccaggagccgtccggcgcgtggggaaacaagatcaggccgataaaggcatccgttatcacgcaagtgttccacgtgccgttggaagagcgaaaatataaggacatgaatcagttcggcgagggcgagcaagcaaaaatctgtctggaaatcatgcaacgcacaggtgcccacctcgagctatcgctggcaaaggaccagggcctcagcatcatggtcagcggcaagttggacgctgtgatgaaggcacggaagtag

SEQ ID NO: 190641 - DNA, 381 bp, synthetic construct
  misc_feature 1..381: note = Description of Artificial Sequence: Synthetic coding sequence
  source 1..381: mol_type = other DNA
atgagcagcgtggccgtgctgacccaggagagcttcgccgagcaccggtcgggcttagtcccccagcagataaaagttgctacgctcaactctgaagaggaatccgacccaccaacatataaggatgctttcccaccgctgccggaaaaggccgcctgtctcgaaagcgcacaggagccctctggtgcctggggcaataaaatcagacccattaaagcaagtgtaatcacgcaagtcttccacgtgcctctggaagagaggaaatacaaggatatgaaccagttcggagagggggaacaggctaaaatctgcctggagattatgcagagaactggggcacatctagagctgtccctggctaaagatcagggcctgagctag

SEQ ID NO: 190642 - DNA, 444 bp, synthetic construct
  misc_feature 1..444: note = Description of Artificial Sequence: Synthetic coding sequence
  source 1..444: mol_type = other DNA
atgagcagcgtggccgtgctgacccaggagagcttcgccgagcacagatcagggctggtgccgcaacagatcaaggtggcgaccttgaattcagaggaggagagcgatccaccaacttataaggacgcattccctccactgccggagaaggcagcatgtctagagagtgcccaagaaccttctggagcatgggggaacaagatccgaccaatcaaagccagtgttataacccaggtttttcacgtacccctcgaggaacgcaagtacaaagacatgaaccagtttggggaaggcgagcaagcgaaaatctgtctggagattatgcagcgcaccggagcgcacctcgaactgtcactggcaaaagaccagggtttatctattatggtatcaggaaagctcgatgcggtgatgaaggctagaaaagacatcgtcgcgcgcttgtag

SEQ ID NO: 190643 - DNA, 54 bp, synthetic construct
  misc_feature 1..54: note = Description of Artificial Sequence: Synthetic coding sequence
  source 1..54: mol_type = other DNA
atgagcagcgtggccgtgctgacccaggagagcttcgccgagcaccgtagctag

SEQ ID NO: 190644 - DNA, 495 bp, synthetic construct
  misc_feature 1..495: note = Description of Artificial Sequence: Synthetic coding sequence
  source 1..495: mol_type = other DNA
atgagcagcgtggccgtgctgacccaggagagcttcgccgagcaccggagtggcctggttcctcagcagatcaaggtggctacccttaatagcgaggaggaaagtgaccccccaacctataaagacgcatttccacctctgcctgagaaggccgcttgcctggaaagcgcacaggaaccgagtggagcctggggaaataaaattcgtccaatcaaggcatccgtcatcactcaggtgttccacgttcctctcgaagagagaaaatacaaggatatgaaccagtttggggagggagagcaggccaagatttgtcttgaaataatgcagcgcacgggcgctcacctggagctgtctttggccaaagatcaggggctgtccatcatggtcagcggcaagctggacgcggtgatgaaagcgagaaaggacatagtggctaggctgcagactcaggcatccgcaaccgtggcgatccctaaggaacatcatcgcttttag

SEQ ID NO: 190645 - DNA, 144 bp, synthetic construct
  misc_feature 1..144: note = Description of Artificial Sequence: Synthetic coding sequence
  source 1..144: mol_type = other DNA
atgagcagcgtggccgtgctgacccaggagagcttcgccgagcacaggagcgggctagtgcctcaacagatcaaggtggctacattaaactctgaagaggaatccgatcctccaacgtataaagatgcttttcctcctctgtag

SEQ ID NO: 190646 - DNA, 1044 bp, synthetic construct
  misc_feature 1..1044: note = Description of Artificial Sequence: Synthetic coding sequence
  source 1..1044: mol_type = other DNA
atggagaacctgatgaccagcagcaccctgccccccctgttcgccgacgaggatggatcaaaagaatctaatgaccttgccactacaggcttaaatcaccccgaggttccttactcatctggcgccacatcatcaaccaacaacccagagtttgtagaagacctcagccagggccagctcctgcagtctgagagttccaacgccgccgaagggaatgagcagcgtcatgaagatgagcagcgctctaagcgcggtgggtggtcaaagggccggaaacgtaagaagcctctacgcgactcaaacgctcccaagtcacctcttactggatacgttcggttcatgaacgagcgacgagagcagctgcgagctaaaaggccggaggtcccctttcctgagattaccaggatgctcgggaacgagtggtcaaagctcccccctgaggaaaaacagaggtatcttgatgaagccgatcgagacaaggaacgatatatgaaagaactcgagcagtatcaaaaaacggaggcatacaaggtcttctcccgaaaaacacaggaccgtcaaaaaggcaagtcacaccgacaggatgccgcccggcaggccacccacgaccacgagaaggagactgaagtgaaggagcggagcgtctttgacatcccgatctttaccgaggagtttcttaatcactcaaaggctcgcgaggctgaattgcggcagctccggaagagcaacatggagttcgaagaacggaatgccgcccttcagaaacatgtggagagcatgcgcacagctgtggagaaactcgaagtggatgtcatccaggaacggtcccggaacaccgtgcttcagcagcaccttgagaccctgcggcaagtcttgacctctagcttcgcctctatgcccctgcctggctcaggggagacccctaccgtggatactatagactcctacatgaataggttgcattcaataattctagctaacccgcaggacaacgaaaacttcattgccaccgtgagggaggtcgtgaacaggctggatcgctag

SEQ ID NO: 190647 - DNA, 1044 bp, synthetic construct
  misc_feature 1..1044: note = Description of Artificial Sequence: Synthetic coding sequence
  source 1..1044: mol_type = other DNA
atggagaacctgatgaccagcagcaccctgccccccctgttcgccgatgaggatggcagcaaggagtctaacgacctcgcaacaactggactgaaccatcccgaagtgccctattcctctggggcaacatcttctacaaataacccagagtttgtggaagacctaagccagggccagctactgcagagcgagtctagcaacgcggccgagggtaacgagcagagacacgaggacgagcagagatctaagcggggcgggtggtccaaagggcgcaagagaaagaaacctttaagggattcaaacgcgcctaaatcccccctgactgggtatgttaggttcatgaatgagcgaagagaacaattacgagccaagaggcccgaggtcccttttcctgaaatcactcgaatgttggggaatgaatggtctaagctgccccctgaagagaagcaaaggtatctcgatgaggccgacagggataaagagagatatatgaaggagcttgagcagtatcagaagacagaggcctacaaggtgttctctcgaaagacccaggatcggcaaaagggtaaatcacataggcaggacgccgctcgacaggctacccacgatcacgagaaagagaccgaggttaaggagcgttcggtttttgacatccctattttcaccgaggagttcctcaaccacagcaaggcccgggaggctgaactcagacagctgaggaagtccaatatggagttcgaggaaagaaatgccgccctgcagaaacatgtggagtctatgcgtacagctgtagagaaacttgaagtcgacgtcatccaggagcgttcacgcaatacagtgctccagcagcatctggaaacacttaggcaggtattgacttcctccttcgcgtcaatgcctttgccaggcagcggcgagacccctaccgtggacacaattgattcctacatgaatcgcctgcactcaattattctggccaacccacaggacaacgaaaatttcattgcaaccgtgcgagaggtagtgaaccgtttagaccgttag

SEQ ID NO: 190648 - DNA, 471 bp, synthetic construct
  misc_feature 1..471: note = Description of Artificial Sequence: Synthetic coding sequence
  source 1..471: mol_type = other DNA
atggagaacctgatgaccagcagcaccctgccccccctgttcgccgacgaagacgggtcaaaggagtcaaatgacctcgctaccaccggattgaaccaccctgaagtgccctatagcagcggcgccacgtctagcaccaataaccctgagtttgtggaggatcttagtcagggacagttgctgcaatccgaaagtagtaacgcggctgagggcaatgaacaacgccacgaagacgagcagcgttcaaaacggggaggatggagcaagggacgcaaacgcaagaaaccattgcgggactccaatgcgcccaagagtccactgaccgggtacgtgaggtttatgaatgaacgcagagagcaactacgagccaagcgaccagaggtgccatttcccgagattacccgcatgctaggaaatgagtggagcaagctgccgcctgaagaaaagcaaagatacttggacgaggcttag

SEQ ID NO: 190649 - DNA, 303 bp, synthetic construct
  misc_feature 1..303: note = Description of Artificial Sequence: Synthetic coding sequence
  source 1..303: mol_type = other DNA
atggagaacctgatgaccagcagcaccctgccccccctgttcgccgatgaggatggcagtaaagagagcaatgacctggcaaccaccgggctgaaccacccagaagtaccatattcctctggcgccacttccagtactaacaacccggagttcgtggaagatctgtcacagggacagctgctgcagtccgagagctcaaacgctgcagagggcaatgaacagcgccacgaagacgagcagcgatctaaacgcggtggctggtcaaaagggcggaaacggaaaaagcccctcagagactcttag

SEQ ID NO: 190650 - DNA, 489 bp, synthetic construct
  misc_feature 1..489: note = Description of Artificial Sequence: Synthetic coding sequence
  source 1..489: mol_type = other DNA
atggagaacctgatgaccagcagcaccctgccccccctgttcgccgacgaagacggatccaaggagagcaacgatttggcaactaccggactgaatcatcccgaggtgccttattcttccggcgctacgtcttcaactaacaaccccgagttcgttgaagatctctcacagggccaacttctgcaaagcgaatcatccaatgccgctgagggcaatgagcagagacacgaggacgagcaacggtcaaaacgtgggggttggtcaaaggggcggaaaagaaaaaagccactgagagactcaaatgcccctaaaagcccactgactggctacgttcgctttatgaatgaacggcgcgagcaactgagagccaaacgccccgaagttccatttcctgagatcactaggatgctgggcaacgaatggtccaagttaccacctgaggaaaaacagaggtacctggacgaggctgatagggacaaggaaagatag

SEQ ID NO: 190651 - DNA, 954 bp, synthetic construct
  misc_feature 1..954: note = Description of Artificial Sequence: Synthetic coding sequence
  source 1..954: mol_type = other DNA
atgagccacggccccaagcagcccggcgccgccgccgcccccgccggcggcaaagctccagggcagcatggcgggttcgtcgtcaccgtgaagcaggagcgtggcgaaggtccacgcgcaggggagaagggctcccatgaagaggagccggtcaaaaagcgcggatggcccaaggggaaaaagcgcaagaagattttgcccaatggcccaaaggcgccggttactgggtatgtccggttcctcaatgagcgcagggagcagatcaggacccgccacccggacctccccttccctgaaatcactaagatgctgggcgcggaatggtctaagctacagcctaccgaaaaacagcgctatttagatgaagcagagcgggagaagcagcaatatatgaaggagttgagagcctatcaacagagtgaggcctacaagatgtgtactgagaaaattcaagagaagaagatcaaaaaggaagacagtagcagcggcttgatgaacactctacttaacggtcacaaaggcggcgattgcgacgggttttcaacattcgatgtgcccatctttaccgaagagttcctggaccagaacaaagctcgggaggcggagctgagacgtctgaggaaaatgaacgttgccttcgaggaacagaacgcagttctacaacgtcacacgcaatcaatgtcaagcgctcgagaaaggctggagcaggaactcgccctcgaagagaggcggaccctcgctctccaacagcagctgcaagccgtccggcaggccctcacagcctcattcgccagtcttccagtgccaggtactggcgagaccccaaccttaggcactctggacttctatatggctcgcctgcatggagccattgagcgagaccctgcacagcatgaaaagctgatagtgcggattaaagagatactcgcacaggtcgcctcggagcatctctag

SEQ ID NO: 190652 - DNA, 807 bp, synthetic construct
  misc_feature 1..807: note = Description of Artificial Sequence: Synthetic coding sequence
  source 1..807: mol_type = other DNA
atggacacccgggtgggcaccgccatggccagcccccccagcatgttccctagcagcctaaaatcttcctggactaaaaccaagagagtgcggcgttctttcggggccgaggatgagtgcgggctgcggggggctgagcggggcacagccgaggcgcacgccgagcacgagcagagggcccgcgctagcggtgctggcgccggcgcaggcggggcagaagacgcaggggctgccgccgcagcccctggacgcgcccctggagcacacaggcaactgaggttgaccgcgggggcaggccacggacgcaacgcccatgctggacattcaggactactgcatggtccagcaagcaggtctcatcgcgctcgcccccgacccgcccgcgaagcacatcggccacatcagggaaatcccggtcccggtcgacagcgcgcccccgttaggagcgggcgcgcacacgatgcagaagaaaagctttgggcacggccatgtcacactccgccaaggggacgggaagctggaggaccccctggacctggcccgatactacacctgggcgggtcaagtcctcctaagattaagttcttgcaacacccattctccttccagtctccacagcccccagagccagggaaatccaccagagatacacctagacgcactagtcagcccagagtgcccctgctaggcggacagacaagatacacaggttcacccggtcacccccaggacaccggacagacaaaacccacgccttccaccagacaggacccacccaactactctctgcgaggggccgtcccctag

SEQ ID NO: 190653 - DNA, 648 bp, synthetic construct
  misc_feature 1..648: note = Description of Artificial Sequence: Synthetic coding sequence
  source 1..648: mol_type = other DNA
atgagccacggccccaagcagcccggcgccgccgccgcccccgccgggggtaaggctcctggccagcatggggggttcgtcgtcaccgtgaagcaggagaggggggagggccctcgggccggagaaaaaggaagtcatgaagaagagcccgtcaaaaaaaggggttggccaaagggaaagaagcgtaagaagatcctccctaacggaccaaaggctcccgtaaccgggtatgtccgctttctgaacgagaggcgggaacagatccgcacaaggcaccccgacctgccctttccagagataaccaagatgctgggtgctgaatggtcgaaactccagcctaccgagaaacaacgctacttggacgaggccgagcgggagaagcagcagtacatgaaagagctgcgcgcttatcaacagagcgaggcatacaaaatgtgcaccgaaaagatccaagagaagaagattaagaaagaggatagcagttctggcctgatgaacacactccttaatgggcataagggcggtgactgtgacgggttctctacatttgacgtaccaatcttcacagaagagtttcttgatcaaaataaagcccgcgaggctgagctgcgaagattgcggaagatgaacgtagccttcgaagaatag

SEQ ID NO: 190654 - DNA, 429 bp, synthetic construct
  misc_feature 1..429: note = Description of Artificial Sequence: Synthetic coding sequence
  source 1..429: mol_type = other DNA
atgagccacggccccaagcagcccggcgccgccgccgcccccgccggcggtaaggctccgggtcagcacgggggcttcgtcgttaccgtgaagcaggaacggggcgaaggtccccgcgcaggggagaaaggtagccacgaagaagagcccgttaagaagagaggctggccgaaggggaagaagcgcaagaagatactgccaaatggtcccaaagctcccgtgacgggctacgttcgtttcttgaacgaaaggagagaacagatcaggaccaggcatcccgatctgccttttccagagattacaaagatgctgggagcagagtggagtaagttgcagcccacggagaagcagcgctatctggacgaggccgaacgcgagaaacagcagtacatgaaggagctgcgcgcttaccagcaatccgaagcttag

SEQ ID NO: 190655 - DNA, 324 bp, synthetic construct
  misc_feature 1..324: note = Description of Artificial Sequence: Synthetic coding sequence
  source 1..324: mol_type = other DNA
atgagcgagagcagcagcaagagcagccagcccctggccagcaagcaagagaaagacggtacagagaagcggggacgcggacgaccaagaaagcaaccccccgtgtctccaggcaccgcacttgttgggtctcaaaaagagccgtctgaagtgcctacccctaagagacccagaggcagaccaaaaggatccaagaacaagggggccgccaaaactcggaaaaccaccacgacacctggcaggaaacctcgaggaagacccaagaaactcgaaaaggaggaggaagaggggatatctcaggagtcttccgaagaagagcaatag

SEQ ID NO: 190656 - DNA, 291 bp, synthetic construct
  misc_feature 1..291: note = Description of Artificial Sequence: Synthetic coding sequence
  source 1..291: mol_type = other DNA
atgagcgagagcagcagcaagagcagccagcccctggccagcaagcaggaaaaggacggcactgaaaaaagaggaagaggccgaccccggaaacagccacctaaggagcctagtgaggttccaactcctaagagacctagagggcgtcccaagggaagcaaaaacaagggagccgcaaagacacgcaaaactacaacgacaccaggcagaaagcctcggggccggcctaaaaaactggagaaggaggaagaagaaggcatatcgcaggagtcatcagaggaggaacagtag

SEQ ID NO: 190657 - DNA, 291 bp, synthetic construct
  misc_feature 1..291: note = Description of Artificial Sequence: Synthetic coding sequence
  source 1..291: mol_type = other DNA
atgagcgagagcagcagcaagagcagccagcccctggccagcaagcaggaaaaagacggaacagaaaagagaggacggggacgacctaggaaacagcctcccaaggaacctagtgaagtgccaacaccgaaaagaccacggggacgaccaaaaggaagcaagaacaaaggcgcggctaagacccggaagacaaccacaacccctgggcggaaaccacgagggaggccaaagaagctagagaaagaggaagaagagggaatctcacaggagtcatctgaagaggagcaatag

SEQ ID NO: 190658 - DNA, 324 bp, synthetic construct
  misc_feature 1..324: note = Description of Artificial Sequence: Synthetic coding sequence
  source 1..324: mol_type = other DNA
atgagcgagagcagcagcaagagcagccagcccctggccagcaagcaggagaaggacgggaccgagaaaaggggcagggggcggccgcgtaaacaacccccagtttcgcccggaaccgcactggtggggtctcagaaagagccgtcagaggttcctacacccaaacgcccaaggggtcggcctaagggatctaaaaataagggtgctgcgaaaacaagaaaaaccactactaccccgggcagaaagccaaggggtaggcctaagaagttggagaaggaagaggaagagggtattagtcaggaaagttccgaggaggagcagtag

SEQ ID NO: 190659 - DNA, 291 bp, synthetic construct
  misc_feature 1..291: note = Description of Artificial Sequence: Synthetic coding sequence
  source 1..291: mol_type = other DNA
atgagcgagagcagcagcaagagcagccagcccctggccagcaagcaggagaaagacggcaccgaaaaacgcgggcgtggtagaccacggaagcagccaccaaaggaaccatccgaagttcctaccccaaagcgccctcgcggtcggcctaaagggtctaagaataaaggcgcagccaaaacccgaaaaactacaaccacccccggccgaaagccaagaggtagaccgaaaaagctggaaaaagaggaggaggaaggcatcagccaagagagcagcgaagaggagcagtag

SEQ ID NO: 190660 - DNA, 987 bp, synthetic construct
  misc_feature 1..987: note = Description of Artificial Sequence: Synthetic coding sequence
  source 1..987: mol_type = other DNA
atgagcgagagcagcagcaagagcagccagcccctggccagcaagcaggaaaaggatgggacagaaaagagaggccgtggccggccgagaaagcagccccctgtgtctccagggacagccttggtaggctcacagaaggaaccttccgaggtgccaaccccgaagcgcccccgcgggcggcccaaagggtccaaaaacaagggcgagggtggcagaggcgggcacttggccggagtcctcggaggcggcgctgtcacgcatgcctgtagattactcctcacaggcggggccgctagtttttgggattggaccgccttgctccgcagccaccggcctcacccttttccacgaccaaccataaccaccgcgagtggtaggcacccacacctcccccccgtgccatcgcccccccactatacagcccatcagcctctccagggatcacacggactctctggtgagcagttctccccagggttgagctcccagctacctcctcccacacacgcctacacacacgcactactggacaaggctaatatccccttgtcaaggactctccatcttctgaggcctcattctttaggaggaggcgacatcgctctttgggcttttggcctgggcgcccccagcttgttactgcattgtagcctgtggctgccgatcgtgggcccaggacgcgtcccattggctcttaagggcgctcaggcgccgagccaccctgggaccccctatagcacagccctcgccgcagcaggtgtggcgaatgggggtggatgctggcctcccggctttccccagcctaattgcctgtgccatcatgttggcctaacatttcatccttcacccacctctctggtacctgtcttaggatggacagcaccgttcggataccgaaaggccggaggggtttctccccttctgcctcttcactgtgggcacagtcccctggcacttcgtttggggagtgagtacattttatggtag

SEQ ID NO: 190661 - DNA, 291 bp, synthetic construct
  misc_feature 1..291: note = Description of Artificial Sequence: Synthetic coding sequence
  source 1..291: mol_type = other DNA
atgagcgagagcagcagcaagagcagccagcccctggccagcaagcaggaaaaggacggaacagaaaaaagaggacggggcaggcctcggaaacagccaccaaaggaacctagcgaggtgcctactccaaagagacccagaggtcggcctaaaggatcgaagaataaaggggccgccaagactaggaaaaccacaacaactcccggccgaaagcctagaggaaggcccaagaaacttgaaaaggaggaggaagagggcatctctcaggaatcctcagaagaagagcagtag

SEQ ID NO: 190662 - DNA, 324 bp, synthetic construct
  misc_feature 1..324: note = Description of Artificial Sequence: Synthetic coding sequence
  source 1..324: mol_type = other DNA
atgagcgagagcagcagcaagagcagccagcccctggccagcaagcaggaaaaagacgggactgagaagcgaggacggggacggcccaggaaacagcctcccgtgtctccagggacagcgctcgtgggatcccagaaagagcctagcgaggtccccacacccaaacggccaagggggagaccgaaaggaagcaaaaacaagggcgcagcgaaaacgaggaaaaccaccactacgccaggacgaaaaccgcgtgggcgcccgaagaagttggaaaaagaagaggaagagggaattagtcaggaatcatcagaggaggagcaatag

SEQ ID NO: 190663 - DNA, 321 bp, synthetic construct
  misc_feature 1..321: note = Description of Artificial Sequence: Synthetic coding sequence
  source 1..321: mol_type = other DNA
atgagcgcccggggcgagggcgccggccagcccagcaccagcgcccaaggacaacctgccgcaccggcgccccaaaagcgggggaggggacggcctcggaagcaacagcaggagcctaccggcgaacccagccctaaacgcccccgcggcaggcccaagggttccaagaacaagagcccttcaaaggcagcacaaaaaaaggccgaggcgaccggcgagaaacgcccacgcggccgcccacggaagtgggataacttactgcctaggaccagctcgaagaagaaaacctccctcgggaactcaacaaagcgatcacattag

SEQ ID NO: 190664 - DNA, 357 bp, synthetic construct
  misc_feature 1..357: note = Description of Artificial Sequence: Synthetic coding sequence
  source 1..357: mol_type = other DNA
atgagcgcccggggcgagggcgccggccagcccagcaccagcgcccagggacagcccgccgctcctgccccccaaaaaaggggcaggggaaggccgcgtaagcagcaacaggaacccactggagaaccaagcccgaagcgacctcggggacggcctaagggatccaagaacaaatccccttccaaggccgctcagaagaaagccgaagcaaccggagaaaagcggcctcgaggacgacctaggaaatggccgcagcaggtggttcagaaaaaaccggcacaggtaaacgtcgccctgcctgggaaagaccatccgggcaatctcatctatctgcttttcagcaagaacgccacctag

SEQ ID NO: 190665 - DNA, 273 bp, synthetic construct
  misc_feature 1..273: note = Description of Artificial Sequence: Synthetic coding sequence
  source 1..273: mol_type = other DNA
atgagcgcccggggcgagggcgccggccagcccagcaccagcgcccagggacagccagcagcacccgccccccaaaagcgaggccgtggcaggcctaggaaacagcagcaagaaccaaccggtgagccttccccaaagcggccacggggccggcctaaggggtcaaagaataagtccccttcgaaggccgcgcagaagaaggctgaagcaacgggagagaaacggccgcgaggtagaccccgcaagtgggaggaattctatatcgcagcctag

SEQ ID NO: 190666 - DNA, 330 bp, synthetic construct
  misc_feature 1..330: note = Description of Artificial Sequence: Synthetic coding sequence
  source 1..330: mol_type = other DNA
atgagcgcccggggcgagggcgccggccagcccagcaccagcgcccaaggccagccagccgctccagctccacagaaaagaggccgcggacgacctaggaaacaacagcaagaacctacgggcgagccaagcccaaagcgcccccgtgggcggcctaagggatctaaaaataagtcaccctcaaaggcggctcaaaaaaaagctgaagcaaccggcgaaaagcgacctagagggcgaccaagaaaatggcctcagcaggtcgtgcagaagaagccagcacaggaggagacagaagagaccagttctcaggagtcagccgaggaggattag

SEQ ID NO: 190667 - DNA, 279 bp, synthetic construct
  misc_feature 1..279: note = Description of Artificial Sequence: Synthetic coding sequence
  source 1..279: mol_type = other DNA
atgagcgcccggggcgagggcgccggccagcccagcaccagcgcccaggggcagcccgctgctcccgcaccccaaaaaagaggcagagggaggcctcgtaagcaacaacaggaaccaaccggcgagccatctcccaagcgacctcggggtagaccgaaaggcagcaaaaacaagagcccatccaaagccgcacaaaagaaagctgaggctacaggcgaaaaacggcctcggggccggcctcggaagtggtggcttctgatgaagtccccatgctggtag

SEQ ID NO: 190668 - DNA, 312 bp, synthetic construct
  misc_feature 1..312: note = Description of Artificial Sequence: Synthetic coding sequence
  source 1..312: mol_type = other DNA
atgagcgcccggggcgagggcgccggccagcccagcaccagcgcccaaggccagccggcagcccctgctccgcagaagcggggtcgaggtcggccacggaagcagcaacaagaacccaccggagagccctctcctaagaggcccaggggacgacctaagggttcaaagaataagtccccatccaaagctgcccagaagaaggctgaggctactggggagaaacgtcctcgaggccgccccagaaagtggttgcgggcccaggcgttggactctgatggtctcgggagcaacagtggccctagcctctcctag

SEQ ID NO: 190669 - DNA, 261 bp, synthetic construct
  misc_feature 1..261: note = Description of Artificial Sequence: Synthetic coding sequence
  source 1..261: mol_type = other DNA
atgagcgcccggggcgagggcgccggccagcccagcaccagcgcccaaggtcaacccgcagcgcctgccccccagaaaagagggcgcgggcgcccaagaaagcagcaacaagagcccacgggggaaccaagccctaaacggccccgcggtaggccaaaaggctcaaaaaacaagagcccctcaaaagccgctcaaaaaaaagccgaagctaccggggagaaaagaccaaggggtcgaccacgcaaatggctgcagaactag

SEQ ID NO: 190670 - DNA, 300 bp, synthetic construct
  misc_feature 1..300: note = Description of Artificial Sequence: Synthetic coding sequence
  source 1..300: mol_type = other DNA
atgagcgcccggggcgagggcgccggccagcccagcaccagcgcccaaggacagcccgctgctcctgcgccgcaaaagagaggaaggggaaggccgaggaagcaacagcaggaacccacaggtgaaccttcacccaagcgacctcggggccgtcccaaggggtcaaagaacaaatccccttctaaggcggctcagaagaaagccgaggccacaggtgagaagcgacctcgaggacgccctagaaagtggccacagcaagtggtgcagaagaaacctgctcaagttcggcactcccattag

SEQ ID NO: 190671 - DNA, 477 bp, synthetic construct
  misc_feature 1..477: note = Description of Artificial Sequence: Synthetic coding sequence
  source 1..477: mol_type = other DNA
atgggcaagggcgaccccaagaagccccggggcaagatgagcagctatgcattcttcgtacagacctgtcgggaggaacacaagaaaaaacatcctgacgccagcgttaacttcagcgagttttcaaagaaatgttcagaacgctggaagacaatgagcgctaaggagaagggaaagtttgaggatatggccaaagctgacaaagcccgttacgaacgggaaatgaagacctacatccccccaaagggcgagactaaaaaaaagttcaaggatccaaacgcccccaagcggcctccttcagctttctttctcttctgctctgagtataggcctaagattaagggggagcaccctgggttaagcatcggagacgtggctaagaaactgggagagatgtggaataacactgctgccgacgataagcagccctatgaaaagaaagccgccaagctcaaagagaaatacgagaagttctag

SEQ ID NO: 190672 - DNA, 648 bp, synthetic construct
  misc_feature 1..648: note = Description of Artificial Sequence: Synthetic coding sequence
  source 1..648: mol_type = other DNA
atgggcaagggcgaccccaagaagccccggggcaagatgagcagctacgccttctttgtgcaaacctgccgagaagaacacaagaaaaaacatcccgacgcttcagtgaatttctcagagttcagcaagaaatgtagcgaaagatggaaaaccatgtcagcaaaggagaaggggaaatttgaggatatggctaaggccgacaaggccagatacgagcgagaaatgaaaacctacatcccgcctaaaggcgagaccaaaaagaagttcaaggaccctaatgctcccaaacggcccccctctgccttttttctgttctgcagcgagtaccggcccaagattaagggcgagcatcccggtctgtctatcggggatgttgccaaaaagttgggtgagatgtggaacaatacagcagcggacgataagcaaccgtacgaaaagaaggccgcgaagttaaaggaaaagtatgagaaggacatcgccgcgtaccgggccaaaggcaagccggatgcagccaaaaaaggagtggttaaggctgagaagtctaaaaaaaaaaaagaagaggaagaagacgaggaagacgaggaagatgaggaagaagaagaagatgaggaggacgaagatgaggaggaagacgacgatgatgagtag

SEQ ID NO: 190673 - DNA, 648 bp, synthetic construct
  misc_feature 1..648: note = Description of Artificial Sequence: Synthetic coding sequence
  source 1..648: mol_type = other DNA
atgggcaagggcgaccccaagaagccccggggcaagatgagcagctatgctttcttcgtgcaaacatgtcgcgaggagcacaagaagaaacacccagacgccagcgtgaactttagcgaattctccaaaaaatgcagcgagcgctggaagactatgtccgcgaaagaaaagggaaagttcgaagacatggcaaaggcagataaggcacgatacgagcgagagatgaaaacctacatacctccgaagggcgaaaccaaaaaaaagttcaaggacccaaacgctcccaaaaggccccctagcgcttttttcctgttctgctcagagtaccgtcccaagatcaagggggaacaccccggactcagtattggagacgtggctaagaagcttggcgagatgtggaacaacactgcagcagacgataagcagccttacgagaaaaaagccgctaagctcaaagaaaagtatgagaaagatatagctgcgtaccgcgccaaagggaaaccagacgctgccaagaaaggggtggtgaaagctgaaaagagcaaaaaaaagaaggaagaggaggaggatgaggaggacgaagaagacgaggaagaggaggaagatgaggaagatgaagacgaggaagaggacgatgacgacgagtag

SEQ ID NO: 190674 - DNA, 294 bp, synthetic construct
  misc_feature 1..294: note = Description of Artificial Sequence: Synthetic coding sequence
  source 1..294: mol_type = other DNA
atgggcaagggcgaccccaagaagccccggggcaagatgagcagctacgcattcttcgtccaaacctgcagggaagagcacaaaaaaaagcacccagacgcttccgtcaatttttctgagttttcaaaaaaatgcagcgagcggtggaagaccatgagcgccaaggaaaaaggtaaattcgaagacatggcaaaagccgacaaggccagatatgagcgggaaatgaaaacctacatccctccgaaaggagagaccaaaaagaaattcaaagaccccaacgccccaaagcggtag

SEQ ID NO: 190675 - DNA, 477 bp, synthetic construct
  misc_feature 1..477: note = Description of Artificial Sequence: Synthetic coding sequence
  source 1..477: mol_type = other DNA
atgggcaagggcgaccccaagaagccccggggcaagatgagcagctatgccttctttgtgcagacatgtagggaggagcacaaaaagaaacatcccgacgccagcgtcaatttcagcgagttttccaagaaatgcagcgagcgctggaagacaatgtcagcaaaggagaaggggaagtttgaggacatggcaaaagctgataaagcaaggtatgagcgggaaatgaaaacttatatcccgcctaaaggcgaaaccaaaaagaaatttaaggaccctaatgcacctaaaaggcccccatcggccttcttccttttctgtagcgagtatcggccaaagattaagggagagcatcccgggttgagcataggtgacgtggctaagaagttgggtgaaatgtggaacaataccgccgctgacgataaacagccctatgagaaaaaagcagctaagcttaaggagaaatacgagaagttctag

SEQ ID NO: 190676 - DNA, 648 bp, synthetic construct
  misc_feature 1..648: note = Description of Artificial Sequence: Synthetic coding sequence
  source 1..648: mol_type = other DNA
atgggcaagggcgaccccaagaagccccggggcaagatgagcagctatgccttcttcgtgcagacatgcagagaggagcacaagaagaaacaccccgacgccagcgtgaacttctccgagttttccaaaaaatgtagcgagcgttggaagaccatgtcagctaaggagaaggggaagtttgaggatatggccaaggctgataaggcaagatacgagcgcgagatgaaaacttacattccgcctaaaggcgagaccaaaaagaaattcaaagaccccaacgctcccaaacgcccgccatcggctttttttctcttttgctccgagtacagaccaaaaattaagggagagcaccctggcctgtccataggtgacgtggcaaagaagcttggcgaaatgtggaacaataccgctgctgacgacaaacagccttatgaaaagaaggccgcaaaattaaaggagaagtatgaaaaggacatagctgcatatcgcgcgaaagggaagcccgatgccgccaagaagggggttgttaaagctgagaagtcaaagaagaagaaagaagaagaggaagatgaggaggacgaggaggatgaggaagaagaggaggatgaagaggacgaggatgaggaagaagacgatgatgatgagtag

SEQ ID NO: 190677 - DNA, 648 bp, synthetic construct
  misc_feature 1..648: note = Description of Artificial Sequence: Synthetic coding sequence
  source 1..648: mol_type = other DNA
atgggcaagggcgaccccaagaagccccggggcaagatgagcagctatgccttctttgtgcagacatgcagggaggaacacaagaagaaacaccctgatgcaagtgttaatttttctgagttctccaagaaatgttctgaaagatggaagaccatgtccgcaaaagaaaaagggaagtttgaggacatggctaaggccgataaggctagatacgagcgagagatgaaaacttacatacccccaaaaggtgaaaccaaaaaaaaatttaaagatccaaacgcgcctaaacggcccccatccgcctttttcctgttttgtagcgagtacaggcctaagattaagggtgaacaccctggtctatccatcggggatgtcgcgaaaaagcttggcgagatgtggaataacacagccgccgatgataagcagccatatgagaagaaggcggcaaaactaaaggaaaagtatgagaaagatattgccgcctatcgggctaagggtaagccagatgcagcaaaaaagggcgttgtcaaagctgagaaatccaaaaaaaagaaggaggaggaagaagacgaggaagacgaggaagacgaagaggaggaggaggatgaggaggacgaggatgaagaggaggatgacgacgacgaatag

SEQ ID NO: 190678 - DNA, 489 bp, synthetic construct
  misc_feature 1..489: note = Description of Artificial Sequence: Synthetic coding sequence
  source 1..489: mol_type = other DNA
atgggcaagggcgaccccaagaagccccggggcaagatgagcagctacgcatttttcgttcagacctgccgcgaagaacacaagaaaaagcaccctgatgctagcgtgaacttttccgaattctcaaaaaagtgctccgaacgatggaagacaatgtccgccaaagaaaaagggaagtttgaggacatggccaaggccgacaaggctcggtatgagcgggaaatgaagacttacataccaccaaaaggtgaaactaagaagaaatttaaagaccctaatgcccccaaaagaccaccttccgcattttttctcttttgttccgagtatcggcctaaaatcaagggcgaacaccccgggttgtcaataggtgacgtcgctaagaagcttggtgaaatgtggaacaacacagcagctgacgacaagcaaccatacgaaaagatcctcctgcacatagagctgaaagaatcattaatgcagcagaagcggtag

SEQ ID NO: 190679 - DNA, 630 bp, synthetic construct
  misc_feature 1..630: note = Description of Artificial Sequence: Synthetic coding sequence
  source 1..630: mol_type = other DNA
atgggcaagggcgaccccaacaagccccggggcaagatgagcagctacgcattttttgtccagacctgtagagaagaacacaaaaagaagcaccccgacagtagcgtaaattttgcggaatttagcaaaaagtgttcggaacgatggaaaaccatgtcggccaaagaaaagtctaagttcgaagatatggccaaatccgacaaagcccgttatgatagggaaatgaagaactatgtacctcctaaaggagataaaaagggcaagaagaaagatcctaacgcccctaaacggccacctagcgcgttcttcctgttctgttcagaacaccgtccgaagatcaaaagtgaacatcctgggctttctatcggagatactgccaaaaagttgggggagatgtggtcagaacagtcagcaaaagataagcaaccatacgaacagaaagcggccaaactcaaagagaagtacgagaaagatatcgcggcctatagagcaaagggtaagagtgaagctggcaagaaaggccccggccggcccactgggtctaagaaaaaaaacgaacctgaggacgaggaggaagaggaagaagaagaggatgaagacgaggaggaggaagacgaggacgaggagtag

SEQ ID NO: 190680 - DNA, 630 bp, synthetic construct
  misc_feature 1..630: note = Description of Artificial Sequence: Synthetic coding sequence
  source 1..630: mol_type = other DNA
atgggcaagggcgaccccaacaagccccggggcaagatgagcagctacgcattttttgtacaaacttgccgtgaggagcacaaaaaaaagcatccagactcatcagtgaactttgcggagttctctaagaaatgttctgagcggtggaagaccatgagcgcaaaggagaaatccaaattcgaagacatggctaaatcagataaggcaaggtatgatcgtgaaatgaagaattacgtgccccctaagggcgacaaaaagggaaagaaaaaagatccaaacgcacccaaacgccctccatccgcatttttcctgttttgtagcgaacatcgccccaaaatcaaatcagaacaccctggactgtccatcggggataccgctaagaagctgggagaaatgtggtcagagcagagtgccaaagacaagcaaccgtatgagcaaaaggcggctaagctgaaagaaaagtatgaaaaagatatcgcagcctaccgagcaaaggggaagagcgaggcaggcaagaagggtcctggaagaccaacaggcagtaagaagaaaaacgagccagaggatgaggaggaggaggaggaggaggaggacgaggacgaggaggaagaggacgaagatgaggagtag

SEQ ID NO: 190681 - DNA, 630 bp, synthetic construct
  misc_feature 1..630: note = Description of Artificial Sequence: Synthetic coding sequence
  source 1..630: mol_type = other DNA
atgggcaagggcgaccccaacaagccccggggcaagatgagcagctatgcttttttcgtccaaacctgtcgcgaggagcataaaaagaaacatccagattcatccgttaatttcgctgaattctcaaaaaagtgcagtgaaaggtggaagacaatgtccgctaaggagaagtctaaattcgaggatatggccaaaagcgacaaggcccgctatgaccgagagatgaaaaactacgtgccaccaaagggagataagaaaggcaagaaaaaggacccgaacgctccgaagaggccaccaagcgcttttttccttttctgctctgagcataggccgaaaattaaatccgagcaccctgggttgagcataggcgacacagctaaaaaacttggtgagatgtggtccgaacaatcagccaaagacaagcagccatatgaacaaaaggctgcaaagttgaaagagaagtacgagaaagacatcgccgcctaccgcgctaagggcaaatctgaggctggaaaaaaaggacccgggcggcccacaggatccaagaaaaagaatgagccggaggatgaagaggaggaagaggaagaagaggatgaggatgaagaagaggaggacgaagatgaagagtag

SEQ ID NO: 190682 - DNA, 405 bp, synthetic construct
  misc_feature 1..405: note = Description of Artificial Sequence: Synthetic coding sequence
  source 1..405: mol_type = other DNA
atgggcaagggcgaccccaacaagccccggggcaagatgagcagctacgcatttttcgtacaaacgtgccgagaagaacacaaaaaaaagcaccctgactcttccgttaattttgcagagttctcgaaaaaatgctccgagagatggaagaccatgtcggccaaggagaagagcaaatttgaagacatggccaaaagcgataaggcaagatacgacagggaaatgaagaattacgttcccccgaaaggcgacaagaagggaaagaaaaaggatcctaacgccccaaagagaccgccaagcgctttctttctgttttgcagcgaacacaggcccaaaatcaagagcgagcacccggggctcagcatcggggacacggctaagaaactgggtgagatgtggtcgtag

SEQ ID NO: 190683 - DNA, 603 bp, synthetic construct
  misc_feature 1..603: note = Description of Artificial Sequence: Synthetic coding sequence
  source 1..603: mol_type = other DNA
atggccaagggcgaccccaagaagcccaagggcaagatgagcgcctacgccttcttcgtgcagacctgcagagaggagcataagaagaaaaaccctgaagtccccgtaaatttcgccgaattttctaagaagtgttccgagcggtggaagactatgagcggtaaggagaagtcaaaattcgatgaaatggctaaggcagataaggtgcgttacgaccgagaaatgaaggattatgggccagccaaaggtggcaagaagaagaaggacccaaacgccccaaagcgtccccctagtgggtttttcctgttctgctcagaatttcgcccaaagattaagtccacaaatcctggcatcagtattggggacgtggcaaagaaactcggagagatgtggaacaacctcaacgatagtgagaagcaaccgtatatcacaaaggctgctaagctgaaggagaaatatgaaaaggatgtcgctgactataagtcaaagggcaagtttgatggcgcgaaaggacccgccaaagtggcccggaagaaggtcgaggaagaggacgaagaagaagaagaagaagaggaagaagaggaggaggaagaggacgagtag

SEQ ID NO: 190684 - DNA, 567 bp, synthetic construct
  misc_feature 1..567: note = Description of Artificial Sequence: Synthetic coding sequence
  source 1..567: mol_type = other DNA
atggccaagggcgaccccaagaagcccaagggcaagatgagcgcctacgccttctttgtccagacatgtagggaggagcacaagaagaagaatccggaggttcctgttaattttgcagagttcagcaaaaagtgttccgagcgctggaagaccatgtctgggaaagagaagtcaaaattcgatgaaatggcgaaggccgacaaggtacgatatgaccgagaaatgaaggactatggcccagctaaggggggcaagaaaaaaaaggatccaaacgctcctaagcggcctccctcaggctttttcctcttttgctcagaatttcgaccaaaaatcaaaagcactaaccctggaattagcatcggggacgtggccaaaaagttgggcgagatgtggaataacctgaacgatagtgagaagcagccatacattacaaaagccgctaagctgaaagaaaaatacgaaaaggacgtcgcagattacaagtccaaaggcaagttcgacggggcaaaaggcccagccaaagtagcacgcaagaaagtggaagaggaggatgaagaggaagaatag

SEQ ID NO: 190685 - DNA, 462 bp, synthetic construct
  misc_feature 1..462: note = Description of Artificial Sequence: Synthetic coding sequence
  source 1..462: mol_type = other DNA
atggccaagggcgaccccaagaagcccaagggcaagatgagcgcctatgctttcttcgtccaaacttgccgggaagagcacaagaaaaagaatcccgaagtccccgtgaatttcgcagagttctccaaaaaatgttcagaaaggtggaaaaccatgagtgggaaggaaaaatctaaatttgatgagatggcgaaagcagataaagtacggtacgatagggagatgaaagattatgggcccgcaaaagggggcaaaaagaagaaagacccaaatgccccgaagaggcccccctccgggttttttctgttttgttcagaatttaggcccaagataaaatccacaaatcccggcatcagtatcggtgacgtggcaaagaaattgggagaaatgtggaacaacctgaatgactctgaaaagcagccatacatcaccaaggccgccaagctcaaagaaaagtattag

SEQ ID NO: 190686 - DNA, 603 bp, synthetic construct
  misc_feature 1..603: note = Description of Artificial Sequence: Synthetic coding sequence
  source 1..603: mol_type = other DNA
atggccaagggcgaccccaagaagcccaagggcaagatgagcgcctatgcctttttcgtacaaacgtgtcgcgaggagcataaaaagaagaaccccgaggtgcctgttaattttgcagaatttagtaagaaatgttccgagaggtggaagacaatgtctgggaaggaaaaatccaaattcgacgagatggccaaggccgataaggtccgatacgaccgcgaaatgaaggattatggtcccgccaagggggggaaaaaaaaaaaggaccctaacgctcccaagagacctcccagcggcttcttcctcttttgtagcgaattccggcccaagattaagtctacaaatcccggaatcagcataggggacgtggctaaaaaactgggtgagatgtggaataacctgaacgattctgagaagcagccctacatcacaaaggcagcaaaactaaaagagaaatacgaaaaggatgtggctgactacaaaagcaaagggaaattcgacggcgctaaaggtccagcgaaagtcgcccggaaaaaggtcgaagaagaggacgaggaagaggaggaggaagaggaggaggaggaggaggaggaagatgagtag

SEQ ID NO: 190687 - DNA, 582 bp, synthetic construct
  misc_feature 1..582: note = Description of Artificial Sequence: Synthetic coding sequence
  source 1..582: mol_type = other DNA
atggccaagggcgaccccaagaagcccaagggcaagatgagcgcctacgccttttttgtacagacgtgtcgcgaggagcataaaaaaaagaatcccgaggtaccagtgaacttcgcagagttctccaaaaaatgcagcgaacggtggaagaccatgagtggaaaggagaaaagtaagtttgacgagatggcgaaagccgataaggtaaggtacgatcgtgaaatgaaggactacggccctgccaaaggaggtaagaagaagaaggaccctaatgctcccaagcggccacccagcgggttctttctcttctgcagtgagtttaggcccaagattaaatccaccaatcctggcatcagtattggcgacgtagccaaaaaactcggagaaatgtggaacaatctgaatgattctgaaaaacagccctatatcactaaagctgccaagcttaaagagaagtatgagaaagacgtcgccgactacaaaagcaaggggaagtttgacggagcaaaagggcctgcaaaagttgctagaaaaaaggtcgaagaagaggatgaggaggaggaagaggaggaggaggagtag

SEQ ID NO: 190688 - DNA, 273 bp, synthetic construct
  misc_feature 1..273: note = Description of Artificial Sequence: Synthetic coding sequence
  source 1..273: mol_type = other DNA
atgcccaagcggaaggccgagggcgacgccaagggcgacaaggccaaggtgaaagacgaaccacagcgcaggtctgcccgcttgtcggcgaaaccggcacccccgaagcctgagcccaagcctaaaaaggctccggccaaaaagggcgagaaagtcccaaagggaaagaaaggaaaagccgacgccggaaaggagggcaataatcctgctgagaacggggacgcaaaaacagatcaggcccaaaaagccgaaggtgctggcgacgctaaatag

SEQ ID NO: 190689 - DNA, 234 bp, synthetic construct
  misc_feature 1..234: note = Description of Artificial Sequence: Synthetic coding sequence
  source 1..234: mol_type = other DNA
atgcccaagcggaagagccccgagaacaccgagggcaaggacggcagcaaagttacgaagcaagagccaacccggagaagcgcccgcttaagcgccaagcctgccccccccaaaccagaacccaagccgaggaagacctctgctaagaaggagcctggcgccaaaatcagtaggggcgcaaaggggaagaaagaagagaagcaggaggcaggtaaggagggtacagaaaattag

SEQ ID NO: 190690 - DNA, 300 bp, synthetic construct
  misc_feature 1..300: note = Description of Artificial Sequence: Synthetic coding sequence
  source 1..300: mol_type = other DNA
atgcccaagcggaagagccccgagaacaccgagggcaaggacggctccaaggtaactaagcaagagcctacaagacgttccgcacgcctaagcgcaaaaccagcccctcctaaacccgagcctaagccgcgaaagacatccgcgaagaaggaacccggagccaagataagtcgcggcgcaaagggaaagaaggaggagaaacaggaagccggaaaggaggggacagccccttctgaaaatggcgaaaccaaagccgaggaggcacagaagactgagagcgttgataatgaaggcgagtag

SEQ ID NO: 190691 - DNA, 507 bp, synthetic construct
  misc_feature 1..507: note = Description of Artificial Sequence: Synthetic coding sequence
  source 1..507: mol_type = other DNA
atggtgctgttcttccggatcaacctgcagaccaagaagtgcaagcagaaagggaagggtgagcagagagaaaatcgcccaaagtggctgaccaaaaaacttaaaaagacttatctcaggaaaaccggaaaaaggaggctacgcagggtgcagccattgatgaagcaagagcgtaaaaagccgtcccttatcaacaaccacataccctgcctgatcagtggaccttgcctgccaagttgcaccattcaacgcaatatttttatcaactatttcgtaaatgcgtcattcctggtggcgctcgaaacattccttaggcgtagggagtctcacctaattccatttttcaagtgcaagtgtttctttctgaggggagaaataatctgttggctattcatattttggtacaaccagaaaattgtgtgggatatcgaactctgggaggctttgacagtttctggggtttctttgacatttcatagatggggagtgagcttctatattctgtag

SEQ ID NO: 190692 - DNA, 303 bp, synthetic construct
  misc_feature 1..303: note = Description of Artificial Sequence: Synthetic coding sequence
  source 1..303: mol_type = other DNA
atgcccaagcggaaggtgagcagcgccgagggcgccgccaaggaggagcccaaaaggcgtagtgctagactgagcgctaagccacctgcaaaagtggaggccaagccaaagaaggcagctgccaaggacaaatcttcagataagaaagtgcaaactaaggggaaaaggggagccaaaggaaagcaggcggaggttgcgaaccaagagaccaaggaggacctgccggccgagaacggggagaccaaaaccgaagagtctcctgcaagtgatgaggccggcgaaaaggaggctaagtccgactag

SEQ ID NO: 190693 - DNA, 582 bp, synthetic construct
  misc_feature 1..582: note = Description of Artificial Sequence: Synthetic coding sequence
  source 1..582: mol_type = other DNA
atgggcaagcagaacagcaagctgcggcccgagatgctgcaggacctgagagagaacaccgaattctctgagctagagctccaggaatggtataagggatttttaaaggattgccccaccgggattctgaacgttgacgagtttaagaagatctacgctaattttttcccctatggagacgcaagcaaatttgcagagcatgtgttcagaactttcgatactaatagcgatgggactatcgattttcgcgagttcattatcgccttgtccgtcacatcccggggacgcttggaacagaaacttatgtgggcattcagcatgtacgacctcgacggcaatggatacattagcagggaagaaatgctcgaaatagtccaggccatttacaaaatggtgagttctgttatgaaaatgcctgaggacgagtctacacctgagaaacggactgaaaagatttttcgccagatggatacgaacaacgacggaaaattaagcctggaggaattcatccggggggctaaatcagatccatctattgtcaggctcctccaatgcgatccttctagcgctagccagttctag

SEQ ID NO: 190694 - DNA, 582 bp, synthetic construct
  misc_feature 1..582: note = Description of Artificial Sequence: Synthetic coding sequence
  source 1..582: mol_type = other DNA
atgggcaagcagaacagcaagctgcggcccgaggtgctgcaggacctccgggagaatacagagttcaccgatcacgaactccaggaatggtacaaaggtttcttaaaggactgtcccaccgggcatctgactgtggacgagtttaaaaaaatatacgcaaatttctttccatatggtgatgcgtctaaattcgccgagcacgtatttaggacttttgacaccaacggagatggaacaatcgactttcgtgagttcattatcgctctcagcgtcacctcccggggcaaattagagcagaagttaaagtgggctttttctatgtatgacttggacggaaatggttacatctctagatctgagatgctggagatcgtgcaagctatctacaagatggtaagtagtgtgatgaagatgcccgaggatgagagtactccagaaaagcgtactgacaagatattccggcagatggataccaataatgacggaaagctctcactcgaagaattcatcagaggcgcgaaatccgaccctagcattgttcgtttgctacaatgcgatccatcctctgcctcacaattttag

SEQ ID NO: 190695 - DNA, 582 bp, synthetic construct
  misc_feature 1..582: note = Description of Artificial Sequence: Synthetic coding sequence
  source 1..582: mol_type = other DNA
atgggcaagcagaacagcaagctgcggcccgaggtgctgcaggacctccgtgaaaacactgaatttactgatcacgaactgcaggagtggtacaaagggtttcttaaagactgtccaacagggcacctgactgtggacgagtttaaaaagatctacgctaactttttcccttacggcgacgcaagcaagttcgccgagcatgtgttcagaacttttgatactaatggagacggtaccattgacttcagggaatttatcatagcactgagcgtgacttctaggggtaagctagaacagaaattgaaatgggctttctccatgtatgacctggacggcaacggatatatttcgcgttcagagatgcttgagattgttcaggctatttataaaatggtctcctccgtgatgaagatgcccgaagatgagtccacgcctgagaagaggaccgacaagatttttagacagatggatactaataatgacggtaagttatccctggaagagttcataagaggggccaaaagcgatccatccatcgtaaggctgctccagtgcgatccttcatctgccagccagttttag

SEQ ID NO: 190696 - DNA, 93 bp, synthetic construct
  misc_feature 1..93: note = Description of Artificial Sequence: Synthetic coding sequence
  source 1..93: mol_type = other DNA
atgggcaagcagaacagcaagctgcggcccgaggtgctgcaggacctcagggagaataccgaattcacggatcacgaactgcaggagtggtag

SEQ ID NO: 190697 - DNA, 3054 bp, synthetic construct
  misc_feature 1..3054: note = Description of Artificial Sequence: Synthetic coding sequence
  source 1..3054: mol_type = other DNA
atgaagctgctgaagcccacctgggtgaaccacaacggcaagcccatattttcagtagacatccacccagacgggaccaaattcgctacagggggccaggggcaggatagtggcaaggtggtgatttggaacatgagcccagtcctccaggaagacgacgagaaagatgaaaacattcctaaaatgctctgtcagatggacaaccacctagcgtgtgttaactgtgtaagatggagtaatagtggtatgtacttggcttctggcggggatgacaagctgataatggtgtggaaaagggcaacttatattgggcctagcacggtctttggcagctccggaaaattagctaacgtggaacagtggcgatgtgtcagcattctgaggaatcattcgggggacgtgatggacgttgcttggtctccccatgatgcttggctggctagctgtagtgtggataataccgtagttatttggaacgcagtgaagtttcctgagatactagccacactcagagggcattctggtctggtcaagggcctaacctgggaccctgtggggaaatacatagcttcgcaagcagacgacagatctctgaaagtctggcggaccctggactggcagctggagaccagcattacaaagccttttgatgagtgcggcggcacaacgcacgtgctgcggctctcttggtctcctgacggacactacttggtgtcagcccacgccatgaacaactcaggtcccacggcccagattatcgaacgcgagggctggaaaaccaacatggacttcgtaggccacaggaaagctgtcacagtggttaagttcaatccaaagatcttcaagaagaagcagaaaaatgggtcaagtgcaaagccgtcttgtccatactgttgttgcgctgtgggcagcaaggaccgaagtttgtccgtgtggctgacgtgcctaaaacggcctctggtagtgatccacgaactgtttgacaaatcgatcatggacatctcctggaccctgaatggacttgggatcctcgtgtgttcaatggatgggtctgtcgcgtttctcgacttctcccaggatgagttgggtgatcccctgtctgaagaggagaaatccagaatccaccagtccacctacggtaaatctcttgccataatgacagaagcccaactaagcacagctgtcatcgagaatcccgaaatgttaaaataccagaggaggcagcagcagcagcagctggaccagaagtcagccgccacaagggagatggggtcagccacgtctgtagcaggtgtggtgaatggcgaatccctggaggatatcagaaagaatctgttgaaaaagcaggtggagactcgaaccgcagacggcagacgtagaattacaccgctgtgtattgctcaactcgacacaggggatttttcaactgccttttttaacagcatccccctttcaggttcgttggccggcacaatgctcagttctcacagcagcccacaacttctccccttggactccagcactcccaatagcttcggcgcttccaaaccatgtacagagccggtggttgcagcatccgcccgaccggcgggcgatagtgtcaataaggatagtatgaacgctacctccacgcccgccgcattgtcgccatctgtactcactaccccctctaagattgaacctatgaaggcatttgactcgaggttcactgaacgaagtaaagccacccccggcgccccggcgttaacatccatgactcctacagccgtggagcggctaaaggaacagaatctggtgaaggaactccggcccagagatctgctggagagctcttctgacagcgacgaaaaagtgcccttagccaaagctagctccctatctaagcgcaaacttgagctggaggtggagaccgttgagaaaaagaagaaagggcgcccaaggaaggattcgaggctgatgccggtgagtctgtctgtgcagtctccggccgcactgaccgcagaaaaggaagccatgtgcctgagtgcccctgcactggcactgaaattacctataccatcaccacagagggcattcaccctgcaagtgagctctgaccctagcatgtacatcgaggtggagaacgaggttaccgtggtcggtggagtgaagctgagcaggctgaagtgtaaccgggaggggaaagagtgggagacagtgctaacaagcaggatactgaccgcagcgggatcgtgcgatgttgtgtgtgtagcctgcgaaaagcggatgctttccgtgttcagcacttgcgggcgaagattgctctccccgatactcctcccctcccccataagtaccctccattgtactggttcgtatgtcatggccctcacggccgctgcaaccctaagcgtctgggatgtgcatagacaagtcgtggttgttaaagaggaaagccttcatagtatacttgccgggagcgatatgactgtttcccagatcttactgactcagcatggaatccctgtgatgaacctgtcagatggaaaagcttactgtttcaatccgtctctgtcaacatggaacctggtgtcagacaagcaggattcgcttgcacagtgtgctgatttccggtcatccctccccagccaggatgccatgctctgtagcggacctctggcaattatccagggtcgcaccagtaactcaggaagacaggcagcccggctgttttcagttccccacgtggtgcaacaggagactaccttagcctatttggagaatcaagtggccgccgcccttaccctgcagagttcccacgaatatagacactggctcctggtgtatgcccgctatctggtgaatgaaggcttcgagtatagactcagagaaatctgcaaggacctcctcggccctgttcactactcaactggaagtcagtgggaaagcactgtggtgggcctgaggaagcgggaattgttgaaggagctgctacctgttattggtcagaacttacgatttcaaagactctttaccgaatgtcaggagcagttggacattctgagagacaaatag

SEQ ID NO: 190698 - DNA, 2433 bp, synthetic construct
  misc_feature 1..2433: note = Description of Artificial Sequence: Synthetic coding sequence
  source 1..2433: mol_type = other DNA
atgaagctgctgaagcccacctgggtgaaccacaacggcaagcccatcttctcagtagatattcaccccgacggcacgaagtttgcgaccggcgggcagggccaggacagcggtaaggtggtcatttggaacatgtcgcccgtcctccaggaggacgatgagaaggacgaaaacattccaaaaatgctgtgccagatggacaaccacctcgcatgtgtcaactgcgtccggtggagcaattcaggcatgtatctcgcttcaggaggagacgataagttgataatggtatggaaaagggccacttatatcgggccctccactgtctttggcagcagcgggaaattagccaatgtggaacagtggcgatgcgtgagtatcctgcggaaccacagcggcgatgtcatggatgttgcatggagcccacacgatgcctggctggcctcttgttcagttgacaatactgttgtgatctggaacgctgttaagttcccagagatacttgccaccctgcggggacactcaggactagttaagggactgacgtgggaccctgtcggcaaatacattgcaagtcaggcagatgatagaagtctgaaagtctggaggacattagactggcagcttgaaacatcaattactaagcccttcgacgagtgcggaggcactactcacgtcttgagactctcctggtcaccagatggccattatctggtatcagcacacgccatgaataattctggccccaccgctcagattatcgagcgagagggatggaaaaccaatatggattttgtgggtcaccgcaaagctgtcaccgtcgtaaagttcaatccaaaaatctttaaaaaaaaacagaaaaacggcagttccgccaagccatcatgtccttactgttgctgtgccgtaggatcgaaagacagaagcctgagtgtctggttgacttgtctgaagcggccccttgtcgtaattcacgagctgtttgacaagtcaatcatggatatttcttggaccttaaatggtcttggtatcttggtgtgctccatggatggatccgtggccttcctcgacttctcccaggatgagctgggggatcctctttcagaagaggaaaaatcgagaatccaccaatccacctacgggaagtccctcgccatcatgacggaggctcagctgagcaccgccgtcatcgagaacccggaaatgctgaagtaccaaaggaggcagcagcagcagcaactcgaccaaaagtccgcggcaactagggagatgggcagtgcgacatctgtggccggcgtggtcaatggggaaagtcttgaggatatcagaaaaaacctgttaaagaaacaggtcgagacgcggactgccgatgggcgcaggagaatcacgccactatgcatcgcgcagttggatacgggagatttcagcaccgctttctttaattcaatcccgctgtctggcagccttgccggcacaatgctgtcatcgcacagcagcccacagctgctgccgcttgattcttctacccccaattcctttggcgcaagcaagccgtgcacagagcccgtggtggctgccagcgcgaggccagcaggggacagtgtgaacaaggatagcatgaacgcaacatctacgcccgcagccctttcgcccagcgtcctgactacacccagcaagatagagcctatgaaagccttcgactcacgcttcaccgaacgctcgaaggctactcctggagctcctgcccttaccagtatgacaccaacggccgtcgaaagagatgtccatcggcaggtggtggtggtcaaagaggaatctctgcactcgattcttgctgggtccgatatgacagtatcgcagattctactgactcaacacggtatccctgtgatgaatctgtccgacggtaaagcatattgtttcaacccatctctgagcacttggaacctggtaagcgacaagcaggactcactggcccagtgcgcagacttcagaagctccctcccttcacaggacgcaatgctgtgtagcggccccctggcaatcatacaaggcagaacttcgaattccggaaggcaggccgccagactttttagcgtgcctcacgtcgtccagcaggagactaccctcgcttacctcgaaaatcaggttgccgcagctcttacactgcagtcgtcccatgaataccgccattggctgcttgtgtatgccagatatctggtgaatgagggctttgagtaccgtctcagggaaatttgcaaggatctactaggccctgtgcattacagcacaggatcccaatgggagtccactgtcgtgggcctccgcaaacgggaactgcttaaagaactactgcctgtcatcggccagaatctcaggttccaaaggttattcacagaatgccaggaacagttagatatcctgagagataagtag

SEQ ID NO: 190699 - DNA, 1815 bp, synthetic construct
  misc_feature 1..1815: note = Description of Artificial Sequence: Synthetic coding sequence
  source 1..1815: mol_type = other DNA
atgctgagcagccacagcagcccccagctgctgcccctggacagcagcaccccaaacagcttcggagcttccaagccatgtaccgagcctgttgtcgctgctagcgcccgcccagccggggacagcgtcaataaagattccatgaacgcaaccagcactcccgctgcgctgagtccctctgtactcaccaccccatctaagattgaacccatgaaagctttcgacagcagattcacggagaggtccaaagccacacccggcgcacccgctctgactagcatgaccccaacagccgtagaaaggctgaaggagcagaatctagtgaaggagttgcgtccgcgtgatctgctggagtcctcatcggattctgatgaaaaggttcctctggctaaagcctcatctctgtctaagcgaaaactagagcttgaggtggagacagtggagaagaagaagaagggccgacccaggaaggattcgagattgatgccagtctcactgagcgtgcaatcccctgccgctctcaccgccgagaaggaggcgatgtgcttgtctgcacccgcactagccctcaagctgccaatcccttcaccccagcgggcttttaccctccaggtcagcagcgaccctagcatgtacatagaggtcgaaaacgaggttaccgtggttggcggagtgaagctctcccgactgaaatgcaaccgtgagggcaaggagtgggagactgtcctgactagccgcatcttgactgctgcgggctcctgtgatgttgtctgtgtcgcttgcgaaaaacgcatgttatcggttttctccacctgcggccgccggctgctgtctccgatacttttgcccagcccaatttcaaccctacattgtacaggaagttacgtgatggcccttacggcggctgcaaccctaagtgtgtgggacgtccatcggcaggtggtggtcgtgaaagaggagagtctccacagcattctggctggctctgacatgacggtaagccagatcttgctcacacaacacggcattcctgtcatgaacctctcggacggtaaggcatactgtttcaatccaagcctttccacatggaatctggtgagcgataaacaggacagtctcgcccaatgcgccgattttcgcagtagtttgccctcccaggacgccatgctgtgttcaggacccctggcgataatccaggggagaactagtaacagcggtcgtcaagctgcccgccttttctctgtaccccacgtggtgcagcaggagacgaccctggcatacctagaaaaccaggtcgcggcagccctgacactccaatcaagccacgagtatcgacattggctgctggtgtacgctcgttacctcgtcaacgaggggtcagccgaggagggggcagccgaaggggcggccacctctcatcgggccgagccaccgattcccgcccctttgcacagggtcagcggcaccgctaggcaccccgaagggcaggtcgcctgcccgagcttgccctggctgcaacaaggtcaggggcacacactcgcggccgacgatatgcaggaccgcctctccccagaccaggcagtggggggaggcgatacagggagaaggtgtgctgtgctacaccagagacagccttcgtcactcggaagatgtgcgttatgccctgggtctgatatcgctagcggagggggttcttctagtcttcctccctcccctcgctgcggcgcccgcgccggagcactacctcggtgccccggggcctcaaaggcagtgccagggctgcccagtcctgctcgccctcaaggcggacactag

SEQ ID NO: 190700 - DNA, 2922 bp, synthetic construct
  misc_feature 1..2922: note = Description of Artificial Sequence: Synthetic coding sequence
  source 1..2922: mol_type = other DNA
atgagccccgtgctgcaggaggacgacgagaaggacgagaacatccccaagatgctgtgccaaatggataatcatctagcctgtgtgaactgcgtccgatggagcaatagcgggatgtacctggctagtggaggagacgataagttaattatggtttggaagcgagcgacctacatcggcccatctactgttttcggaagttcaggtaaacttgcaaatgtcgagcagtggagatgcgtgtccattctgagaaatcacagcggggacgtgatggacgtggcctggtctcctcacgacgcgtggttggccagctgctcggtggataataccgtggttatatggaacgctgttaaatttcctgagatcctagctactctcaggggccattcaggtctggtgaaaggtctaacctgggatcccgtgggcaaatatatcgcctcccaggcagacgaccgcagcctgaaggtatggcggactctggactggcagttagaaacctccattacaaaaccgtttgacgagtgcgggggaactacccacgtcttgcgcctgagctggtcccccgacggacattacttagtgtccgctcacgcaatgaacaactctggccccactgcacagatcatagagcgcgagggctggaaaactaatatggactttgtgggacaccgcaaggccgtgacagtcgtcaaattcaaccccaagattttcaagaaaaagcaaaagaatggttcatccgctaaacctagttgcccctactgctgttgcgcggttggcagcaaggacaggagcctgagcgtatggcttacgtgtctgaaaaggcctctggtggtgatccacgagttgttcgataagtcaattatggacatttcttggaccctaaacggcctagggatccttgtatgcagtatggacggttcggtggcatttctggatttctcccaggatgagctaggtgatcctctgagcgaagaggagaagagccgcatccaccagtccacttatgggaaatcattggctattatgaccgaggcccaattgagcactgcagttatagaaaacccagaaatgctgaagtatcagagacgtcagcaacaacagcaacttgatcagaagagtgctgccacccgagagatgggaagcgcaacatccgtggccggcgtcgtaaacggggaatctctcgaggatatccggaagaacttgctgaagaagcaagtggagacacgaaccgccgacggcagaagacgcataactccgctgtgcattgcccagctcgatacaggagacttctctaccgctttttttaatagcatccccctgagcggctccctcgcggggactatgttgagctctcactcatccccccaacttttacccctggactcctcgacacccaattccttcggcgcttcaaagccatgcacagaacccgtcgtcgccgcatcagccaggccagcaggcgactcagtgaataaagattccatgaacgccacaagcactccagccgcactctcaccgagtgtcctgaccactccttccaaaatcgaaccaatgaaggcctttgacagccgatttaccgagcgttctaaagccacaccaggcgcaccagctctgacatcaatgactcccaccgctgtggagcggctgaaagaacagaacctggtaaaggaactccgccctcgagaccttctcgagtccagctctgactccgacgaaaaagtgcctcttgccaaagccagctccctgtccaaacgcaagctcgaattagaagtggaaacggtagagaagaaaaaaaagggacgccctaggaaggattcacggctcatgcctgtaagcctgtctgtacagagccctgcagccctgacagccgaaaaggaggccatgtgtctgtcagccccagcgctagcacttaaactgcccattccaagccctcagagagcttttacgttgcaagtgagctccgatccaagtatgtacattgaggtggaaaacgaagtgacagtggtaggcggggtgaagcttagcaggctgaagtgtaatagggagggaaaagagtgggagactgtactcacaagccgaatcttgaccgcagccggttcttgtgatgtggtgtgtgtggcctgcgaaaaaagaatgttgtccgttttttctacctgcggccgccgtctgcttagcccaatactcctgccctcacccatatccaccttgcattgtaccgggtcgtatgtaatggccttaacggcggcagctacgctgtccgtgtgggatgttcacaggcaggtggtggtggttaaagaggagtctttgcatagtatcctcgcaggttcggacatgaccgtttcacagattctgcttacgcaacatggaatcccagtgatgaacctcagcgatgggaaggcctactgttttaacccctccctgagcacatggaacctggtgagcgataagcaagactcacttgcccagtgtgctgatttcagatcctctctgccatcacaggatgcgatgttgtgcagtgggccattggccatcatccagggccgcacatctaatagtggccggcaggctgccagactgtttagtgtgcctcatgtagtgcaacaggagactaccctggcctacctggagaaccaagtcgctgccgccctgaccctccaatcatcccacgaatatcgtcattggctactggtgtatgcgaggtatctggtgaacgaggggttcgagtacagactaagagagatatgtaaagatttattgggccctgtgcactacagtacaggctctcagtgggagtccaccgtggtgggtctgagaaaaagagagctgcttaaagaactgttacccgtgatagggcaaaacttgcgattccagcgactcttcacagagtgccaggagcagctagatatactgagagacaagtag

SEQ ID NO: 190701 - DNA, 2421 bp, synthetic construct
  misc_feature 1..2421: note = Description of Artificial Sequence: Synthetic coding sequence
  source 1..2421: mol_type = other DNA
atgagccccgtgctgcaggaggacgacgagaaggacgagaacatcccaaagatgctctgtcagatggataaccacctcgcgtgtgtgaattgtgttaggtggtccaattcaggcatgtacctggcatccggcggtgatgataaactgatcatggtgtggaagagggccacctatatcggacctagtaccgtctttggctcatccggtaaactggctaacgttgagcagtggagatgtgtaagcattttgcgcaatcactctggcgatgtcatggacgttgcctggagcccgcatgatgcgtggttggccagttgctctgtcgataacaccgtcgttatctggaacgccgtgaaattcccagagatcttggcaacgctgcgcggtcactccggtctcgtcaaggggttgacatgggatccagtcggaaagtatatcgcatcacaggcagatgaccgctcacttaaagtttggcggaccctggactggcagttggaaacaagtattactaagcccttcgacgagtgcggggggacaactcatgtcctgcgcctatcctggtcccctgacggacattatttagttagcgcccatgctatgaataacagtggcccaacagcgcagataatcgaacgggagggctggaaaaccaacatggactttgtcgggcatagaaaagcggtgaccgtggttaaattcaatcctaagatcttcaagaaaaagcagaaaaatggttcttcagctaaaccaagttgcccctactgttgttgcgccgtgggaagcaaagacaggtcccttagtgtctggttaacatgcttgaaacggcccctagtggtcatccacgagctgtttgataaatccataatggatatttcttggacactcaacggactgggcattctcgtttgcagcatggacggcagtgttgcgtttctcgatttctctcaggatgagcttggtgacccactctcggaagaagaaaaaagcagaatacaccagtctacctatgggaaatccctagccataatgacagaggcgcagctgagcacagccgttatagaaaaccccgaaatgctgaaataccaaaggcgccagcagcagcagcagttagatcagaaaagcgcggccaccagagaaatggggagtgcaacgtctgtcgccggagttgtgaacggcgagtctcttgaggatataaggaagaacctcctgaagaaacaggtggagacaaggaccgccgacggtaggcgtagaatcaccccgctgtgtatcgcccagcttgacaccggcgacttcagcaccgcatttttcaactccataccattgtccggcagtctcgctggcacaatgcttagctcccatagttctccgcagttattgccactggattcgtccactcccaacagctttggggcgagcaagccctgcacggagcctgtggtagcagcctctgcgcgccccgccggggattccgtgaataaggacagcatgaatgccacaagcaccccggccgctctatcccccagcgttctgacaaccccttccaaaattgaacctatgaaagcttttgactcacgcttcaccgaaagatcaaaggctacccctggagctccagctctcactagtatgacacctactgcagtcgagcgtctcaaagaacaaaatctcgtgaaggaactgaggccccgcgaccttcttgaatccagcagcgattcagacgagaaagtgcccctcgcaaaagccagctcactgtccaaacggaagctggagcttgaagttgagaccgtcgaaaagaagaaaaagggacgaccacggaaagatagcagactgatgcctgtgtccttatcagtccaatctccagctgcactgaccgccgaaaaggaggcaatgtgtctgagcgcaccggccctcgcgttgaagctccctatcccctctccacagagggccttcacacttcaggtgtccagcgatccctccatgtacattgaggtcgaaaatgaggtcacggtggtcggcggcgtgaagctcagcaggctgaagtgtaatcgggaaggcaaggaatgggaaacagtgctcactagtcgcattctcactgctgccggctcttgcgacgtggtatgcgttgcctgcgaaaagcggatgttatcagtgttcagcacttgtgggcggcgattgcttagtcccattctgctgccctccccgatctccacattgcactgcacagggtcttacgtgatggcccttaccgcagctgctacactgagcgtgtgggacgtgcatagacaggtggtggttgtcaaagaagagagtcttcactctatactcgccgggacttggtttctaaccagtcgaacgcattggctgtccgtccagacactgggagccgcatgtcacccgagaactccttgttgcgcccaagatcgctag

SEQ ID NO: 190702 - DNA, 156 bp, synthetic construct
  misc_feature 1..156: note = Description of Artificial Sequence: Synthetic coding sequence
  source 1..156: mol_type = other DNA
atggccagcagcatgcggagcctgttcagcgaccacggcaagtacgtggagtcattcaggcgcttccttaaccattcaacagaacaccagtgtatgcaggaattcatggacaaaaagctacccggtatcattggcagataccagaactgctgctag

SEQ ID NO: 190703 - DNA, 879 bp, synthetic construct
  misc_feature 1..879: note = Description of Artificial Sequence: Synthetic coding sequence
  source 1..879: mol_type = other DNA
atggccagcagcatgcggagcctgttcagcgaccacggcaagtacgtggaatctttccgcaggttcctgaatcactcgactgagcatcagtgtatgcaggagtttatggacaagaagttgcccggtatcattggcagaattggcgataccaagtcagaaattaagattctcagcatcggtggcggcgctggcgaaatcgatctacaaatcctcagcaaggtgcaggctcagtaccctggggtgtgtatcaacaacgaagtggttgagcctagcgctgaacagatcgccaaatataaagaactggttgccaagaccagcaacctagagaatgtgaagtttgcctggcataaggaaaccagctctgagtatcaatcccgcatgcttgaaaagaaggagcttcagaaatgggactttatccacatgatccagatgctttactacgtgaaagacatacccgcaactctgaagttctttcatagcctcctcggcaccaacgcaaaaatgctgattattgtggtaagtggtagctcggggtgggataagctgtggaaaaagtacggctccagatttccacaggacgacctctgccaatacattacctccgatgacctgacccagatgctggacaacctgggcctgaagtatgaatgttacgatctgctgtcaactatggatatctctgattgtttcatcgatggaaacgagaatggggatcttctgtgggactttctgacagaaacctgtaacttcaacgccacagcaccaccagacctgcgggctgagctgggcaaagatttgcaggaacctgagttctccgcgaaaaaggagggcaaagtactgtttaacaacacgctttcatttatcgtcatcgaagcgtag

SEQ ID NO: 190704 - DNA, 381 bp, synthetic construct
  misc_feature 1..381: note = Description of Artificial Sequence: Synthetic coding sequence
  source 1..381: mol_type = other DNA
atggccagcagcatgcggagcctgttcagcgaccacggcaagtacgtcgaaagcttcaggagattcctgaatcacagcaccgaacatcaatgcatgcaagagtttatggataagaagctccccgggatcattgggcgtatcggcgatacaaaatccgagatcaagatactttcaattggaggaggtgcagactgtctgatacgcggaagctcccgcgtgctgaaacggaattcatgcttcatactttgttccactcgtcaaaaggataaaccaggaatgaggatccacgacgagcgcagttcggaactgcccttcggtgctgcgaggcttgaatctaagtcggcgtttccttcatttttggtgtctttcattctcttctag

SEQ ID NO: 190705 - DNA, 879 bp, synthetic construct
  misc_feature 1..879: note = Description of Artificial Sequence: Synthetic coding sequence
  source 1..879: mol_type = other DNA
atggccagcagcatgcggagcctgttcagcgaccacggcaagtacgtcgagagcttccgccggttcttgaaccattccacagaacatcagtgcatgcaggagttcatggataagaaattgccagggatcattggccgcatcggcgatactaagagcgaaatcaaaattctgtctattggaggaggagcgggagagatcgacctgcagatcctgagcaaggtacaggcacagtaccccggtgtgtgcatcaacaacgaggtcgtggagccttctgctgaacagattgctaagtataaggaacttgtagctaagaccagcaatctggaaaatgtgaagtttgcatggcacaaggagaccagcagcgagtaccagagccgtatgctggagaagaaagagctgcagaagtgggattttatccacatgattcagatgctttattacgtcaaggatatcccggctacactgaagttctttcactcgttgttaggaacgaatgccaaaatgcttattatcgttgtctccggttctagcgggtgggacaaactttggaaaaaatacggatcacgatttccccaagatgacctgtgtcagtacatcacaagcgatgacttgacccagatgctagacaatctcggactcaagtatgaatgctatgatctgctctccacaatggacatctccgactgttttattgatggtaatgagaatggggacctcctgtgggactttttgactgagacatgtaactttaatgctacagccccccctgatcttagagccgagcttggaaaagacctgcaagagccggaattctccgccaagaaagaaggcaaggtcctctttaataacactctctctttcatagtcatcgaggcctag

SEQ ID NO: 190706 - DNA, 1464 bp, synthetic construct
  misc_feature 1..1464: note = Description of Artificial Sequence: Synthetic coding sequence
  source 1..1464: mol_type = other DNA
atgagcctgcccaacagcagctgcctgctggaggacaagatgtgcgagggcaataagactaccatggcttccccgcagctcatgcccctggtggtcgtcctgagcacaatctgtcttgtcaccgtggggctcaatctccttgtgctgtacgccgtgcggagcgaacgcaagcttcacactgtgggaaatctttacatagtgtctttatccgtggcagatctcattgtcggtgccgtagtaatgccaatgaacatcctgtacctactgatgagtaagtggtcccttggtcggccattgtgcctgttctggctgtctatggattacgtcgcttctacagcatccattttctccgtgttcattttatgtattgaccgatatcgaagtgtgcagcagccattgaggtatctgaagtacaggacaaagacccgggcctccgcgactatactgggggcttggtttttgtcgtttttgtgggttatcccaatccttggatggaatcattttatgcagcaaaccagcgtccgaagagaggataagtgtgaaacagacttttacgatgtcacttggttcaaggtcatgaccgctatcatcaatttctatctgccgacactcttaatgctttggttctacgccaagatctacaaagcagtgcgacagcactgccagcatagggagctcatcaataggagtctccccagcttttccgaaataaaacttcggcccgagaatccaaagggcgacgcgaaaaagccaggcaaagagtcgccgtgggaagtcctgaagcgcaagcctaaggatgccggaggggggagtgtgctaaagtcaccatcccaaacgcccaaggaaatgaaaagtcctgtcgtgttcagccaggaggacgaccgcgaggtagacaaactctattgtttccctttggatatagtgcacatgcaggccgcagctgaaggaagtagtcgcgattacgtagccgtgaatcgatcgcatggacaactgaagacggatgagcagggtctcaatacccacggtgcctccgaaattagtgaggaccagatgctgggagatagccagtctttctctcgcaccgattccgacaccaccaccgaaacggcccccggaaaaggcaagctgagaagcggttccaatacagggctcgactatatcaagtttacatggaagcggctgcggtcacacagccggcagtacgtgtctggactacacatgaatagggagcgaaaggccgcaaagcagctgggctttatcatggccgcatttatactgtgctggataccgtactttatattttttatggtgattgccttttgcaagaactgttgcaacgagcatctgcacatgttcaccatctggctgggctacattaactcgaccctgaacccactaatctatcccctctgtaatgagaactttaagaagacctttaagcgaatcctgcacataagatcttag

SEQ ID NO: 190707 - DNA, 39 bp, synthetic construct; identical to SEQ ID NO: 84513
  misc_feature 1..39: note = Description of Artificial Sequence: Synthetic coding sequence
  source 1..39: mol_type = other DNA

SEQ ID NO: 190708 - DNA, 1464 bp, synthetic construct
  misc_feature 1..1464: note = Description of Artificial Sequence: Synthetic coding sequence
  source 1..1464: mol_type = other DNA
atgagcctgcccaacagcagctgcctgctggaggacaagatgtgcgaagggaataaaacaactatggctagcccgcagttaatgcccctcgtggtggtcctgagcaccatctgtctcgttactgttgggctgaatttgctggtgctgtacgctgtaaggtctgaacggaaactgcacaccgtcgggaacctgtacatagtctcacttagcgtggcagacctgatagttggcgctgttgtgatgccaatgaacattctgtatctgttgatgagcaagtggtcactcggtcgtcctctctgcttgttttggctgtcaatggattatgtggctagcaccgcttcaatattctcagtgttcatcttatgtatcgacagataccgctctgtgcagcagccgctccgttacctcaagtacagaaccaagacacgtgcgtcagcaactattcttggtgcatggttcctgtccttcctgtgggtgatcccaattctcggctggaaccacttcatgcagcagacgagcgtaagaagagaagacaagtgtgagaccgatttttacgacgtgacatggttcaaggtaatgactgccattatcaatttctacctgcccacattgctcatgctttggttctatgctaagatttataaggctgtgcgtcagcattgccagcacagggaactaatcaacagatctctgccctcattttcggagattaagctgcggccggaaaatcccaagggagatgctaaaaagcctggtaaagaaagcccttgggaagttctcaagagaaagccaaaagacgccggtggagggtccgttctgaaaagtccttcccaaaccccgaaggagatgaaaagtcctgtagtctttagtcaggaggacgatcgggaggttgacaagttatattgctttccccttgatatcgttcatatgcaagcagccgccgaaggatcatcacgtgactatgttgccgttaataggagtcacggtcagctgaaaactgacgaacagggactgaatacccacggagcttctgaaatttctgaggaccagatgctcggcgacagccagagtttttctcggacagacagcgacaccacaactgagactgctccggggaaaggtaaactccgctccgggagcaataccgggttagattatattaaatttacctggaagcggttgcgcagccacagccgccaatacgtgagtggactacacatgaaccgcgaacgcaaggccgcaaagcagcttggctttatcatggccgcgttcatcctgtgctggattccctactttatattctttatggttatagctttctgcaagaactgctgcaatgaacacttgcacatgtttaccatctggctgggctatataaatagcacactcaatcccctcatctatcccctctgtaatgaaaatttcaagaagacctttaagcgcatcctgcatatcagaagctag

SEQ ID NO: 190709 - DNA, 1464 bp, synthetic construct
  misc_feature 1..1464: note = Description of Artificial Sequence: Synthetic coding sequence
  source 1..1464: mol_type = other DNA
atgagcctgcccaacagcagctgcctgctggaggacaagatgtgcgaaggcaacaaaaccaccatggcctccccgcagctcatgccccttgttgttgtgttatccacaatctgtcttgtgactgttgggcttaatttgctcgtgttgtacgccgtgagatcagaaagaaagctgcatacagtgggtaacctgtatattgtgagcctttctgtagccgatctaatagtcggcgccgtcgtgatgccgatgaatattctctatttactgatgtccaaatggtctctcggtcgccccctttgcttgttctggctgagtatggattacgtggcgagtacagcaagtattttctccgtgttcatcttatgcattgatcgctacaggagtgtgcagcaaccacttaggtacttgaagtaccgaacaaaaactcgggcgagcgccaccatcctgggggcatggttcctgtcattcctgtgggtgataccaatccttggctggaatcatttcatgcagcagaccagtgtgagaagagaagacaagtgcgaaaccgatttctatgacgttacctggtttaaggtcatgactgccatcataaatttttaccttccaacacttctgatgttatggttttatgctaaaatttataaggccgtcagacagcattgtcagcaccgcgaactcattaacagatcgctgccatccttctcagagatcaagctcaggccggaaaatcccaagggcgatgccaaaaagcctgggaaggagagcccctgggaggtgttaaagaggaagccaaaggacgcaggcggcggttcggttttaaagtctccttcgcagactccaaaggagatgaaaagccccgtggtgttcagccaagaagatgatcgtgaagtagataagttatattgctttccgctggatatcgtgcatatgcaagctgcagcagaggggagtagtcgtgactatgtcgctgtcaaccgctcacacgggcagctcaagactgatgagcagggcttgaacacacatggggcaagcgaaatttccgaggaccagatgctgggagacagtcagtcgttttctagaaccgacagtgacaccactacagaaacggcccccggtaagggtaaactgagaagcggatcaaatactgggctcgactatatcaagttcacctggaaacggttacgatcccacagccggcagtatgtatctgggctgcacatgaaccgcgagagaaaagccgcaaaacaattgggattcatcatggccgctttcattctgtgttggattccctacttcatcttctttatggtgatcgcattctgtaaaaactgctgcaacgaacaccttcatatgtttacaatatggctcggatacattaacagcaccttgaatccactaatataccccctttgcaatgagaacttcaagaaaacctttaagcgcattcttcacattcgcagttag

SEQ ID NO: 190710 - DNA, 816 bp, synthetic construct
  misc_feature 1..816: note = Description of Artificial Sequence: Synthetic coding sequence
  source 1..816: mol_type = other DNA
atggccgccccccaggacgtgcacgtgcggatctgcaaccaggagatcgtcaaattcgatctcgaggtcaaggctttgattcaggacattcgagactgtagtggccctctgagtgccctgaccgaactcaacaccaaggtgaaggagaaatttcagcagctccggcacaggattcagcctgtgctttaccagcgcgcgttcatctggacagcttccacattttttttcaaacttacgtattctctgacagacttttctagtactcaacatgacttcaatagcccaaccacaccagttactttctctgatctggagcaactagcaaaagaacaggacaaggagtctgaaaaacaattgctgctccaggaagttgaaaaccacaaaaagcagatgcttagcaatcaggcttcttggagaaaggccaacctgacctgcaaaatagctattgacaacttggaaaaggccgagctgctgcaaggaggggacttactaagacagcggaaaactaccaaggaaagtctcgctcagacctcttctacgataactgagtccctcatgggaatcagtagaatgatggcgcagcaggtacagcagtctgaggaagcaatgcagtcactggtcacatcctcccggactatcctagacgctaatgaggagtttaagagcatgtcaggaaccattcagctcggcagaaagctgataaccaaatacaatagacgtgagttaactgataagcttctgattttcctggcactggctctcttccttgccactgtgttgtatatcgtaaaaaagaggttgttcccatttctctag

SEQ ID NO: 190711 - DNA, 1194 bp, synthetic construct
  misc_feature 1..1194: note = Description of Artificial Sequence: Synthetic coding sequence
  source 1..1194: mol_type = other DNA
atggcccccaacggcaccgccagcagcttctgcctggacagcaccgcttgtaagataaccatcaccgtggtgctggctgtcctgatccttatcacagtggcaggcaacgtggtggtttgtctggcagtgggcctgaatcgcagattgcggaacctaaccaactgcttcatcgtatcactggccatcactgacctcctgctggggctgctggtgcttccttttagcgccatctatcagctcagttgcaaatggtctttcggcaaagtgttctgtaacatttacaccagtttggatgtgatgctttgtaccgcgtccattctcaacctgtttatgatttccctggatagatactgtgctgtcatggatcctttgcgataccccgtactagtgacccctgtgcgcgtggccatatcccttgtgctcatctgggtaattagcatcaccctgtcctttttgtctattcatttgggctggaacagcaggaacgagacaagtaaaggcaatcataccacttccaaatgcaaagtgcaagtgaatgaggtttatggcctggtggatggtctggttactttttatttacccctgttgatcatgtgcatcacatactacaggatcttcaaagtcgctcgtgaccaagccaagcggatcaatcacatctccagctggaaagctgcaacaatcagggaacataaggccacggtcactttagccgctgtgatgggcgccttcatcatctgttggtttccgtatttcaccgcgttcgtgtatcgcgggctccgcggggatgacgccataaatgaggtgctggaagcaattgtgctgtggctggggtatgccaattccgcactgaacccaattctctatgccgccctcaatcgcgactttaggaccggctatcaacaacttttctgttgtcggttagccaacaggaattctcataagacttctctaaggtctaatgcatcacagctctccagaactcagagccgcgagccccgacagcaggaagaaaagccacttaaacttcaggtatggtcaggtacagaggtcacagcaccacagggcgcgactgaccggccatggctgtgtttaccagaatgctggtccgtagagctcacgcactcctttatccacctttttattcattccttcgctaacatacaccccatcccaacaacctgtcaggagctgtag

SEQ ID NO: 190712 - DNA, 1173 bp, synthetic construct
  misc_feature 1..1173: note = Description of Artificial Sequence: Synthetic coding sequence
  source 1..1173: mol_type = other DNA
atgcccgacaccaacagcaccatcaacctgagcctgagcacccgggtgaccttggcatttttcatgagcttagtggcttttgcgattatgctcggaaacgcacttgtcatccttgcctttgtggtggataagaacctcagacatcgatcaagctatttcttccttaacttggctatttcggactttttcgtcggtgttatctccatcccactctacataccgcacacactgtttgaatgggatttcgggaaagagatctgtgtgttctggctgacaacggattatctcctctgcacagcaagcgtctacaatatcgtgctgattagttatgatagatacctgtcagtaagcaacgctgtgtcttatcgaacgcaacacacgggagtactgaagatcgtgacactaatggtggctgtgtgggtcttagctttcttagtgaacggccctatgatcttagtaagcgagtcgtggaaagacgaagggtctgagtgtgaacctggcttctttagcgagtggtatattctggccatcacctctttcctagaatttgtgatccccgtgatcctggttgcatatttcaatatgaacatttattggtcactttggaagagggatcacctgagtcgctgtcagagccatcccggtctgacagctgtaagcagcaatatttgtggtcattccttcaggggacggctcagtagtcggcgaagcctgagtgccagcactgaggtgcctgcatctttccacagtgagcgccagagacggaagagctctctcatgttctcctcgcggactaaaatgaattctaacacaatcgccagtaagatgggctcctttagccagtcagatagcgttgcactgcaccagcgggagcacgtcgaactattgcgtgctcggaggctggccaagagcctggccattttgcttggagtcttcgccgtctgttgggccccctactctctgtttaccattgtacttagcttctattcatcggccaccggccccaagagcgtgtggtatcgtatagcgttctggctccagtggttcaatagctttgttaaccccctgctgtaccctctttgccacaaaagatttcagaaggctttcctcaagatcttctgtattaaaaagcagcctctcccttcccagcactcccggtcggtgtcctcttag

SEQ ID NO: 190713 - DNA, 909 bp, synthetic construct
  misc_feature 1..909: note = Description of Artificial Sequence: Synthetic coding sequence
  source 1..909: mol_type = other DNA
atgcccgacaccaacagcaccatcaacctgagcctgagcacccgggtcactctcgcctttttcatgagcctggtcgcatttgctattatgctggggaacgccctcgtgatcctggcctttgtagtggacaaaaatctcagacatagatcctcgtatttttttctgaacttggctatctcagactttttcgtcgtgtctgagtcttggaaagacgaggggtctgaatgcgagcccggcttttttagcgaatggtacattctggccatcacatctttcctggagtttgtgatccccgtgatcctcgtggcttactttaatatgaatatctattggagtttatggaaacgggatcacttgtcaaggtgccagtcgcaccccgggctgacggcggtgagctctaacatttgcggacattcttttcggggcaggctctctagccggcggtccctgagcgcttctactgaggtgcctgctagtttccacagcgaaagacagaggagaaagtcgtccctgatgttctcatcaaggacaaagatgaacagtaataccatcgcatccaagatggggtccttcagccaatctgactccgtggccctgcaccagagggaacatgtggagctgttgcgcgcacggcggctggcgaaaagtttggcgattttactcggcgtatttgccgtatgctgggcaccctacagcctgttcaccatcgttctgtcattctactccagcgccaccgggccaaaatccgtgtggtaccgaatagcattttggctgcagtggtttaatagttttgttaatcctttactgtatcccctgtgtcataagcggtttcagaaagcctttctgaagatcttttgtatcaagaagcagcctcttccatctcagcacagccgttccgtgtcaagctag

SEQ ID NO: 190714 - DNA, 174 bp, synthetic construct
  misc_feature 1..174: note = Description of Artificial Sequence: Synthetic coding sequence
  source 1..174: mol_type = other DNA
atgaagttcttcgtgttcgccctggtgctggccctgatgatcagcatgattagtgcagatagccatgagaaaagacaccacgggtatcgccggaagtttcacgagaagcatcacagccatcgagagtttcctttttacggcgactatgggtcgaactacctctatgataactag

SEQ ID NO: 190715 - DNA, 174 bp, synthetic construct
  misc_feature 1..174: note = Description of Artificial Sequence: Synthetic coding sequence
  source 1..174: mol_type = other DNA
atgaagttcttcgtgttcgccctggtgctggccctgatgatcagcatgatctcagccgacagccatgagaaacggcatcacggttaccgccgcaagtttcacgaaaaacaccactcccatagggaatttcctttctatggagactatggctcaaactatctgtatgataattag

SEQ ID NO: 190716 - DNA, 156 bp, synthetic construct
  misc_feature 1..156: note = Description of Artificial Sequence: Synthetic coding sequence
  source 1..156: mol_type = other DNA
atgaagttcttcgtgttcgccctgatcctggccctgatgctgagcatgactggagccgatagtcacgcaaagcgtcaccacggatacaaacgcaagttccatgagaagcaccactcccatcgtggctaccggagtaattatctgtatgataactag

SEQ ID NO: 190717 - DNA, 156 bp, synthetic construct
  misc_feature 1..156: note = Description of Artificial Sequence: Synthetic coding sequence
  source 1..156: mol_type = other DNA
atgaagttcttcgtgttcgccctgatcctggccctgatgctgagcatgacaggagccgatagccacgctaagaggcaccatggctataaaaggaaattccacgagaaacaccatagtcacagaggctatcgcagcaattacctgtacgacaactag

SEQ ID NO: 190718 - DNA, 1989 bp, synthetic construct
  misc_feature 1..1989: note = Description of Artificial Sequence: Synthetic coding sequence
  source 1..1989: mol_type = other DNA
atgatggagcccgaggagtaccgggagcggggccgggagatggtggactacatctgtcaatatttgtctaccgtgagagagcggcgagtgacccccgacgtgcagcctggatacctcagagcacagctacctgaatctgcgcccgaggatccagacagttgggacagtatcttcggtgatatcgaaaggattatcatgcccggcgtggttcactggcaaagccctcacatgcacgcttattaccccgccctgacgtcatggcctagcttgctgggagacatgctggcagatgccattaactgcctcggatttacctgggcaagttcacctgcctgcaccgagctggaaatgaatgtgatggactggctcgcaaaaatgctcggactcccggagcactttctccaccatcacccaagtagccagggtggaggagtgctacagagcactgtttctgaatcgactcttatcgcactgctcgccgctcgaaagaacaaaattctagaaatgaagacatcagagcctgatgcagatgaaagctgtttaaatgcccggctggttgcctatgcttctgatcaagctcacagcagcgtggagaaagcgggtttgatcagcctggtcaagatgaagtttttgccagtagacgacaacttttccctgaggggcgaggccttgcaaaaagccatcgaagaagacaaacagagggggctggtcccggtcttcgtctgtgctactctagggactacgggtgtctgcgcgtttgattgcctttccgagctcgggcccatatgcgcacgtgaggggctctggctgcacatcgatgctgcgtacgcaggcactgcatttctctgtcctgagttccgggggttccttaaaggcatagagtacgccgatagtttcacatttaatcccagcaagtggatgatggtacacttcgactgcaccggcttctgggtgaaagataagtacaaactccagcaaaccttttccgtgaatcccatttatctgcgacatgccaactcaggagtggctaccgacttcatgcattggcagatcccacttagtagacggtttaggtccgtgaagctctggttcgtgattcgctcctttggtgtaaagaatctgcaggctcacgtgagacatgggaccgaaatggctaaatatttcgagtcacttgtaagaaatgatccctctttcgagattcctgctaagcgccacttgggcttagttgtttttcggctgaagggacctaattgtctgacagagaacgtgctgaaagagatcgccaaagctggtcggctgttccttatccctgccaccattcaagacaaactgatcatccgctttacagtgacttctcagtttaccacgcgggatgacatactgcgtgattggaatctgattagagatgctgccaccttgatcctaagtcagcactgcacgagccaaccgtcaccgcgtgtcgggaatctgatttcccagatacgaggcgcacgggcttgggcttgtggaacctcgcttcagagcgtgagcggggctggcgacgatcccgtacaagctcggaagatcatcaagcagccccagagggtcggagctggaccgatgaagagggagaatgggctgcatctggagaccctgctggatcccgtggatgactgcttctccgaggaagcacctgacgctaccaagcacaaactgtctagctttctctttagctaccttagtgtccagaccaaaaagaagacagtaagaagcctgtcatgtaattcagttccagtctctgctcagaaaccactgcccactgaggcgtcagtgaagaatggaggctcttcacgagtccgaatctttagccgattccctgaagatatgatgatgctgaagaagtctgctttcaaaaagctgattaagttctactctgtgccgtccttccctgaatgctccagccaatgcggacttcagctgccttgctgtcccttgcaggccatggtttag

SEQ ID NO: 190719 - DNA, 2100 bp, synthetic construct
  misc_feature 1..2100: note = Description of Artificial Sequence: Synthetic coding sequence
  source 1..2100: mol_type = other DNA
atgggccaccaccggccctggctgcacgccagcgtgctgtgggccggggtggcgagcctgctgctaccccctgctatgacccaacaactacgaggcgatggactgggcttccggaaccggaacaattccaccggcgtggccggcctctcggaggaagcctccgccgagcttcgacaccatctgcactcgcctcgggaccaccccgacgagaacaaagacgtctccactgagaacgggcaccatttttggtcccaccccgaccgggaaaaagaagatgaggatgtgtctaaagaatacgggcacctgcttccagggcacaggagtcaggatcataaggtaggtgatgagggcgtttctggtgaggaagtgttcgccgagcacggtggccaagcccgaggacatcggggccacggtagtgaagacaccgaggactccgcagagcatcgccaccatttgccgtctcacagaagccactcccatcaggatgaggatgaggatgaggtggtcagctctgagcatcaccaccacatcctgaggcacggccacaggggtcacgacggcgaggacgatgaaggcgaggaggaggaggaggaggaagaggaggaggaggaggcctcaacagagtacggtcatcaggcacatagacaccgcggtcacggcagcgaggaagatgaggatgtgtcagacggacatcaccaccacggacctagccaccggcaccagggccacgaagaagacgacgacgatgacgacgatgacgacgacgatgacgatgatgacgacgtctccatcgaatacaggcaccaggcacaccgccatcagggccacggtatcgaagaagacgaggacgtcagtgacggccaccaccatagagatccctctcatcgccatagatctcacgaggaagatgacaatgatgacgacgacgtgtcaaccgagtatggccaccaagcacaccggcatcaggaccaccggaaggaggaagttgaggcagtgtcgggggaacaccatcatcacgtcccagaccaccgacaccaaggtcatcgagacgaagaggaagacgaggacgtctcaaccgaacggtggcaccaggggccccagcatgtccatcacggactggtggacgaggaagaggaagaagaagagattaccgtgcagtttggacactacgtcgcatcccatcagccacgaggacacaagtctgacgaagaagattttcaggatgagtataagacagaggtgccgcaccaccaccaccaccgagtccctagagaagaagacgaggaagtgtccgctgagctggggcatcaagctccctcccatcggcagagccatcaagacgaggagactgggcacgggcagcgcggctctattaaagagatgtcccaccaccctccaggccacactgtggtcaaggacagaagtcatttgcgcaaggacgactctgaggaagaaaaagagaaagaagaggaccccggcagccatgaagaggacgatgagagctcagagcagggggagaagggtacccatcacggatcccgggatcaagaggatgaagaggacgaggaagaaggccatggattgagcttgaaccaggaagaggaggaagaggaagataaagaagaggaggaggaagaggaggacgaggaacgacgggaagagagagccgaagtgggggcccctctgtctccagaccattccgaggaggaggaagaagaagaggaaggcttggaggaagacgaaccccggttcacaattatccccaacccactcgatagacgggaagaagccgggggcgcatcgagtgaggaggagagcggtgaagatactggaccccaggacgcccaggagtatgggaactatcaacccggctccctctgtgggtattgttcattctgcaacaggtgtaccgagtgtgagagttgccattgcgacgaagagaacatgggcgaacactgcgatcagtgccagcattgccagttttgctacctgtgtcctctcgtttgcgagactgtgtgcgcccccgggagctacgttgattactttagcagcagcctgtaccaagccctggctgacatgctcgagacacctgagccatag

SEQ ID NO: 190720 - DNA, 1170 bp, synthetic construct
  misc_feature 1..1170: note = Description of Artificial Sequence: Synthetic coding sequence
  source 1..1170: mol_type = other DNA
gaggacgacaacgacgacgacgacgtgagcaccgagtacggccaccaagcccacagacatcaagaccatagaaaagaggaggtggaagcagtgagcggggagcaccaccaccacgtcccagaccatcggcatcagggccaccgcgatgaggaggaggacgaggacgtgtccactgagcggtggcatcagggtcctcagcatgtgcatcacgggctggttgacgaagaagaggaggaggaagagattacagttcagttcggccactacgtcgcttcccaccaaccacgcgggcataagagtgatgaggaagactttcaggatgagtataaaactgaggtccctcaccatcaccatcacagggtgccacgcgaggaggatgaggaagtctcagctgaactcggacaccaggctcccagccatcggcagtctcaccaggacgaggagaccggccacggtcagcggggttcaattaaagagatgtcccaccaccctcctggccacacagtggtgaaggatagatctcatctgcgaaaggacgactccgaggaggagaaagagaaagaagaggatccggggtcgcacgaagaagacgatgaaagtagcgaacaaggggaaaaaggaactcatcatggatctcgcgaccaggaggatgaagaggacgaggaagaaggccacggacttagtctgaatcaggaggaggaagaggaggaggatgaggaaagaagagaggaaagggcagaggtgggagcgccccttagccctgatcacagcgaggaagaagaggaggaagaagaaggcctagaagaggacgagccaaggtttactatcatcccgaacccactggaccgaagggaagaagccggtggtgccagcagtgaggaagaatcaggcgaggacaccgggcctcaggatgctcaggaatatggcaattaccagcccggatctctctgcgggtactgctcgttctgcaaccgttgcactgaatgtgaatcgtgccattgcgatgaggagaatatgggtgaacactgtgaccaatgtcaacattgccagttctgctatctctgccccttggtgtgtgaaaccgtctgtgcccccgggagttacgtcgattacttcagcagctcactttaccaggcgctcgcggatatgcttgaaactcctgaaccatag

SEQ ID NO: 190721 - DNA, 1365 bp, synthetic construct
  misc_feature 1..1365: note = Description of Artificial Sequence: Synthetic coding sequence
  source 1..1365: mol_type = other DNA
atgggccaccaccggccctggctgcacgccagcgtgctgtgggccggagtggccagcctgctgctgcctcctgcgatgactcagcagctgcggggtgacgggttgggttttagaaaccgcaacaaggatgtgtccacggaaaacgggcaccacttctggtcccatccggaccgtgaaaaggaggacgaggacgtgtccaaggaatatggccatcttctgccaggccatcgttcccaggaccataaggtgggagacgagggggttagtggggaagaggttttcgccgagcacgggggccaagcgagggggcaccgggggcacggtagcgaggatacagaagactctgctgagcacaggcatcatctgccatcccaccgctcacactcccaccaggatgaagacgaggacgaagtagtgtcgagtgaacaccaccatcatattctgcggcatggtcatcggggacatgatggcgaggatgacgagggcgaggaggaggaagaggaggaagaagaggaagaagaagcttccaccgaatacgggcaccaggcgcatcgtcaccgcggccacgggtccgaggaggatgaggatgtttccgacgggcaccaccaccacgggccaagccatcgccatcaagggcatgaggaggacgatgacgacgacgacgatgatgatgatgacgacgatgacgacgacgtcagcatcgagtaccgccaccaggcccatagacaccagggccacggaattgaggaggacgaagatgtgtccgacggacaccatcaccgggatccttcccaccgtcaccgatctcacgaagaggacgacaacgatgatgatgatgtgtctacagaatatgggcatcaggcccaccggcatcaggaccacaggaaggaggaggttgaagctgtgtccggcgagcaccatcatcatgtgccagatcaccgccatcagggacatcgggacgaggaagaggatgaggatgttagtaccgagaggtggcatcaggggccccagcacgtacatcatggcctcgtggatgaggaggaggaggaggaggagattacagtgcaattcggtcattatgtcgccagtcaccagcctaggggacacaaatccgatgaagaagattttcaggacgaatacaagaccgaggtgcctcaccatcatcaccaccgcgtcccaagagaagaggatgaagaggtgagcgcagaacttgggcatcaggctccctcgcacaggcagagtcaccaggatgaggagacgggccacggacagcgcggcagcatcaaggaaatgagtcatcatccccctggccataccgtggttaaggacagatcacatctgaggaaagatgatagtgaagaatag

SEQ ID NO: 190722 - DNA, 381 bp, synthetic construct
  misc_feature 1..381: note = Description of Artificial Sequence: Synthetic coding sequence
  source 1..381: mol_type = other DNA
atggccgacgagatcgccaaggcccaggtggcccggcccggcggcgacaccattttcggcaaaatcattcggaaggagatcccagcaaaaataatcttcgaggatgataggtgtctggctttccacgatatttctccacaagcccccacccattttcttgtcatccccaagaagcacatctctcagatttccgtcgcagaagacgacgatgagtccctactgggacatctaatgatagtcggaaagaaatgcgctgcagatctgggcttgaataagggttataggatggttgtgaatgaaggcagcgatgggggccagagcgtttatcatgtgcaccttcacgtgttgggagggaggcaaatgcactggcctccgggctag

SEQ ID NO: 190723 - DNA, 492 bp, synthetic construct
  misc_feature 1..492: note = Description of Artificial Sequence: Synthetic coding sequence
  source 1..492: mol_type = other DNA
atggccgccgccgtggtgctggccgccggcctgcgggccgcccggagggccgtggccgcaaccggtgttcggggaggtcaggtgaggggcgccgcaggagtcacagatggcaacgaagtagcaaaggcccaacaggccactcctggaggagctgcacctactattttcagtcgcatactggataagtcacttcctgccgatatcctctatgaagatcaacaatgtctggttttccgggacgtggctcctcaggctcccgtccactttttagtcatccccaaaaagcccatcccacgtatttcccaagcagaggaggaggatcagcagctcctcggccacctgttacttgtggccaagcaaacggccaaggccgaaggtctgggggacggataccgcctggtaatcaacgacgggaagctgggggcccaatctgtataccacctgcatatacatgtattaggcggcagacagctgcagtggccccccggttag

SEQ ID NO: 190724 - DNA, 615 bp, synthetic construct
  misc_feature 1..615: note = Description of Artificial Sequence: Synthetic coding sequence
  source 1..615: mol_type = other DNA
atggccaaggtgcaggtgaacaacgtggtggtgctggacaacccctcacccttctacaaccctttccagttcgaaatcaccttcgaatgtatcgaggacctctctgaagacctggagtggaagataatatatgtcggctctgccgagagcgaggagtatgatcaggtgctcgacagtgtcctggtgggccccgtgcctgccggaagacatatgttcgtatttcaagctgatgcacccaaccccggcttgatcccagacgccgacgctgtgggggtcactgtcgttttaatcacttgtacctaccgcggccaggagtttattagagtcggctattacgtgaacaatgagtatacagagaccgagctgagagagaaccccccagtgaagcccgactttagcaagcttcagagaaacattctggccagcaacccccgcgtgacacgttttcacataaattgggaggacaacaccgaaaaattagaggacgccgagagcagtaaccccaacctccaatcactgctctccacagacgcactgccttctgcctctaagggctggtccacttccgagaactccctgaatgtgatgcttgagtcccacatggattgcatgtag

SEQ ID NO: 190725 - DNA, 1329 bp, synthetic construct
  misc_feature 1..1329: note = Description of Artificial Sequence: Synthetic coding sequence
  source 1..1329: mol_type = other DNA
atggccggcgagggcgaccagcaggacgccgcccacaacatgggcaaccaccttccactgttgccagccgagtcagaagaggaggacgaaatggaagtggaggatcaggactctaaagaggcgaagaagcctaacatcatcaatttcgacaccagtttgcccacctcacatacatatctcggggccgacatggaggagttccacgggaggactttgcacgacgacgatagctgtcaggtgatcccggttttaccacaggttatgatgatcctgatacccgggcagacactcccattgcaacttttccaccctcaagaagtttctatggtgcgcaacttaatccaaaaggatcgcaccttcgccgtgttggcctactccaatgtacaggaaagagaagctcaattcggcacaaccgcagagatttatgcttacagagaggagcaagacttcggtattgaaatcgtaaaggtcaaggccatcggacgtcagcggttcaaagtgctcgaactgcgcacacagtcagacgggatccagcaggctaaagttcagatcttgcctgagtgtgtcctcccgagcacgatgtcagccgttcagctcgagtcgctgaacaaatgccagattttcccaagcaaaccagtgagcagagaggaccagtgcagctataagtggtggcagaagtaccagaagaggaagttccactgcgccaatctgacatcatggcctcgatggctgtatagcctttatgatgcagagactctcatggatcggatcaaaaaacaattacgagagtgggatgagaatttgaaggacgactcactgcccagtaatcccatcgacttctcctatcgcgttgccgcctgcctgccgatagacgatgtgctcaggattcaactcctcaagatcggatctgccattcagcgactgcggtgcgagctagacatcatgaacaaatgtactagcttgtgctgtaaacaatgtcaagagacagagattactactaagaacgagatcttttccttgagcctgtgcggacccatggcagcgtatgtaaaccctcacggttatgtacatgaaacgctgactgtttataaggcatgcaacctcaatctcatcggtagacccagtacagagcatagctggttccctggttacgcctggacggttgctcagtgtaagatctgcgcctcacacattgggtggaagtttacagctactaagaaagatatgtctccgcagaaattttggggactcactaggtccgccctactgcccactatcccggacaccgaggatgaaattagccccgacaaggtgatcctgtgcctgtag

SEQ ID NO: 190726 - DNA, 1308 bp, synthetic construct
  misc_feature 1..1308: note = Description of Artificial Sequence: Synthetic coding sequence
  source 1..1308: mol_type = other DNA
atggccgagcgggccgccctggaggagctggtgaagctgcagggcgagcgcgttcgcgggctcaaacagcagaaggcctccgccgagctgatcgaggaagaggtggcaaagctgctcaagctgaaggcccagctcggacccgacgagtcaaaacaaaagtttgtattgaagactcctaagggaactagagactatagtcctaggcagatggccgttcgagagaaagtgttcgacgtgatcatcaggtgttttaagcgccatggcgctgaggtgattgacactcccgtttttgagttaaaggacttcgatattgccgggaactttgatcctatgattcccgacgcggagtgcctaaagatcatgtgcgagatactgtcgagcttgcagatcggcgactttctggtgaaagtgaatgatagaaggatcctcgatggcatgttcgcgatctgcggcgtctccgatagcaagttcagaaccatttgctcctctgtagataagcttgataaagtgtcctgggaagaagttaagaacgaaatggtcggagaaaaggggttagccccagaagtcgccgacagaatcggagattatgttcagcagcacggcggcgttagcctcgtggaacagttgctgcaggaccctaaattgtcccagaacaagcaggccttggaaggattgggagatttgaagctcttgttcgaatacctgacccttttcggaattgatgacaaaatttcttttgacttatccctggctcgcgggctggactattacacaggagttatctatgaagctgtgctcttgcagactcccgcgcaggcaggagaagaacccctcggcgtcggatctgtggccgccggaggacgctatgacgggctcgttggtatgtttgatcccaaaggtcgaaaagtgccctgcgtgggcctgagcatcggagtggaacgtatctttagcattgtggagcagcgcttggaagctttggaagagaagatccggaccactgaaacccaggttctggtcgcttctgcccagaaaaagcttcttgaagagaggctgaaattggtgagcgagttgtgggacgcgggtataaaggcagagctgctatacaaaaaaaacccaaagttgctgaaccagctgcaatactgcgaagaagctggaattcccctcgttgcaatcattggggagcaggagctgaaagatggcgtaattaaactcagatctgtgacttcccgagaagaggtggatgtcagacgcgaagacctcgttgaagaaatcaagcggagaaccggacagcctctatgtatctgttag

SEQ ID NO: 190727 - DNA, 1188 bp, synthetic construct
  misc_feature 1..1188: note = Description of Artificial Sequence: Synthetic coding sequence
  source 1..1188: mol_type = other DNA
atggccgagcgggccgccctggaggagctggtgaagctgcagggcgagcgtgtccgagggctcaagcagcagaaggcttcggccgagctaattgaagaagaagtggcaaaactactgaaactgaaagcccagctgggcccggacgagagtaagcagaagttcgtgctgaaaactccaaaagattttgacatcgcgggaaactttgatcccatgattcctgacgccgaatgtctgaagattatgtgcgaaatcttgtccagcctccagatcggggacttcctggtgaaagtaaatgaccgtaggatcctagacggcatgttcgccatttgtggagtgagtgactcaaaatttcgcaccatctgtagttctgtggacaagctcgataaggtgtcctgggaagaagtgaagaatgagatggtcggggagaagggactggctccagaagtggcagacagaataggcgactatgtgcaacaacacggcggagtcagcctggtggagcagctgttgcaggacccgaagttgtcgcagaacaagcaggccctcgaggggctgggcgatctgaaattgctcttcgaatatttaacgctgtttggcattgacgacaagatctcatttgatctgtccctggcaagaggactggactattatactggtgtgatttacgaagcagttctgctccagacaccggcccaagctggcgaagagcctctcggagtaggatcagtagctgctgggggtcgatacgacgggctggtgggcatgttcgacccaaaaggacgtaaggtgccgtgtgtggggcttagcatcggcgtggagcgaattttctcgatcgtggaacagcgactggaagccctcgaagagaaaataaggacaaccgaaactcaagttctggtggcctctgcccagaagaagctccttgaagaacgcctgaaactggtgagcgaactttgggacgccggcatcaaagcggagctcctgtataaaaaaaatcctaaattactcaaccagctgcagtattgtgaggaagccggtatccccctggtggccatcatcggagaacaggagttgaaagacggcgtgattaaactgcggagcgtcacctcccgggaagaagtagatgtccgacgggaagatctcgtggaggagataaagcggaggactgggcagccactttgtatttgctag

SEQ ID NO: 190728 - DNA, 1410 bp, synthetic construct
  misc_feature 1..1410: note = Description of Artificial Sequence: Synthetic coding sequence
  source 1..1410: mol_type = other DNA
atggccgagcgggccgccctggaggagctggtgaagctgcagggcgaacgggtgcgtggtctcaaacagcagaaggcctcagccgagctgatcgaagaagaggtggctaaacttttaaagctgaaagcccaattgggccctgatgaatctaagcaaaagttcgtgttaaagacccctaaggaaaccctgatgggaaaatatggagaagactctaagctcatatatgatctgaaagatcaggggggagaactcctgtccttaagatacgacctgacagtgccatttgcacggtaccttgccatgaataagctcacaaatatcaaacggtaccatatcgctaaggtctatcgcagagataacccagctatgacaaggggcagatatcgcgaattctatcagtgcgacttcgacatcgcagggaacttcgacccaatgatcccggacgctgagtgtctgaagataatgtgcgagattctgtcctctctacaaatcggagactttctggtaaaggttaatgacaggcgaatactggatgggatgttcgccatctgcggggtctccgattctaagttcaggacaatttgcagctccgtggataagttagataaggtgagctgggaagaagttaagaatgaaatggtgggcgagaaggggctcgcccccgaggtagctgacaggattggtgattacgttcagcaacatggcggggtttctttagtggaacagttactgcaagaccctaagctttctcagaacaagcaagctctcgagggtttgggagacctgaagctgctcttcgagtacctgacactctttggcatcgacgacaaaataagcttcgatctgagtctagctcgtggcctggattactacaccggcgtcatctacgaggccgtgcttttacagacccccgctcaggccggcgaagagccactcggcgtggggtccgtggcagccgggggtagatacgacggcctggtcggtatgtttgatccaaaagggcgaaaagtcccttgtgtgggattatcgattggagtcgaacgaattttttctatcgtagagcagcgactggaagccctagaagaaaaaatcaggactaccgaaactcaggttcttgttgcctctgcccagaaaaagctcctcgaagaaagactgaagttggtgtcggagctctgggacgccgggataaaagcggagcttttatataagaagaatcccaaacttctaaaccagctgcagtactgtgaggaggcaggaatccccctcgtggcaatcatcggtgaacaggagctgaaagatggcgtgatcaagctgagatcagtgacgtccagagaggaagtggacgttcggcgggaggacctcgttgaagaaattaagaggaggaccggtcagcccttgtgtatttgctag

SEQ ID NO: 190729 - DNA, 945 bp, synthetic construct
  misc_feature 1..945: note = Description of Artificial Sequence: Synthetic coding sequence
  source 1..945: mol_type = other DNA
atgacccggggccggtaccgggagttctaccagtgcgacttcgacatagcaggcaactttgatcccatgattccggatgctgagtgccttaagatcatgtgcgagatcctgtcatctctgcaaatcggggatttcctggtcaaggtttcatgggaagaggtcaaaaacgagatggtgggtgagaaaggcctggctccagaagtagcggatagaattggcgattatgtgcagcaacatggcggggtaagcctagtcgaacaactgttgcaggaccctaagctatcccaaaacaaacaggcgttagaggggctgggggacctgaaacttctcttcgagtacctgaccctgttcggcatcgatgacaaaatttcattcgatttgagtctcgcacgcggtctcgattactacactggtgtgatctatgaagccgtgctgctacaaacccccgcccaggccggcgaggagccccttggcgtaggctccgtggcagccgggggtaggtatgatgggctggtggggatgtttgaccccaagggaagaaaagttccctgtgtgggactatctatcggtgttgagaggatattcagcattgttgagcagcggctagaagccctagaagagaagatccgcacaaccgagacacaagtcctcgtggcctcggcccagaaaaagctgctggaagaacggttgaaacttgtttcagagctttgggacgccggcatcaaagcggagctgctgtataaaaagaaccctaagctgctgaaccagttacagtactgcgaagaggctggaattcctctggtcgcaataattggagagcaggaactaaaggacggagtgattaagctgcggtcagtgacaagtagggaagaggtagatgttcgtcgcgaagatctcgtagaggagattaaaagacgaacaggccagcctttgtgcatatgttag

SEQ ID NO: 190730 - DNA, 1530 bp, synthetic construct
  misc_feature 1..1530: note = Description of Artificial Sequence: Synthetic coding sequence
  source 1..1530: mol_type = other DNA
atggccgagcgggccgccctggaggagctggtgaagctgcagggcgaacgcgtaagggggctgaagcaacagaaggcgagcgcagaattgattgaggaagaggtcgccaaactgttgaaactgaaggcccaactgggccccgatgaaagtaaacagaaatttgtgctgaaaacgccgaagggcacccgggattactccccgagacagatggcagttcgggaaaaggtgttcgacgtcattataaggtgtttcaaacggcacggcgccgaggtgattgatactccagtttttgagctcaaggaaacacttatgggcaagtatggcgaggacagtaagttaatctatgacctcaaggaccaagggggcgagctgctctcccttcggtatgacctaaccgtaccgttcgcaaggtaccttgccatgaacaaattgaccaacatcaagcggtaccacatcgcaaaggtctacaggagggacaaccccgccatgacgagaggtcgatacagagagttctaccagtgcgattttgatatagcagggaacttcgaccccatgattccggatgcggaatgcctgaaaatcatgtgtgagattctaagtagcctgcagatcggcgacttcctcgtgaaggtgaacgaccgccgcatcttggatggtatgtttgctatatgtggcgtgagcgattcaaagtttaggaccatttgttcgtctgtagacaagctggataaagtgtcatgggaagaagttaaaaatgagatggtcggcgagaaaggactcgcacccgaagtggcagaccgtattggcgattacgtccaacagcatggcggcgttagtctggtagagcaacttctgcaagaccccaagctaagccagaacaaacaagcgctggagggtctgggcgacctgaagcttctcttcgaatacctgaccttatttggaatcgacgacaaaatttccttcgatctgagtctcgccaggggcctagattactacacaggggtcatttatgaggctgtgctgctccaaacgccggcccaagcaggagaagagcccctcggagtggggtcagtggcagctggtggccgatacgatggcctggtgggtatgtttgaccccaaaggtcgcaaagttccctgcgtcggactgtccattggagtggaacgtatcttctctattgttgagcagcgtctggaggctctcgaggagaagatcaggacaaccgagacccaagtccttgttgctagcgcccagaaaaaactgctggaagaacgacttaagctcgtcagtgagctatgggatgccggcatcaaggcagagctgctgtataaaaaaaacccaaaactactaaatcagttacagtactgtgaggaagcggggataccattggtggccattatcggggagcaggagctgaaggacggagtcatcaaattgaggtctgttacctctcgtgaggaagttgacgtgcgaagggaagatctcgttgaggagattaaacggcgaacgggccaacctttgtgcatatgttag

SEQ ID NO: 190731 - DNA, 1323 bp, synthetic construct
  misc_feature 1..1323: note = Description of Artificial Sequence: Synthetic coding sequence
  source 1..1323: mol_type = other DNA
atggccgtgcgggagaaggtgttcgacgtgatcatccggtgcttcaagagacacggcgccgaagtgattgacaccccagtattcgagttaaaggaaaccttgatgggtaagtacggagaagacagcaaactcatatacgacctcaaggatcaagggggtgaactgctgtctcttcgatatgacctgaccgtgccttttgcacggtacctggccatgaacaagctgacaaacattaagcgatatcacatcgcgaaagtataccgccgggacaaccccgctatgacaagaggtagataccgagaattttaccagtgtgacttcgatatcgcaggaaactttgatcccatgattcccgatgccgaatgcttaaagatcatgtgtgaaatcctatcttcccttcagatcggggactttttggtgaaggtcaatgacaggcggatcttggatggaatgtttgcaatatgcggcgtgtccgatagcaagtttagaacaatctgcagttctgtcgacaaattagataaggtgagctgggaggaggtgaaaaatgaaatggtcggggaaaaaggccttgcaccggaggtggccgatcggattggggattatgtgcaacaacacggcggagtgtctcttgtggagcagctcctgcaagaccctaaactctcacagaacaagcaggcactggagggcctaggagacctgaagctgctgtttgagtacctgaccctctttggaatcgatgataaaatctcattcgatctgtcgctcgcaagggggctggactactatactggcgttatttacgaagcagtactgctgcagacgcccgcgcaggcaggggaggagccgctgggcgtaggatccgtggccgctggtggaagatacgacggcctagttggcatgttcgatcccaagggtaggaaggtgccgtgcgtcgggcttagcatcggcgtagagcgtatcttttcaatcgttgagcagaggctcgaagcgctcgaagaaaaaattaggacgaccgagacacaagtcctggttgcttcggcacagaagaaactcctggaagaaagactgaagttagtgagtgaactctgggacgccggaatcaaggccgaactgttgtacaaaaaaaatcccaaattgctaaaccaactgcagtattgcgaggaggcagggatccccctggttgcaatcataggtgagcaggagctgaaagacggggtgatcaaactcagaagcgtgacttctagggaggaagtcgacgttagacgggaagatctagtcgaagaaattaaacgcagaactgggcagcctctgtgtatttgttag

SEQ ID NO: 190732 - DNA, 867 bp, synthetic construct
  misc_feature 1..867: note = Description of Artificial Sequence: Synthetic coding sequence
  source 1..867: mol_type = other DNA
atggccgagcgggccgccctggaggagctggtgaagctgcagggcgagagggtcaggggcctgaagcagcagaaggcttcagcagagttgatcgaagaagaagtggcaaagctgttaaagcttaaggcgcaactggggcccgacgagtctaaacagaagtttgttctgaagacccccaaaggtactcgtgattactctccccgccagatggccgtccgggagaaagtcttcgacgtgattatccgctgttttaagcgccacggcgccgaagtaatcgacaccccagtcttcgagttgaaagtgaatgatcggcggatcctcgacggaatgttcgctatctgtggagtctccgattctaagtttcggacgatatgttccagtgtcgacaagctcgataaggtttcttgggaggaagttaaaaacgaaatggtgggggaaaaggggctggcaccagaagtggccgaccgcatcggcgactatgttcaacagcacgggggtgtgagcctggtggagcaactcctgcaggatcccaagctctctcaaaataagcaggctctggagggtctgggcgacctgaagctgctgtttgagtatttgaccctctttggcattgacgataagatctctttcgacctttctctagctagggggctcgactattatactggcgtaatctacgaggccgtcttgctgcagacccctgcccaggccggggaagagcccctcggcgtgggcagcgtggcagcaggcggcaggtatgacgggctcgtcggaatgttcgaccctaaaggccgaaaagtgccctgtgtggggcttagcatcggggtagagaggattttctccatcgtcgagcagcgattggagtag

SEQ ID NO: 190733 - DNA, 1350 bp, synthetic construct
  misc_feature 1..1350: note = Description of Artificial Sequence: Synthetic coding sequence
  source 1..1350: mol_type = other DNA
atggccgagcgggccgccctggaggagctggtgaagctgcagggcgaacgcgtgcgcggactcaaacaacagaaagcttcagccgagttaatcgaggaagaggtggccaaactcttaaaactgaaggcccaattgggacctgatgaaagcaagcagaaatttgtcctgaagacaccaaaagagaccctgatgggcaagtatggggaggatagcaaactcatttatgatttaaaagatcaaggaggggagctgctttcccttcgatatgatctgactgtgccctttgctaggtatctggccatgaacaagctgactaacattaaaaggtaccatatagcgaaggattttgacatcgccgggaatttcgatcccatgattcctgacgcagaatgcctgaagattatgtgtgaaatcctctctagtctccaaatcggggactttcttgtgaaagtgaacgatagacgtatcttggatgggatgttcgctatttgtggagtatcggacagtaagtttaggaccatctgcagcagcgtggataagctggataaggtgtcctgggaggaggtaaaaaatgagatggttggggagaaaggactcgcccccgaagtggctgacagaattggtgactacgtccaacagcacggaggagtgagcctggtagaacagcttctgcaggatccaaaactctcacaaaataagcaggctctagaaggtctaggagatcttaagctgctctttgaatatctgaccctgttcgggattgacgacaagataagcttcgaccttagcttagcgcgcggactggattactacacaggagtgatttatgaggccgttttgcttcagacacccgcccaggccggcgaggagcctctgggcgtcggcagcgtggccgctggggggcgctacgacggcctggttggaatgttcgatcctaaagggaggaaagtcccctgcgtggggctgagcattggtgtggaaagaatttttagtatcgtcgagcagagactggaagccttggaggagaagattcgcacaactgaaacacaagtcctcgtggcgagcgcccaaaagaaactgttggaggagcgcctaaaactggtgtctgaactttgggatgccggtattaaagcagagttgttgtacaaaaaaaaccctaagcttctgaatcagctccagtactgcgaagaggcggggatccctctggtggccatcatcggcgaacaagaacttaaagacggggttatcaagctgaggagtgtgaccagccgcgaggaggtggatgtccgtcgggaggacctggttgaggagataaagaggcgcacaggacaaccactgtgcatctgctag

SEQ ID NO: 190734 - DNA, 1470 bp, synthetic construct
  misc_feature 1..1470: note = Description of Artificial Sequence: Synthetic coding sequence
  source 1..1470: mol_type = other DNA
atggccgagcgggccgccctggaggagctggtgaagctgcagggcgaaagggtgcggggactgaagcaacaaaaagctagtgccgagctgatcgaggaggaggtggccaaacttctcaaactgaaggcccagctcggtcccgatgagtccaaacagaaatttgtgcttaagacacctaaggggacccgggattattcacctcgacagatggctgtgagagaaaaggtgttcgacgtgatcatccggtgctttaagaggcatggggcagaggttattgatacccctgttttcgagctgaaggagacacttatgggcaagtacggggaggacagtaaactgatatacgacctgaaggatcagggtggagaactgttgtcactccggtacgacctgactgtgccgtttgcacgctacctcgccatgaataagctaaccaatatcaaacgttatcacatcgccaaggatttcgacatcgctggcaattttgaccccatgatacctgatgctgaatgtctgaagattatgtgtgagatcctgtccagccttcagatcggtgactttctagtgaaagttaatgacagacggatcctagacgggatgttcgcaatttgcggtgtctccgactcaaaatttagaaccatttgctcgtcagtggacaagctagacaaagtgtcctgggaggaggtgaagaatgagatggtgggagagaaagggctggcccctgaggtggctgaccggatcggcgactatgtgcagcagcacggtggtgtgtccctggtcgagcagctcctccaagatcccaaattgtcacagaacaaacaggccctggagggactgggggacctgaagctgctgttcgaatatctcaccttattcggaatagacgataagatctcttttgacctgagcctggcgagggggctggattactacacaggagtcatctatgaggcagttcttctgcagactccggcccaggccggggaagaacccctgggcgtaggatcagtggcggcaggtggtcgctatgacggcctagtgggtatgttcgaccccaaggggcgtaaggtgccatgtgtgggcctttctatcggcgttgaacgtattttttccattgttgagcagagactggaggctctggaagagaagatacgcaccacagagactcaggtgctggtcgcttccgcccagaaaaaactactggaagaaaggctcaaattggtgtcagaactttgggatgcgggcattaaggcagaattgttgtacaaaaaaaacccgaaattgctgaaccagctgcaatattgcgaggaggcaggtataccgcttgttgccataataggggagcaggagttaaaggatggagtgatcaaactcaggtctgtgacctccagagaagaagtggacgttcgtagggaagaccttgttgaggaaattaagcgccgaaccggccagccactgtgcatctgttag

SEQ ID NO: 190735 - DNA, 1017 bp, synthetic construct
  misc_feature 1..1017: note = Description of Artificial Sequence: Synthetic coding sequence
  source 1..1017: mol_type = other DNA
atgatggccatgaacagcaagcagcccttcggcatgcaccccgtgctgcaagagcccaagttctcatccctccattctggcagcgaggctatgcggagagtctgtttgcctgcaccacagttgcagggcaatatattcggatctttcgatgagtcattgttggctcgggccgaggcccttgctgccgtggatatcgtttcacatgggaaaaaccatccttttaagcccgacgccacctaccatactatgtctagcgtgccctgcacatccaccagctccacagtgcctattagtcaccccgccgcactgacctcccatccccaccacgcagtgcaccagggactggagggcgacctcctggaacacatctcacctactctttctgtatctggtctcggagcgccggagcactcagtcatgcccgcacagatccacccgcaccaccttggggctatgggacatctgcaccaggctatgggcatgtcccacccacacaccgtggctccccattctgccatgcccgcctgcctctccgacgtcgaaagtgacccacgtgagctggaggctttcgccgagcgcttcaagcaacggaggataaagctgggggtgacacaagcagatgtgggagcagctctggccaatctgaagattccaggtgtgggctctctgagccaatccactatttgtaggttcgaaagccttacgctttcgcacaacaatatgattgccttgaaaccagttttacaagcatggctcgaagaggcggaagccgcctatagggagaaaaattcgaagccagaattgttcaatggtagcgaacgtaaacgaaagaggactagcattgcggcccccgaaaagcgcagcctcgaggcctactttgccattcagcctagacccagctcagagaaaatagctgccattgccgagaaactggacctcaagaagaacgtcgtccgtgtatggttctgcaatcagcgacagaaacaaaagcgcatgaagtactccgcagtgcactag

SEQ ID NO: 190736 - DNA, 1038 bp, synthetic construct
  misc_feature 1..1038: note = Description of Artificial Sequence: Synthetic coding sequence
  source 1..1038: mol_type = other DNA
atgaccctgctggaggtgcccttcgcccggtacctggccatgaacaaagtgaaaaagatgaaacggtaccatgttgggaaggtttggcgcagagagagcccaaccattgtgcaaggccgttatagagaattttgtcaatgcgacttcgacatcgccggtcaatttgatccgatgatccctgatgctgaatgcctgaagatcatgtgcgaaatcctttccggcctgcagctcggggacttcctgataaagatggcatggaaggacgtgcggcatgagatggtggtgaagaagggcctggcaccagaggtggcggacaggatcggggattatgtgcagtgtcacgggggagtctcactggttgagcagatgtttcaggatccacgcttgagtcagaacaaacaggcattggagggtctcggcgacctcaaactgctcttcgagtacctaactctcttcggaatagcggataagattagctttgacctaagtctggccagagggttggattattacacaggcgtgatctacgaagctgttctgctgcaaacccctacacaagccggcgaggagccacttaatgtcggctcagtcgctgctgggggcaggtacgatggcctggtcggaatgttcgatcctaagggacataaggttccttgcgtcggcctcagcattggtgttgaacgaatcttttatatcgtggagcagcggatgaaaacaaaaggagagaaggttcgaaccacagagacacaagtatttgttgcaacacctcagaaaaattttctacaagagcggctgaaactcatagccgaattgtgggacagcggtatcaaagcagaaatgttatacaagaataaccctaaacttctgactcaactccactactgtgagtctacaggtattcccttggtggtcattatcggagagcaggaactgaaagaaggagtcataaaaatacgaagcgttgcaagcagggaagaggtcgctatcaagcgagaaaacttcgtcgccgagatccagaagcggctgagtgagagttag

SEQ ID NO: 190737 - DNA, 1179 bp, synthetic construct
  misc_feature 1..1179: note = Description of Artificial Sequence: Synthetic coding sequence
  source 1..1179: mol_type = other DNA
atgcccctgctgggcctgctgccccggcgggcctgggccagcctgctctcacagctgctgagacctccttgcgcgtcttgcaccggagctgttaggtgtcagtcccaggtagccgaagccgtgcttacaagccaactcaaagctcaccaggagaaacccaactttatcatcaaaacccccaaggactttgatattgcgggacagttcgatcccatgatcccggatgccgaatgtctgaagatcatgtgcgaaatcctttctgggctgcagcttggggatttcctgatcaaggttaacgacaggagaatcgtcgatggcatgtttgctgtgtgtggagtaccagagagcaaattccgggctatctgttccagcatagataagcttgataagatggcctggaaagatgtgcgacatgaaatggtggtcaagaagggactcgctccagaggttgcagacaggattggagactatgtgcagtgccacggtggcgtgtcacttgtcgaacagatgttccaggacccccggcttagtcagaacaagcaggcgctggagggtcttggcgatttgaagttgctgttcgaatacctgacactctttggaattgcagataaaatctcttttgacctgtcactcgcaagaggactagactattacactggagtcatatatgaggctgtgctgctccagaccccaacccaagcaggtgaggagccactaaatgtgggctccgtggccgcggggggccggtacgatggactggtaggcatgtttgaccctaaaggccacaaggttccttgtgtcgggttgtcaatcggcgttgagcgcatattttacattgttgaacagagaatgaagaccaagggggaaaaggttcgaacaacagagacccaggtttttgttgccactccccagaaaaactttctgcaagaaaggctgaagttgatcgcggagttgtgggatagcggaatcaaagcggagatgctgtataaaaacaacccaaaactactaacacaactccactattgtgagagcaccgggataccgctcgtggtcattatcggggaacaggagcttaaggagggggtcatcaaaatcagatccgtggccagtagggaggaagtagctatcaagagggagaattttgtagcggagatccagaagcgcttatcggaatcgtag

SEQ ID NO: 190738 - DNA, 1401 bp, synthetic construct
  misc_feature 1..1401: note = Description of Artificial Sequence: Synthetic coding sequence
  source 1..1401: mol_type = other DNA
atgcccctgctgggcctgctgccccggcgggcctgggccagcctgctgtcccagttgctccgaccaccatgtgccagctgcaccggggctgtgcggtgccagtcacaggtggctgaggctgtgctgacgagccagctgaaggcgcatcaggagaaacctaacttcataattaaaactccaaaagaaacactgacagaaaaatacggcgaggactctggattgatgtacgacctcaaggatcaaggtggcgagttactaagtctgaggtatgatctgaccgtcccatttgcacgttatctggccatgaacaaagtcaagaaaatgaaacgctaccacgtgggtaaagtctggagaagagagtcaccgacaattgtgcaggggagatacagagaattttgtcagtgtgacttcgatatagctggtcaatttgatccaatgatacccgatgccgaatgcctgaaaataatgtgtgagatcctgagtggcctgcagttgggcgattttttgataaaagtaaatgaccggagaattgtcgacggaatgtttgccgtctgtggggtgcctgaaagcaaattcagggcaatttgctcttccatcgataaattggataaaatggcctggaaggacgtccggcatgaaatggtagtgaaaaagggactggcacccgaagtggctgaccggataggcgattatgtgcaatgccatgggggcgtatcattagtagagcaaatgttccaggacccgcgcttgagccaaaataagcaagctcttgaaggccttggggacctgaaactccttttcgaatacctgacgttatttggcattgccgacaagatctccttcgacctgtcactggcaagaggtctggattactatacaggcgtaatttacgaggctgtacttctgcagacccctacacaggccggggaagaacccctaaacgttggcagcgtggcagccggcggcagatacgacggcctggtaggaatgtttgatccaaagggtcataaagttccgtgtgtgggcctaagcattggcgtcgagcgcatcttctacatcgtggagcagcggatgaagacgaagggggagaaggtgaggacaactgagacacaggtgttcgtcgctacgccacagaagaactttctgcaagagcgcctcaaactgatagcagagttgtgggattccggaataaaggccgagatgttgtacaagaacaaccctaagctgctcactcagcttcactattgtgaatcaactggcattcccttggtggtgataataggagagcaggagcttaaggagggagtaataaagattagatctgtggcctccagagaggaggtggctattaagagggagaattttgtcgccgaaattcagaaacgcctctctgaatcgtag

SEQ ID NO: 190739 - DNA, 1005 bp, synthetic construct
  misc_feature 1..1005: note = Description of Artificial Sequence: Synthetic coding sequence
  source 1..1005: mol_type = other DNA
atgcccctgctgggcctgctgccccggcgggcctgggccagcctgctgtctcagctgcttaggcctccctgcgcctcctgtactggggcagtgcgctgccagagtcaagatttcgatatagcgggccagtttgatccgatgatacccgatgctgaatgtctgaaaatcatgtgcgagattttgagtggtcttcagctgggagattttctgatcaagatggcatggaaagacgtgcgccacgagatggttgttaagaaaggtttagcccccgaggttgctgacagaattggcgactatgtacaatgtcatggcggcgtgagcttggtggaacagatgttccaggaccctagactatcacagaataagcaggcactcgagggtctgggcgacctgaaactactgtttgagtacctcaccttgtttgggatagcagacaaaatcagttttgatctttcactggcccgggggttggactattacactggtgtgatttacgaggcggtgttgctgcagacacctacacaggctggagaggaacctctgaacgtcggatcagtagcggcaggtggacgatacgacggcctagtgggcatgttcgaccccaaggggcataaggtcccctgcgtcggactgtctatcggcgtggagcgcattttttacatcgtcgagcagcggatgaaaacaaagggcgagaaggtgagaacaacagaaactcaggtgtttgttgccacaccacaaaagaattttctccaggagcgcctgaagctcatcgcagagctttgggattctggcattaaggcggaaatgctctataaaaataatccaaagctgctcactcagttacactattgtgagtcaacaggaattcccctagtagttattattggcgaacaggagctgaaagaaggcgtgattaagatccgtagcgtggcttcccgcgaggaggttgccatcaaaagggagaattttgttgcagaaatccagaagcggctgtctgaaagttag

SEQ ID NO: 190740 - DNA, 1446 bp, synthetic construct
  misc_feature 1..1446: note = Description of Artificial Sequence: Synthetic coding sequence
  source 1..1446: mol_type = other DNA
atgcccctgctgggcctgctgccccggcgggcctgggccagcctgctgtctcagttactccgccccccatgtgcctcttgcacaggagccgtgcgctgtcagtcccaagggacgcgcgacctctcgccccagcacatggtggtgcgcgagaaaatactcgacctggtgatctcctgttttaagcgtcacggtgccaagggtatggacacacccgccttcgagctgaaagagactctcacagaaaaatatggcgaagactcagggctgatgtacgacctcaaagatcaggggggtgagctcttgtctctgcggtacgacctaaccgtgccatttgctaggtacttggccatgaacaaggtcaagaaaatgaagagatatcacgtgggtaaagtttggcgccgggagtctcctaccattgtacagggtaggtatcgggaattttgccagtgtgatttcgatatagctggacagttcgatcccatgatccccgacgctgaatgtctgaaaattatgtgcgaaattctatcgggattgcagctgggagacttcctgataaaggtcaatgaccgtcgcattgtcgatggcatgttcgcagtgtgcggagttcctgaatccaaatttagggctatttgtagttcaatcgacaaacttgacaagatggcttggaaggatgtgcgccatgaaatggtggtgaaaaaaggacttgctccggaagtagcagacaggatcggagactacgtgcagtgtcatggcggtgtttctctcgtcgagcaaatgtttcaagaccctaggctgagtcagaataagcaggctctcgaaggtctgggcgacctcaaactcctgtttgaatacctgaccctgtttggcatcgccgacaaaatctcatttgatctttctcttgctagaggcttggactactacacaggggtaatctacgaggctgtgctcttacagactccaacacaagctggcgaagaaccgttgaatgttggaagcgttgcagctggaggcaggtacgacgggctggttggcatgttcgaccctaaggggcataaagtcccctgcgttggattatctataggtgtggagcggatcttctacatcgtagaacaaaggatgaaaaccaagggagagaaagttagaaccaccgagacccaggtgttcgtggcaaccccccagaagaactttctgcaggagaggcttaaactgatcgccgagctgtgggactctggcatcaaagcagagatgctgtataagaacaaccctaaactattaacacagcttcattactgtgagagtaccgggatccctctggttgtcatcatcggcgagcaggagcttaaagaaggcgtgattaagatcaggtccgtggccagccgcgaagaggtggccatcaaaagagaaaacttcgtggccgagatccagaagaggctttccgaatcttag

SEQ ID NO: 190741 - DNA, 1185 bp, synthetic construct
  misc_feature 1..1185: note = Description of Artificial Sequence: Synthetic coding sequence
  source 1..1185: mol_type = other DNA
atggacagcgccctgagcgacccccacaacggcagcgccgaggccgggggccccaccaattctacgacacgtccaccctctactccggagggaattgccctggcttatggtagccttctcttgatggccctgcttcccattttttttggcgcattaaggagtgtccgctgtgctagggggaagaatgcttccgacatgcccgaaactatcacctcccgggatgccgctaggtttccaataatcgcaagctgcaccctgctgggactatatcttttctttaaaattttctctcaagaatatatcaatctgctcttgagcatgtacttcttcgtgcttggaatccttgcgctgagtcacacaatctctccctttatgaataaattttttccggcctctttcccgaacaggcagtaccaactgctgttcacacagggcagcggtgaaaacaaagaagagataatcaactatgagttcgacacgaaagaccttgtgtgtctggggctctcatctattgttggggtctggtaccttcttcgcaaacattggatcgccaataacctgttcggcctcgctttttcgttgaatggggtggaactactgcatctgaacaacgtctctaccggctgtatcctcttgggtggcctgttcatctatgatgtgttttgggtcttcggaactaacgtcatggtgaccgtcgccaagtcttttgaagcgcccattaaattggtattccctcaggacctgctggagaaaggcttagaggctaacaattttgccatgctcgggcttggagatgtagtgatccccgggatattcattgctcttcttcttagatttgatatctccctcaagaaaaacactcatacctacttttacacttcttttgccgcctacatttttgggcttgggttgaccattttcattatgcacatctttaagcacgcacagcccgcgctgttgtatctagtgccggcgtgtattggttttccggtgctggtggcgctggcaaaaggggaggttacagaaatgttcagctatgagtcaagtgcagagatccttcctcatacacctcgccttacacacttccctactgtcagtggctcgcccgccagcctcgccgacagtatgcagcagaagctagcagggccaaggcgccggcgtcctcagaatccctccgcaatgtag

SEQ ID NO: 190742 - DNA, 1134 bp, synthetic construct
  misc_feature 1..1134: note = Description of Artificial Sequence: Synthetic coding sequence
  source 1..1134: mol_type = other DNA
atggacagcgccctgagcgacccccacaacggcagcgccgaggccgggggtccaacaaattcaacaacccggccaccaagtacaccggagggaattgctctggcctatggcagtcttctcttgatggccctgctgcccatctttttcggcgctctcaggagcgtgcggtgcgctcggggtaaaaatgccagcgacatgcctgaaactatcacctccagggacgccgctcggtttccaattatcgcgtcttgtaccttgttaggcttatacctgttcttcaagatattctctcaggagtacataaatctcctcctgtccatgtatttttttgtcctcggaattttggcgctgagccacacgatcagcccattcatgaataagttctttcctgcctctttccccaatagacagtaccaattattgttcactcaaggcagtggcgagaataaagaggaaattatcaactacgagttcgacaccaaggacctggtttgcctaggcctttcgtccatcgtgggtgtttggtacctcctcagaaagcactggatcgccaacaacttattcggcttggcttttagtttgaacggtgtcgaactgctgcacctgaacaacgtgagcacagggtgtattctgctgggcgggctgtttatctacgacgtcttttgggtatttggcacaaacgtcatggtcaccgtagcgaaatcctttgaagctcccattaagctggtgtttcctcaggatctgttggaaaaaggcttggaagctaacaactttgccatgctcgggctcggggatgtagtgatccctggcatcttcatagccctgctactgcgctttgacatcagtttgaagaagaatacacatacatatttttatacgtcatttgcggcatatattttcggcctgggactgactatctttatcatgcacattttcaaacacgcacagccggctttgctttatctggtgcctgcttgtatcgggttccctgtactcgtggccctcgctaaaggcgaggtgaccgaaatgtttagctatgaggagtccaatcccaaggatcctgctgcagtcacagaatccaaagaggggactgaggccagcgccagtaaaggcctggagaagaaagaaaagtag

SEQ ID NO: 190743 - DNA, 1008 bp, synthetic construct
  misc_feature 1..1008: note = Description of Artificial Sequence: Synthetic coding sequence
  source 1..1008: mol_type = other DNA
atggacagcgccctgagcgacccccacaacggcagcgccgaggccggtgggcccaccaattctacgacaagacctccctctacacctgagggaatagcccttgcatacgggtctcttctcttgatggccttgctacctattttcttcggagctctgaggagcgtgaggtgtgcccgcggcaagaatgcatctgatatgcctgagacaatcacttctagggatgccgccagatttcccatcatcgcatcatgtacactgctcggcctgtatctgtttttcaagatcttctctcaagaatacatcaacttactactgagcatgtattttttcgtgctgggaatccttgccctcagccatactatctccccctttatgaacaaatttttccctgcaagttttccaaatcgtcagtaccagctgctgttcacacaaggcagcggagaaaacaaggaagagattatcaactatgagttcgatactaaagatttggtctgccttggcctgtcgagtattgtaggcgtgtggtatttgctccgcaaggtgtttggcacaaacgtcatggtcactgttgccaaatcttttgaagccccaatcaaattggtgttcccccaggatctgttggaaaaggggctggaggctaataattttgccatgctgggtctgggcgatgtagttataccggggatttttatcgccctcctcttgcgttttgatatttccctgaagaagaacacccatacatacttttacacaagcttcgctgcttacatcttcgggctgggtctcacaatatttatcatgcatatcttcaagcacgcacagccagcactgttatacctggtcccggcatgcatagggttccccgtcctcgtggcccttgccaagggcgaggtcaccgaaatgttctcatacgaagagagcaaccccaaggacccagctgctgtcacggagagtaaagaaggcaccgaagccagcgccagcaagggcctggagaagaaagaaaaatag

SEQ ID NO: 190744 - DNA, 1281 bp, synthetic construct
  misc_feature 1..1281: note = Description of Artificial Sequence: Synthetic coding sequence
  source 1..1281: mol_type = other DNA
atggacagcgccctgagcgacccccacaacggcagcgccgaggccgggggaccgaccaacagtaccacccgcccccccagcacgcccgagggtatcgcactcgcatacggctctcttctgctgatggctctgttacctatattttttggcgccttacgttctgtgcggtgtgcgcgggggaagaacgcctcagacatgcctgaaacaataacatctcgggacgcggccagatttccaattatagcatcctgcacattgctgggactctacctgtttttcaagatttttagccaggagtacataaacctgctgctatcgatgtacttcttcgtgcttggcattttggctctgtcacataccatatctccatttatgaataaatttttccccgccagtttccctaatagacaataccagctcctgtttacgcagggaagcggagaaaacaaagaagaaattattaactatgagtttgacaccaaagacttggtgtgtttaggattgtctagcatcgtgggtgtgtggtacctcttgcggaagcattggatcgctaataatttgttcgggctggcgttttctctgaacggggttgagctgctgcatttgaacaacgtttcaactggctgcatactgttaggggggcttttcatatacgacgttttctgggtgttcggcaccaatgtgatggtcacagtcgctaagtcctttgaggcaccaatcaagctagtctttccgcaagacctgctggagaaaggccttgaggctaacaactttgcgatgctgggtctgggcgatgtggtcattccgggcatcttcatcgcactgttgctgcggttcgacatctccttaaaaaagaatactcacacctatttctacaccagcttcgcagcctacattttcggactggggctcaccatcttcatcatgcacatttttaagcacgctcaaccagccctgctgtacctcgtgcccgcttgtatcggttttccagtgctcgttgccctcgctaagggggaggttacagagatgttttcctatgagtcgtcagccgaaatcctgcctcacacacctagattaacacactttccaactgtctcagggtctcctgctagcctcgcggattccatgcagcagaagctggcggggccccggagacgaaggccacagaacccatccgctatctacgaagaaagcaaccccaaggatccagctgccgtaaccgaatcaaaggagggtaccgaagctagcgcctctaagggcttggagaagaaggagaaatag

SEQ ID NO: 190745 - DNA, 3411 bp, synthetic construct
  misc_feature 1..3411: note = Description of Artificial Sequence: Synthetic coding sequence
  source 1..3411: mol_type = other DNA
atgttcagccggaagaagcgggagctgatgaagacccccagcatctccaagaagaaccgggctggaagtccctctcctcagcctagcggtgagcttccacggaaggatggagcggatgccgtattcccaggcccctctctggagccgccagcaggcagcagcggagtgaaggcaaccgggaccctgaaacgaccaacaagtttgtctcgacacgccagtgccgctggttttcctctgagcggcgcagcgagttggacactcggccgaagccaccgatctcctctcaccgcagcaagccctggcgaacttccaacggagggagcggggcctgatgtggtggaggatatttcccatctcctggcagatgttgctagatttgcagagggtctggagaaacttaaggaatgcgtgctgcgggacgatctgctcgaggctagacgcccgcgcgctcacgagtgtctgggtgaggccctgcgtgtcatgcatcagattattagtaaatacccgcttcttaacacagtggagacacttaccgctgctggcaccctcatagccaaagtcaaagctttccactacgaatccaataacgatttggagaaacaggagttcgagaaagctctggaaaccatagcggttgctttctcctccacagtgtcagagttcctcatgggagaagttgatagtagcacccttctggccgtgccaccaggagactctagccagagcatggaatctctatacggcccaggctctgagggtacccctccttctcttgaagactgcgacgccggatgcctccccgccgaggaagttgatgtcctgttacaaaggtgtgaggggggcgttgatgctgccctgctttacgcgaagaacatggccaagtatatgaaggaccttatcagctaccttgagaagcgcaccaccctggagatggagtttgccaagggtctgcagaagatcgctcataattgtcgccagtcagtcatgcaagaacctcacatgccgctgctctctatctactcactggcccttgaacaagacttagagttcggccacagtatggtgcaagccgtcggcacgctgcagacgcaaacttttatgcagcctctgaccctgaggcgtctggagcatgagaagcggcgcaaggagatcaaggaggcttggcacagggcccaacggaaattgcaagaggctgagagcaatctgcgaaaagcaaagcaagggtatgtccagagatgcgaagatcatgacaaggccagattcttagtggcaaaggccgaagaggaacaggctgggagcgctcctggggccggaagcactgcaacaaaaaccctagataagagacggcgcctggaggaggaggcaaaaaacaaagccgaagaggcaatggcaacttaccggacttgcgtagccgatgctaagacacagaagcaggagctggaggatactaaggtgactgccttgagacagatccaggaggttatccggcagtccgatcagaccatcaagtccgcgaccatctcctattaccagatgatgcacatgcaaacagctcccctgcccgtgcacttccaaatgctgtgcgaaagctccaagctgtatgacccaggacagcagtatgcatcacacgttagacagttacagagagatcaagagcccgatgtgcactacgactttgagccccacgtatctgctaacgcttggtcccccgtgatgcgggctaggaagtcgagcttcaatgtgtctgacgttgcacggcccgaagcagccggatcaccccccgaggaaggcgggtgtacggaaggcactccagctaaagaccacagggccggccgaggtcaccaggttcacaagtcttggcccctcagcatatcggactccgactcaggccttgatcccggcccaggtgcgggcgattttaaaaaattcgaaagaacttcatcaagcggcaccatgtcaagcacagaggagttggtcgaccccgatggcggggcgggtgcttctgccttcgagcaggctgacctcaatgggatgacacccgagctgccagttgctgtgccctcaggccccttccggcacgaggggctcagtaaagcggcccggacgcacaggcttcgaaagttgaggactccggcaaaatgccgcgagtgcaatagctatgtctacttccaaggagctgagtgtgaggagtgctgtcttgcctgccataaaaagtgcttagaaacactcgccattcaatgcgggcacaaaaaattgcagggtcggctgcagttattcgggcaggacttctcgcatgcggctcgctccgcacccgacggcgtgccgtttattgtgaagaagtgtgtgtgcgaaatagagcggcgagccttacgaacaaagggcatttatagagtgaacggagtgaagaccagggtggagaagctgtgtcaggccttcgaaaacggcaaggagctggttgagttaagccaggcttccccccacgacatctcgaatgtgctgaaactatacctcaggcagctgcccgagccgcttatttccttcagactgtaccacgagctggttgggctggccaaggactctctgaaagccgaggccgaagccaaagccgcgagtcgcggtaggcaggatggctcagaatcagaggccgtcgctgtagccctggccgggagactgcgagagctgctcagggacttgccaccagagaaccgtgcaagtctgcagtatttgctccgacaccttcgaaggattgtggaggtggagcaagacaataaaatgactcctggtaatctaggaattgtgtttggcccaacacttctgcgaccaaggcccaccgaggccacagttagcctgtcctcgctggttgattatccgcatcaggcgcgcgtaattgaaacgcttattgtacactacggactggttttcgaggaggagcccgaagaaacccccgggggtcaggacgaatccagcaaccagcgagctgaggtggtcgttcaggtcccctacctcgaggcaggagaagctgtggtctatccgttacaggaagcagcagcagacggatgccgagaatctagggtcgtttctaacgattcagacagcgacctcgaagaggcctccgaactgctctcatcaagcgaagcgtctgccctgggccatctgtccttcctcgagcagcagcagagcgaagctagcctcgaggtcgccagcggatcccatagtggctccgaggaacagctggaggctacagcaagagaagatggtgacggagacgaggatggcccagcgcagcaactgagcggattcaataccaatcaaagtaacaacgtcctgcaggcacccttaccacctatgcgtctgaggggtggcagaatgactctggggtcgtgtcgggagaggcagccagaattcgtatag

SEQ ID NO: 190746 - DNA, 3393 bp, synthetic construct
  misc_feature 1..3393: note = Description of Artificial Sequence: Synthetic coding sequence
  source 1..3393: mol_type = other DNA
agctacagcccctaccgggccggccggcagggcccccagcagcggggacgggacccgggcatccagctcacagagttgccaagaaaggacggcgctgatgctgtctttcccggaccctccctggaacctcccgcagggtcctctggggtgaaggctaccggcaccctcaagcgtcccaccagtctcagtcggcacgcttccgccgccgggttcccgctcagcggggcagcgtcttggacgctgggacgatcccatagatcccctttgactgccgccagtcccggggaactgcccactgagggagctgggcccgacgtggtagaagatatcagccacttgctggccgacgtagcaagattcgcagaaggtctagagaagttgaaggagtgcgtcctcagagatgacctgcttgaagcccgcaggcctcgggcccacgaatgtctcggggaggctttgcgcgtgatgcaccagattatatcgaagtatcctctactaaatactgtggagacactgacagctgcgggtacacttattgcgaaggtgaaagcattccactacgaatctaataacgaccttgaaaagcaggagtttgagaaggctctagaaacgatcgccgtggccttcagctctactgtctccgagtttcttatgggggaagtcgactctagtactcttctcgcagtaccgcccggggattcgtctcagtctatggagtcgctgtacggacctgggtcagagggcaccccaccttcgctggaggactgcgacgcaggttgcttgccagcagaagaagtcgacgttctcctgcagcggtgcgaaggcggagtggacgccgcactcttgtatgcaaagaacatggcaaagtatatgaaggatctgatctcatatctcgaaaaaagaactaccttggagatggaatttgccaaggggctccaaaagatcgcacataactgtaggcagtccgtgatgcaggagccccacatgcctctcctctccatttatagccttgctcttgagcaggacttggagtttggacactccatggttcaggctgttgggactctgcagacacagacattcatgcaacccctgaccttaaggcggttggagcacgagaagagacgcaaggaaataaaagaagcctggcatcgggctcaacgtaaactgcaggaggccgagagtaacctgagaaaagctaagcagggatacgtgcagaggtgtgaggatcatgacaaggccaggttcctggtggcaaaggcagaagaggagcaggccggctcggcccccggcgccggcagtaccgctacaaaaactctggataagagacggcggttagaggaggaggctaaaaacaaagccgaggaggcaatggccacttatcggacgtgcgtggcagatgctaagacccagaagcaagagctcgaggatacaaaagtcacagctttgaggcagatacaggaagtcattcgacagtccgatcaaacaattaagtctgctaccatctcatactatcagatgatgcatatgcagactgcccctttacccgtgcacttccagatgctctgcgaaagctccaagctctacgatccaggtcagcagtacgcttctcacgtaagacagcttcagagggatcaggagcccgacgtgcactatgatttcgagccccacgtcagtgccaacgcctggagccccgttatgcgggcaaggaaaagcagctttaatgtgtccgacgtcgctaggcctgaggcagcaggctccccccccgaggaaggtgggtgcacggaggggacaccggccaaggatcatcgggcgggacgcggccaccaggtccacaagtcatggcccctctcaatttccgactccgattcgggcttggaccctggacctggggccggagattttaagaaattcgagcgcacctcatcttccgggaccatgagtagtaccgaggagctcgtcgatccagacggaggggctggcgctagtgccttcgagcaggcagacttgaacggcatgacgcctgagctgcccgtcgccgtaccttcaggcccattccgccacgaagggctgtctaaggctgctaggacgcacaggctgcggaagctgaggacccccgctaagtgcagggagtgcaacagctatgtctatttccagggggccgaatgcgaagagtgttgtctggcctgccataaaaaatgccttgagacactcgctatacaatgcggtcataagaaactccaggggcgccttcagctgttcggtcaggacttctctcatgccgccaggtccgctccagacggggtcccattcatcgtcaagaaatgtgtctgtgaaattgaaaggcgggcactgaggactaagggaatatatcgcgtgaacggtgtaaagacccgagtggagaagctgtgccaggcctttgaaaacggtaaggagctagtggagctcagccaggcctcaccacatgatatatccaatgttctgaagctgtacctgaggcaactaccagagccactgatttctttccggctctaccatgagctggtgggcctagcaaaggacagcttgaaagctgaagccgaagccaaggccgctagccgaggcagacaggatgggagcgagtcggaagcagtcgcggtcgcactggcaggtcgactgcgagaactgcttagggacctgccaccggaaaaccgcgcctctctgcagtatctgctgcggcatctacggaggattgtagaggtggagcaggacaacaaaatgactccaggaaatctcgggattgtgttcggaccaacactgctgaggccccgtcctacggaggcgactgtctcattgtcatctctggtcgactacccacaccaggcaagagtaatcgagactctgatcgtccattacggactcgtcttcgaggaggaaccggaagagacaccagggggtcaggatgaaagctcaaatcagcgcgccgaggtcgtagtccaggtgccgtatttggaagccggcgaggctgtggtctatccactgcaggaggcagccgccgacggatgtagggagagtcgagtggtatcaaatgactctgactccgacctggaggaggcatcagagctgctctcctcttctgaagcctcagcccttgggcatctgtctttcctggagcagcagcagagcgaggcctccctggaagtggccagcggctcccacagcgggtcggaggagcagctggaagctacggcgagggaagatggcgacggggacgaggacggacctgctcagcagctgtctggctttaacaccaatcagtccaacaacgtcctccaggcacccctcccccctatgagactcagggggggccgcatgacactcgggtcatgcagagagaggcagcccgaatttgtgtag

SEQ ID NO: 190747 - DNA, 3015 bp, synthetic construct
  misc_feature 1..3015: note = Description of Artificial Sequence: Synthetic coding sequence
  source 1..3015: mol_type = other DNA
atgcaccagatcatcagcaagtaccccctgctgaacaccgtggagaccctcacagctgccggtacactcatcgcaaaagtcaaggccttccattatgagtcaaacaacgacctggaaaagcaagagtttgagaaggctctcgaaactatcgccgtagctttctcctcgaccgtaagcgaatttttgatgggagaggtggactcttctaccctattagccgttccccccggtgactcatcacaatctatggagagtctgtatggacctggcagtgagggcacgcctccttctctcgaggattgtgatgctgggtgcctccccgccgaggaggtggacgtcctgcttcagagatgcgagggtggggtcgatgctgcgctgctttacgctaagaatatggccaagtacatgaaggacctaatcagctatctggaaaaacgcaccaccctagaaatggaatttgcaaaaggcctgcaaaaaattgcccataactgccggcagtcggtgatgcaggagccccacatgccccttctgagcatctactctctggccctagagcaggacctggagttcggtcactctatggtgcaggcagtcggaacactgcagacccagaccttcatgcaacctttgacactccggcggctcgagcacgagaaacggcgaaaggagattaaggaagcttggcacagagcacagcgtaagttgcaagaggccgagagtaacctgagaaaagctaaacagggctacgtccagcggtgtgaggatcatgataaggcccgcttcttggttgctaaggccgaggaagaacaggccggatcagccccaggggctggaagcaccgcaaccaaaacgttagacaagagaaggagactggaggaggaggctaaaaacaaggccgaagaggccatggcaacttacagaacatgcgtggctgacgctaagactcagaagcaggaactcgaggacaccaaagttacggccctcaggcagatccaagaagttatccgccagtccgaccagaccataaagtcggccacaatctcgtattatcagatgatgcacatgcagaccgcaccgctgcccgtccacttccagatgctgtgcgaaagtagtaagctctatgatccaggccagcaatacgccagtcacgttcgtcaactccagagagaccaggagcctgatgttcattacgacttcgaacctcatgtctccgccaatgcttggtcacctgtcatgcgagctcggaaatcctcattcaatgtgagcgacgtggctcgtcctgaggccgcagggagtcctcctgaggaaggaggttgcacggagggcacgccagcaaaggaccacagaggtgagtgtccagctggtccccgtggcggtagatggctaccagcaacacatcccggaccatctcccgaaacacccctgagtccagccgggcgcggccaccaggtacataaatcatggcccctgtcgatctccgactctgacagcgggttagacccgggaccaggcgccggcgatttcaagaagtttgagcgaactagcagtagtgggaccatgtcttctaccgaagagttagttgaccctgatgggggggctggcgcctccgctttcgagcaagcagatttgaacgggatgacccccgagctgcccgtggcagtgccttcaggtcccttcaggcacgagggtctgagcaaggctgccagaacccataggctcagaaaactgcggacaccagctaagtgcagggagtgcaactcctatgtctactttcagggtgccgagtgcgaggagtgctgcctggcttgtcacaagaaatgcctagagacgctggcgatccagtgtgggcacaaaaagctccaaggccgcttgcagttgttcggacaggatttttcacatgctgcacggagtgctccagatggggtgccctttatagttaaaaaatgtgtttgtgagatcgaacggcgcgccctgcgtactaaaggaatttatcgcgtgaacggagttaagaccagagttgagaagctatgccaggccttcgaaaatggtaaggagctagtggagctgagccaggctagcccccacgatatatcaaatgttctaaaactgtacctgcggcaactgccggaacctctgatctccttcaggttatatcacgagctggtgggactggccaaggatagcctgaaggcggaagccgaggcaaaagccgcctcacgcgggaggcaagatggcagcgaatcagaagcagtggctgttgcacttgccggccggttaagagaactcctccgagatttgcccccggagaacagagcgtcgctgcagtacttgcttcgtcacctaaggcggatcgtggaagtcgagcaggacaataaaatgacgcccggcaatctcgggatcgtatttggccccacactattgcggccccgtcctaccgaggctaccgtgtctctcagctctctcgtcgattatccccatcaggctcgcgtgatcgagaccctgatcgtccattatgggctagtcttcgaggaagaacctgaagagacaccaggcggccaggacgagagctctaaccaaagggccgaagttgtggtgcaggtaccctacctggaggcaggagaggcagtggtgtatcccctccaggaagccgctgctgatggatgcagggagagcagagtcgtctccaacgactctgattccgacctagaagaggctagcgagttgctaagctccagcgaggctagcgcactaggtcacctttcctttctcgaacagcagcagagcgaagcaagcttggaggtggcttcaggatcccactcagggtctgaggagcaacttgaggccactgcgcgtgaagatggggacggtgacgaagatggcccagcccagcagttgagtggtttcaacacaaaccagagtaataacgtgctccaagctccgctgcctcccatgcgacttaggggaggacgtatgactctggggagctgtcgcgagcggcagcctgagtttgtgtag

SEQ ID NO: 190748 - DNA, 3459 bp, synthetic construct
  misc_feature 1..3459: note = Description of Artificial Sequence: Synthetic coding sequence
  source 1..3459: mol_type = other DNA
atgagccggggccagcgggtgctgaagggcctgctgggctgggtgtgcacatggacctgggcctggagggcacggctgggagcaagaggttgcgggctgcatgttctctgcccaagagatttgccgctgccgccggaagaactgcctagaaaggatggagcagacgctgtgtttcccggcccttctctagagccacccgccggctccagcggagtgaaagcgacagggaccctaaaacggcccacctcattgagcaggcatgcgagcgctgccgggtttccgctcagtggcgcagctagttggacactggggcggtcccatcgatccccattaacagctgccagcccaggcgagttgcccaccgaaggcgctggtccggatgtcgtggaagacatttcgcatctactagccgacgtagcaagattcgccgaaggattggagaagcttaaggagtgtgtacttagggacgatctgctcgaagcacgaaggccgcgagctcatgaatgtttgggtgaggccttacgggtgatgcaccagatcatatctaaataccctctactcaacacagttgaaaccctcactgccgcaggaacattgatcgccaaagtgaaggccttccactacgaatcaaataacgacctggaaaagcaggaatttgagaaggctcttgagacaatagcggtggcctttagctccacagtttcagagtttctgatgggcgaagtcgattctagtacacttctggccgtgccacctggcgacagctcacaaagcatggagtccctctacgggccaggtagtgaggggacacctccgagcttggaagattgtgatgccgggtgcctcccagccgaagaagtggacgttctgctccagcgttgtgaggggggcgttgacgccgccctgctgtacgccaaaaatatggccaagtatatgaaagatcttatttcatatcttgagaagagaaccacgctcgaaatggagttcgcgaaaggacttcaaaaaattgcccacaattgccggcaatccgttatgcaggaacctcacatgcccctccttagcatctactccttagctctggaacaggatctggagttcgggcactccatggtgcaggccgtaggcaccctccagacacagacctttatgcagccactgaccttgaggcggcttgagcacgagaagcgccgaaaagagatcaaggaggcctggcatagggcccagcgcaagcttcaggaggccgaatccaaccttaggaaggccaaacagggctatgtccaaaggtgtgaagaccacgataaggccagattcctcgtggcaaaggctgaggaagagcaggccgggtctgcccccggagcaggatcaacagccactaagacgttagacaagcgccgacggctcgaggaagaagccaagaataaagccgaggaagcaatggccacctacagaacatgcgtggcggacgcaaaaacccaaaagcaggagctggaagatacaaaggtcaccgccttaaggcaaatccaggaagtcatcaggcagtccgaccagaccatcaaatccgctacaataagttattaccagatgatgcacatgcagacggcaccccttccggttcactttcagatgctctgtgagagtagcaagttgtatgacccaggtcagcagtatgccagccatgtgagacaactccagagggatcaagagcccgacgtccactatgacttcgagcctcatgtttccgctaatgcctggagtcccgtgatgcgggcccggaagtccagcttcaatgtctccgacgtggctcgacctgaggccgcaggaagtccacctgaggagggtggctgcaccgagggtacaccagctaaagatcatagagccggtcgcgggcaccaggtgcataaatcttggcccttgtcaatcagtgactccgatagcggcctggatcccgggccaggggccggcgattttaaaaagtttgagcgtacatcttcaagcggcactatgtcttcaactgaggagttagtggatccagatgggggggctggtgcttccgccttcgaacaggccgacttaaacggtatgacaccggaactgccagtggccgtcccaagcgggccatttaggcacgaaggcttgtcgaaagcagctcggacacatcggcttcgtaagctgaggactccagccaaatgcagagagtgcaactcatatgtttacttccagggagcagagtgcgaagagtgctgtttagcatgccacaagaagtgcctggagacgcttgcaattcagtgcggtcacaagaaactccaaggacgcctgcagcttttcggccaggattttagtcatgctgccagaagcgctccagatggggttccctttatcgtaaaaaaatgcgtgtgcgagatcgagaggcgcgcgctgcgaacaaagggcatctacagggttaatggcgtcaaaactcgcgttgagaagctttgccaggccttcgagaacgggaaggagctggtcgaactcagccaggcatctccacatgacatatcaaatgtgctgaaactctacctacgacagctccctgaaccactcatcagcttccgcctttaccacgagttagtgggtctggcgaaagactcattaaaggccgaggccgaagctaaagcagcctcaagaggaagacaagatgggtctgaatctgaagccgtggccgtggccctcgctggcagactgcgcgagctgcttagagatcttcctcccgagaatagggcttcattgcagtacctgttacgtcacctgcgaaggattgtggaggtcgagcaggataataaaatgaccccaggcaacctgggaatcgtgttcggccctacgctgctaaggcctcgaccaactgaggccaccgtgagcctgagtagcctcgtcgattatccacatcaagcaagagtgatagaaaccctgatagttcattacggtctggtgttcgaggaagagccagaggagacacctgggggacaggacgagtcctccaatcaacgcgcagaggtggtcgtgcaggtgccataccttgaagcaggcgaggccgtcgtttatccccttcaggaggcggccgctgacggatgtcgggaaagcagagtcgtgtcaaacgactcggatagcgaccttgaggaagcatcagagctgctgtccagcagcgaagcatctgcccttggccacctgagtttccttgaacagcagcaatccgaggcttctctggaggttgcatccgggtcgcacagcgggtcggaggaacagttagaagctacagctcgtgaggacggggacggagatgaggatggacccgctcagcagttatcaggtttcaataccaaccagtccaataatgtccttcaggcacctttaccccccatgcgtctgcgggggggcaggatgactctcggctcttgcagagaaagacaacccgaatttgtgtag

SEQ ID NO: 190749 - DNA, 3060 bp, synthetic construct
  misc_feature 1..3060: note = Description of Artificial Sequence: Synthetic coding sequence
  source 1..3060: mol_type = other DNA
atgtgcatctgcggcaccgcccaccccgtgctggacgagggccccgtgaggtgtagggccggcccaagagacctacttgaggcccggcggccccgagctcacgagtgtcttggagaagcactgcgcgtaatgcaccagatcatctcgaagtaccccctcctgaatactgtggagactttgaccgctgccggaacactgattgcgaaagtgaaggcctttcactacgagtctaataatgatctagaaaaacaggagttcgaaaaggctttagagacaatcgccgtggccttctcctccaccgtgagcgagttcctgatgggagaggtcgacagctctaccctcctggccgtgccaccgggcgacagcagtcaatccatggaaagcctgtatgggcccgggagtgaaggcacccctccttcactcgaggattgcgatgccgggtgcctgccagctgaagaggtagatgtgctgctgcaacggtgtgaaggaggggtggacgccgctctgctgtatgctaagaacatggcaaagtatatgaaggatctcatctcatacctggagaaacgtacaaccttagaaatggagtttgctaaaggcctgcaaaaaatagcacacaattgtagacagtccgttatgcaggagccgcatatgcccctactgtctatatacagcctagctctggagcaggacctggagttcgggcacagcatggtgcaggcagtgggaaccctccagacacagacattcatgcagccattgaccctgagaaggttggaacacgaaaagcggaggaaagagataaaggaagcttggcacagggcgcaaaggaaactgcaagaggccgaatctaacctgcggaaggcaaagcagggatacgttcaacggtgcgaagaccacgataaggcacgcttcctagtagccaaagccgaggaagaacaggcagggtccgcccctggtgccggatccacagctacaaaaacgctcgataagcgacgaaggctggaggaggaggctaagaacaaagccgaagaagctatggccacatacagaacctgtgtggctgacgcgaaaacccaaaagcaggaactcgaagatactaaagtgaccgctctgcggcagatccaggaagtaatccggcagagtgaccagaccatcaagtcagcgacgatcagttactaccagatgatgcatatgcagactgcccctttgcctgttcatttccagatgctgtgcgaaagcagcaaactgtacgaccctggtcagcagtacgcttctcacgtccggcagctgcagagagaccaggagcctgacgtgcactacgacttcgaacctcacgtcagtgccaacgcttggtcccctgtgatgcgggcccggaaatctagctttaacgtgagcgacgtggcacgcccagaggctgcaggttcaccaccggaagaagggggttgcacagagggcactcctgctaaggatcaccgagccggccgtggtcaccaggtgcacaaaagctggccactcagcatcagcgactccgattccggcctggacccaggccccggagctggcgactttaagaagtttgagcgaacatccagcagcggcaccatgtctagcacggaagaactggtagatcccgacggcggagcaggagcaagcgctttcgagcaagccgacctgaacggaatgacaccagaactgccagtcgccgtgccaagcggtcctttccgacatgaagggctgagcaaagccgctaggacacaccgactgcgcaaactgaggaccccagccaaatgcagggagtgtaactcatacgtgtactttcagggtgccgagtgcgaagaatgctgtttggcttgccacaaaaagtgcctagaaacactggccattcagtgtggacacaagaagttgcaagggcgcctacagttgttcgggcaagatttcagccacgccgcccggagcgcacccgatggcgtacccttcattgtgaagaaatgcgtgtgtgagatcgaacgtagagccctgcggacgaagggaatctaccgagtgaacggagtgaaaacacgagttgagaaactatgtcaggcttttgagaacggtaaggagctcgtcgagctttcacaggcttctccacacgatatctccaatgttctgaagttgtacctgagacagctaccagagcctctcatcagtttcaggctgtaccacgaactggtgggcttagccaaggactcactgaaagctgaggccgaggcaaaagcagcttctaggggtcgtcaggacgggtctgagtctgaggccgtcgccgtggcattggccggacggctgagggaattgctgcgcgacttgccgccagaaaatcgggcatctctgcaatatcttctccgccacctgcgacggatcgttgaggtggagcaggataataaaatgacaccaggaaacttggggattgtgttcgggccaaccctgctgcgtccgcgtccaactgaggccactgtctctctgagttctctagtggactacccccatcaggcccgggtgatcgagaccctgatagtgcattacggtctggtgtttgaagaagagcctgaggagacacccggcggccaagatgaaagcagcaaccagcgggctgaggtcgttgtgcaggtaccttacctggaagccggagaggctgtggtgtaccccctccaggaggcagctgccgatgggtgccgcgaatcccgagtggtttcaaacgactcagacagtgatctggaggaggcctccgaactgttatcttcttctgaagcctcagcccttggacatctctcgttcctcgagcagcagcagtcagaggctagcttggaggtggccagcggctcacacagtggctctgaggagcagcttgaggcaaccgcaagggaagacggcgatggcgacgaggatgggccggctcagcagctgtcaggttttaataccaaccagagcaataacgtgctccaggctccgcttcctccaatgcgactgcggggtggtcgaatgacactgggcagttgtcgagagcggcagcccgaatttgtttag

SEQ ID NO: 190750 - DNA, 2847 bp, synthetic construct
  misc_feature 1..2847: note = Description of Artificial Sequence: Synthetic coding sequence
  source 1..2847: mol_type = other DNA
atgttcagccggaagaagcgggagctgatgaagacccccagcatctccaagaagaaccgagccggaagcccctcacctcagccaagtggggagttgcctaggaaagacggggccgacgctgtctttcccggtccgagcctggaacccccagccggatcctcaggcgtgaaggctacagggacgttgaaaaggccaacctctctgtctagacatgcttctgccgctgggttcccactgtctggggccgcttcttggacgctgggcaggagtcataggagccctcttacagcggcgtctcccggagaactgcccactgaaggagcaggacccgacgttgtcgaagacatctcccacctgctggccgatgtcgctagatttgctgagggcctcgagaagctaaaggagtgcgttctaagagacgacctgctggaggcgcgtcgccctcgcgcccacgagtgtttaggagaggctctgcgcgtcatgcaccagatcatctcgaaatatcccttgctgaacacagtggaaactctgaccgcagcaggaacgcttattgctaaagtgaaggctttccactacgagagcaacaatgaccttgaaaaacaggaatttgagaaggctctggagaccattgccgtggccttttcgtcgactgtgagtgagtttttaatgggagaggttgattctagcactctgcttgcggttccaccgggagacagctcccagagtatggagtctctgtatggccctgggagcgagggcacccctccatctctcgaggactgcgacgcagggtgcctgccagctgaggaggtggatgtgctactgcaaagatgcgagggcggagtggatgcagctctcctgtatgctaaaaatatggccaaatacatgaaggacctgatcagctatctggagaagagaacaaccttggagatggagttcgccaagggcctgcagaagatcgctcacaattgtcgacaatctgtgatgcaggaaccccatatgcctcttctttctatctatagcctggccctggaacaggacctggaattcggccactccatggtgcaggctgtgggtacgttacagacccagacattcatgcagccgcttactctgagacggcttgaacacgagaaaagaagaaaggaaattaaggaggcttggcacagagcgcagcgcaaactgcaagaggccgagtccaacctgcggaaagccaagcagggttacgtgcaaaggtgcgaggatcatgacaaagcaaggttcctcgtagccaaggccgaggaagagcaagcaggctccgctcctggggccggctccactgccaccaaaaccctagataaacgccggagactggaggaggaagcgaagaataaggccgaagaggccatggcaacgtatagaacctgcgtggccgacgcaaaaacacagaaacaggaactggaggacacgaaggtgacagctctacgtcagattcaagaagttatccgccagagtgatcagactatcaaatctgctaccatctcatactatcagatgatgcacatgcagaccgcaccattaccagttcactttcagatgttgtgcgagtcctccaagttatatgatcccggacagcaatatgcttcgcatgtgcggcagctgcagagggatcaagagcctgatgtccactacgactttgaaccacatgtgagtgccaatgcatggtcccccgtgatgagggcccgcaaatcaagctttaacgtgagcgacgtggcccgtccagaggccgcaggctcgcccccggaggagggcgggtgtaccgaggggactcctgcgaaagaccacagagctggtcggggacatcaggtgcacaaatcatggcccttgagtatcagcgattctgatagcgggctggacccaggtcccggcgctggcgatttcaagaagttcgagaggacttcctcttcgggcactatgagctctactgaagaactagtggatcctgacggaggagcgggggcgtctgcctttgagcaggcagaccttaacgggatgactccggagctgccagtagccgtgccaagcggcccctttcggcacgagggattgtctaaagctgcacgcacccatcgactgcgtaagctcaggacgcccgcaaaatgtcgcgaatgtaactcatacgtttatttccagggtgcagagtgcgaagagtgctgcctggcttgtcataaaaagtgtttggagacactggcaatacagtgcggccacaagaaactccagggcaggctgcagttgtttggtcaagacttcagtcacgctgccaggagtgcgcctgacggcgtgcccttcattgtcaaaaaatgtgtgtgtgagatcgagaggcgcgctctccggacaaagggcatctaccgggtgaacggggttaagactcgggtggagaagctttgtcaggcttttgaaaatggaaaggagctggtcgagctgtctcaggccagcccgcacgacatttcaaacgttctcaagttatacttaagacagcttccagagcccctgataagctttagactgtatcacgaactggtagggctcgcgaaagactctctgaaggccgaagccgaagctaaagcagcttctagaggccggcaggatggttccgagagcgaggcagtcgctgtcgcactggccggccgcttgagagagctgctgcgtgatctcccccccgagaaccgggcctcccttcagtatctcctccgccacctgcggagaatagtagaagtcgaacaggataataaaatgacccccatgaggctcagggggggcagaatgacgctgggctcttgtcgcgagaggcagcctgaattcgtatag

SEQ ID NO: 190751 - DNA, 3492 bp, synthetic construct
  misc_feature 1..3492: note = Description of Artificial Sequence: Synthetic coding sequence
  source 1..3492: mol_type = other DNA
atgttcagccggaagaagcgggagctgatgaagacccccagcatctcgaagaaaaacagagctggtagtccaagtccgcagccctcaggaccacattttatctctggagagacggaggcagtctcccgtcctgaaaatcctttcaacgagctccccagcgacctccccaaggaacttccacggaaagacggagctgacgctgtcttccccggtccaagcctagagcctccagcgggatcttctggggtgaaggctacagggactctcaagaggccaacctctctttctagacatgcctccgcggctggattccctttaagcggagccgcttcatggaccctgggccgcagccaccgctcccctctcacggccgcctcacccggtgaactacctaccgagggcgctggccctgacgtggttgaggatatcagccacctgctggctgacgtcgctaggttcgccgagggactggagaaattgaaagagtgtgtgctccgcgacgacctgcttgaggctcgaagacccagggcccatgagtgtctcggcgaagcgctacgcgtgatgcaccaaattatctcaaaatacccactcctgaatacagtggaaactttaactgccgcaggaacactgattgctaaggtcaaagccttccactacgaaagtaataatgatttggagaagcaggagttcgagaaggcgctcgagactatagccgtcgcgttctcttcaactgtctccgaattcttaatgggcgaggtcgactccagtaccctgctggctgtcccgcccggcgacagctcccagagtatggagtccctctatggtcccgggagtgaaggaacaccaccttccttagaagattgtgatgctgggtgccttccggccgaggaggtagacgtcttgctccaaagatgtgagggaggagtggacgccgcgctgttgtacgctaagaatatggccaaatacatgaaagatctgattagctacttggaaaagcgcacgactttggaaatggaattcgccaaaggcctgcagaagatcgcccacaactgccggcagtcggtaatgcaagaaccgcacatgccgctcttgagtatttacagcctggccttagaacaagacctggaatttggccactccatggtgcaggcagtcggcacactgcagacacaaacgtttatgcagccactgaccctgagacggcttgagcacgagaaacgtcgcaaggagatcaaagaggcatggcaccgggcccagaggaagctacaggaggctgaatccaatttacgcaaggcgaaacaaggctacgtacaacggtgcgaagaccacgacaaggcgcgcttcctcgtggcaaaggccgaagaggaacaggcggggtcggccccgggagcgggctcaactgccacaaagaccctcgataagagacgtcggctggaagaggaagctaagaacaaagccgaagaggccatggcgacctaccgtacttgcgtggcagatgccaagacacaaaagcaggagctggaagacactaaagtgactgctctgcgccagattcaggaggtgattagacagtcggaccagacgattaaatccgccacaatctcatattaccagatgatgcacatgcagacagccccgttacctgtgcattttcaaatgttatgcgaaagtagcaaattgtacgacccaggacagcagtatgctagtcacgtccgccaattgcaaagagaccaagagcccgacgttcactacgacttcgaaccccacgtgtcggccaatgcttggtcaccagtgatgcgcgccagaaagtccagctttaacgtttccgatgtggcgcgccctgaggccgctggcagccccccggaggaagggggctgtacagagggaactcctgccaaggaccacagagctggcaggggacatcaagtgcataagagctggcccctctcgatctcagatagcgactctggactagacccaggcccgggcgccggggacttcaaaaagtttgaacggacaagctcttctggaacaatgagtagcaccgaagaattggtcgatcccgatgggggagctggagcctcagccttcgagcaggccgatctgaacgggatgacgcctgagttgccggtagccgtgccgtcagggccctttaggcatgagggactgtccaaagcagccaggacacaccgccttcgcaaattgcggacaccagctaagtgtagggagtgtaacagctacgtgtatttccagggcgctgaatgcgaagaatgttgtttagcatgccataaaaagtgtctcgaaacactggcgattcaatgtgggcacaaaaagttacagggacgattacagcttttcggacaggacttctcgcacgctgccaggtctgccccagacggtgtaccattcattgtgaaaaaatgcgtctgcgaaatcgaacgcagagccttgcggactaagggcatctaccgggtgaacggagtcaagactagagtcgaaaagctgtgtcaggcctttgaaaatggcaaggaactggtggaactttcacaagctagccctcacgacataagcaacgtgcttaagctttatctccggcagctgcccgaaccactgatttcctttcggctgtaccatgagctggttgggctagccaaagactccctgaaagccgaagccgaggctaaggcggcaagccgcggtaggcaagacggcagcgaaagcgaagctgtggctgtagctctggctggccgcttgcgtgaattgctcagggacctgcccccggagaatcgagcatccttacaatacctcttaagacaccttaggcgtattgtggaggtagaacaagacaataagatgacgcctgggaatctgggcatcgtgttcgggcccacactcctgaggccgcggccaacggaagccactgtgagtctatcatctcttgtggactatccccaccaagcacgggtgatcgaaacgttgatagtgcattatgggcttgtcttcgaagaggaaccagaggagacaccggggggccaggacgaaagcagcaatcagcgggccgaggtggtggtgcaggttccttacttggaggcaggggaggctgttgtgtaccccttacaggaggcggccgctgacggttgtcgtgaatcccgtgtggtcagtaatgattccgactctgacttagaagaggcctcagagcttctatcttcttctgaagcaagcgcgctgggacatctttctttcttggaacagcagcagtccgaggcgtctttagaagtcgcctctggctcgcacagcggctctgaggagcagttggaagccactgcacgcgaggacggggatggggatgaggatggacctgctcaacagctgtcaggttttaatacaaatcagtctaacaatgtcttgcaggccccactaccacccatgaggctgcggggcggacggatgactttagggtcctgcagagagagacagcctgagttcgtgtag

SEQ ID NO: 190752 - DNA, 420 bp, synthetic construct
  misc_feature 1..420: note = Description of Artificial Sequence: Synthetic coding sequence
  source 1..420: mol_type = other DNA
atgagcatcagcagcgccctggccatggtgttcatgggcgccaaggggaacacagcagcacagatgagtcaagcgctctgttttagtaaaatcggcggcgaagacggcgatattcatcggggattccaatccctactggttgctattaatcgaacagataccgaatacgtgctgcggactgcaaatgggctctttggcgaaaaatcatatgatttcctaaccggtttcactgactcttgtggcaaattttaccaggccactatcaaacagctcgacttcgtaaatgataccgaaaaatcaacaacaagagtgaatagttgggtggcggataagacaaagggagagaacattttacttttctactttgacaatattctgaattccttcatcgtatcgagtctccaaaactgtcaaatatag

SEQ ID NO: 190753 - DNA, 162 bp, synthetic construct
  misc_feature 1..162: note = Description of Artificial Sequence: Synthetic coding sequence
  source 1..162: mol_type = other DNA
atggagatcttcatcgaggtgttcagccacttcctgctgcagctgacagagctaaccttgaacatgtgcttagaattgcctactggatctctggagaagtccctcatgatctccagtcaagtactccaaatacccgtcgcaaactcaaccaagcaacgctag

SEQ ID NO: 190754 - DNA, 648 bp, synthetic construct
  misc_feature 1..648: note = Description of Artificial Sequence: Synthetic coding sequence
  source 1..648: mol_type = other DNA
atgagcgagaccgtgccccccgcccccgccgccagcgccgcccccgagaagcccctggcagggaagaaagccaaaaaacctgcaaaggccgccgccgccagtaagaaaaagccggccggtccatcagtcagtgaactgatcgtgcaagctgcctcctccagtaaagaaaggggtggtgtgtctcttgccgcccttaaaaaggccctggccgctgccggttacgacgtcgaaaagaacaattcccgaataaaactcggcattaaatccttggtgtcaaaggggacactggttcagacgaaagggaccggagcatccggttcctttaaactgaacaaaaaagctagttccgtagagaccaagcctggagcgtccaaagttgctaccaaaaccaaggctaccggagcgagtaagaaactgaaaaaagccactggtgcctctaaaaagtctgtaaaaacccctaagaaagctaaaaaacccgctgcgactcgaaagagctcaaagaatccgaagaagccaaagaccgttaaacccaagaaggtggcaaaatccccagccaaagccaaagctgtcaagccgaaggcggcaaaagctagagtaactaaaccgaaaactgccaaacctaagaaagctgcgcccaagaaaaagtag

SEQ ID NO: 190755 - DNA, 681 bp, synthetic construct
  misc_feature 1..681: note = Description of Artificial Sequence: Synthetic coding sequence
  source 1..681: mol_type = other DNA
atgagcgagaccgcccccgccgagaccgccacccccgcccccgtggagaagagtcctgccaagaagaaggccacaaagaaagccgctggcgccggagctgcaaagcggaaagctaccggcccccctgtgagtgagttaatcaccaaagctgtcgccgcatctaaagaaaggaatggcttgtctctggcggctctaaagaaagctctcgctgcaggaggctatgacgtggagaagaacaactccagaattaaactgggtctgaaatctctggtgtcgaaaggtactttagtccagactaagggcacaggagcttcaggtagttttaaattaaacaagaaagcggcttcaggggaggccaaaccgaaagccaagaaagcgggggccgcaaaagctaaaaaaccagccggcgccacaccaaaaaaggccaagaaggctgcgggtgccaagaaagctgtgaagaaaacacccaaaaaagccaaaaagcctgccgccgcaggagtcaagaaggtagccaagagccccaagaaggctaaggcggccgccaaacccaagaaggcaaccaaaagccccgctaagcccaaagcagtcaagccaaaagcggccaaacctaaagccgcgaagccgaaggcagccaagcccaaagctgccaaggccaagaaggctgcagccaagaagaaatag

SEQ ID NO: 190756 - DNA, 642 bp, synthetic construct
  misc_feature 1..642: note = Description of Artificial Sequence: Synthetic coding sequence
  source 1..642: mol_type = other DNA
atgagcgagaccgcccccgccgcccccgccgccgccccccccgccgagaaagcgcccgtcaagaaaaaggccgctaaaaaagccgggggaacaccccgcaaggccagcggccccccagtgagcgagctcatcacaaaggccgtggccgccagcaaggagaggagcggggtatctctggcagccctcaagaaagcattggccgctgccggctatgatgtggagaaaaacaattcgcggattaagctggggctgaaatccttggtctcaaaaggtacactggttcagactaagggcaccggggcttccggctccttcaagttgaataaaaaggctgcgtcaggcgaagctaagccaaaggtcaagaaagcaggtggcactaagcctaagaaaccagtgggtgccgcaaaaaaacccaagaaagccgcaggaggagctacacctaagaaatcagccaagaagactcccaagaaagccaaaaagccagcagccgctacagtcactaaaaaggtggcgaagtcaccaaagaaagcgaaggttgcaaagcccaagaaggctgcaaagagcgccgccaaagccgtgaaacctaaggcagcaaaaccaaaagtcgtcaagcccaaaaaagccgctccaaaaaagaagtag

SEQ ID NO: 190757 - DNA, 666 bp, synthetic construct
  misc_feature 1..666: note = Description of Artificial Sequence: Synthetic coding sequence
  source 1..666: mol_type = other DNA
atgagcgagaccgcccccctggcccccaccatccccgcccccgccgagaagacaccagtcaaaaaaaaagcaaaaaaggcgggagcaaccgccggaaagagaaaagccagtgggcccccggtgtccgagctcatcactaaagcagtcgccgcctcaaaggagcggagcggcgtttccctggcagcactgaaaaaggccttggccgccgccggttacgatgtggagaaaaacaactccaggataaaacttggactaaaaagcctggtgagcaagggtactctcgtccagactaaagggactggggcttccgggtcttttaaacttaataaaaaagccgctagcggtgaggggaaaccgaaggccaagaaggcgggcgccgctaaaccgcgcaaacccgcaggcgctgcgaagaaacctaagaaggtggcaggcgcagcaacacccaagaagagtattaagaaaactccgaagaaggttaagaagcctgcgactgccgccggtactaagaaggttgccaaatccgccaagaaagtaaaaaccccccaacctaagaaagctgcgaagagccccgccaaggcaaaggcacctaagcctaaggcagctaagcctaagtctggtaaaccaaaggtgaccaaggccaagaaggctgctcccaagaagaagtag

SEQ ID NO: 190758 - DNA, 660 bp, synthetic construct
  misc_feature 1..660: note = Description of Artificial Sequence: Synthetic coding sequence
  source 1..660: mol_type = other DNA
atgagcgagaccgcccccgccgcccccgccgcccccgcccccgccgagaaaacaccggtgaagaagaaggcccggaaatcagctggtgccgccaagcggaaggcaagcggcccccctgtgtccgaactgatcactaaagcagtcgcggcttctaaggaacgaagcggcgtttccctggccgctcttaaaaaggctttggccgctgcaggctacgacgtcgagaaaaacaactctcggatcaagctgggcctgaagagcctagtgagcaagggcacattggtgcagactaagggaacaggggcgtcaggttcctttaaattaaacaagaaggcggccagcggcgaagctaaacccaaagctaaaaaggcaggagctgccaaggccaagaaacctgctggagcggccaagaaacccaaaaaagctaccggggcagctaccccgaagaagagcgccaaaaaaacacccaagaaagccaaaaagcccgccgctgcagctggggccaagaaagcgaagtcccctaaaaaagcgaaggctgctaagccaaaaaaagcccccaagagccctgcgaaggcaaaggctgtcaagccaaaggcagctaaacccaagacagcaaaaccaaaggccgcaaagcctaagaaggctgccgcaaagaagaaatag

SEQ ID NO: 190759 - DNA, 624 bp, synthetic construct
  misc_feature 1..624: note = Description of Artificial Sequence: Synthetic coding sequence
  source 1..624: mol_type = other DNA
atgagcgagaccgtgcccgccgccagcgccagcgccggcgtggccgccatggaaaagctgcctaccaaaaaaaggggccgaaaacctgccggcttgattagcgcctctcgaaaggtgcccaaccttagtgtgagcaagctgatcacagaggccttatccgtatcccaagaacgggtcggcatgtccttagtcgctttgaagaaggcactcgcagctgccggttatgacgtggagaaaaacaactcaaggatcaaactctcccttaagagcctagtaaataagggcatcttggtgcagactagggggacaggagcgagtggttctttcaagctcagcaagaaggtgattcccaaatcaacacgatccaaagcaaagaaaagcgtgtccgctaagacaaagaagctggtgcttagccgtgactccaaatccccaaaaacggccaagactaataaacgcgctaaaaaaccaagggctacgacgcccaagactgtgcgcagcggtcggaaggcaaagggggccaagggcaagcagcagcagaagagtccagtcaaagcccgagcctccaagtctaaacttacacagcaccatgaagtgaatgtgcgcaaggcaacctccaaaaaatag

SEQ ID NO: 190760 - DNA, 393 bp, synthetic construct
  misc_feature 1..393: note = Description of Artificial Sequence: Synthetic coding sequence
  source 1..393: mol_type = other DNA
atgagcggccggggcaagcagggcggcaaggcccgggccaaggccaagacaagatcatcaagagccggattgcagtttccagtggggagggtgcacagactacttaggaagggaaactatagcgagcgggtaggagccggagctcccgtatatttggcggccgtcttggagtacctgaccgcagaaattctcgaactggccgggaatgccgcaagagataataaaaaaactcgcatcataccgagacatttgcaactagccatcaggaacgatgaagagctgaataagcttctgggtcgcgtgaccattgctcaaggaggcgttctccctaatatacaagcggttctactgcctaagaagaccgaatcccaccacaaagcaaaaggtaagtag

SEQ ID NO: 190761 - DNA, 393 bp, synthetic construct
  misc_feature 1..393: note = Description of Artificial Sequence: Synthetic coding sequence
  source 1..393: mol_type = other DNA
atgagcggccggggcaagcagggcggcaaggcccgggccaaggccaagtccagaagttcccgagctggcctgcagtttccggttgggcgagtgcacaggctcctgcggaaagggaactacgccgagcgtgtcggtgcgggtgcccccgtgtatctggccgctgtgttagaatatctgacagcagagatattggagttggctggcaacgcagcccgggacaataagaaaacaagaatcatcccacgtcaccttcagctagcaataagaaatgatgaagagctaaacaagcttctgggtcgcgtcacaatcgcccagggtggagtgctgccaaacatccaggccgtactgctccccaaaaaaacagagtctcatcataaggcaaagggaaaatag

SEQ ID NO: 190762 - DNA, 393 bp, synthetic construct
  misc_feature 1..393: note = Description of Artificial Sequence: Synthetic coding sequence
  source 1..393: mol_type = other DNA
atgagcggccggggcaagcagggcggcaaggcccgggccaaggccaagagtcgctcgtcacgcgctgggctacagttccctgtcggtagagtgcatagattattgagaaaagggaattatgctgagcgagtgggggccggagcacctgtgtatttggcagccgtgctggagtacctgacagcagagatcttagagctcgctggtaacgcggctagagataacaagaaaacaaggatcatccccaggcacctccaactcgcaatccgaaacgatgaagagctgaataagttgttagggcgcgtgaccattgcccagggtggcgtcctaccaaacattcaggccgttctgcttcctaagaaaactgagtctcaccataaggccaagggcaagtag

SEQ ID NO: 190763 - DNA, 393 bp, synthetic construct
  misc_feature 1..393: note = Description of Artificial Sequence: Synthetic coding sequence
  source 1..393: mol_type = other DNA
atgagcggccggggcaagcagggcggcaaggcccgggccaaggccaagacgcgatcatccagagccggcctccagttccccgttggaagggtacatcgcctgttgcgtaaagggaattacagcgaaagggtcggcgcaggcgcgcccgtctacttagccgccgtgctggagtacttgacagccgagatcctcgaactcgctggcaatgccgctcgcgacaataagaagacccgcatcatcccccgtcacctgcagttagcaatcaggaacgatgaagagctgaataagctgctaggcaaggtaaccatagctcagggcggtgtgcttccaaacatacaagccgtcctgttgcctaagaaaaccgaaagtcaccacaaggctaaggggaaatag

SEQ ID NO: 190764 - DNA, 393 bp, synthetic construct
  misc_feature 1..393: note = Description of Artificial Sequence: Synthetic coding sequence
  source 1..393: mol_type = other DNA
atgagcggccggggcaagcagggcggcaaggcccgggccaaggccaagaccaggagctctcgtgctggactacagttccccgtgggtagggtgcaccgtttactccgaaagggaaactattctgaaagggtgggggccggagcgccagtgtatctcgccgcagtcctggagtacctgacagcggagattctcgaattggcaggaaatgcggcaagagacaacaaaaaaactaggattattccccgacatctgcaactcgccattcggaacgacgaggagctgaacaagctgctggggagagtgactattgctcaaggcggcgtgttgcccaatatacaggctgtgctcttacccaaaaagacggagtcacaccacaaagccaaggggaaatag

SEQ ID NO: 190765 - DNA, 393 bp, synthetic construct
  misc_feature 1..393: note = Description of Artificial Sequence: Synthetic coding sequence
  source 1..393: mol_type = other DNA
atgagcggccggggcaagcagggcggcaaggcccgggccaaggccaagacaagatcatctagggccggactgcagttcccagtgggacgggtccaccggctgttaagaaagggcaattatgccgagagagtcggtgccggcgccccagtgtacttagcagccgtattggaatatttaactgctgagattctggaactcgcgggcaatgccgcacgggataataagaagacgaggatcatacccaggcacctgcagttggccatacggaacgacgaggaactaaataagctcctcggaaaagtgactatcgcccagggaggggtgcttcctaatatccaagcagtactgctcccgaagaagactgaaagtcatcacaaggcgaagggcaagtag

SEQ ID NO: 190766 - DNA, 387 bp, synthetic construct
  misc_feature 1..387: note = Description of Artificial Sequence: Synthetic coding sequence
  source 1..387: mol_type = other DNA
atgagcggccggggcaagcagggcggcaaggcccgggccaaggccaaaacccgatcctcacgggcaggcctgcagtttcctgtggggcgcgtgcatcggctcctcaggaaggggaactacgccgagagggtgggagccggggccccagtgtacttggctgcagtgctcgaatacctgactgccgagatcctggaacttgccggcaacgcggcacgagataacaaaaagactaggataatcccccgccatctgcagctggccatacggaatgacgaggagttaaacaagctgttgggcaaagtgacgatcgcccagggtggcgtgcttccgaacatacaggccgtgctactccctaagaagactgagtcacaccacaaaactaagtag

SEQ ID NO: 190767 - DNA, 393 bp, synthetic construct
  misc_feature 1..393: note = Description of Artificial Sequence: Synthetic coding sequence
  source 1..393: mol_type = other DNA
atgagcggccggggcaagcagggcggcaaggcccgggccaaggccaaaacgcggtcctcccgcgcgggtttgcagtttcccgtgggacgcgttcacagattattacgaaaaggtaactacgccgagcgggttggggcaggcgctccagtgtacctggccgcagtcctggagtatctaaccgccgaaattttagagctggccggcaacgccgcacgggataacaagaagaccaggatcattccaaggcaccttcaacttgcgatccggaacgacgaggaattaaataagctactcggcaaggtgactattgctcaaggcggcgtccttccaaatatccaggcagtgctcttgcctaaaaaaaccgaaagtcaccataaggctaaggggaagtag

SEQ ID NO: 190768 - DNA, 393 bp, synthetic construct
  misc_feature 1..393: note = Description of Artificial Sequence: Synthetic coding sequence
  source 1..393: mol_type = other DNA
atgagcggccggggcaagcagggcggcaaggcccgggccaaggccaagacaagatctagccgggccgggctgcaattccctgtgggaagagtccaccgcctgctgagaaaaggcaactacgccgaacgcgtgggcgccggagccccggtgtacctggccgccgtgctggaatacctgaccgcagagatcctggaattagctggaaatgccgccagggataataaaaaaacccgcattatccctcgccacttgcagctggccatcaggaatgatgaggagctgaataaattgctcggaaaggtaaccatagcccagggtggggtgttaccaaacattcaggctgttctgctcccaaagaaaacagaatcccaccataaggctaagggaaagtag

SEQ ID NO: 190769 - DNA, 393 bp, synthetic construct
  misc_feature 1..393: note = Description of Artificial Sequence: Synthetic coding sequence
  source 1..393: mol_type = other DNA
atgagcggccggggcaagcagggcggcaaggcccgggccaaggccaagacccgcagtagtcgtgctgggctgcagttccccgttggacgggtgcacagattgctgcgaaaagggaattacgcagagagagtgggagccggcgcgccggtatatctcgcagcggtccttgaatacctaacggctgaaatactggagctggctgggaatgccgccagggacaacaagaaaactcgcatcatacctagacacctgcagctcgctatcagaaatgacgaagaattaaacaaacttctgggaaaggttacaattgcccaaggaggggtgcttccaaacatccaagctgtcttgctacccaagaagaccgaaagccatcacaaagccaagggcaaatag

SEQ ID NO: 190770 - DNA, 384 bp, synthetic construct
  misc_feature 1..384: note = Description of Artificial Sequence: Synthetic coding sequence
  source 1..384: mol_type = other DNA
atgcccgaggtgagcagcaagggcgccaccatcagcaagaagggctttaagaaggcagttgtgaaaacacaaaagaaagagggaaaaaaaagaaagagaacccgcaaggaatcctattctatctacatctataaggtgttgaaacaggtccaccccgataccggtattagctccaaagccatgtccataatgaatagtttcgttacagacatattcgagagaatcgcgagcgaagccagccgactcgcccactactccaagcgcagtaccatatcctcacgagaaatccaaacagccgtgcgacttctgctgcctggagaactagccaagcacgctgtctccgaggggacaaaggctgttacaaaatacacatccagtaagtag

SEQ ID NO: 190771 - DNA, 381 bp, synthetic construct
  misc_feature 1..381: note = Description of Artificial Sequence: Synthetic coding sequence
  source 1..381: mol_type = other DNA
atgcccgagcccagcaagagcgcccccgcccccaagaagggcagcaagaaggcgattaccaaggctcagaagaaggatgggaagaagcgcaagagatctagaaaagagtcatattctatttacgtatacaaggtcctaaaacaggtgcacccagatacaggaatcagtagtaaggccatgggcattatgaacagcttcgtgaatgacatcttcgaaagaatcgccggagaagcttctagactcgcccactacaacaaacgcagcactatcacctcacgagaaatacagacagccgtccggctgctgctccccggggaattggccaagcacgccgtgagcgaaggcacaaaagctgttacaaagtatacgtccagtaagtag

SEQ ID NO: 190772 - DNA, 381 bp, synthetic construct
  misc_feature 1..381: note = Description of Artificial Sequence: Synthetic coding sequence
  source 1..381: mol_type = other DNA
atgcccgagcccgccaagagcgcccccgcccccaagaagggcagcaaaaaggcggttactaaagcccagaagaaggacggcaagaagaggaaacgctcccgcaaagagagttattccgtatatgtgtacaaggtgctgaaacaggttcatcccgacaccggcatcagttccaaggctatgggtattatgaattcctttgtgaatgacatcttcgagagaatcgcgggagaagcttctcggttagcacattataacaaaaggtcaaccatcacctctagagagattcagaccgctgtcaggctgctgctgcccggagagcttgccaaacatgctgtatccgaaggcaccaaggccgttacaaaatatactagctccaagtag

SEQ ID NO: 190773 - DNA, 381 bp, synthetic construct
  misc_feature 1..381: note = Description of Artificial Sequence: Synthetic coding sequence
  source 1..381: mol_type = other DNA
atgcccgagcccgccaagagcgcccccgcccccaagaagggcagcaaaaaagcagtgaccaaggctcagaaaaaggacggcaagaagcgtaagaggagccggaaggagtcgtactctgtgtatgtgtacaaagtactgaagcaggtccatcccgacaccgggatcagcagcaaagcgatgggcataatgaacagttttgttaacgatattttcgaacggatcgctggtgaggctagccgattggctcattacaacaaacgctctactatcacctcgcgcgaaatacagacagcagtccgcctcttactaccaggagagctcgctaagcatgctgtttccgaaggcactaaggccgttactaagtacacatccagcaagtag

SEQ ID NO: 190774 - DNA, 381 bp, synthetic construct
  misc_feature 1..381: note = Description of Artificial Sequence: Synthetic coding sequence
  source 1..381: mol_type = other DNA
atgcccgagcccaccaagagcgcccccgcccccaagaagggcagcaaaaaagctgtaactaaggctcaaaagaaggacggaaagaagcggaaacgcagccgtaaggaatcttatagtgtatatgtttacaaagtgttgaaacaagtgcatcctgatacagggatcagctccaaagctatgggaatcatgaactcttttgtgaatgatatatttgaacgtattgcaggcgaggccagccggctggcgcactacaataagcgcagtacgattaccagtcgcgagatacagaccgccgttcgcctcttactccccggcgagctggccaagcatgctgtgagcgaaggcacaaaggctgtcactaagtacaccagctctaaatag

SEQ ID NO: 190775 - DNA, 381 bp, synthetic construct
  misc_feature 1..381: note = Description of Artificial Sequence: Synthetic coding sequence
  source 1..381: mol_type = other DNA
atgcccgagcccaccaagagcgcccccgcccccaagaagggcagcaagaaggctgtcaccaaggctcagaagaaagacggtaaaaagcggaagcgttcccggaaggagtcttacagcgtctatgtatacaaggtcttaaaacaagtgcaccccgacacggggatatcaagcaaagcaatgggaattatgaatagcttcgtgaatgatatattcgaaaggattgccggtgaagcgagcagactagcccactacaacaagagatctaccatcacttcaagagagatccaaacagcagtgaggctgctgctgccgggcgagctcgctaaacatgccgtgtccgagggtacaaaggccgtgacaaaatacacctccagtaagtag

SEQ ID NO: 190776 - DNA, 381 bp, synthetic construct
  misc_feature 1..381: note = Description of Artificial Sequence: Synthetic coding sequence
  source 1..381: mol_type = other DNA
atgcccgagcccgccaagagcgcccccgcccccaagaagggcagcaagaaggccgtgactaaggcccaaaagaaggatgggaaaaaacgaaaacggagccgcaaagagagttatagtgtgtacgtgtacaaggtgctgaaacaagtgcacccagacactggcatttcttccaaggcaatgggcattatgaattctttcgtgaacgacatatttgagagaattgccggtgaggctagccgcctcgcccattacaacaagagaagcactataacgtcccgggaaattcagaccgccgtcaggctcttactccccggagagctcgccaaacacgcagtaagcgagggcactaaggccgtgacaaagtacacatcgagcaagtag

SEQ ID NO: 190777 - DNA, 381 bp, synthetic construct
  misc_feature 1..381: note = Description of Artificial Sequence: Synthetic coding sequence
  source 1..381: mol_type = other DNA
atgcccgagcccgccaagagcgcccccgcccccaagaagggcagcaaaaaggctgttacgaaagctcagaaaaaagacggtaagaagcgtaaaaggtctcgcaaggagtcctatagcgtgtacgtgtacaaagttctgaaacaggttcatcccgataccggcatcagctccaaggcgatggggattatgaattctttcgtgaacgatatattcgaacgcattgccggtgaggcttccaggctcgctcactacaacaagagatccacaattacctcaagggagattcagacagccgtcaggctcctgcttcccggggaactagccaaacacgctgtgtctgagggcacaaaggctgttacaaagtataccagcagtaaatag

SEQ ID NO: 190778 - DNA, 381 bp, synthetic construct
  misc_feature 1..381: note = Description of Artificial Sequence: Synthetic coding sequence
  source 1..381: mol_type = other DNA
atgcccgagcccgccaagagcgcccccgcccccaagaagggcagcaaaaaagctgttacaaaagctcagaagaaagatggaaagaaaaggaaacggtctcgcaaggaaagttactctgtgtatgtgtacaaggtattgaagcaggtgcatccagatacaggcatcagctcaaaagcgatgggcattatgaattcctttgtcaatgacatcttcgaaagaatagccggggaggcatctcgcttagctcactataataaacggtcaacaataaccagtagagagatacagaccgcagtgaggctcctgttaccaggggaactggctaagcacgcagtctcggagggcaccaaggctgttacaaagtacactagcagcaagtag

SEQ ID NO: 190779 - DNA, 381 bp, synthetic construct
  misc_feature 1..381: note = Description of Artificial Sequence: Synthetic coding sequence
  source 1..381: mol_type = other DNA
atgcccgaccccgccaagagcgcccccgcccccaagaagggcagcaagaaagccgttaccaaagctcaaaaaaaggatggaaagaagcgaaagaggtcccgaaaagagagctacagcgtgtacgtttacaaagtcctaaaacaggttcaccccgacacaggcatctcttctaaagcaatgggaattatgaattcttttgttaacgacatattcgaacgcatcgctggtgaggcgtccagattagcgcactacaacaagaggagtacgatcacaagccgggaaattcagaccgccgtccggttactgctccctggtgagttggctaagcacgcagtgagtgagggcacaaaggcagtcacaaaatatacatcgagtaagtag

SEQ ID NO: 190780 - DNA, 381 bp, synthetic construct
  misc_feature 1..381: note = Description of Artificial Sequence: Synthetic coding sequence
  source 1..381: mol_type = other DNA
atgcccgagcccgccaagagcgcccccgcccccaagaagggcagcaaaaaagcagtcacaaaggcccagaagaaggacggtaaaaagcggaagcgttcacgaaaggagtcgtatagcgtttacgtgtataaggtacttaagcaagtccatcctgatactgggatcagcagcaaggctatggggattatgaactcttttgtaaacgatatattcgaaagaattgccggggaggcctctcgtcttgctcattacaataaacgatccaccatcactagccgcgaaatccagactgcagtcaggctgctactgccaggcgagctggcgaagcacgccgtgtctgaaggaaccaaagcagtgacaaaatacacatcttccaagtag

SEQ ID NO: 190781 - DNA, 381 bp, synthetic construct
  misc_feature 1..381: note = Description of Artificial Sequence: Synthetic coding sequence
  source 1..381: mol_type = other DNA
atgcccgagctggccaagagcgcccccgcccccaagaagggcagcaaaaaagctgtgactaaggctcaaaaaaaggatggaaagaaaaggaagcgttcaaggaaagaatcctactctgtctatgtttacaaagtcctgaaacaggtgcatccagacacagggatcagcagcaaggccatgggcattatgaacagctttgtaaacgacattttcgaacggattgcatcagaagcatcaaggctagcccactacaacaagaggtcaacaattacaagccgagaaatccagacagcagttcgactccttctgccaggggagctggccaaacacgccgtgagcgaaggaaccaaagccgtcactaaatacacatccagcaaatag

SEQ ID NO: 190782 - DNA, 381 bp, synthetic construct
  misc_feature 1..381: note = Description of Artificial Sequence: Synthetic coding sequence
  source 1..381: mol_type = other DNA
atgcccgagcccgtgaagagcgcccccgtgcccaagaagggcagcaaaaaagctataaataaggcacagaagaaggatggaaagaaacggaagcggagcagaaaagaatcctacagcgtctacgtatataaggtgcttaagcaggtccatccggacactggtatatcctccaaggccatgggaataatgaactcttttgtaaacgacatcttcgagcgcattgcgggcgaagcaagccggcttgcacattacaacaagagaagtaccatcacatctcgagagattcagactgccgtacggctcttgctacccggtgaactggctaagcacgctgtgtcagagggcacaaaagccgtaacaaagtacaccagctctaagtag

SEQ ID NO: 190783 - DNA, 381 bp, synthetic construct
  misc_feature 1..381: note = Description of Artificial Sequence: Synthetic coding sequence
  source 1..381: mol_type = other DNA
atgcccgagcccagcaagagcgcccccgcccccaagaagggcagcaaaaaagctgtaacaaaagctcagaagaaggacggtaaaaaaaggaagcggtctcgcaaagagtcctatagcgtctatgtctataaagttctcaagcaggtacatccagacacaggtatcagcagtaaggccatgggtattatgaacagtttcgtgaacgacatattcgaacgcattgccggagaagcttctaggctggcacattataataagcgctccacgatcaccagtagggagatccaaactgctgttagattactgctgcccggagagctggctaaacacgccgtgtcagagggtactaaggcagtaaccaagtacacctcctctaagtag

SEQ ID NO: 190784 - DNA, 381 bp, synthetic construct
  misc_feature 1..381: note = Description of Artificial Sequence: Synthetic coding sequence
  source 1..381: mol_type = other DNA
atgcccgagcccagcaagagcgcccccgcccccaagaagggcagcaagaaggccgttactaaggctcaaaagaaggacggcaaaaagaggaaaagatcacggaaggaatcgtactccgtttatgtgtacaaggtattaaaacaggtgcacccagataccggtatcagctccaaggccatggggattatgaattcatttgtcaacgatattttcgagcggatagctggtgaagcatctagactcgcacattataacaagcgatccacaataacgtctagagagatccagactgccgttaggctcttacttccgggcgaactcgcgaaacacgctgtgtctgaaggcaccaaggccgtcacgaagtatacatcaagcaagtag

SEQ ID NO: 190785 - DNA, 381 bp, synthetic construct
  misc_feature 1..381: note = Description of Artificial Sequence: Synthetic coding sequence
  source 1..381: mol_type = other DNA
atgcccgaccccgccaagagcgcccccgcccccaagaagggcagcaaaaaagctgtcacgaaggcacagaaaaaggacggcaaaaaacgtaagcggagccgcaaggaatcctatagcatttatgtgtataaggtgcttaagcaggtgcatccagacaccggcatcagttctaaagccatgggaatcatgaatagcttcgttaatgatatttttgaacgcattgccggggaggcctcacgactcgcccattacaataaaagatcaactataacatctcgggagatccaaaccgccgtgagattactgctgcccggggagttggcaaaacatgccgttagtgagggtacaaaggcagttaccaaatacaccagttccaagtag

SEQ ID NO: 190786 - DNA, 411 bp, synthetic construct
  misc_feature 1..411: note = Description of Artificial Sequence: Synthetic coding sequence
  source 1..411: mol_type = other DNA
atggcccggaccaagcagaccgcccggaagagcaccggcggcaaggcacccaggaaacagctggctaccaaggctgctagaaagtcagcccccgccaccggcggagtgaaaaagccacacagatataggcccggaaccgttgccctgagggaaattcgtcgttaccagaaatctacagagcttctgatccgcaagctgccgtttcagagactggtgagagagatagctcaggacttcaagactgatttaagattccagagttccgctgtcatggcactgcaggaggcctgcgaggcctatttggtgggtttatttgaggacaccaatctttgtgcgatacatgccaagcgcgtgaccatcatgcccaaggacattcaacttgcccgcaggatcaggggggaacgcgcttag

SEQ ID NO: 190787 - DNA, 411 bp, synthetic construct
  misc_feature 1..411: note = Description of Artificial Sequence: Synthetic coding sequence
  source 1..411: mol_type = other DNA
atggcccggaccaagcagaccgcccggaagagcaccggcggcaaggctcctcggaagcagcttgctaccaaagccgctcggaaatccgcccctgctacaggcggcgttaagaagccccatagatacagacccggcaccgtcgctctccgggagattcgccggtaccagaagagcacagaattgctgatcagaaaacttccctttcagcgcctagttagggaaatcgcccaagacttcaagactgacctcaggttccagagttctgccgttatggctctacaagaggcttgcgaagcctatctagtggggctgttcgaggataccaacctgtgtgccatacatgctaagcgggtcactatcatgccaaaagacatccagttagctcggagaattaggggagagagggcttag

SEQ ID NO: 190788 - DNA, 411 bp, synthetic construct
  misc_feature 1..411: note = Description of Artificial Sequence: Synthetic coding sequence
  source 1..411: mol_type = other DNA
atggcccggaccaagcagaccgcccggaagagcaccggcggcaaggctcctcgtaagcagttagctactaaagccgctaggaagtctgcccccgccacaggcggcgtgaaaaaaccccatcgctatagacctggaacagtcgcgctccgcgaaattagaaggtaccagaagtccactgaactgcttattaggaagttaccatttcagcgacttgtgcgcgaaatcgcacaagactttaaaacggacctgcgctttcaatcatctgccgtcatggccctgcaggaggcatgcgaggcatacctcgtgggcctcttcgaagacaccaacctgtgtgctatccacgccaagcgggtcaccattatgcctaaggacattcagcttgcccggcggattaggggtgagcgggcctag

SEQ ID NO: 190789 - DNA, 411 bp, synthetic construct
  misc_feature 1..411: note = Description of Artificial Sequence: Synthetic coding sequence
  source 1..411: mol_type = other DNA
atggcccggaccaagcagaccgcccggaagagcaccggcggcaaggcccccaggaaacagcttgcaaccaaggctgctcgtaaatcggcccccgccaccggcggggtcaagaagccccaccgctaccgtcctggcactgtagcacttcgtgaaatccggcgctaccagaaaagcacagagttgctgattcgcaaactgccattccagcggctggtgcgcgagatagctcaagacttcaaaactgaccttcggtttcagtcctcggcagttatggcgctgcaggaggcctgcgaggcttaccttgtgggcctgttcgaggataccaatctctgcgcaatacacgcaaaaagggtcacaatcatgccaaaggatattcagcttgccagaagaattcggggcgagcgcgcttag

SEQ ID NO: 190790 - DNA, 411 bp, synthetic construct
  misc_feature 1..411: note = Description of Artificial Sequence: Synthetic coding sequence
  source 1..411: mol_type = other DNA
atggcccggaccaagcagaccgcccggaagagcaccggcggcaaggcacctcggaagcagctggcaacaaaagcagccagaaaatccgcacccgcgaccggtggagttaagaagcctcataggtatcgccccgggactgtcgcgctgcgcgaaattagacggtatcaaaaaagcaccgagctcctgattagaaaactgcccttccagcgccttgtgagagagatcgcccaggattttaaaactgacctcaggtttcagagtagtgctgtgatggccctgcaggaagcatgcgaggcttacctcgtcggcctctttgaggacaccaacctgtgtgctattcatgctaaaagggttacgatcatgccaaaagacatccagctggctagacgtataaggggagaacgggcctag

SEQ ID NO: 190791 - DNA, 411 bp, synthetic construct
  misc_feature 1..411: note = Description of Artificial Sequence: Synthetic coding sequence
  source 1..411: mol_type = other DNA
atggcccggaccaagcagaccgcccggaagagcaccggcggcaaggctcccaggaagcagcttgcaaccaaggctgcccgaaagagtgcccctgccacgggaggggtaaagaagccccaccgctaccgcccaggaacagtggctctccgagagatcaggaggtaccagaagagcacagagctactcatcaggaaactacccttccagcgcctggtgagggagattgcccaggacttcaagacagatctgcgtttccagtcctccgccgtcatggccttacaggaagcttgcgaggcatacttggttgggctgttcgaagacaccaatttatgtgctatccatgcgaagcgggtaaccattatgcctaaagacattcagcttgcgagaaggattagaggcgagagagcatag

SEQ ID NO: 190792 - DNA, 411 bp, synthetic construct
  misc_feature 1..411: note = Description of Artificial Sequence: Synthetic coding sequence
  source 1..411: mol_type = other DNA
atggcccggaccaagcagaccgcccggaagagcaccggcggcaaggcaccaaggaaacagttggctacgaaggctgctaggaagtcagccccagcgacgggaggcgttaaaaagccccaccgctacagaccaggcaccgtggcactgcgggaaatcaggcgttaccagaagagtaccgagttgctcatcagaaaacttccttttcagaggttggtgagagaaatagcacaggactttaaaactgacctcaggttccagtcctctgccgtgatggccctccaggaggcatgcgaggcatatctcgttggactgtttgaggataccaatctatgtgccattcacgccaaacgggttaccattatgcctaaggatatccagcttgcacggaggatacggggggagagggcctag

SEQ ID NO: 190793 - DNA, 411 bp, synthetic construct
  misc_feature 1..411: note = Description of Artificial Sequence: Synthetic coding sequence
  source 1..411: mol_type = other DNA
atggcccggaccaagcagaccgcccggaagagcaccggcggcaaggctccacgcaagcaactcgcaaccaaagctgccagaaaaagcgcccctgctactggcggggttaaaaagccccatcgttacagacctggaaccgtggcccttcgcgagatcagaagataccagaagagtacagagcttctgatccgcaagctgcctttccagaggctcgtgagagaaattgcacaggatttcaagactgacctcaggttccagagctccgccgtgatggcactccaagaagcctgtgaggcgtatctggtaggcttattcgaggataccaatctttgtgcaatccatgctaagcgtgtgaccatcatgcccaaagacattcagctcgctcggcgcattcgcggtgaaagggcatag

SEQ ID NO: 190794 - DNA, 411 bp, synthetic construct
  misc_feature 1..411: note = Description of Artificial Sequence: Synthetic coding sequence
  source 1..411: mol_type = other DNA
atggcccggaccaagcagaccgcccggaagagcaccggcggcaaggcgcctcggaagcaactcgccaccaaagccgccaggaagagtgccccagcaacaggtggcgtcaagaaaccacaccgctatcgaccaggcacggtcgctctgagggaaatcagaagataccagaagtctaccgaattgttaattcgaaagctgcccttccaacgattagtaagagaaatcgcacaggattttaaaacggatttgaggtttcagtccagtgctgtgatggctctacaagaagcgtgcgaagcatacctagtgggccttttcgaggacaccaacctttgcgccattcacgccaaacgcgtaactatcatgccaaaagatatccagctagcccgccggatacggggggaacgtgcctag

SEQ ID NO: 190795 - DNA, 411 bp, synthetic construct
  misc_feature 1..411: note = Description of Artificial Sequence: Synthetic coding sequence
  source 1..411: mol_type = other DNA
atggcccggaccaagcagaccgcccggaagagcaccggcggcaaggcaccccgcaagcagctcgctacaaaggctgcgcggaagtctgcgcctgcgacggggggcgttaaaaaaccacataggtatcggcctggaaccgtagcactcagagagatccggagataccaaaagtccactgaactcctgatcaggaagctcccatttcagcgcctggtcagagagattgcgcaggactttaagaccgatctacggttccagtcaagcgccgtcatggcactgcaggaggcctgcgaagcctacctggtgggcctgtttgaggacacaaacctgtgcgccatacacgcgaagcgagtgaccataatgccaaaggatatacaacttgctagacggatcagaggtgagagggcctag

SEQ ID NO: 190796 - DNA, 411 bp, synthetic construct
  misc_feature 1..411: note = Description of Artificial Sequence: Synthetic coding sequence
  source 1..411: mol_type = other DNA
atggcccggaccaagcagaccgcccggaagagcaccggcggcaaggcgcctcgcaaacagctcgcaactaaggcagcacgaaagtccgcccccgccaccggtggggtaaaaaagccacacaggtatagaccagggactgtcgccttgcgcgaaattaggcgctaccagaagtccaccgagttactgattcgtaagctgccgtttcagaggctcgtccgcgagatcgcacaggatttcaaaaccgacttgcgatttcagagcagcgcggtgatggccctgcaggaggcctgcgaagcttacctggtgggcttatttgaagatactaacctctgtgctatacatgccaaacgtgtgaccataatgcccaaagacatccaactggctaggcgaattcgtggagagcgggcgtag

SEQ ID NO: 190797 - DNA, 339 bp, synthetic construct
  misc_feature 1..339: note = Description of Artificial Sequence: Synthetic coding sequence
  source 1..339: mol_type = other DNA
atgagcggccggggcaagggcggcaagggcctggccaaggccaagacatgttcatcccttccaggcttacagtttcctgggagggtcaggcatcttttccggaagggaaattactttgaacctgtgggggctggagcccctgtgtatctacagtatctcgcggctgagatcctggagttggtcggctccgccatccgtgataagacaaggtccattattccacgacatctgcagcttgccatacggaatgacgaggaggtgaacaagcagctcggtaatgtaactatcgcccaaggtggggtcctctccaacattcaggccgtccttcttcccaaatag

SEQ ID NO: 190798 - DNA, 312 bp, synthetic construct
  misc_feature 1..312: note = Description of Artificial Sequence: Synthetic coding sequence
  source 1..312: mol_type = other DNA
atgagcggccggggcaagggcggcaagggcctgggcaagggcggcgcgaagcggcacagaaaagtcctgcgcgataacatccaggggattaccaaacccgctataagacgactcgcccgaagaggtggagtgaaacggattagcggcttgatatatgaagagacaaggggcgtgctgaaggtctttctagaaaacgtgatacgggatgccgtgacttataccgaacacgcaaagaggaaaaccgttactgcaatggacgtagtgtatgctctgaagcgtcagggccgcaccctttacggctttggggggtag

SEQ ID NO: 190799 - DNA, 312 bp, synthetic construct
  misc_feature 1..312: note = Description of Artificial Sequence: Synthetic coding sequence
  source 1..312: mol_type = other DNA
atgagcggccggggcaagggcggcaagggcctgggcaagggcggcgcaaagcggcatcgtaaagtcctgcgagataacattcaggggatcacaaagcctgcgatcagacgcctggcacggaggggtggcgtgaaacgcatttcaggactgatctatgaagagacccgcggtgtgctcaaggtgttcctcgaaaatgtaattcgcgatgcagtcacctacactgagcacgctaaaagaaagactgttacagcaatggacgttgtctatgcattaaaacggcagggcaggaccctgtatggcttcggagggtag

SEQ ID NO: 190800 - DNA, 312 bp, synthetic construct
  misc_feature 1..312: note = Description of Artificial Sequence: Synthetic coding sequence
  source 1..312: mol_type = other DNA
atgagcggccggggcaagggcggcaagggcctgggcaagggcggcgcgaaaaggcacagaaaggttctacgagacaatattcagggaataactaaaccagccatccggcgactggctcggaggggcggggtgaagagaatttccggcctgatctacgaagagaccaggggtgtgttaaaagtctttcttgagaacgtaattcgggacgctgtgacttacaccgagcacgccaaacgcaagacagtcactgccatggacgtggtgtatgcccttaagaggcagggaagaactctctatggcttcgggggctag

SEQ ID NO: 190801 - DNA, 312 bp, synthetic construct
  misc_feature 1..312: note = Description of Artificial Sequence: Synthetic coding sequence
  source 1..312: mol_type = other DNA
atgagcggccggggcaagggcggcaagggcctgggcaagggcggcgccaagcgccacaggaaggtcctcagggacaatatacagggtattacaaagccagccatccgcaggctggctcgacgaggaggagttaagagaattagtgggctgatctatgaagagaccaggggagtattgaaagtgtttcttgagaatgttattcgcgatgcagtcacgtacacagagcacgccaaaaggaagacagtgactgccatggacgtcgtgtacgctctgaaacgccaaggcagaaccctctacggctttggcggatag

SEQ ID NO: 190802 - DNA, 312 bp, synthetic construct
  misc_feature 1..312: note = Description of Artificial Sequence: Synthetic coding sequence
  source 1..312: mol_type = other DNA
atgagcggccggggcaagggcggcaagggcctgggcaagggcggcgccaaacgtcaccgtaaggtactgcgggataacatccagggaataaccaaaccagctatccgtcggctcgccagacgagggggcgttaagaggattagtggcttgatttatgaggagacccgcggcgtcctgaaggttttcctggagaatgtaatccgggatgcagttacctataccgagcacgccaaaaggaagacagtgactgcgatggacgttgtgtacgccttgaagcgccaggggaggacactctacgggtttggcgggtag

SEQ ID NO: 190803 - DNA, 312 bp, synthetic construct
  misc_feature 1..312: note = Description of Artificial Sequence: Synthetic coding sequence
  source 1..312: mol_type = other DNA
atgagcggccggggcaagggcggcaagggcctgggcaagggcggcgccaagaggcaccggaaggtgttgagggacaacatccaggggatcacaaagcctgcaatccgtagacttgcccgacggggcggagtcaaaagaatatcgggtctgatctatgaagagacccgtggtgtgctgaaggtgtttctggagaatgtaattcgcgacgctgtgacttacaccgagcacgccaagcgtaagacagtgaccgcaatggacgtggtttacgcactaaaaagacaggggcggactctttacggcttcggcggctag

SEQ ID NO: 190804 - DNA, 297 bp, synthetic construct
  misc_feature 1..297: note = Description of Artificial Sequence: Synthetic coding sequence
  source 1..297: mol_type = other DNA
atgagcgtgcggggcaaggccggcaagggcctgggcaagggcggcgctaaatgtcatcgcaaggttctctccgacaatatacaggggataaccaagtgcactattcgccggttggcccgccacggaggtgtaaagaggattttggggcttatttatgaagaaactaggagggtctttaaggtgtttctagagaatgtcatatggtatgcggtcactaatactgaacacgccaagcgcaagaccgtaaccgccatggccgttgtatacgtgctgaagcgtcaagggaggacgctttag

SEQ ID NO: 190805 - DNA, 312 bp, synthetic construct
  misc_feature 1..312: note = Description of Artificial Sequence: Synthetic coding sequence
  source 1..312: mol_type = other DNA
atgagcggccggggcaagggcggcaagggcctgggcaagggcggcgctaagcgacaccgaaaagttctcagggacaatatccaaggtatcactaaaccagcaatccgacggctggcccgacgcggcggagtcaaacgaatatcaggccttatctatgaggagaccaggggagtgctgaaggtgttcctcgaaaatgtcatcagggacgcagtaacatacacagagcatgctaaacggaagacagtgaccgcaatggatgtagtatacgcacttaagcggcaaggccgaactttgtacgggtttggtgggtag

SEQ ID NO: 190806 - DNA, 312 bp, synthetic construct
  misc_feature 1..312: note = Description of Artificial Sequence: Synthetic coding sequence
  source 1..312: mol_type = other DNA
atgagcggccggggcaagggcggcaagggcctgggcaagggcggcgctaagcggcacagaaaagtactacgggacaatatccagggaataaccaaaccagctatcagaaggttggcacgacgtggcggggtgaaacgtatctccggcctgatttacgaggagacacggggtgtgttgaaagtctttctggaaaatgtgattcgggacgctgtgacgtacactgaacacgctaaacggaagaccgtgacggcgatggatgtcgtttatgccctgaaacgccagggcaggacgctctacggcttcgggggctag

SEQ ID NO: 190807 - DNA, 312 bp, synthetic construct
  misc_feature 1..312: note = Description of Artificial Sequence: Synthetic coding sequence
  source 1..312: mol_type = other DNA
atgagcggccggggcaagggcggcaagggcctgggcaagggcggcgcgaagcgtcaccggaaagtgctgcgggataacattcaaggtatcaccaaacccgcaatcagaagactggcgagaaggggtggcgtgaaacggataagtggtctgatctacgaggagacacgcggtgtgctcaaagtgttcttagaaaatgtcattcgcgacgcagtgacctacacagaacacgcgaagcggaaaactgtgactgcaatggatgtggtgtatgcgcttaagcgccaggggcgaaccctgtatgggtttgggggatag

SEQ ID NO: 190808 - DNA, 312 bp, synthetic construct
  misc_feature 1..312: note = Description of Artificial Sequence: Synthetic coding sequence
  source 1..312: mol_type = other DNA
atgagcggccggggcaagggcggcaagggcctgggcaagggcggcgctaagcgtcatagaaaggtgctgcgggataatatccagggaatcaccaaacctgccatcagacggctagcaagacgaggtggggttaaacgcatcagcggactgatttacgaggagactcggggcgtgctgaaagtcttcctggagaacgtgataagggatgcagtgacatacactgagcatgcaaaaaggaaaaccgtgaccgcaatggacgtggtttatgccctcaagcgacaggggaggaccctttatggtttcgggggctag

SEQ ID NO: 190809 - DNA, 312 bp, synthetic construct
  misc_feature 1..312: note = Description of Artificial Sequence: Synthetic coding sequence
  source 1..312: mol_type = other DNA
atgagcggccggggcaagggcggcaagggcctgggcaagggcggcgcgaagcgccacaggaaggtgctgagggataacatacagggcatcactaaaccagcaattagaagactcgcccggcggggaggagtgaaacgcatttccggtttaatctatgaggagacgcgcggtgtgctgaaggtcttccttgagaacgtgatccgagacgccgttacgtacaccgagcacgcaaaaaggaaaacagtaacagccatggacgttgtctatgcgctgaagcggcagggaaggaccctctatggatttggcggttag

SEQ ID NO: 190810 - DNA, 312 bp, synthetic construct
  misc_feature 1..312: note = Description of Artificial Sequence: Synthetic coding sequence
  source 1..312: mol_type = other DNA
atgagcggccggggcaagggcggcaagggcctgggcaagggcggcgcaaaacgccaccgaaaagtactgcgagataacatccagggtatcaccaagccagccattaggcgactggcccgaaggggaggggttaagcgcatcagcggtctgatctatgaggagactagaggtgtccttaaggtgttcctggagaatgtcatacgcgacgccgttacgtacactgaacacgccaaacggaaaacagtcactgcgatggacgtggtgtatgctctgaagcggcagggcaggactttatacgggttcgggggttag

SEQ ID NO: 190811 - DNA, 390 bp, synthetic construct
  misc_feature 1..390: note = Description of Artificial Sequence: Synthetic coding sequence
  source 1..390: mol_type = other DNA
atgagcggccggggcaagcagggcggcaaggcccgggccaaggccaagtcccgtagttccagggccggcctgcaattcccggttgggcgagtgcatagattgctgaggaaggggaactacgctgagcgggtgggcgccggcgctccagtgtatatggccgcagtgttggaatatcttacggccgagatactggagctggccggcaatgcagcccgagacaacaagaaaacacgcataattccccggcacctgcaactggccatccgtaatgatgaagaacttaacaagctgctgggaaaagtcacgatcgctcagggtggagttctgccaaacatccaggccgtcttgttgcccaaaaagaccgaaagccataaagctaagtctaagtag

SEQ ID NO: 190812 - DNA, 381 bp, synthetic construct
  misc_feature 1..381: note = Description of Artificial Sequence: Synthetic coding sequence
  source 1..381: mol_type = other DNA
atgcccgagcccgccaagagcgcccccgcccccaagaagggcagcaagaaggccgtaactaaggctcaaaagaaggacggcaagaagaggaaaagaagcagaaaagagtcatacagtatctacgtgtacaaggtattgaaacaagtgcatccagacactgggataagcagcaaggccatggggatcatgaatagttttgtcaacgacatcttcgaacggatcgccggcgaggcaagcaggcttgctcattataacaagcgcagcacgatcacaagtagagagattcagactgccgtgagactgctgctgcccggcgagcttgcaaagcatgccgttagcgagggtaccaaggcagttactaagtacacttcgagtaagtag

SEQ ID NO: 190813 - DNA, 411 bp, synthetic construct
  misc_feature 1..411: note = Description of Artificial Sequence: Synthetic coding sequence
  source 1..411: mol_type = other DNA
atggcccggaccaagcagaccgcccggaagagcaccggcggcaaggccccgcgaaaacagttagcaacaaaggcggctcgtaagtccgcaccggctacaggaggcgtgaagaagccgcatcgctatcggcctggtaccgtggccctgagggaaatccgtagataccaaaagagcacagagctgctgattagaaaactccctttccagcgactggtgcgtgaaattgcgcaggactttaagacagatctgagattccagagttccgccgtcatggcccttcaagaagcctcagaagcttacctcgtcgggttattcgaagacaccaacctgtgtgccatacacgccaaacgcgtgaccatcatgccaaaagacatccagttggccagacgcattcgcggcgagagggcgtag

SEQ ID NO: 190814 - DNA, 411 bp, synthetic construct
  misc_feature 1..411: note = Description of Artificial Sequence: Synthetic coding sequence
  source 1..411: mol_type = other DNA
atggcccggaccaagcagaccgcccggaagagcaccggcggcaaggcaccaaggaaacagctggcgacaaaagtggcacggaagagcgctcccgccaccgggggtgttaagaagccccaccgctaccgaccaggcaccgtggctctcagagaaatcaggcgctatcaaaagagcactgagcttttgatccgcaaacttcctttccaacgacttatgcgcgaaatcgcccaggacttcaagactgatcttcgctttcaaagttccgctgttatggcccttcaggaggcctgcgagagctacttagttggcctgtttgaagatacaaacttatgcgtgatccatgccaagcgtgtgaccatcatgcccaaagatattcagctggcgaggcgcatacgcggcgaaagagcttag

SEQ ID NO: 190815 - DNA, 684 bp, synthetic construct
  misc_feature 1..684: note = Description of Artificial Sequence: Synthetic coding sequence
  source 1..684: mol_type = other DNA
atggagggccagagcggccggtgcaagatcgtggtggtgggcgacgccgagtgcggaaagacggctctcttacaggtgttcgctaaagatgcctatcccggcagctatgtgcccaccgtgtttgagaactacacagccagctttgagatcgataagcgtaggatcgaactgaatatgtgggataccagtggtagttcttactatgacaacgtccgtccgctggcataccccgattccgacgcagtgctaatctgtttcgatatcagtcggcccgaaaccttggacagcgtattgaaaaaatggcagggggagacgcaggaattttgcccaaacgctaaagttgtgttggtaggctgtaagctggatatgaggaccgatctcgcgactctgagagagttatccaaacagcgcttgatccctgtaactcacgaacagggaacagtacttgctaaacaagttggtgccgtttcttatgtggaatgctcttcgagaagctccgagcgatcggtccgcgacgtcttccacgttgcaacagttgcctccctgggaagggggcatcgccaactgcggaggacagacagccgccgcgggatgcaaaggagtgctcagctctcaggtaggcccgatcgaggcaatgagggagaaatccacaaggatcgggcaaagtcctgtaacttgatgtag

SEQ ID NO: 190816 - DNA, 3114 bp, synthetic construct
  misc_feature 1..3114: note = Description of Artificial Sequence: Synthetic coding sequence
  source 1..3114: mol_type = other DNA
atgaacagccccaacgagagcgacggcatgagcggccgggagcccagtctggagatccttcctaggacctcactgcattcaatccctgtgactgtcgaggtcaagcccgtcctgccacgggccatgccaagtagtatgggcgggggggggggtggttcaccatcccccgtggaactgcggggggctctggtgggctccgtggacccaaccctgagagaacagcagcttcaacaggagctgctcgccctgaagcagcagcagcaacttcaaaagcagctgctttttgctgaatttcagaaacagcacgatcacctcacgcggcagcatgaggtgcagctgcaaaaacacttgaagcagcagcaggagatgctcgcggcaaaacagcagcaggagatgctcgccgccaaaagacaacaggagctggagcagcaacgacaacgggagcagcagagacaggaggagttagaaaaacagaggcttgagcaacagttacttatcttgagaaacaaagagaaatcgaaagaatcagccatcgcatctacagaggtgaagctcagactgcaggagttccttctgtccaagtctaaagagccaacccccggcggcctcaaccactctcttccccagcatcctaagtgttggggcgcccaccacgcatccttagatcagagctcgcccccccagtctggcccacctggaacgcctccatcctacaagctgcctctccctgggccatatgattcccgagacgacttccctttgaggaaaacagcctctgaacccaatctgaaggttcgctccagactgaaacagaaggtggcagaacggcgcagctcccccctgctgaggcggaaggacggaacagtgattagcacgtttaagaaaagggccgtcgagattacaggagccggcccgggagcctcatctgtctgcaacagcgcacctgggtcaggcccctcctcacctaacagctcacattctaccattgccgagaatggcttcacaggttctgtcccgaatatacccactgaaatgctgccgcaacaccgtgcccttcccttggacagtagccccaatcaattcagtctgtacacttctccctccctccctaacatctcactgggtctccaggcgacagtaaccgtcacaaactcccacttgaccgcgtcgcctaaactttctacccagcaggaggccgaaagacaggctctccagagtcttcggcagggaggaaccttgacaggcaaatttatgtctacctcatcaatccccggctgtttgctcggtgtggctctggagggtgacggatccccccacggtcacgcaagcctgttgcaacatgtactgctgctggagcaggcccggcaacaatccactctgattgcggtgccgctccacggtcaatcacctcttgtgaccggagagagggttgcgacgtccatgcgcactgttggcaagctgcctagacatcgtccactgagtaggacacaatcatcaccactgccccaatctccccaagcactgcagcagctagtgatgcagcagcagcaccagcagttcttagagaagcagaagcagcagcagcttcagctggggaaaatcttgactaaaacaggcgagctccctcgacagcctactacccacccagaggagacagaggaggaactgaccgaacaacaggaggtattgctcggagaaggcgccctcaccatgccccgcgaagggtctactgaaagcgaatcgacccaagaggacctggaggaagaagacgaagaagacgacggagaagaagaggaagactgcattcaggtgaaggacgaggagggtgaatccggagcggaggagggtccggacctagaagagcctggcgccgggtacaaaaagctcttttccgacgcccagccactgcagccgctccaggtgtatcaggcccctctatccctggcaactgtgccacaccaagccctaggccgaacccagagtagccctgccgcgccgggtggcatgaagtcccctccggatcagcctgtgaaacacctgtttacgactgggcctatttctcagaagatgtatgccgtcctgccctgcggaggtattggtgtcgattctgatacagtgtggaacgagatgcattccagcagtgctgtgaggatggctgtgggttgtctgctagaacttgcctttaaagttgctgccggcgagctcaaaaacggctttgccattatcagacctccagggcatcacgcggaagaaagtaccgcaatgggcttttgtttctttaattccgtcgctataacggccaagctgctgcagcagaagctgaatgtggggaaagtgcttatcgtggattgggatatacatcatggtaacgggactcaacaagccttctataacgatccatccgttctgtacatttccctgcaccgctacgacaatgggaatttcttccctgggtctggggctcccgaagaggtgggcggcggccctggcgtgggctacaacgtgaacgtggcatggacaggcggggtggaccccccaattggcgatgtggaatatctaacagccttcagaaccgttgtgatgccaatcgcacatgaattctctccagacgtcgttctcgtttccgcaggattcgacgccgtggaaggacatttatcacctctggggggctactcagtgaccgcccgctgttttggacatctaaccaggcagctgatgacactcgctggggggcgagtagtgttagctctggaagggggccacgatctgactgctatatgcgatgccagcgaagcgtgtgtatccgcgctcctgagtgttgagctacagcctctggatgaagctgtgttgcaacaaaaaccgaatatcaatgcggtggcaaccctggaaaaagtgattgaaatccaaagtaaacattggagttgcgtacagaagttcgctgccgggctgggccggtctctgagggaagctcaagctggggaaacagaggaagctgagactgtctcagccatggcactcttgtccgtaggcgctgaacaagcccaggccgccgcagccagagaacattccccccggccagccgaagaaccaatggagcaagaacctgcactgtag

SEQ ID NO: 190817 - DNA, 3369 bp, synthetic construct
  misc_feature 1..3369: note = Description of Artificial Sequence: Synthetic coding sequence
  source 1..3369: mol_type = other DNA
atgaacagccccaacgagagcgacggcatgagcggccgggagccctcattggagattctgcctaggacatctctgcactccattccagtcactgtggaggtgaaacccgtcctgcctcgagctatgccaagcagtatgggcggcggtggaggcggcagccctagccccgtcgagctgagaggagccttggtaggcagcgtagatcccacccttagggaacagcaactgcagcaagagctgctcgctctgaaacaacaacagcaactgcagaaacagcttctttttgccgagtttcagaagcaacatgatcatctgaccagacaacacgaagtacagcttcagaagcacctgaaacagcagcaagagatgctggccgccaagcagcagcaagagatgcttgctgctaagcggcagcaggaattagaacaacagcgccagagagagcagcagcgccaggaagaactggagaagcagaggctggaacaacagctgctcattttgcgcaataaggaaaaaagcaaggagtcagcaattgcctcaacagaagtgaaactccgcctgcaggaattcctactttcaaagtctaaggagcctacccccggtggactaaaccactcactgccacagcaccccaaatgctggggcgcacatcacgccagcctggaccagtcgtcacccccacagagtggcccaccaggcacccccccctcctacaaactacctttacccggcccctacgactcacgtgatgatttcccccttcgaaagactgctagcgagcctaacctcaaagtgcgttcaagactgaaacagaaagtcgcggaaagacggagctcccctttactgaggcggaaagacggaactgtgatttcaacctttaagaagagagcagttgagattactggcgcaggcccgggcgcctcttccgtctgcaacagtgccccaggcagcggaccttcatcccctaatagttctcattcaacaatcgcagagaacggcttcaccggtagcgtccccaatatcccaaccgagatgctcccacagcatagggccctccctctggactcatcacccaaccaattctctctttatacctccccatcgttgccaaatatttctctgggtttgcaggccacagtaacagtgactaattcacacctcacagctagccctaaactcagcacccagcaagaggccgaaaggcaggccttgcagtctctccggcagggcggcactttaactggaaaattcatgtccacctctagcatccccgggtgcttgcttggcgtcgccctggaaggcgatgggagtccccatggtcacgctagtctgctccagcacgtactattgctggagcaggctaggcaacagagcacactcatcgccgtaccacttcacggacagagcccactcgttactggggagcgtgtcgctacaagcatgcggaccgttggcaaattacctcggcataggcctctgagccgtactcaatcgtccccgcttccacagagtccacaggctttgcaacagctggtgatgcaacagcagcaccagcaattcctggaaaagcaaaagcaacaacagctccagctgggcaagattttgaccaaaaccggggaacttccccggcagccaacaacgcacccagaggaaaccgaagaagagcttaccgagcaacaagaagtgttgctaggagaaggagcgctcaccatgcctagagagggatcgacggagagcgagagcactcaagaggacctggaggaagaggacgaggaggacgatggcgaggaggaggaggactgcatccaggtgaaagatgaggagggcgaatcaggcgctgaggagggcccagacttagaagagcccggggcaggttataaaaagctttttagcgatgcccagcctctgcagcctctacaagtgtaccaagctccattgtcactggcgacagtgccccaccaagcactaggacggacacagtccagccctgccgctcctggtggcatgaaatctccacctgaccagcccgtaaagcatctttttaccaccggtgtcgtatatgacaccttcatgctgaagcatcagtgcatgtgcggtaacacccacgtgcacccggagcatgcaggccgcatccagagcatctggagtagactacaggaaacaggtttgctttctaagtgcgagcgaatacgcgggaggaaggcaacgctagacgagatccaaacggtgcactccgaataccacacccttctttatggcacgtccccgcttaataggcagaaactggattccaagaaattactcggtcccatttcacagaaaatgtatgcggtgctgccctgcggagggatcggcgttgatagcgacacagtctggaatgaaatgcattcctccagcgctgtgcgaatggctgttgggtgcttgctagaacttgcttttaaggtggccgcaggtgaactgaagaatgggtttgccattatacggccccctgggcatcacgccgaagagagtacagctatgggattttgttttttcaattcagtagcgattacagcaaaattgttacagcaaaagctgaatgtgggcaaggtattgattgtggactgggatatccaccacggcaatggcactcaacaagccttctacaacgaccccagcgtgctctacataagcctgcatcggtacgacaatggtaatttcttccctgggtccggggcgccggaagaagtcggaggggggcctggagtgggctataacgttaacgtcgcttggacaggaggtgtggatccgcccattggcgacgtcgagtatctcaccgccttcaggaccgtcgtcatgccaattgcccacgaattttcccctgacgtcgtgctggtctcggccggattcgatgctgtggagggacacctgtcacccctaggcggctacagcgtcaccgctcggtgttttgggcatctgacgcggcaactgatgactctcgccgggggacgtgttgtgctcgctctggagggcggacatgacctgacagcaatctgtgacgcctcagaagcatgcgtcagcgccctgctgagcgtagaactacagcctctggacgaggctgtcctgcagcaaaagcctaacatcaacgccgtagccacattagagaaggtgatagagatacagagtaagcactggtcatgtgtgcagaaattcgccgctgggcttggccgaagccttagagaagcccaggctggggagaccgaggaggcagaaaccgtgtccgctatggctctgctaagcgttggcgccgagcaggcccaggcggcggcagccagagaacatagtccaagacctgccgaggagccaatggagcaagagccggctttatag

SEQ ID NO: 190818 - DNA, 1776 bp, synthetic construct
  misc_feature 1..1776: note = Description of Artificial Sequence: Synthetic coding sequence
  source 1..1776: mol_type = other DNA
atgatgagcagccccgcccagagccggagccccgacctgatgtggaacctcgtgccctgggttctgttttgcggctgctgtaggatcttccccgacggggtggccggaagagaacagctgctggctcagcagagaatgcactccatgatctcaagcgtggacgtgaagagtgaggtcccagtcggacttgagccgatctctccactggatcttcggacagatctgcgcatgatgatgccggtggtggatccagtggtgcgggaaaagcaattgcagcaagaacttctgttaattcagcaacagcaacaaattcagaagcagctgctaatcgccgaattccagaagcagcatgagaacctgactagacaacaccaggcccaattacaggagcacatcaaagaattgctcgccattaaacaacagcaggaactgcttgagaaggaacagaagcttgaacagcaacggcaggaacaagaagttgagcgccatagacgtgagcagcaacttccgcccctcagaggtaaggacaggggccgtgagcgtgcagtcgctagcactgaagttaagcagaagctccaagagtttctgttgagcaagtcagccacgaaagacacgccaacgaatggaaaaaaccactccgtgagccgccaccccaagttatggtatacagctgcccaccacacctctctcgatcagagctccccacccttgagtggtacatccccgagctacaagtacaccctgccaggggcccaagatgccaaggacgatttcccactcagaaaaacagagtcgagtgtatcctccagttcccccgggtccggcccttcatcgcccaacaatggcccaacaggtagtgtcacagagaatgaaaccagtgtactgcctccaaccccacatgcagaacagatggtctcccagcagagaattctgattcacgaggacagtatgaacttgctgtccctgtacaccagcccttccctgccgaatataactctcggcctgcctgccgtcccttcccaactgaatgcctctaattcgcttaaggaaaaacagaagtgcgaaacacagacccttcggcagggggtgcctctcccggggcaatacggcggcagcattcccgcatcatcgtcccacccccacgtgactctggaggggaagcctcctaatagttctcaccaggccctgctgcagcacctgctgttaaaggagcaaatgcggcagcagaagttactggtcgctggtggggtgcctctccatccccagtcccctctggcgacaaaggaacgcatctctccaggcataagaggcacccacaaattgccgcgccaccggccactcaatagaacacagtccgcgccacttccccagagcaccctcgcccaactggtgattcagcagcagcatcagcagtttctcgagaaacagaaacagtatcaacaacaaatccacatgaacaagctgctgtctaagtccattgaacagctgaagcagccaggttctcatctggaagaagccgaggaggaactccagggcgatcaggcaatgcaggaagatagggctcccagtagcggcaactctactcggtcagactcatccgcatgcgtcgacgatactctcggccaagttggggcagttaaagtcaaagaagagcccgtagattcggacgaagatgcccagatacaagagatggagagcggagaacaggcagcatttatgcagcaggtgattggcaaagacttggcgcccggctttgtgatcaaggtgatcatttag

SEQ ID NO: 190819 - DNA, 2772 bp, synthetic construct
  misc_feature 1..2772: note = Description of Artificial Sequence: Synthetic coding sequence
  source 1..2772: mol_type = other DNA
ctgcacaagctgagcagcctggtggacgtgaagagcgaggtgcccgtgggcttggaacctatttctcccctggacctgagaacggatctaagaatgatgatgccagtggtggatcctgtcgtccgagagaaacagctgcagcaagaacttctgctgatccaacagcagcagcagattcaaaaacaattactcatagctgaattccagaagcagcatgagaacctaacaagacagcatcaggcccagctccaggagcatatcaaagaacttctcgcgatcaagcagcagcaagagctgcttgagaaggagcagaaactagaacagcagcgtcaagaacaggaggtcgaaagacacaggagagagcaacagctccctccattacgaggcaaagatcgcggaagggaacgggcggtggcgtccactgaagttaaacagaagctacaggagtttctcctcagcaaaagcgctactaaagatacgcccactaacggtaaaaaccactctgtgtcaaggcaccccaagctgtggtatacagcggcacaccacacctctctggatcaatctagcccgccactctccggaacatccccgagttacaagtacacactgccgggggcccaggacgccaaggatgactttcccctcagaaagaccgcctctgaaccaaatttgaaggttcggtcacgccttaaacagaaggtcgccgagaggagatccagcccactcctgagaaggaaagatggcaacgtggtaacttcattcaaaaagagaatgtttgaggtaacggagtcatcagtctctagctctagtcccggcagtggcccatctagccccaacaatggtcccacagggtcagtgactgagaatgagacctccgtcctgccccccacccctcacgccgaacagatggttagccaacagcgcatcttaatccatgaagacagtatgaatttgcttagtctctacacttctccgagcctccctaacattaccctcgggttacccgcagtgccctctcagttgaacgcatctaacagcctgaaggaaaagcaaaaatgtgagacacagactctgaggcagggagtgcctctccctggccagtatgggggctccattccagcctctagctcccacccacatgtcacactcgaagggaagccccctaacagtagccaccaggccttgctgcagcacctgctgctgaaggaacaaatgagacagcagaagttgctggttgcaggaggagtgcccttgcacccacagagccccctggccacaaaagagcgcatctctcctggaatccgtggcacacacaagctgccacggcaccgtcccctcaaccgcactcagtccgctccactcccccaatcaactctcgcccaactcgttattcagcagcagcaccagcaattcctggaaaagcagaagcagtatcagcagcagattcatatgaacaagccctttctagagcctacgcacacaagagccctctctgtgagacaggcccctctagccgccgtcggcatggatggcttggaaaagcataggcttgtgtccaggacccactcaagtcccgctgcttccgttcttccccacccagctatggatcggcccctgcagcctggcagcgctacaggaatcgcctacgatccactgatgctgaagcatcaatgtgtatgcggaaatagtacaacacatcctgaacacgccggacgtatacaatctatttggagccggctgcaagaaacaggactccttaataaatgtgaacggatccagggccgaaaggcttccctggaggaaatccaactcgttcacagcgaacaccactccctactctatggaacaaaccctttggatggccagaagctagaccctcggatccttctcggagatgattctcagaagtttttttctagcctaccttgtgggggattgggggtggattccgatacaatctggaacgagctgcattccagcggggctgcgcggatggctgttggatgtgtgatagaactggctagtaaagtcgcaagcggtgaactgaagaacggattcgccgtggtgagaccccccgggcaccacgctgaagagagcaccgcaatgggtttctgcttctttaatagtgtggcaatcaccgccaaatacctgagggatcagcttaacatctccaaaattctgatagtggacctcgatgtgcaccacggtaacgggacccagcaggctttttatgcggatccatccatcctctacatcagcctccacagatacgacgagggcaactttttccctgggtcaggcgccccaaacgaggtaggtaccggcctaggagaggggtataacatcaatatcgcttggaccggaggcctggacccacccatgggtgatgtcgaatatctggaggcctttcgcactattgtgaagcccgtggcaaaggaattcgacccagacatggtgctcgtcagtgctgggttcgatgctctcgagggccataccccccctcttggcggctacaaagtgactgctaagtgtttcggccatctcaccaagcaactgatgacgttggccgatggcagggtcgtgctggccctggaggggggtcacgatctgacggcaatatgcgacgcatcagaggcctgcgtgaatgcccttctgggaaacgagctggagcccttggccgaggacattctgcaccagtctcccaatatgaacgccgttattagccttcagaagatcattgagatccagagtatgtcactaaagtttagttag

SEQ ID NO: 190820 - DNA, 3078 bp, synthetic construct
  misc_feature 1..3078: note = Description of Artificial Sequence: Synthetic coding sequence
  source 1..3078: mol_type = other DNA
atgcacagcatgatcagcagcgtggacgtgaagagcgaggtgcccgtcggtctcgaacccattagcccactcgacctgagaacggatttgcgcatgatgatgcccgttgttgatccggtcgtgagagaaaagcaactgcagcaggagctactgttaattcagcagcagcagcagatacagaaacagctgcttattgccgagttccagaagcaacatgagaatttgacccgtcagcatcaggctcagcttcaggaacacatcaagttgcaacaggaactgctggcaattaaacaacagcaggaactattggagaaggagcagaaactggagcagcagcgccaggagcaggaggtcgaaagacacagacgcgagcagcagctgcctccactgcggggaaaagaccgcggccgagagagagctgttgccagcacagaggtcaagcagaaactgcaggagtttctgctctctaagtccgccactaaagatacacctaccaatgggaaaaatcattcagttagtcggcaccccaaactgtggtacaccgcagcccaccatacaagccttgaccagagctctcctcccctaagtggcacttctcctagctacaagtataccttgccaggtgcccaggacgctaaggatgattttccccttaggaagacggaatctagcgtgtctagcagcagccctggctcaggtcctagtagcccgaacaatggccccacgggctctgtgactgaaaatgagacctctgtactgccccccacccctcacgctgaacagatggtgtcccagcagaggatacttatccatgaggactcaatgaacctcctcagcctgtatacttccccaagccttcccaacattactctgggcctgccggccgttccaagccagctcaacgcctccaattccttgaaagagaaacagaagtgtgaaacgcagactctacgtcaaggcgtcccactgccagggcagtatggaggtagtatcccagcgagttctagccatccccacgtgacgttagaaggaaagcctcccaactcaagccaccaggctttattgcagcaccttctcctgaaagaacagatgaggcagcagaagctgctggtggccgggggggtgccacttcacccgcaatccccactcgccacaaaggagaggatttcacctggcatccgaggaacccataagttacctcgacacagacctctcaacagaactcagagcgcccctctgccccagtccacactcgcgcagctggtgattcagcagcagcaccaacagtttctggagaaacagaaacagtatcagcagcaaatccatatgaataaactgctgagtaaaagcatcgagcagcttaagcagccaggctcacacctggaggaggctgaggaggaactacagggggaccaagcaatgcaagaggatcgcgctcctagcagcggcaattctaccaggtccgatagcagcgcctgtgtggatgacaccctggggcaagtgggagccgttaaagtgaaagaagagcctgttgattccgacgaggacgcccagatccaggaaatggagagcggtgagcaggcggcctttatgcagcaaccatttctcgagcctactcacaccagagccttatcagtgagacaggctcccttagcagccgtagggatggacgggctggaaaaacataggttggtgtccagaacacatagcagcccagccgcctccgtgctcccgcacccggcaatggaccggccattacagcctggctccgctactggaattgcctatgacccactcatgttaaagcaccagtgtgtctgcggtaacagcactactcatcctgagcacgctgggcgcattcagtccatatggagtcgccttcaagaaacaggactccttaacaagtgcgagagaatacaaggtcggaaagcttccctggaggagattcagctggtacacagcgaacaccactccctgctctatggcacgaatccactggacgggcaaaagctagatccgcgcatcctactgggcgacgatagccaaaaatttttctcatccctgccctgcggcgggctgggcgtcgatagcgataccatatggaatgagctacactcctcaggcgcagccaggatggccgtgggatgcgtcatcgaattggctagcaaggtggcctctggcgagttaaaaaatggatttgctgtagtgagaccgcccggccatcatgccgaggagtccactgcgatgggcttctgtttttttaacagtgtcgccatcaccgccaaatacttacgagatcagctgaacatctccaagattttgattgtggatctcgacgtgcaccatggcaacgggactcagcaggccttttacgccgacccctccatactgtacatctctctgcaccgatatgacgaaggcaattttttcccaggctcaggcgcacccaatgaggtcggtaccggtctgggtgagggttataatatcaatattgcctggaccgggggacttgaccctcctatgggggatgtcgaatacctcgaagcgttccgcactatcgtaaaaccagtggctaaagagtttgatcctgacatggttctcgtatctgctggattcgacgcacttgaaggccacacgccccctcttggaggttacaaggtgacagctaagtgttttggacaccttaccaaacagctcatgaccctcgccgatggacgggtggtgcttgctctcgaagggggccatgatcttactgccatctgcgacgccagcgaggcatgcgtcaacgctctcctcgggaatgaactggaaccacttgcggaagacatcctgcatcagtcacccaatatgaatgccgtgatatccttgcagaagatcatcgagattcagagcaagtactggaagagtgtgcggatggtggccgtccctaggggatgtgctcttgcgggggctcagttacaggaggagacagagacagtgtctgcactggcctccctgactgtcgatgtcgagcagccgttcgcccaggaggatagccgaaccgcaggagaacccatggaagaggagcccgcactctag

SEQ ID NO: 190821 - DNA, 1773 bp, synthetic construct
  misc_feature 1..1773: note = Description of Artificial Sequence: Synthetic coding sequence
  source 1..1773: mol_type = other DNA
atgcacagcatgatcagcagcgtggacgtgaagagcgaggtgcccgtggggctcgaacctatttccccacttgacctccgtaccgacctgcggatgatgatgcctgttgtggaccccgtggtgcgggaaaaacagctgcaacaggagctcctcctcattcagcagcagcagcagattcagaagcagctactaatagcagaattccagaaacagcatgagaacctaacacgccagcatcaggcacagctacaagagcacattaaagagttgctcgccataaaacaacagcaagaactgttggagaaggaacagaagctcgaacagcagcggcaagagcaagaggtcgagagacaccgccgtgagcaacagctgccacctctgcgcggtaaggatcgagggagagagagggcggtggcatccaccgaggttaagcagaagctgcaagaattcctcttgtctaaatcagccaccaaggatacccccactaatggaaaaaaccacagtgtgtcccgccatcccaagctctggtataccgcagcacaccatacttctctcgatcaaagcagcccacccctttccggaacttctccttcttataagtatactctacctggcgcacaagatgccaaggacgatttccctttgaggaagaccgcctcagaaccaaacctgaaggtgcggagccggttgaagcaaaaggtggccgaacggaggagttcccctctgctgcggaggaaggacggcaacgtcgtcacttcattcaagaaacgcatgtttgaggtgactgagagctctgtttcttccagtagccctggatcagggcctagcagccccaacaacgggcccacaggtagcgttacggaaaacgaaacgagcgtcttgcctccaacccctcacgccgagcaaatggtgtcccagcagagaattctcatccacgaagatagcatgaaccttttgagcctgtacacgtcacctagtctgcccaacatcacccttggacttccggccgtcccctcgcagctcaatgcttcaaactcactgaaggagaagcagaagtgtgagacccaaactttgcgacagggcgtcccacttccggggcagtacggtggaagtattcctgcttcgtcgtcacatccccacgtcaccctggaaggcaaaccaccaaacagttcccatcaagcactgctccagcacctgcttctcaaggagcagatgagacaacagaaactcctagtcgcgggtggagttcctctgcacccacagagccccctcgctacaaaagaaagaatatccccggggattaggggaacacataagctgcccaggcatagacctttaaatcgaacccagtccgccccccttcctcagagcactctcgcgcagttagtgatccagcagcaacatcagcaattcctggagaagcaaaagcagtatcagcagcaaattcacatgaacaaactgctgtccaaatccatagagcagctgaagcaaccagggtctcatctggaagaggctgaggaggagctccagggtgaccaggctatgcaggaagatcgagcgccttcctcgggtaattccacaaggtctgactcctcagcctgcgtggacgacactttaggccaggtcggagccgtgaaagtcaaggaggaacctgtagatagtgatgaagacgcccagattcaggaaatggagtctggggagcaggctgcttttatgcagcaggtgatcggtaaagatctcgccccaggatttgtcatcaaggtcatcatatag

SEQ ID NO: 190822 - DNA, 1734 bp, synthetic construct
  misc_feature 1..1734: note = Description of Artificial Sequence: Synthetic coding sequence
  source 1..1734: mol_type = other DNA
atgctgcagaccatctacgagagcgacagctgcttcagcagcgacggagtggccggtagggagcagttgctggctcagcaacgcatgcacagcatgatctcctctgtcgatgttaagtccgaagtccccgtggggcttgagcccatatctcccctggatcttcggaccgatctcagaatgatgatgcctgtcgtggaccccgtggttcgggaaaaacagctgcagcaagaacttctcctgatacagcagcagcagcagatccagaagcagctccttatcgcggagttccagaagcagcatgaaaaccttactcgccaacatcaggctcagctccaggaacacatcaaactgcaacaagaattgctggccattaaacagcagcaggaactgctggagaaagagcagaagctcgaacagcagagacaggagcaagaggttgaacgacatcgacgcgagcagcagctgccacccttgagaggaaaagaccgcggaagggagcgcgccgttgcctcaaccgaagtaaagcaaaagctgcaggaatttctgctgagcaagtcggccactaaggatacgcctactaacggaaagaaccattccgtctctcgtcacccaaaactatggtataccgccgctcatcatacatctttagatcagtccagcccacctctgtcgggcacatccccctcttacaaatatacgctgcctggtgcccaggatgcaaaggacgattttcccctgagaaagactgaatcaagcgtaagctcttcatcccctgggtcgggtccctcgtcccccaacaatggccccactggaagcgtaacagagaacgagaccagcgtgctgccccctacgccccatgcagagcaaatggtgagtcagcaacggatcctaatacatgaggacagcatgaaccttctgagcctttatacatcaccctcattgccaaatatcactcttggcctgccagcagtgccttcacagctcaacgccagcaactcgctcaaagaaaagcagaaatgcgaaacccaaacactccgtcagggggtccctctgcccgggcagtacggtggatctataccagccagttctagccaccctcacgtgacactcgaaggaaagccacccaattcatctcatcaggctttgctgcaacacctcctactgaaggagcagatgcgtcaacagaagctgctcgtagcagggggtgttcccctgcacccccagtccccactggctacaaaggagcgaatcagccctggaattaggggaactcataagctgcctcgacacagacctcttaatagaactcaaagcgctcctctgccccagagcaccctggcccagttagtaattcagcagcagcaccaacagttcctcgagaagcaaaaacagtaccagcagcagatccatatgaacaaactgctgtcaaagagtatcgagcagttgaagcagcctggttcacacttggaggaagctgaggaagagttgcaaggtgaccaggccatgcaggaagatagagcacctagttcagggaattccacacggagcgatagtagcgcctgtgtggacgacactttaggccaggtcggagctgtgaaggttaaggaagaaccagttgactcagacgaggacgcacagattcaagagatggagtcaggtgagcaagcagccttcatgcaacaggtaattgggaaggatcttgcccccggatttgttatcaaggtgatcatatag

SEQ ID NO: 190823 - DNA, 3201 bp, synthetic construct
  misc_feature 1..3201: note = Description of Artificial Sequence: Synthetic coding sequence
  source 1..3201: mol_type = other DNA
atgcacagcatgatcagcagcgtggacgtgaagagcgaggtgcccgtgggcttggagccaatttctccacttgatctgcggacggatctaagaatgatgatgcctgtcgtggacccagtcgtgcgcgaaaaacagctacagcaggaactgctcctgattcagcagcagcaacagatccagaagcagcttttaatcgcagagtttcagaaacagcatgagaatctgaccagacagcatcaggcacagctccaggagcacattaaagagctcctcgcaataaagcagcagcaggaattgttggaaaaggagcagaaactggaacagcaaagacaggagcaggaggttgagcgtcatcggcgcgaacagcagcttcctccattgagggggaaggaccgcgggagagagcgagctgtggcttccactgaggttaagcagaaactccaggagttcttattgagtaagtccgctacaaaagacacgcctaccaacggaaagaatcactccgtgtctcgccaccccaaactctggtacacagccgcccatcatacttccttggaccaatcttcacctcctctgtcaggtacctctccttcctacaagtacaccctgcccggcgcacaagatgctaaggacgattttccgttgcgcaagactgccagcgaacccaacctgaaggtccggtctcgactaaaacagaaagtagcagaacggcgctcctccccactgctacgtcgaaaggatggcaatgtggtaaccagttttaaaaaacgcatgtttgaagtgaccgagagcagtgtttcctctagttcccccgggtctggcccttcctccccaaataacggccccaccgggtccgtgactgaaaacgagacatctgtattacctcccacaccccacgcagagcaaatggtgtcccagcagcgaatcctcattcatgaagacagtatgaatctgctgagtctttatacaagtccatctctccccaacattactctcggccttcccgctgttccttctcagctcaatgcgtctaatagtctgaaggaaaagcagaagtgcgaaacccagacgctcagacagggtgtacctcttccgggtcaatatggaggcagtattcccgctagttctagtcacccgcacgttacacttgagggtaaaccacccaactcaagtcaccaagctctgcttcagcatcttctgctaaaagaacagatgcgtcagcagaaactgcttgtcgcgggcggagtacctttacacccccagtcacccctcgcgaccaaggagaggattagtcccggtatcaggggaacacataagctcccaaggcacagaccgttaaatcgtacccagagcgcgcctcttccacagagcacactggcccagctcgtcatccaacagcagcaccagcagtttctggaaaaacagaaacagtaccagcagcagatccacatgaacaaactgctctctaaaagtattgaacaattgaagcaacctggtagccacctcgaagaggcagaggaggaacttcagggagaccaagccatgcaggaggatagagccccttcctctggaaactcgaccaggagtgattcctccgcctgcgtcgacgataccctcggacaggtgggagccgtgaaggtgaaagaagagccagtggatagcgatgaagatgcccagatacaggagatggaatccggggaacaggctgcttttatgcagcagcccttcctggagccaactcacacgagggctctgtctgtcaggcaggcacctctggccgctgtgggtatggatgggctggaaaagcacagactggtctcccggacacactcctccccagctgccagcgtcctgccccatcccgctatggacagacccctgcaacccggatccgctactgggatagcttatgatcctctgatgctcaagcatcagtgcgtgtgcggcaacagcacaacccatcctgaacacgctggacgcatccaatccatctggtcccgcctacaggaaaccggattgctgaataaatgcgagcgaatccaaggtagaaaggccagcctagaagaaattcagctggttcacagcgaacaccatagcctcctgtacgggacaaacccccttgatgggcagaaactggatcctagaatactgctgggggacgattcccagaagttcttcagttctctgccttgcggggggttgggggttgactctgatacaatttggaacgagctacattcatccggggcagcccgaatggctgtcgggtgtgttatagagctcgccagtaaggttgcctctggggagcttaaaaacggttttgccgttgtgcgcccccctgggcatcacgcagaagagtcaacagccatggggttctgcttttttaactctgtggccatcactgccaaatatctgcgcgatcagctcaatatttctaagatccttattgtggatctcgacgtgcatcacggcaatggcacgcagcaggcgttttatgccgaccccagcattctgtacattagtctacacaggtacgacgagggaaacttcttccccggatctggggcgccaaacgaggtcgggacggggcttggggagggttataacataaacattgcatggacaggaggacttgatccacctatgggggacgtggaatacctggaagctttccggaccattgtgaaaccagtggctaaggagttcgacccagacatggtattggtcagcgcgggctttgatgccctggagggccatacgcctccattgggtggttataaagtcacagccaaatgcttcgggcacctcactaagcagctgatgacattggctgatggccgcgtggtcctggccctggaagggggacacgacttgacagccatttgcgatgctagcgaagcatgtgtgaacgctctgctgggcaatgaactcgagccactggccgaagatatactgcatcagtccccaaatatgaatgccgttattagcttacagaaaattattgaaattcagtccaagtattggaaatccgtacgcatggtggccgttcccagaggatgtgcgcttgccggagcgcagctccaggaagagacagaaaccgtctctgccctggccagtctgacggtcgatgttgagcagcctttcgcacaagaggattccaggactgctggcgagccaatggaagaagaacccgcattatag

SEQ ID NO: 190824 - DNA, 447 bp, synthetic construct
  misc_feature 1..447: note = Description of Artificial Sequence: Synthetic coding sequence
  source 1..447: mol_type = other DNA
atgcacagcatgatcagcagcgtggacgtgaagagcgaggtgcccgtgggtcttgaacctatctctccactggacctccgaacggacctgaggatgatgatgccagtggtcgacccggtcgtgcgcgagaaacaactgcaacaggaactgctgcttattcagcagcaacaacagatccaaaagcagctgctgattgcagagttccagaagcagcacgagaatctgactcggcagcatcaggcccagcttcaggagcatataaagctccagcaggaactgttagctatcaagcagcagcaggagttactagagaaagagcagaaactggagcagcagaggcaggaacaagaggtcgaaagacacagacgggagcaacagttgcccccactgcggggcaaggatcgaggacgagaaagggcagtcgcctctacagaagtaaagcagtag

SEQ ID NO: 190825 - DNA, 417 bp, synthetic construct
  misc_feature 1..417: note = Description of Artificial Sequence: Synthetic coding sequence
  source 1..417: mol_type = other DNA
atgcacagcatgatcagcagcgtggacgtgaagagcgaggtgcccgtcggcctcgaaccaatcagtccactggacctccggactgatctccgcatgatgatgcctgtagttgatccagtggttagagagaagcagctccaacaagaactgctgctgattcagcagcagcagcagatacaaaaacaactgctgattgctgaattccagaagcaacacgagaatctgacacggcagcatcaggctcagcttcaggaacacatcaaactgcagcaggaactgttggctattaagcagcagcaggaactgctggaaaaagaacagaagcttgaacagcaacgtcaggagcaggaggttgagaggcaccggagagagcaacagctaccacctctcagagggaaagacagaggaagagaatag

SEQ ID NO: 190826 - DNA, 1767 bp, synthetic construct
  misc_feature 1..1767: note = Description of Artificial Sequence: Synthetic coding sequence
  source 1..1767: mol_type = other DNA
atgatgagcagccccgcccagcccgacctgatgtggaacctggtgccctgggtgctcttctgtgggtgttgccgcatcttcccagatggagtcgctggacgggaacagctcctggcccagcagagaatgcattcaatgattagttctgtggacgtgaagtctgaggtacccgtcggattagaacccatatcacccctcgatctccggacagatctgcgaatgatgatgccggtggtcgatcccgttgtgagggagaagcaactgcagcaagagctgttgctgattcagcagcaacagcagatacagaaacagttgctcattgcagaattccaaaaacagcatgagaacctgacaaggcagcatcaggcgcaattgcaagagcacataaaggagctgctggccattaaacaacaacaggagttactggaaaaggaacagaagttggagcaacagcgccaggaacaggaggtggagcgtcaccggcgagaacagcagctacctcctctgcggggtaaggatcgaggaagggagcgtgcagtcgcaagcaccgaggtcaagcagaagttacaggagttcctgctcagcaaatccgctaccaaggatactcctaccaacgggaagaatcactctgtgagccgccatcccaaactttggtacacagctgcccaccacacctctctggatcaatcttccccaccgctgagtggcacatctccatcttataaatacacactgcccggagcccaggacgccaaggatgactttcctctgcggaaaaccgaaagctctgtgtcttcttcttctcctggcagtggcccaagtagtcccaataacggaccgactggttctgtgactgagaacgagacatctgtgctgcccccgacaccacacgccgaacaaatggtaagtcagcagcggatcctgatccacgaggattcaatgaacttactctcactttatacaagtccgtcacttccaaacatcacactcggattgccagcagttccatctcagctcaacgcctcaaatagtttaaaagagaagcagaagtgcgagactcagaccttgcgacagggagtccccttaccaggtcaatacgggggcagcataccggccagctcaagtcacccccacgtcacactagagggtaagccaccaaatagtagtcaccaggccctcctgcagcacttgctgctaaaagaacagatgagacagcagaagctgctcgttgccggcggggtgcccctccatccacagtcaccactggctactaaggagcgtatctcccctggcattagagggactcacaagcttccacgccaccgacctcttaatagaacacagagcgctcctcttccccagtccactctggcccagttggtgatccagcagcagcaccagcagtttctggagaagcaaaagcaataccagcagcagattcacatgaataaactgctctctaagtctattgaacagctcaaacagcctgggagccatctggaggaggctgaagaggagcttcaaggcgaccaagccatgcaggaagaccgcgctccgagcagcggtaattccacgcggtccgactcttccgcatgcgtggatgacacccttggccaggttggcgccgtgaaggtgaaggaggagccggtggattccgacgaagacgcccagatccaggagatggagtccggcgagcaggcggctttcatgcagcaggtaatcgggaaggacttagcgcctggattcgtgattaaggtaattatctag

SEQ ID NO: 190827 - DNA, 1641 bp, synthetic construct
  misc_feature 1..1641: note = Description of Artificial Sequence: Synthetic coding sequence
  source 1..1641: mol_type = other DNA
atgcacagcatgatcagcagcgtggacgtgaagagcgaggtgcccgtggggttagagcctatctccccactcgatctccggacggatctcagaatgatgatgcctgtagttgaccctgttgtgagagaaaaacaactgcagcaggagctgctcctgattcaacaacagcagcagatacagaagcaactgctgatcgccgagtttcagaaacagcatgagaatcttaccaggcagcatcaagctcagctacaggaacacatcaaggagctgctggccattaaacagcagcaggagctgttagagaaagaacaaaaattggagcagcagagacaggaacaggaggtcgagcggcatcgtcgcgagcagcagctacctccgctaaggggcaaggaccggggccgcgaaagggctgtcgcctctactgaggtgaagcagaagttgcaggagtttttgcttagcaagtccgcaacaaaagacactccgactaacggcaagaatcattccgtttccaggcaccctaagctctggtacacagcagctcaccacaccagcctcgatcagagctcaccccccctgagcggcacttctccaagttacaaatataccctgccgggcgctcaagacgccaaagacgattttccactcaggaagactgagtcttctgttagcagctctagcccagggagcggcccatcaagtcctaataacgggccaactggatccgttaccgagaacgagaccagtgtgctgcctccaactccgcacgcagagcagatggtcagtcagcagcgcatcttgattcatgaggattctatgaatcttctgagcctatacacctcgccaagtctaccgaacatcactctcgggctgcccgctgttccttcgcagctaaatgccagcaacagtttgaaggagaagcaaaagtgcgaaacccagacactgcgacaaggagtgccactgcctggacagtatggcggctccattccagcatccagctctcatccacacgtgacactggaggggaaaccacccaattcatctcatcaggcacttctgcagcacctgctcctgaaggagcagatgaggcagcagaaattgttggtggctggaggcgtcccactgcatccccaatcccctcttgctactaaggaacgtatcagccccgggattagggggactcataagttgccacggcacagacctctgaacagaacccaatctgcacctttgcctcagtcaacactcgcccagctggtgatacaacagcagcatcaacagttccttgagaaacagaagcagtaccagcagcagatacacatgaacaaactcctgtccaagagtattgaacagctgaagcagcccggcagccatttagaagaggcagaggaagaactgcagggagaccaggccatgcaggaagaccgcgccccgtctagcggcaattccacacggtcggattcatctgcatgtgtggatgacacacttggacaggtcggagccgtcaaggtaaaggaggaaccggttgattccgacgaagacgcccagattcaggagatggagagcggtgagcaggccgcatttatgcagcaggtcatagggaaggacttagcgcccgggttcgttattaaggtcatcatctag

SEQ ID NO: 190828 - DNA, 3036 bp, synthetic construct
  misc_feature 1..3036: note = Description of Artificial Sequence: Synthetic coding sequence
  source 1..3036: mol_type = other DNA
atgcacagcatgatcagcagcgtggacgtgaagagcgaggtgcccgtggggttggagccaatatcccctctagacttacgaactgatttaagaatgatgatgcctgtggtggaccctgtagtgagggaaaagcagctgcaacaggagctgttactgattcagcagcaacagcagatccagaaacagctgttgatcgccgaattccagaaacagcatgagaacctcacgaggcaacaccaggcgcagctccaggaacacatcaaggagctcctcgctattaagcagcagcaggagcttttggaaaaagaacagaagctggagcagcagcgacaagagcaggaggtggagcgccacaggcgtgaacagcagctcccccctttaagaggcaaagataggggccgggaacgggccgtggcttccactgaggtgaagcaaaagctgcaggagttcctcttatcaaagtcggccacgaaagacaccccaacgaacggcaagaaccactccgtatctcgacacccaaaactctggtacactgcagcccatcacacctcccttgaccaatcctcccctcccctgagtggcacatctcccagctataagtacaccctgcccggagcccaggatgcgaaggatgacttcccactgaggaaaacagctagcgagcccaacctaaaagttcgctcccgcctaaagcagaaggtggcagaaagacgttcctcccccttgttaagacgcaaggacgggaacgtggttacttccttcaagaaaagaatgttcgaagtgactgaaagttccgtgtcctcctcgtccccaggatccggaccctccagccctaacaatggccctacgggcagcgtgaccgaaaatgaaacatccgtcctgccaccaactccccatgccgagcagatggtatcacagcagcggatactgatacacgaagacagtatgaacctcctatccttatatactagcccaagcctgccaaatatcactcttggcctccccgccgtaccttctcagctcaatgccagcaatagtcttaaggagaagcagaaatgtgaaacacagacgttacgccagggagttccattgcccggacagtatgggggatccattcctgcctccagcagtcacccacatgtgactcttgaggggaagccacccaattctagccaccaggcactgctacagcatctgctgctaaaagagcaaatgcggcagcagaagcttcttgtcgcaggaggggttcctctccatccacagtctcctcttgccacaaaggagcgaatttccccaggtatacgaggcacacacaagctccctcgccaccgtccgcttaataggacacagtctgccccgctccctcagagcacactcgcccagctggttatacagcagcaacaccagcagttcctggaaaagcagaaacaataccagcaacagatccatatgaacaagctgctgagcaagagcatcgagcagttgaagcagccgggctcccacctggaggaagcagaagaagagctacagggagaccaggctatgcaggaggacagggctccaagctcagggaattccacccggtcggattcgagtgcctgcgtggacgacacattggggcaggtgggtgccgtcaaggtgaaggaggagccagttgacagtgacgaggacgctcagatccaagaaatggagtccggggagcaggccgcatttatgcagcagccattccttgaacccacccatactagagccctgagtgtccggcaggcccccttagccgccgtaggtatggacggccttgagaagcaccggctggtgagtcgcactcattcctcccctgcggctagcgtgctccctcatcctgcgatggaccggccgctacagcctggaagcgcaaccgggattgcatacgatccattgatgctgaaacatcagtgcgtgtgtggtaatagtacaacccatccggagcacgcagggagaattcagtcaatctggtcgcgcctgcaggagacaggtctgctcaataaatgtgaaaggatacaaggaaggaaggcctctctggaggagatccagttggtgcacagcgaacatcacagcttgctgtatggaacaaaccccctggatggtcagaagctggatccccgcatcctcctcggcgatgactcacagaagtttttttcctctctcccctgtggcgggctcggggtcgactccgatacgatctggaacgaacttcattcttcaggcgccgcacggatggctgttggctgtgtcatcgaactggcctctaaagttgcttccggggagctgaagaacggatttgcggtggttcgcccaccagggcaccatgcggaggagagtacagcaatggggttttgcttttttaactccgtcgctataacagcaaagtatctgagagaccagctgaatattagcaagatcttaatcgttgacctcgatgtgcaccatggtaacgggacccaacaggctttctacgcagatccctccatcttatacatctcactgcacaggtatgatgaggggaacttttttcccggttctggcgctccaaacgaagtgggcactggcctcggcgagggatataacataaatatcgcgtggacaggaggcctagatccgcctatgggtgatgtagaatatctggaagctttcaggacaattgtgaaacctgttgccaaagagtttgaccctgatatggtgcttgtttccgctggttttgacgcactcgaaggccacacgccccctctcggcggatataaagttaccgcaaaatgctttggtcatttgactaaacagctgatgacactggcggatggtcgggtggtgctggccctggagggcggccacgacctgaccgctatttgtgatgcctccgaagcttgcgtaaacgcgctcctcggaaatgagctggagcccctcgccgaggacatcctccaccaaagccctaacatgaacgcagtcatcagcctgcagaagatcatcgagatccagagcatgtctctgaagttcagttag

SEQ ID NO: 190829 - DNA, 72 bp, synthetic construct
  misc_feature 1..72: note = Description of Artificial Sequence: Synthetic coding sequence
  source 1..72: mol_type = other DNA
atgcacagcatgatcagcagcgtggacgtgaagagcgaggtgcccgtggggctggaacctatctccccatag

SEQ ID NO: 190830 - DNA, 3210 bp, synthetic construct
  misc_feature 1..3210: note = Description of Artificial Sequence: Synthetic coding sequence
  source 1..3210: mol_type = other DNA
atgcacagcatgatcagcagcgtggacgtgaagagcgaggtgcccgtgggtctggagcccatctctccactggatctacgaacagacctgagaatgatgatgcccgtggtcgatcccgtagtccgagagaagcagttgcagcaggagttactcctcattcaacagcagcagcagattcagaaacagctcctcatcgctgagttccagaagcagcacgaaaatcttactcgccagcatcaagctcagctccaggagcatataaaactgcaacaggagttgttggctatcaagcagcagcaggagctgctggagaaggaacagaaactggaacagcagcgccaggagcaggaggtggagcgacataggagagagcagcagctcccccctttacgtggcaaggatcgcgggcgggaaagagccgtggccagtactgaggtgaaacagaagctgcaggaatttttactgtccaaatcggctacaaaagacacgccgaccaacggcaagaaccacagcgtttcccgacacccgaagctatggtacaccgctgctcaccacacatcactggatcagtccagcccacctctttctgggactagcccctcgtacaaatataccttacctggggctcaagatgccaaggacgacttcccgttgcggaaaacagcttcagagccgaacttgaaggtgaggagcagactgaagcagaaggttgccgagcggcggtcctcgcccttactcagacggaaggacggtaacgtagtgaccagctttaagaagcgcatgttcgaggtgacagagagcagcgtgagttcctcttcaccaggaagtggacctagcagcccaaacaacggccctaccggctctgtgactgagaatgagacctccgtgttaccacctactccgcatgccgagcaaatggtgagccaacagaggattttgatccatgaggacagcatgaatctgttgagcttatacacctcaccaagtctacctaacatcacactcggcctccctgctgtgccttcacagctgaacgcatcaaactctctgaaagagaagcagaagtgcgaaacccagactctccggcagggtgtgcccttgcctggacagtacggaggctccatccctgcttcctcaagccatcctcacgtcaccctcgagggcaaacctcctaacagctcccatcaagcactcctccaacatctgttgcttaaggaacaaatgcgccagcaaaagctactcgtggctggcggcgtcccgctgcacccgcagtcccccctggccacaaaagagaggatctcgcccggtatacgcggtacccacaaactgcccagacataggcccctgaatagaactcagagcgcaccactaccacaatcaactctggcccaactcgtaattcagcagcagcaccagcagtttttggaaaagcagaaacaatatcagcagcagatacatatgaataaactgctgagtaagtcaatcgagcagttgaagcagccaggaagccacctggaggaagccgaggaggaactgcagggcgatcaggccatgcaggaggatagagccccctcatccgggaacagcactagatccgactcctctgcctgtgtagacgatacactcggacaggtcggtgcagtgaaggtgaaggaagagcccgtggattctgacgaagacgcccagatccaggagatggaatctggcgagcaggccgccttcatgcagcaaccatttctggaacccacacacactagggccctgtctgtccgacaggcacccctggcagcagtgggaatggacggcttagagaagcacaggctagttagtagaacccactcaagccccgccgcaagcgttctgccccacccagcgatggacaggcctctgcagccaggaagcgctaccgggatcgcctacgaccctctgatgctgaagcatcagtgcgtctgcggcaactccaccacccaccccgagcacgcaggcaggattcagtcaatttggtctcggttgcaggaaacggggctcttgaacaaatgtgaacgcatccaaggaagaaaagcatcattggaagagattcagttagtccacagtgaacatcatagcctcctttacgggactaatccgctggacggccagaaattggatccccgtatactgctgggggacgatagccagaagttcttttcgtccttgccatgtggcgggctcggcgtggattctgacactatttggaatgagctgcactcgagcggcgctgcgcggatggcagtgggctgcgtcatcgaactcgcatccaaggtagcctccggggaactcaagaatgggttcgcagtggtgcggcctcccgggcatcacgccgaagagtccactgcaatgggcttttgtttctttaatagcgtcgcgataacagctaagtacctcagggatcagttgaacatcagcaaaatcctcattgtcgacttagacgtccaccatggaaacggtactcagcaggccttttatgctgatccatccatcttatatatttcgttgcataggtatgatgaggggaatttttttcctgggagcggagcaccaaatgaagtgggcactggactcggcgaagggtacaacattaacatcgcgtggaccggtgggttagacccccccatgggagatgttgaatacctcgaggcctttcgaactatcgttaaacccgtggcgaaagagtttgatcctgatatggtcctggttagcgctggctttgatgccctggagggccacacaccaccactgggtggatacaaagtgacggccaagtgtttcggtcacctgaccaaacagctgatgactttagccgatggcagggtagtcctcgctctagaggggggtcacgatctgacagcgatctgtgatgcgtcggaggcatgcgtgaacgcccttctcggcaacgagctcgagccacttgctgaggatattttgcaccagtctcctaacatgaatgcggttatctcgctgcaaaagattatagaaatacagagcaagtactggaagtccgtgaggatggtggccgtgccgcgggggtgcgccctggccggggcgcagctgcaggaagagacagagacggtgagcgcattggcaagcctgaccgtggacgtggaacaaccctttgcacaggaagacagcagaactgcgggtgaacctatggaagaagaaccggccttgtag

SEQ ID NO: 190831 - DNA, 1689 bp, synthetic construct
  misc_feature 1..1689: note = Description of Artificial Sequence: Synthetic coding sequence
  source 1..1689: mol_type = other DNA
atgatgatgcccgtggtggaccccgtggtgcgggagaagcagctgcagcaggaacttctgctgatccaacagcagcaacaaatacagaagcagctgttaatagccgagtttcaaaaacagcacgagaaccttacgcgccagcatcaggctcagctgcaggagcacatcaagttacaacaggaactactggcaataaaacaacagcaggagctgctcgagaaggagcagaaactggaacagcaaaggcaggagcaggaggtagaaaggcacaggagagaacagcagttgccaccactgaggggcaaagatcgaggtcgagaacgtgcagtcgcatcaacagaagtcaagcagaaactgcaggagtttctgctgtctaaaagcgctaccaaggataccccaactaacgggaagaaccattccgtgtcaagacaccctaagctgtggtacactgccgctcaccacaccagcctcgaccagagttcacctcccttgtccggcacgagtccatcttacaagtacactttaccaggtgctcaagacgcaaaagacgattttccactgcgcaagactgcatccgagccaaatcttaaagtgcgaagtaggttaaagcagaaagtggccgaaagaagaagttcaccacttctacggcgcaaggatggcaacgtggtgacttccttcaagaagaggatgttcgaggttacagaaagtagtgtgtcttcttctagtcccggatccggaccatcctcacctaacaatggacccactgggtcagttaccgagaatgaaacctctgtgctgccgcccactcctcatgctgagcagatggtatcacagcagagaattctcatccacgaggattcgatgaatctgctcagcctgtacacatcaccgtctctgcctaacataacattgggcctccccgctgtgcctagccaactgaacgccagcaactctcttaaagaaaagcagaaatgtgagacgcagacgctccggcagggagtccctttaccaggtcagtatggaggcagcatcccggcatcaagttctcatccacatgtgacactcgagggaaagccacctaactcttcccatcaggcactgttgcagcacctgctccttaaggaacagatgcgtcaacagaagcttctggtggccggaggcgttcctctccatccccaatcaccactcgctaccaaggagcgaataagtccaggaatacggggcactcacaagctgccgcgacacagaccactaaatcgaacacagagcgcccctcttccccagtccaccctagcacaattagttatccagcagcaacatcagcaattcctagaaaagcagaaacagtaccagcagcagatccatatgaacaaattgcttagcaagtccatcgaacagcttaaacagccaggctcacatctggaggaggctgaggaagaactccaaggagaccaagctatgcaggaggatagggccccttcgtccgggaactcaacacgcagtgatagctcagcctgcgtcgacgatacgctgggacaagttggcgccgtcaaggtcaaggaggagcccgtggatagcgacgaggacgcccaaatccaggaaatggaatccggcgagcaggcggccttcatgcagcaagtgattggtaaagatctggcccccggttttgtgattaaagtcattatctag

SEQ ID NO: 190832 - DNA, 1542 bp, synthetic construct
  misc_feature 1..1542: note = Description of Artificial Sequence: Synthetic coding sequence
  source 1..1542: mol_type = other DNA
atgatgatgcccgtggtggaccccgtggtgcgggagaagcagctgcaacaagagctgctgctcatccagcaacaacagcaaattcagaaacagctcttgattgcagaatttcaaaaacagcacgaaaatttgacacgccagcatcaggcgcagcttcaggagcacatcaaggaactgctggccataaagcagcagcaagaactcctcgagaaagaacaaaaactggagcagcagcggcaggagcaggaggtcgaaaggcaccggcgtgagcagcagctccccccacttcggggaaaggaccggggccgggagagggccgtggcaagtacagaggtaaaacagaagctgcaggagtttttactgagcaagagcgctactaaggatacacctaccaacgggaagaatcattccgtatcccgacacccaaaactgtgggccgcgcaccatacctcgcttgaccagtcatctccgcctctctccgggacaagtccatcatacaagtatactctgcctggtgcacaggatgcaaaagatgattttcccctgcgcaaaaccgagtctagcgtctcctcttcctcccccggctctggcccttcaagtccaaacaatggccccacgggatctgtgacagagaacgaaacatcagttttacccccgacccctcacgcagagcagatggtgtctcaacagaggatcctgattcacgaggattcaatgaatttgctgtccttgtacactagcccttcccttccaaatatcaccctaggcttgccggccgtaccctcacagctgaacgcctccaacagtcttaaggagaaacagaaatgcgaaacccagaccctgaggcagggagtgcctctcccagggcagtacggcggaagcatacctgcctcgagctcacacccgcacgtaacgttagaaggtaagccaccaaactcttcccaccaggcgctgctccagcacctcctcctgaaagagcagatgagacagcagaaattacttgtggcaggtggcgtgcccctgcaccctcagagccctctcgccacgaaagagcggatttcgcctggcataagaggcactcataagctgcctcgtcaccggcctctgaatcgcacgcaatccgctccactgccccagtctaccttagcccagcttgtaatccaacagcagcaccagcagttcttggagaagcagaagcaatatcagcaacagatccacatgaataagttgctgtcaaagagcatcgagcagcttaagcaaccgggaagccaccttgaggaagcagaagaggaattgcagggtgaccaggctatgcaggaagacagggcaccttccagcgggaatagcacaaggagcgactcatcagcatgtgtggacgacaccctcgggcaggttggtgccgtcaaggtaaaggaagagcctgtagattccgacgaagacgcccagatacaagagatggagtctggagaacaggctgccttcatgcaacaggtcatcggtaaggacttggccccgggatttgtgataaaagtgattatatag

SEQ ID NO: 190833 - DNA, 1980 bp, synthetic construct
  misc_feature 1..1980: note = Description of Artificial Sequence: Synthetic coding sequence
  source 1..1980: mol_type = other DNA
atgcgggtgaaccacaccgtgagcaccatgctgcccacctgcatggtccaccgacaaacaatgtcttgcagtggtgcaggagggataacagcctttgtggcctttcgtgacgttgccgtatactttactcaagaagaatggcgattgctctcaccggcccaacgaacactgcacagagaagtgatgctcgagacatacaaccatctcgtatctttggaaatcccgtcatccaaaccaaaacttatagcacagctggagagaggagaagccccctggagagaggagcggaagtgccccctcgatctgtgtcctgagagcaaaccagaaatccagctgtctccttcttgtcccctcatttttagttctcaacaggccctgagccagcacgtgtggttgtcccacctgtctcaactcttcagcagcctctgggcagggaaccctctgcatctgggaaaacattatcctgaagatcagaagcaacagcaagacccgttctgctttagtgggaaagcagagtggatccaggagggcgaggatagccgcctgttatttgggagggtgtccaagaacggaacttcaaaggccttgagtagcccccccgaggagcaacagccagcacagtccaaggaggacaacaccgtcgtggatatcgggagttctcccgagcgcagagcagatttagaagagacagacaaagtgttgcatggcctggaggtgtcaggatttggcgaaataaagtacgaagagtttggccctggcttcattaaggagtctaacctcctgtctctgcagaaaacacagaccggtgagacaccctacatgtacaccgagtggggcgatagctttggcagcatgagtgtgctaatcaaaaaccccaggacccactccggtggtaaaccctacgtttgtcgagagtgcggcaggggatttacttggaaatccaatttgatcacacatcagcgcacccatagcggggagaagccgtacgtgtgcaaggattgtggtagagggtttacttggaagtctaatctgttcacccaccagcgcacacactccggcctgaagccttacgtgtgcaaagagtgcggacagtcattcagccttaagagtaacctcattacacaccaacgggcccatactggcgagaagccatacgtatgtcgggagtgcggacggggttttcgccagcactctcacttggtgcggcataaacgtactcactcaggagagaaaccttatatctgcagggaatgtgaacaggggttcagccagaagtcgcacttaattaggcacttgcggacacacaccggagagaagccatacgtatgcactgagtgcggaagacatttttcttggaagtctaaccttaagacacatcaacgaacccactcaggggtgaagccttacgtatgcttggagtgtgggcagtgcttttcactgaagagcaacctgaacaaacaccaacggagccataccggcgaaaaacctttcgtctgcactgagtgtggcaggggcttcactcggaagtctaccctcagcacacaccaaaggacacacagcggggaaaagcccttcgtatgcgcagaatgcggacgtggttttaacgacaagtctacgcttataagccatcagcgcacacacagcggggaaaagccgtttatgtgtagggagtgcggccggcggttcagacaaaaacctaacctgttcaggcacaagcgcgctcactctggtgcattcgtgtgcagggaatgtggccagggtttttgcgccaagctgaccttgatcaagcaccagcgcgcacatgctggcggaaagccccacgtttgtcgcgagtgtgggcaggggttttccaggcaatcccatctcatcagacaccagaggacccattctggcgagaaaccgtacatttgtaggaagtgcggccgggggttttcgcgcaaatctaatttaatacggcaccagaggactcacagcggctag

SEQ ID NO: 190834 - DNA, 1923 bp, synthetic construct
  misc_feature 1..1923: note = Description of Artificial Sequence: Synthetic coding sequence
  source 1..1923: mol_type = other DNA
atggccaccggcctgctgcgggccaagaaggaggccttcgtggccttcagagatgttgcggtgtacttcacacaggaagagtggcgccttctttcccccgctcagcggaccctgcatcgagaagtgatgttggagacgtacaatcaccttgtgtccctggagatcccctcatctaagcccaagctgattgcccagctcgagaggggggaagcgccgtggagagaggagcggaagtgtcccctggatctgtgccctgagtctaagccagagatccaactctccccatcatgccccttaattttctcatcccaacaagccctttcacaacatgtgtggctatcccacttaagccagttgttttccagtctgtgggctggaaatccactgcacctcgggaagcattaccctgaagaccagaagcaacaacaagaccctttctgcttcagcggaaaggcggagtggatccaagagggcgaggatagccgactgttgttcggacgtgtgtctaaaaacggtacgtcaaaagccctgtcttctcccccagaggaacagcaaccagctcagagcaaggaggacaatacagtcgtggacatcggcagctcccccgaaagacgcgcagatctggaagagactgataaggtgctgcacggcctggaggtgtccggctttggagagatcaagtatgaagagtttggtcctgggtttattaaagaaagtaacttgctgagtctccagaaaacacagacaggcgagactccttatatgtacaccgaatggggagattccttcggaagcatgtctgtgctgataaagaatccacgtacgcatagcgggggcaaaccatacgtgtgtagagaatgtggacgaggctttacctggaagtcaaaccttatcacccatcaacgcactcattctggtgaaaaaccttatgtgtgtaaggattgcggccgcgggttcacctggaaatcaaatctcttcacccaccagagaacacactctggcttaaagccatatgtgtgtaaagaatgtggacagagcttcagcctgaaaagtaatctgattacccaccaacgggcgcacaccggcgaaaagccatacgtctgtagggagtgtggccggggctttagacagcatagccatctggtacgtcataagcgaacccattcaggcgaaaaaccttatatatgccgagagtgtgagcagggtttttctcagaaaagtcatttgatccggcacttgagaactcatactggcgaaaaaccttatgtttgtaccgagtgtggccgacacttcagttggaagtctaatctgaagactcatcaacgcacgcattctggtgtcaagccctatgtgtgtctggaatgtggacagtgtttttccttaaagagcaacctgaataagcaccagaggtctcacaccggcgagaaaccttttgtctgcaccgaatgcggccgtgggttcactagaaagagcacgttatccacccaccaacggacacactccggcgaaaagcctttcgtctgtgccgagtgcggacggggattcaatgacaaatctacactgatatctcatcaaagaacccatagtggcgaaaaacctttcatgtgccgtgagtgtggaagacgcttccggcagaaacctaaccttttccgtcataagcgagctcattcaggggctttcgtctgccgggaatgcggtcagggtttttgcgccaagctcactcttatcaaacatcagcgtgcacacgcaggaggcaaacctcatgtgtgccgcgaatgtggccagggctttagtcgtcagtcccatctgataaggcatcaacgcacccacagtggcgagaagccatacatttgtaggaaatgcggccgaggcttcagtcgcaaatccaacctgatcaggcaccagcgcacgcactctggatag

SEQ ID NO: 190835 - DNA, 1317 bp, synthetic construct
  misc_feature 1..1317: note = Description of Artificial Sequence: Synthetic coding sequence
  source 1..1317: mol_type = other DNA
atgctggagacctacaaccacctggtgagcctggagatccccagctctaagccaaaattgatcgcccaactggagaggggggaggccccttggagggaggagaggaaatgccccctggatctgtgccccgaatccaagcccgaaatccagcttagcccctcttgtcctcttattttctcgtctcagcaagctctatcacagcatgtgtggctgtcccaccttagccaactgttctcctctttgtgggcaggaaaccctctgcacctagggaaacattacccggaagatcagaagcagcaacaggacccattttgttttagtggtaaagcggagtggatccaggagggagaagatagtcggctgctgttcggacgggtctccaagaacgggacctctaaagccctgagctctcccccagaagagcagcaaccggcccagtctaaggaggacaacacagttgtagacatcggttctagcccggagcgtagagccgatctcgaagaaaccgataaagttctgcatggactagaggtcagcggctttggggagatcaagtacgaagagttcggacctgggtttattaaggaatctaacctgctctcccttcaaaaatcacacctgatccgtcaccttaggacccacacaggagaaaagccgtatgtgtgtactgagtgcggcaggcacttctcttggaaaagcaacctgaaaactcatcagcgcacccattcaggcgtgaagccttacgtgtgcctggaatgtggacagtgtttctcccttaagtcgaacttgaacaaacaccagcgctctcacacaggtgagaagcccttcgtgtgtaccgagtgtggcaggggatttacacgtaaatcaacattatctacccaccagcgtacgcatagcggcgaaaagccattcgtgtgcgctgagtgcggaaggggtttcaacgacaaaagtaccctgatttcgcatcaaaggacccacagcggcgagaagccatttatgtgtcgagagtgtggccggagattcaggcaaaagcctaacctgttccgtcacaagcgtgcacactcgggcgcctttgtctgcagagagtgcggacaggggttttgcgccaaactgactctgataaagcatcaacgcgcccatgcgggcggaaaacctcacgtctgccgcgagtgtggacaggggttttcgagacagtcgcacctgatccggcatcaaagaacacactccggggagaagccatacatttgcagaaagtgtggcagaggcttctcaaggaaaagcaatctgatcagacaccaaagaacccattctggttag

SEQ ID NO: 190836 - DNA, 1797 bp, synthetic construct
  misc_feature 1..1797: note = Description of Artificial Sequence: Synthetic coding sequence
  source 1..1797: mol_type = other DNA
atgctggagacctacaaccacctggtgagcctggagatccccagcagcaaacccaagctgatagctcagctagaaagaggggaggcgccatggcgggaagagcgcaagtgcccactggacctttgccctgagtctaagcctgaaatccagctgagccccagttgccccctcattttttcttctcagcaggcactcagccagcacgtgtggttatctcatctgtctcagcttttcagctctctgtgggccgggaatcccctgcatctgggcaagcattaccccgaagatcagaagcagcagcaagacccattttgttttagtggcaaggctgagtggatacaggagggcgaggacagcagactgctgttcggtagagtgtccaaaaatgggacgagtaaagcccttagctcgcctcccgaggagcagcagcccgcccaaagcaaagaggacaacacagttgttgacatcggctctagccctgaacgccgcgccgacctagaagagactgacaaggtccttcacgggctagaagtgtccggctttggtgagataaagtacgaagagttcgggccaggattcattaaagagtcaaatttgctgtcattgcagaagacccagacgggcgagactccctacatgtacaccgagtggggggacagcttcggatcaatgtcagtcctgatcaaaaatcctcgcacccatagcgggggaaagccttacgtttgtcgagaatgcggaagaggttttacttggaagtcgaaccttattacgcaccaacggacccactccggcgagaaaccatacgtttgtaaagattgtgggagggggttcacttggaagagtaatctgttcacccaccagcggacccactctggcctcaaaccctatgtgtgcaaagaatgcggacaatccttttccctgaaatccaacctgattactcaccaacgggctcacaccggggaaaagccttatgtctgcagagagtgtggccgtggttttagacagcacagccatctggtaaggcacaaacgcacacatagcggtgagaagccttacatatgtagagaatgtgagcagggcttttcccagaaaagccacttgatccggcacttgcggacacacaccggcgaaaaaccatatgtttgtaccgaatgcgggcggcacttctcctggaagtcgaacttgaaaactcaccaaagaactcatagtggagtaaagccctatgtgtgcctggaatgtggccagtgcttttcgctaaaatccaacctcaataaacaccaacgcagtcacaccggagagaagccctttgtttgcacagagtgtggaagaggcttcacgcggaaaagcacactctctacccaccagcgcacccattccggagaaaaacccttcgtttgtgcagagtgcggaagaggctttaatgacaagtcgactctgatctcccaccagagaacccattcaggcgaaaaacctttcatgtgccgggagtgcggccggaggtttcggcagaagcccaatctgtttcggcacaaacgcgcccacagtggggcctttgtatgccgggaatgcggccaggggttctgtgccaaattgaccctcatcaaacaccagagagcccacgctggcggtaagccccacgtgtgcagggaatgcgggcagggattttcgagacagagccatcttatccgccatcagaggactcattctggagagaagccttatatctgtagaaaatgcggcaggggcttctcccggaagagcaatctgattagacaccaaaggacacactctggatag

SEQ ID NO: 190837 - DNA, 2190 bp, synthetic construct
  misc_feature 1..2190: note = Description of Artificial Sequence: Synthetic coding sequence
  source 1..2190: mol_type = other DNA
agctggctgggccccggcaaggccagcctgctgcggagcttcccccacttgtgcacactgctgcccgacttccgtttgcaagaccctcagcgcgctcctgctttccacttgtcctccgagactctgcccttctctaggaagtctacgcaggagaccaggaagatggcgactgggctcctcagggctaaaaaggaagcttttgttgcttttagggatgtggccgtttattttacccaagaagaatggcgcttactttcccctgcccagaggaccctgcaccgtgaagtgatgctggagacttataatcatctggtttctcttgagattcccagcagcaagccaaagctgatcgcccagcttgaacggggagaggctccatggagagaggaaaggaagtgcccactcgatttgtgtccggctgaatccaagccggaaattcagctcagtccctcatgccctttgatctttagctcccagcaggctctaagccagcacgtgtggctctcgcacctgtctcagctcttttctagcctgtgggccggcaatccccttcatctgggtaagcattatcccgaggatcagaagcaacagcaggaccctttttgttttagcggaaaggctgagtggatccaagaaggagaggattcgcgcttgctgtttggcagggtgagtaagaacggcacgagtaaggctctgtcttctccaccagaggagcaacagccggcacagtcaaaagaagataacaccgttgtcgatattggaagtagtcccgagagacgggccgacctggaggagactgataaggtactccatgggctggaggtgtctgggttcggcgaaataaaatatgaggagttcggccccggttttataaaggagagcaacctactgtccctccagaagacacagaccggtgagactccttacatgtacaccgagtggggagactccttcggcagcatgtcagtcttgattaaaaacccccggactcatagcggcggcaagccctacgtgtgcagggaatgcggacgtgggtttacatggaagtcaaaccttataacacatcaacggacacattccggtgaaaagccctatgtttgcaaagattgcggccgaggcttcacttggaaatcgaacctgtttacacaccagagaacccacagcggattgaaaccatacgtctgcaaagagtgtggacaatcattcagcctaaaaagcaatttaatcacgcaccagagggcgcacacaggcgaaaaaccatatgtctgccgcgagtgcggccgaggatttcgtcagcactcacacttggtgaggcataagcggactcattcaggcgagaagccatatatctgtagggagtgcgagcagggattttcccagaagagtcacttgattcgacatctgaggacccataccggggagaagccctacgtttgcaccgagtgcggaagacacttcagttggaagagtaacttaaagacccaccagagaacgcacagcggggtcaaaccctacgtctgcctagaatgtggacaatgcttcagtttgaaatcgaacctgaacaagcaccagcgaagccacactggtgaaaaaccctttgtatgcactgagtgtgggagaggcttcacaaggaagtcgacactgtctactcatcagagaacacactccggagagaagccgtttgtgtgtgccgagtgcggaagaggcttcaatgacaaaagcaccttaatcagtcatcagaggacccattccggcgagaagccattcatgtgtagggagtgcgggagacgatttcggcagaagcccaacctcttccgacacaagcgcgcacattccggtgccttcgtttgccgagaatgcggccaggggttttgtgcaaagctgactcttattaagcaccagagagcccacggaggcagcttgatgtgtgccggctctgttgggaaggccctcgccggttctcataccagcctggacaccaggggacatatacaggaacggagcctaatctttgccgagagcgtggatggcgctctggtcggatcccccaccctctccgacattcgaggacatacccaagatcggaactttatgtgcattggcaatgtggtacaacccctggcacgcagccataccagcagcgacactcgcggacacactcagtgctgtggatttttctcccactgctag

SEQ ID NO: 190838 - DNA, 1161 bp, synthetic construct
  misc_feature 1..1161: note = Description of Artificial Sequence: Synthetic coding sequence
  source 1..1161: mol_type = other DNA
atgtacaccgagtggggcgacagcttcggcagcatgagcgtgctgatcaagaaccccagaacacactccggaggaaagccctacgtctgccgtgagtgcggcaggggtttcacatggaagtctaaccttatcactcaccagagaacgcacagcggcgagaagccctacgtgtgcaaagattgtggtcggggcttcacttggaaaagtaacttgttcacccaccaaaggactcatagcggcctgaaaccctatgtctgcaaggaatgcggccagagcttcagcttgaaaagtaaccttatcactcaccagcgggcccatactggcgagaagccgtacgtgtgcagggagtgtggaagagggtttcgtcagcacagccacctcgtgcgccataagaggacccactccggagaaaagccatatatctgtcgtgagtgcgaacaaggattctctcagaagagccacctgatccgtcatctccggacgcataccggtgagaaaccatatgtctgtaccgaatgtgggcggcacttctcttggaagtccaatttaaagactcaccaaagaactcactctggcgtgaagccatatgtttgcctcgagtgtggtcagtgtttttctcttaagtcaaatctgaataagcaccagcgttcccatacgggggaaaaaccttttgtctgtactgagtgcggacgcggtttcacacggaagagtacactatccacgcaccagcggacccacagcggggagaaaccattcgtgtgtgcagagtgcggacgagggtttaacgacaagtctaccctcatatcccaccaacggacccactccggcgagaaaccttttatgtgtcgcgaatgtggaaggcggttccggcaaaaacctaacctctttagacacaaacgtgcacactcaggcgccttcgtgtgtcgcgagtgcggccaaggcttctgtgcaaagttaacacttatcaagcatcagagagcccatgctggcggtaaaccacacgtgtgtcgagagtgtgggcaagggttcagccggcagtcccacttaattcggcaccagcgcactcactccggcgagaagccttatatttgccggaaatgtggcagaggcttctctcgcaagtctaacctcatcaggcaccagaggacccactcaggctag

SEQ ID NO: 190839 - DNA, 612 bp, synthetic construct
  misc_feature 1..612: note = Description of Artificial Sequence: Synthetic coding sequence
  source 1..612: mol_type = other DNA
atgggcggcagcctgcgggtggccgtgctgggcgcccccggcgtgggtaaaacggccattataagacagtttctgttcggagattatccggaacggcaccggcctacggatgggccaaggctttacaggcccgctgtcctgctggatggagctgtatatgatttatccatccgggacggcgacgtggcgggcccaggctcatcccccggtggccctgaggagtggcccgatgctaaggattggtccctgcaggacactgacgccttcgtcctcgtgtatgatatttgctcaccagactctttcgactacgtcaaagcattgcggcaacgcatcgcggaaacacgccccgcaggggctccagaggcccccattttggtggtggggaataaacgcgacagacagcgcctgagattcggaccccgacgggccctcgccgcactcgtaagacgggggtggcgttgcggatacctcgagtgcagtgccaagtacaattggcatgtattacgactgttccgggagctactcagatgtgccctggtaagagctcgccctgcgcacccagcactgcgcttacagggtgccctccaccccgcaagatgcagccttatgtag

SEQ ID NO: 190840 - DNA, 1479 bp, synthetic construct
  misc_feature 1..1479: note = Description of Artificial Sequence: Synthetic coding sequence
  source 1..1479: mol_type = other DNA
atggacctgctgaaggccatcaccagccccctggccgccggcagcaagccctctaaaaaaaccggagaaaagtccagcggttcaagctcgcatagtgaaagcaagaaggagcaccacaggaagaaggtctccggatcgagcggcgaattgccactggaggatggaggaagccacaagtctaaaaagatgaagccattatatgtcaacacagaaaccctcactctgagggagccagacggtttaaaaatgaagctcatcttgtccccaaaagagaagggtagcagctctgtggatgaagagtcctttcagtaccctagccagcaagccaccgttaaaaagtcctcaaaaaagtccgcgagagacgaacagggtgccctgttactgggtcacgaattgcagtcctttttgaaaaccgctagaaaaaagcataagtctagctcagacgctcacagttccccgggccctgaggggtgtgggtccgacgctagtcaattcgccgagtcccattcagccaacctcgacctctccggactggaaccaatattggttgaaagtgactcctcatctggcggtgagcttgaggctggcgagcttgtcattgacgattcttacagggaaatcaaaaaaaaaaagaagagcaaaaagtcaaaaaagaagaaggacaaagagaagcataaggaaaagaggcactccaagtctaagcgaagtttgggcctatcggctgtgccagtaggtgaagtaaccgtgacctccgggcctccaccttcaattccatatgccggcgcagccgctccacccctgccgctgccagggctccacacagacggacacagtgaaaagaagaagaaaaaggaagaaaaagataaggaacgagaacgaggcgaaaagcctaagaagaagaatatgagcgcatatcaggtattctgtaaggagtacagagttactatcgtagctgatcacccaggcatagattttggcgagctttccaagaagctggcggaggtctggaagcaattacccgagaaggataagctgatttggaagcagaaagcccagtacctgcagcacaagcagaacaaagccgaagcgactactgtaaagagaaaggcttcatcttcagagggatctatgaaagtaaaggcctcaagtgtgggcgtcttgagccctcagaagaaatccccgcccacaaccatgcttttacctgcttctcccgcaaaggcaccggaaacagagcccatagacgtcgcagcccacctccagctgctcggcgagtccctgagcttgattggccatcgcctccaggagacagagggaatggtggcagtgtcaggaagtctcagcgttcttctggactcaattatatgcgcactaggccccctcgcgtgccttaccacgcagctgcctgaactgaatggctgtcccaagcaggtcctgtccaatactctggacaacatcgcctacatcatgccagggctttag

SEQ ID NO: 190841 - DNA, 1896 bp, synthetic construct
  misc_feature 1..1896: note = Description of Artificial Sequence: Synthetic coding sequence
  source 1..1896: mol_type = other DNA
atggtgagcaagctgagccagctgcagaccgagctgctggccgccctcctagagtcaggactgtctaaggaagcgctgattcaggctttaggtgaacccggcccctacctactcgcaggtgaggggcccttggacaaaggcgagagttgtgggggcggtcggggagaactcgctgagctccctaatggactgggagagaccagaggatcagaagacgagacagacgacgacggagaagactttacacccccaatcctgaaagaactcgagaatctgagcccagaagaagcagctcatcaaaaggctgtcgtggaaaccttactgcaggaggacccttggagggtcgcgaaaatggtgaaatcataccttcaacagcataacatcccgcagagggaagtggtcgatacaacagggctcaaccagagccacctgtctcaacacctcaataagggcactcccatgaagacacagaaacgagctgctctctatacttggtacgtcaggaagcagagagaggtggctcagcagttcacacacgcagggcagggcggcctgatagaggagcctactggagatgaactcccaaccaagaagggacggcgaaaccgcttcaaatggggacccgcctcccagcagatactgttccaggcttacgagagacagaaaaacccttcaaaggaggagagagagacccttgtagaagaatgtaatcgtgccgaatgcattcagcgaggcgtcagccctagccaagctcaaggactgggctctaacctggttactgaggtaagggtgtataactggttcgccaatcggagaaaggaggaagccttcaggcataaactggcgatggatacatacagtgggccacctccaggccccggacccggccccgcgctacccgcccactccagtcctggactgccacctcccgcactgtccccctccaaggtccacggcgtccggtacggacagcccgccacctccgagacagctgaggtcccgagcagcagtggtggcccactggtgacagtctctacacccttacaccaagtctcccccaccggcctggaaccatcccattctttgttaagcaccgaagccaaactcgtgagcgctgcagggggcccgctccccccagtctctactctgactgccctacactctctggagcagaccagccccggcttgaaccagcagccccagaacctgattatggcttcactaccaggtgtcatgaccattgggcccggcgagcctgcttccctcggaccaacatttacaaatactggagcgtccaccctggtgataggactggcgtctacccaagcccagtctgtgcccgttatcaattctatgggatccagtttgaccacattgcagcccgtacagttcagccagccactacatccgtcttatcagcagccactgatgccccccgtgcagtctcatgtgacccaatcccccttcatggcgacgatggcccagcttcagtccccccatgccttatactcccacaaacccgaggttgcacaatatactcacacaggactgttgccccagacaatgctgataactgacacaacaaatttgagcgctctggcctccctcaccccaaccaagcaggtgtttaccagcgacaccgaagcatctagtgagtctgggctccacacaccagcaagccaggctaccacactgcatgtcccctcgcaagatcctgccagcatccagcacctgcagcctgcccatcgactgtctgccagcccaacggtgtcatcttctagtctggtactttaccaaagctcggactcaagcaatggacaatctcatctgttgccctccaatcatagcgtgatcgaaacatttatcagtacacaaatggcgagctcttcacagtag

SEQ ID NO: 190842 - DNA, 1719 bp, synthetic construct
  misc_feature 1..1719: note = Description of Artificial Sequence: Synthetic coding sequence
  source 1..1719: mol_type = other DNA
atggtgagcaagctgagccagctgcagaccgagctgctggccgccctgctcgagtcaggcctgtctaaggaagcgttaatccaggccctgggagagcctggcccttacctcctcgcaggcgaggggcccttggataagggcgagtcatgcggcggaggacgaggcgagcttgccgaactgcccaacggactgggtgaaactcgaggctccgaagacgagactgacgacgatggtgaggactttactccgccaattcttaaagagctggagaatctttcaccagaagaggccgctcaccaaaaagccgttgtggagaccctactccaagaggacccctggagggtggcaaaaatggtcaaaagctacctgcaacaacataacattccacagcgggaagtggtggacactaccggcctcaaccagtcccatctgtctcagcaccttaacaaagggacaccaatgaagacgcagaaacgcgcagccctgtacacctggtacgtgcggaagcagcgagaagtcgcacagcagttcacccatgcgggccaaggtgggcttatcgaggagcctactggcgatgaactgcctactaaaaaaggtcggcgtaatagattcaaatgggggcctgccagccagcagattctgtttcaggcttacgaacgacagaagaacccgtccaaagaagagcgagaaacactggttgaagagtgtaacagggccgagtgtattcagcggggtgtaagcccttcgcaggcacaggggctgggctctaacctggttacggaagtgcgggtgtataattggtttgctaatcgcagaaaggaagaggcatttaggcacaaattggccatggatacctattccgggcccccacccggccccggccctggtccggctctccccgctcatagctcacccggactgcctcctcccgccctgagtccaagcaaggtgcacggtgtgcgttacgggcagcccgcaacaagcgagacagccgaagtaccctcgtctagcgggggcccactggttaccgtgagtacccctctccaccaggtttctccaaccggcctcgaacccagccactctcttctgagcactgaagctaagctcgtgagtgcagctggcggacccctgccccccgtgtccacactgacagccctacactctctggaacaaacatcaccagggctgaatcagcagcctcagaacttgatcatggcgagcttgccgggggtgatgaccatcggcccgggcgaacctgcctcccttgggccaacattcaccaataccggagcgagcaccctagttataggtctcgcttctacacaggcccagagcgtgcccgtcattaattcaatgggatctagcctgaccacgcttcagccagtgcagttttcccagcctctgcacccttcctaccaacaaccattaatgccaccagttcagagccatgtaacacagtctccattcatggctaccatggcacagctgcagagtcctcatggcgagcgcccagtgccccataccgcgggcgacgacgatcgtggttggctctctatggatgcgggtgagcgcggggcatggcaggccctccagagcgcctgcgtctcaggtacctccgtgttcccttactccagcaacgggcagagtcacctactgcctagcaaccactctgtgatcgagacttttattagcactcaaatggcctccagctcccaatag

SEQ ID NO: 190843 - DNA, 1566 bp, synthetic construct
  misc_feature 1..1566: note = Description of Artificial Sequence: Synthetic coding sequence
  source 1..1566: mol_type = other DNA
atggtgagcaagctgagccagctgcagaccgagctgctggccgccctgcttgagagcgggttatcaaaggaggctctcattcaagcgttgggcgagccaggaccgtacctgctggctggcgaagggccccttgataagggagagagctgtgggggagggaggggcgagctagcagagttgccaaacggccttggggagactaggggatccgaagacgaaactgacgatgacggagaggacttcaccccgccaattcttaaagaacttgaaaacttaagcccggaggaggccgcccaccagaaagccgtcgtcgaaacgctgttacaggaggacccttggcgcgtggccaagatggtgaaatcctatttgcaacagcataacatcccccaaagagaagtggtggacactacgggtcttaaccagtctcacctcagccagcatctgaataagggcacccctatgaaaacacagaagagagcagctctgtacacatggtatgtgagaaaacagcgggaggttgctcagcagtttacacacgccggacaaggaggactgatagaggagccgacaggggatgagctgcctactaagaaggggagaaggaatcgttttaagtggggccccgcctcgcagcagatcctgttccaggcatatgaaagacaaaaaaacccaagcaaggaggaacgcgaaacactggtggaggagtgtaaccgcgctgagtgcattcagcggggggtgagtccaagtcaggcacagggtctcgggagcaatttagttaccgaggtacgcgtttataattggtttgctaacaggcgcaaggaagaggcatttcggcacaagctggctatggatacatacagtggtcccccccccgggcccggtcccggccctgctttgccggcccactcttcccccgggctacctcccccagccctcagccctagcaaagtgcacggagtacgatacggacagccggcaaccagtgaaaccgctgaagtaccatccagttctggggggcctctggtgaccgtaagcacgcccctgcatcaggttagtcctactggcctcgagccttcccacagtctgctctccactgaggccaagttggtgagcgctgccggcgggccgctgcctcctgtgtctacattaactgctctgcattcgttggagcagacaagccctggactgaaccagcagccacagaatctaatcatggcttccctgcccggcgtgatgacgattgggcccggcgaacccgcttcactggggcccacgttcactaacactggtgcctccacactggttattggaaaactcgtcgggatgggaggccatctcggaggcagattgatgggccagccccaaaatccaggcgcgggacgggccaccggcacacactctttcattcaccagcacgtgttcatccaatgcctgctgtggacttcacactgtgccacttcagtcattcctggagactccagcaacggacagtctcacctcctgcctagcaatcactccgtcattgaaacattcattagcacccagatggccagttccagccagtag

SEQ ID NO: 190844 - DNA, 1572 bp, synthetic construct
  misc_feature 1..1572: note = Description of Artificial Sequence: Synthetic coding sequence
  source 1..1572: mol_type = other DNA
atggtgagcaagctgagccagctgcagaccgagctgctggccgccctcttggaaagtggtctctcaaaggaggcgcttattcaggccctgggcgagcctgggccgtatctgcttgccggcgaggggcccttagataaaggagaatcatgtggtggaggacggggggaattggctgagctgcctaacggcctgggcgaaacgcgcggatccgaggatgaaaccgacgatgacggtgaagatttcacacctcccatcctgaaagagctggaaaacctctcacccgaggaggcggcccaccagaaagcagtcgtagaaaccctcctgcaagaggacccgtggagagtcgcaaagatggtgaagtcatatctgcagcaacacaatattccacagagggaagtcgtggatacgaccgggctgaaccaatcacacctcagccagcatttgaataaggggacccccatgaagacacagaaaagggccgctctgtacacgtggtatgtccgcaaacagcgggaagtcgcccagcagttcactcacgccgggcagggcggcctcatcgaagaaccgacaggcgatgaattgcccactaagaaggggcggcgtaacaggttcaagtggggacctgcctctcaacagattctgtttcaggcttatgaacgccagaaaaaccctagcaaggaagagcgagagaccctggtggaggaatgtaaccgggctgaatgcatccagaggggtgtgtccccatctcaagcccaggggctggggtcaaatttagtgaccgaagtcagtgcagccggggggcctctacctcctgtttccacgcttacagcattgcattccctcgagcagacctcccccggacttaaccaacaaccccagaacttaattatggcgagtcttcccggcgtgatgaccattggccctggcgagccggcctctctgggtccaacattcaccaacacgggcgcttccacccttgttatcgggctggcatctacgcaggcccagagtgtccccgttatcaactctatgggaagttcgcttacaaccttacaacctgtccagttctctcaacccctgcatccttcctaccaacaaccattgatgccacctgtccagagtcatgttacccagagccccttcatggccacaatggctcagctccagtctccccacgcactatattctcacaaacccgaagtggcccaatatacacacacggggctgctgccccagaccatgctgattacagacactactaacctcagcgccctcgcatctttaacgccaacgaagcaagtgttcacatcggatacggaggccagtagtgagtctggcctgcacaccccggcaagtcaggcaacaacactgcacgtcccaagtcaggatcccgcaagtatccagcatctacagccggcacaccgattgtccgctagccctaccgttagcagcagttcactggtgctctaccaaagctccgattcgtccaacggccagtcccatctgcttccctctaatcacagtgtgattgagacctttatttccactcagatggcaagctcctcccagtag

SEQ ID NO: 190845 - DNA, 1812 bp, synthetic construct
  misc_feature 1..1812: note = Description of Artificial Sequence: Synthetic coding sequence
  source 1..1812: mol_type = other DNA
atggtgagcaagctgagccagctgcagaccgagctgctggccgccttgctagaaagtggcctctccaaggaagccctcattcaggccctgggggaacctgggccctatctgttggcaggagaaggccccctggacaaaggagagagttgtggagggggcaggggggaattggccgagctccctaacggattaggcgagacccgcggctcagaagacgagactgatgatgacggagaggacttcactcccccgatcttgaaagagttggagaatctgagccccgaggaggctgcccaccaaaaggccgtagtggagacactgctgcaagaggatccatggagggtcgcaaagatggtcaagtcttatcttcagcagcataacataccccagagagaggtggtggataccactggcctgaatcagagtcacctgtcacaacacctgaacaaagggactcctatgaagacacagaagagagccgcactgtacacatggtacgtaaggaaacagcgagaagtagcgcaacagtttactcacgctggacaggggggtctcattgaagaacccaccggagatgaactgccaacaaaaaaggggagaaggaatagattcaagtgggggccagcatcccagcagatcctcttccaggcatacgaaagacagaaaaatccctctaaggaggaacgagagaccctcgtggaagaatgtaaccgagccgaatgcattcagcgtggggtgagtccaagccaggcccagggactgggctctaatctggtcacagaggtgcgtgtctacaattggttcgcgaacaggaggaaggaggaagcgtttagacacaaactggctatggatacatattccggtcctcccccgggacccgggcctggtcccgccttgcccgctcactccagtccagggctgccccctccagcacttagccctagcaaggttcacggcgtgcgctatggccaacccgcaacctccgagaccgccgaagtgccatcatcgtccgggggccccctggtgacagtatccaccccgctccaccaggtctctcctactggcctggagccctctcacagcctcctgagtacggaggccaagttggtctccgcggccggcggaccactgcccccagtcagtacgctgacagcattacattcactcgaacagacttcaccaggccttaaccaacaaccccaaaatctgatcatggcctctctgccaggcgtaatgactattggtcctggagagccagctagcctgggaccaacatttacaaacaccggagccagtacacttgtgatcggtctcgcctctacccaggcgcagtcggtgcccgtgatcaacagcatgggtagttcccttaccaccctgcagccagttcagtttagtcaaccccttcatcccagctaccagcagcccctgatgccccctgtgcagagccacgtaacgcagtcgccttttatggccaccatggctcagttgcagagtcctcatgccttgtattcacacaagcccgaggtggctcagtatacacacaccggccttttgcctcagacaatgctgatcactgatactacgaacctcagcgccctggccagcctgacccccaccaaacaggtctttacgagtgataccgaggcatcatcagagagcgggttgcacacacccgcctcccaggccactactcttcacgtgccatctcaggatcccgcatccattcagcatctgcaacccgcacaccggctgtcggcctctccaacagtgtccagcagcagtctggtcctatatcagagtcttggactatag

SEQ ID NO: 190846 - DNA, 837 bp, synthetic construct
  misc_feature 1..837: note = Description of Artificial Sequence: Synthetic coding sequence
  source 1..837: mol_type = other DNA
atggtgagcaagctgagccagctgcagaccgagctgctggccgccctgctggagtcgggtctgtctaaggaggctctgattcaggcactgggtgagccgggaccatacttacttgccggcgaaggacctcttgataagggagaatcctgtggcgggggtagaggggaattagctgagctacctaatggtctaggcgagacccgtggatcggaagacgagacagatgacgatggcgaggatttcacgccaccgatcctgaaggaactagaaaacctgagccctgaagaagccgcccaccagaaagcagtggtggagacgttattgcaggaggatccatggcgagttgctaagatggtgaagtcttatctgcagcagcacaacatcccacagagggaggtcgtagacactacaggtctgaatcagagtcacctgagtcagcaccttaataagggcacccccatgaagacccagaagcgcgctgccctctacacgtggtacgtgaggaagcaacgcgaagtggcccagcgccggaatgcaagccgtgagggatgccctcatcaccgccatcgcggatgggcccccacatcgtcacggagatgtgtgtcgacaacaggactccctaccggggcaaaaaaaaagccgtctggcacctcgtggccctggacaaggactgcaggccccccccagggccaggcccgcgacctgcgatgtccgctcactgcgccacttgcctgtctgcatctgccctctcctcctgtgagatcaaccgtttgtgctatggactctttgcgcccagttcgacttcagaagtaccctcaggccgcagccgtcccctag

SEQ ID NO: 190847 - DNA, 360 bp, synthetic construct
  misc_feature 1..360: note = Description of Artificial Sequence: Synthetic coding sequence
  source 1..360: mol_type = other DNA
atggtgagcaagctgagccagctgcagaccgagctgctggccgccttgctagagtctgggttgagcaaagaggctctaattcaggcattgggcgaaccgggtccttatctgcttgctggcgaagggccactggacaagggtgaatcttgcggcggcggtagaggcgaactggccgaactgccaaacgggctgggagaaacacgtggtagcgaggacgagaccgatgatgacggagaggactttacccctccgatcctgaaagagttggagaatctgagcccagaggaggccgcacatcagaaggcagtggtggaaacattgctgcaggtgcacccatgtagagccggaagggccgattag

SEQ ID NO: 190848 - DNA, 1989 bp, synthetic construct
  misc_feature 1..1989: note = Description of Artificial Sequence: Synthetic coding sequence
  source 1..1989: mol_type = other DNA
atggtgagcaagctgagccagctgcagaccgagctgctggccgccctgctcgagagcgggttaagtaaggaggccctgatccaagcactaggggagccaggtccctacctgctggctggcgaaggacctctcgataagggtgagtcatgcggcggcgggcgcggggaactggcggagctgccaaacgggctgggggagacaagaggttccgaggacgagaccgatgatgacggtgaagattttacgcctccaattttgaaggaactggagaacctttcacctgaagaagctgcccatcaaaaagcagtggtggaaaccctgttgcaagaggatccatggcgtgtggctaagatggtcaagtcgtacctacagcaacacaatatccctcagcgcgaggtggtcgatactacaggtttgaaccagtctcatctctcccagcacctcaacaagggaactcccatgaagacccagaaaagagctgccctgtacacctggtatgttcggaagcaacgcgaagtcgcccagcaatttactcacgccggccagggcggactgatcgaggagcccactggagacgagctgccaaccaagaaggggcgccgcaatcggttcaagtggggacctgcgagtcaacagatcttatttcaagcctatgaacgccagaagaatccctcgaaggaggaacgtgaaacgctcgtggaggaatgcaatagggcagagtgtatccagcggggcgtatccccttcgcaggctcagggcctgggatctaatttggttacagaggttagggtttacaattggtttgccaacaggcgtaaggaggaggctttccgtcacaaactggccatggacacttatagtggcccacctccaggacccggacccgggcccgccctcccggcccattcctctcctggactgcctcctccggccctgtccccttcaaaggtgcacggagtgcgatacggtcaacccgctacctctgaaactgccgaggtgccatcctcctctggcgggccactcgtgacggtcagcactcccctgcaccaggtttcacccacagggctcgaaccctcacactccctgctcagcaccgaagcaaagctggtgtctgccgccggaggcccacttccccctgtgtctactttgaccgccctgcattcgttggaacaaacgtcacctggcctcaaccaacagcctcagaatttgatcatggctagcttgccgggggtgatgaccatcggtcctggtgagcccgcatccctgggccccacattcacgaacacaggcgctagtacgctggtgatcggattggcttcaactcaggcccagtcagtccctgttattaactcaatgggatctagcctgacaactctccagccagtgcagttctcccagcccctacatccttcctaccaacaacccctgatgccacctgttcagtcgcacgtgacacagagtccattcatggcaaccatggcgcaattgcagagcccacatgccctgtactcacacaagcccgaggtggcccaatatacgcacaccggtcttcttcctcagactatgctcattacagataccacgaacctgagtgctctggcttcccttacacctacaaaacaggttcggtcaagacctgcggggcccccacttgcgtgtgaccgggcgccgcatcctcatattccgagagcccaggaggccgccctgctgccgcaggtgttcacctctgacaccgaagcctcttctgagtctggtcttcatacaccagcctcccaggcaactactctgcacgttccgtcccaggaccccgcttcgatccagcaccttcaacctgctcacagactttcagccagcccaaccgtctcctcctcaagcctcgtcctttaccagtcgtcagacagctctaacggtcaaagccacctcctaccgtccaaccacagtgtaattgagacctttatctcaacgcagatggcctcaagctcacagtag

SEQ ID NO: 190849 - DNA, 744 bp, synthetic construct
  misc_feature 1..744: note = Description of Artificial Sequence: Synthetic coding sequence
  source 1..744: mol_type = other DNA
atggtgagcaagctgagccagctgcagaccgagctgctggccgccctgttggagtcaggtttatctaaggaggccctgattcaagctctgggggagcccggcccttatctactggcgggcgaaggtcctctggacaaaggggagtcctgtggtggtgggagaggtgaacttgccgagcttccaaacgggctcggtgagactcgggggtccgaagacgagactgatgacgatggcgaggactttactccgccaatcttgaaggaattagagaacctgtcacctgaggaggccgcacaccaaaaggctgtggttgaaactctgcttcaagaagatccctggagagtggcaaaaatggtgaagagttatctgcagcagcataacattccccagcgagaagtggtcgacaccactgggctgaaccagagccacttgtctcagcatctcaataagggcactccaatgaagactcagaagcgggcagcactgtacacctggtatgtgaggaaacagagggaagtagcacagcagttcactcatgcaggccaaggtggtctgattgaggagcccacaggagacgagcttcccacaaagaaggggaggagaaaccgctttaaatgggggcccgccagccagcagattctatttcaagcttatgagcgccaaaaaaacccttctaaggaggaaagggagactctggtcgaggagtgtaaccggtgcgctctgtggacggcatgtgatcagtag

SEQ ID NO: 190850 - DNA, 1359 bp, synthetic construct
  misc_feature 1..1359: note = Description of Artificial Sequence: Synthetic coding sequence
  source 1..1359: mol_type = other DNA
atggtgagcaagctgagccagctgcagaccgagctgctggccgccctcttagagagtggcttaagtaaagaggcgctgatacaagcacttggcgaaccaggcccttacttattagcgggagaaggcccactggacaaaggcgagtcctgtgggggaggaaggggagaactggcggagctgccaaatggcctgggggaaacccgagggtcggaggacgagacagacgatgacggcgaggactttactcccccaatccttaaggagttggagaatctttccccggaggaggccgctcatcagaaggctgtcgttgaaaccctcctacaagaggatccatggagagtagcaaaaatggtaaaatcatatttacaacaacataacattcctcagcgggaggtggtggacaccacagggctcaatcagagccatctctcacagcatctgaataagggcactccgatgaaaacacagaagagggccgcactctatacctggtatgtgcgtaagcagcgagaagttgctcaacagtttacacacgctgggcagggtgggttaattgaagaacccacaggagatgagctgcccacaaagaaaggccgcagaaaccggttcaaatggggcccagcgtctcagcagacatccccaggactgaaccagcagccccaaaacctgataatggcgtctctgcctggcgtcatgactatcggccctggagagccagcttcgttaggccccaccttcacaaatactggagctagtacccttgtgatcgggctggctagcacccaggcccagtccgtgccagttatcaactctatgggaagttctctaacaactcttcagccagtccagttttcccagcctctgcacccatcctaccagcagccactgatgccacccgttcaatcgcacgtgacccagtccccctttatggccaccatggcccagcttcaaagccctcacgccttgtactcccacaaacccgaggtagctcagtacacccacacaggtcttctaccgcagaccatgttgatcactgataccacaaatttatccgcactggcttccctgacacctaccaagcaagtgtttaccagcgatacagaggcgtcatccgagtccggattacataccccggcttcgcaggcaaccactttgcacgtgccatcgcaggaccctgcaagtatccagcacctccagcccgcgcaccggcttagtgctagcccgactgtctcaagttcatctttagtgctgtaccagtctagcgacagtagtaatggccagtctcacctgctgccgtccaatcactccgtgattgagaccttcatttccactcagatggcctcatcctcacagtag

SEQ ID NO: 190851 - DNA, 1212 bp, synthetic construct
  misc_feature 1..1212: note = Description of Artificial Sequence: Synthetic coding sequence
  source 1..1212: mol_type = other DNA
atggtgaagagctacctgcagcagcacaacatcccccagcgggaggtcgttgataccacaggactcaatcagagtcatttatcccagcacctcaacaagggaactccgatgaagactcaaaagcgggcagccctgtatacttggtacgtccgcaagcagcgggaggttgcccaacagttcacccatgcaggtcagggcggtctgatcgaggagcctactggtgatgagctacctactaagaagggcagacggaacagatttaaatggggccccgccagccagcagatcttgttccaggcgtatgaaagacagaagaacccaagcaaagaggaaagagaaacactagtggaggagtgtaacagagccgaatgcattcagcgaggggtgagtcccagccaggcccaggggttaggatccaatttagtcactgaggtcagggtctataactggtttgcaaatcggaggaaggaggaggccttccgccacaaactggccatggatacatactcgggacctccccccggccccgggcccggccctgctctgccggcccatagctcacctgggctccccccccccgctctctccccctccaaggttcatggagtgagatacggccaaccagctaccagtgagaccgccgaggtgccaagtagcagcggaggtccgctggtaacagtgagcaccccactccaccaggtgagtcctaccggcttagaaccaagccacagtctcctgagcacagaagccaagctggtgagcgccgccggaggccccttaccacccgtgagtaccctgacagcactgcactcccttgaacagacgtcacccgggttgaatcagcaaccccaaaacctgatcatggccagcctgccgggggttatgaccatcggtccaggggaaccagccagcctcggtccgacgtttacgaataccggggcctccaccctggtgatcggaaaactggtcgggatgggtggacacctcggtggtcgcctcatgggccaaccacagaaccctggggcaggtcgagcgacaggcacccactccttcatacacaccacttgtatttaccctgtgcccaccctggaccagtccctgtgctatataagcgacacatgggtcaaccagactgatcaaaacctatctaactcctcacgagaagccggaacaaagcacaacaccagcatcctgtggtaccttcgccgatag

SEQ ID NO: 190852 - DNA, 1185 bp, synthetic construct
  misc_feature 1..1185: note = Description of Artificial Sequence: Synthetic coding sequence
  source 1..1185: mol_type = other DNA
atggtgagcaagctgagccagctgcagaccgagctgctggccgccctcttagaatcaggcctgtccaaagaggcgctgattcaagccctcggggaaccgggcccttacctcctcgcgggtgaaggcccactggataagggcgagtcttgtggaggcggcagaggcgaattggctgaactacctaatgggctgggggagacaaggggaagcgaagacgagactgatgacgatggggaagactttactcctcccatcctcaaagagcttgagaaccttagccccgaagaggccgcgcaccagaaagctgttgttgaaaccttgctgcaggaagacccatggagggtcgccaaaatggtgaagtcctatctgcagcagcataacatccctcaacgcgaggtcgtggacacaactggtctgaatcagagccacctgtctcagcacctcaacaaaggtacccctatgaaaacccaaaagagagccgccctctatacctggtatgtccgaaagcagcgggaagtggctcagcagttcacacacgctggccaaggcgggcttattgaggaaccgacgggtgacgagctgccaactaagaagggccggaggaatcgcttcaaatggggaccagcttctcagcaaattctctttcaggcctatgaaaggcagaagaatccaagcaaggaggagcgtgagaccctggtggaggaatgcaaccgggctgaatgcatccagcgcggagtgagcccgtcacaggcccaaggtctaggttccaatttggtgacagaagtcagggtctacaactggttcgccaatcgtaggaaggaggaagcttttcggcacaagctggccatggacacatattctgggcctcccccaggcccaggcccagggccagcgctccccgcccatagcagccctggactgccaccacccgcactctcaccctctaaggtccatggcgtcaggtacggacagcccgccacctccgagacagctgaggttccaagctcatctggcgggccactcgtgacggtgtcaacaccactccatcaagtgtctcctaccggattagagcccagccactcactgttgagtacagaggcgaagttagtgtcagctgctgggggcccccttcccccagctgcttgtagccagccaggcagggttgctcgcctatttaatttctag

SEQ ID NO: 190853 - DNA, 1917 bp, synthetic construct
  misc_feature 1..1917: note = Description of Artificial Sequence: Synthetic coding sequence
  source 1..1917: mol_type = other DNA
atggtgagcaagctgagccagctgcagaccgagctgctggccgccctgcttgagtcagggctgtctaaggaagctctcattcaggctctcggcgagccaggaccctaccttctcgccggagagggaccattagacaaaggcgagtcttgtgggggtggccgaggcgaattggcagaactgcctaatggcctgggtgagacccgggggtccgaggatgagacagacgatgatggcgaggacttcacgcccccgattcttaaagaactggaaaatctgtctccagaagaagccgcccaccagaaggcagtagtggaaactctgttgcaggaagatccatggagggttgccaaaatggtgaaaagttatctacagcagcacaatatcccccaacgagaggtggtagacactacaggcctaaaccagtctcacctgtcacagcatctgaacaagggcacaccgatgaagacgcagaaacgtgccgcactatatacgtggtacgtgcgtaaacagagagaagtggcccaacagttcacccatgcagggcagggaggactcatcgaagaaccaaccggtgatgagctccctaccaagaagggccgccgcaacagattcaaatggggtccagcttctcaacaaattctgttccaggcttacgagagacagaagaacccttctaaggaggagagggaaacgctggtcgaagagtgtaatcgggctgaatgtattcagcgcggagtctccccctcacaagcgcaaggattgggaagtaacctggttaccgaagttagggtatataattggttcgccaacaggaggaaagaagaagcctttcgccataagctcgctatggacacttattccgggccaccacccggcccaggtcccggaccagcattacccgctcacagtagtccgggactgccccctcccgcactgtcaccgtcaaaggttcatggcgtgcgctacggccagccagccacttctgagactgcggaggtcccaagctcgagcggtggaccactcgttacggtctccaccccactacaccaggtctcacctactggcctggaaccctcgcattcactactatccacagaagccaagctggtgagcgcagcaggggggccacttccaccagttagtacactgacggccctccacagtctggagcagacgtcacccgggctcaatcagcagcctcagaatctaatcatggctagcttgcctggcgtcatgaccattggccctggcgagcctgccagtcttggacccacattcacgaacaccggcgcatcaacattggtaattgggttggcctctacccaagctcagtcagtacctgttatcaacagcatgggtagctctttaacaaccctccaaccggtccaattcagtcaaccccttcaccctagttatcaacagccactcatgcctcccgtccagagtcatgttacacagtctccttttatggcaaccatggctcagctccagtcaccgcacgccctgtactcacacaagcctgaggtggcccagtacactcacactggtcttctaccccagaccatgctgatcactgacaccacaaacttatctgccctggcttccctcacaccaactaagcaggaggccgcacttcttcctcaggtattcacctccgacaccgaggcgtctagtgagagcgggctgcacacgcccgcctcacaggccacaaccctacacgtcccatcccaagatccagcctctatacagcatctgcagccagctcaccggctgtccgcctcacccacagtgtcatcgagttcactcgtgttataccagagttccgactcatccaatggccagtctcacctgcttcccagcaaccactccgtcatcgaaacatttatatctacacagatggcttcctctagccagtag

SEQ ID NO: 190854 - DNA, 1416 bp, synthetic construct
  misc_feature 1..1416: note = Description of Artificial Sequence: Synthetic coding sequence
  source 1..1416: mol_type = other DNA
atggtgagcaagctgagccagctgcagaccgagctgctggccgccctgctggaatccgggctgagtaaagaagccttgatacaagccctgggcgagcccggcccctacctgcttgccggagaaggacccttggataaaggggagtcctgcggcggaggccgtggcgaactggcggaactcccgaacggtcttggtgagactaggggcagtgaagatgagactgacgacgacggagaagacttcactccccccattctcaaggagctggaaaacctgtctcccgaagaagccgcccatcagaaggctgtggtggaaaccttgctgcaggaagacccctggagggtcgcaaagatggttaaatcatacctgcaacagcataacataccacaaagggaagtggtagataccactggtctcaatcaatcccaccttagccagcatctgaataagggcacccccatgaaaacacagaaacgggccgccctgtacacttggtacgtccgtaaacaaagagaggtggctcagcagttcactcacgccggccaggggggactgatcgaggagccgactggtgacgagctgccaactaaaaaaggccggagaaataggtttaagtggggccctgcgagtcagcagatcctcttccaagcatatgagcggcagaaaaatccatccaaggaggaaagagagacgctggtggaagagtgcaaccgggccgaatgcattcagaggggagtgagccccagccaggctcaggggctgggttccaatctggtgacggaagtcagggtatataactggtttgcaaataggcggaaggaagaggccttccggcataagctagctatggacacctatagtggcccgccgccaggaccgggccccggccccgccctgccagcacactcaagccccgggttgcccccccccgccctctcaccatcaaaggtgcacggggtaagatatgggcagcccgctacctcagagactgccgaggtcccatcgagttctggggggcccctggtgacggtgagcactcccctgcatcaggtctcacccacaggactggaaccctctcattcgttgctttccaccgaggcaaaactggtcagcgcagctgggggtcccctgcccccggtttcaaccctgaccgccctgcactcattggagcagacatctccgggactgaaccagcagccacaaaatttaatcatggcttccctccctggggtgatgacaattgggccaggggagcccgctagcctgggacccacgtttacaaataccggcgcttctacgctggtgattggactcgcaagcacccaagctcagagtgtgcctgtgattaactctatggggtccagcctgacgaccctgcaaccggtacagttcagtcaacagggacccagcagctag

SEQ ID NO: 190855 - DNA, 1359 bp, synthetic construct
  misc_feature 1..1359: note = Description of Artificial Sequence: Synthetic coding sequence
  source 1..1359: mol_type = other DNA
atggtgagcaagctgagccagctgcagaccgagctgctggccgccctgttggagagcggtctctccaaggaggcgctgattcaggccttgggcgaacccggaccgtacctgctagcgggtgaggggccactggataagggagagtcatgtgggggtgggcggggtgagctggcagaactaccaaatggcctcggggagacacgtgggagcgaggacgaaacggacgacgatggagaagattttacgccacccatcttgaaggagcttgagaatttgagcccggaggaagctgcccatcagaaggcggtcgtagagaccctgttacaggaagatccttggagagttgctaaaatggtaaagagctacttacagcagcacaatataccacagcgcgaggtagttgacacaacaggcctcaaccagagccacctgagccaacacttaaataagggaactcctatgaagacacagaagcgcgcggctctgtacacatggtacgtgaggaagcagagagaggtggctcaacaattcacacatgccggccaggggggtctcatcgaggagcccaccggggacgagttgcctaccaaaaaagggcgccgcaacagattcaaatgggggcccgcttctcagcagatactgttccaggcttacgagaggcagaagaatccctccaaagaggagcgtgaaacgctggtggaggagtgtaacagagcagaatgcatccagaggggggtctcacctagccaggcccaggggctgggctcgaatctggtgaccgaagtgcgcgtgtacaattggttcgccaatcgccgcaaggaggaggccttccgacacaagttagccatggatacttatagtgggccaccccctggcccaggaccggggccggcattgcctgcacactccagccccggcctgccacctcctgcactgtctccttccaaggtgcatggcgtgcggtacgggcagcccgcaacaagcgaaaccgccgaggtgccctcctcaagtgggggccctctcgtgaccgtcagcacaccactgcatcaggtcagtcctacagggttagaaccctcacacagtcttttatcaactgaagccaagcttgtaagcgcagcaggcggaccgcttcctcccgtatctacgctcacggctctgcactccctagagcaaacttcacctggactcaatcagcagccgcagaacttgatcatggcatcactgccaggggttatgaccattgggcccggcgagcctgccagcctgggccctaccttcactaacacgggcgcctccactctacccctcttcggagcaggagtcgccgagttaacgagacagcagggaccgtcatcttag

SEQ ID NO: 190856 - DNA, 1071 bp, synthetic construct
  misc_feature 1..1071: note = Description of Artificial Sequence: Synthetic coding sequence
  source 1..1071: mol_type = other DNA
tgatggctggtgggcttctggggcggcagcggctgcaaggagttcgggttatgtctgcctgctggtcggcagacacaacccacacggtgggggcgtagattggcttggtggacaagggccgcctggccttgtggatcccgggcaatggtgtccaagttatcacagctccagaccgagctgcttgccgctctactggagtccggtctttctaaggaagccctcatacaggccctaggcgaacccggaccgtacctgctcgccggcgaggggcctctggacaagggggagtcgtgcgggggaggaaggggcgaactggctgagctccccaatggacttggagagactcggggctccgaagacgagacagatgacgatggcgaggactttactccccccatcttaaaggaattggagaacctttctccagaggaggccgcccatcagaaggcagtcgtagaaactttgctgcaggaagacccatggcgcgtggcgaaaatggtaaaatcatatctgcagcagcacaacatcccgcaacgcgaagtggtcgacaccactggattaaatcagtcacatttgagccagcacctgaacaagggtacacccatgaaaactcagaaaagagcggcgttgtacacatggtacgtgagaaagcagagagaggtggcacaacaattcacgcatgctggccagggcgggctgattgaggaacccacaggagacgaactacccaccaaaaagggtcggagaaatcgcttcaagtgggggccagcctcccagcagatcttgtttcaggcttacgaaaggcagaagaacccgagcaaggaagagcgagagactctagtagaggagtgtaaccgggcggaatgcatacagcggggtgttagtcccagccagccacaacccgcagaatacagatctcaagccggcttaagctcatggggacccccccctccctgtcagcatcccgattccactgctcagttgggggctgatatccctaggcctcagcctgcggctccagaaccacatcacggactgacctcctggggccacgatcatagagcttggtag

SEQ ID NO: 190857 - DNA, 2247 bp, synthetic construct
  misc_feature 1..2247: note = Description of Artificial Sequence: Synthetic coding sequence
  source 1..2247: mol_type = other DNA
atgctgggcaccctgcgggccatggagggcgaggacgtggaggacgatcagctgcttcagaaactcagagccagtcgccgccgcttccagcgaaggatgcagagactcatcgagaagtacaaccaaccattcgaggacaccccagtcgtccagatggccactctcacctacgaaaccccccagggtctgaggatctggggcgggaggctgatcaaggagcgcaatgagggcgagattcaggactcatcaatgaagcctgcggatcggacggatgggagtgtgcaggcagcagcttgggggcctgagctgccttctcatcgaaccgtgctgggggccgacagtaaatccggcgaggttgacgctacatccgatcaggaagagtcagtggcgtgggccttagctcctgcagtccctcagagtcctctcaagaacgagttgagaaggaagtacctgactcaggttgatatactcctccagggggcagagtatttcgagtgtgccggtaatagggccggcagggatgtacgcgtcacacctcttccttctttggcctctccggctgtgcccgccccgggctattgtagtcgcatttcaaggaaaagcccgggtgacccagccaagcccgcctcaagtcccagagaatgggatccgcttcatccaagttctaccgatatggccctcgtccctaggaacgattctctgtccctgcaagaaacctcttcctcgagctttttgagctcccagccgtttgaggatgacgacatatgtaacgtaaccattagcgacttgtatgcgggaatgctgcacagcatgtcacgacttctgagcaccaagccttccagtatcataagcactaagaccttcattatgcaaaattggaactcccggcgaagacatcggtataagtcccgcatgaacaagacttactgtaagggggcccgtagatcccagcgtagctcaaaggaaaatttcataccgtgtagtgaaccagtgaaggggacaggcgctttgcgggactgtaaaaatgtgttggatgtgagttgtagaaagaccgggctgaagctagagaaagcttttctggaggtgaatagaccacaaattcacaaactggatccaagctggaaagaacgcaaggtaactcccagtaaatattcttcactgatctatttcgattcctcagctacctacaacttggatgaagaaaacagattccggactctgaagtggttgataagtccagtcaagatagtgagtcgtcccacaatcaggcagggtcatggagaaaaccggcaaagagaaattgagatccggtttgaccagctgcacagggaatattgcttgagtcctcgaaatcaaccccggcgaatgtgcctccctgacagttgggccatgaacatgtataggggtggacctgcttccccaggcggcctgcagggcctcgagactagaaggctttcgctgccttcttccaaagccaaggccaaaagcctgtccgaagccttcgagaatttgggaaagaggagcctggaggcaggaaggtgtctccccaagtccgacagttccagctcactaccaaaaacaaatcccacgcacagtgccactagaccacagcagacttctgacctgcacgtgcagggtaattcatccggtatcttccgtaagagtgtctcaccaagcaagaccctgtccgtccctgacaaagaggttcctgggcatggaagaaaccggtacgatgaaattaaagaagagtttgataaattacaccagaaatattgcctgaaaagcccaggtcaaatgactgtgcctctctgcatcggcgtttctactgacaaagcctctatggaagtgcgctatcagactgaggggtttcttggcaagctgaatcccgatccacacttccagggctttcagaagttaccttcaagtccattggggtgcagaaaaagcctgttaggcagtaccgctattgaagcaccctcatcaacatgtgtggctagagcaatcacgagggacggcacaagagatcaccaatttcctgctaaacgaccacgactaagtgagcctcaaggcagtggccgccagggaaattccctgggcgcctctgatggagtcgataatactgttagacccggcgaccagggaagttcttctcagccaaacagtgaagaaaggggcgaaaatacatcttatagaatggaagagaagagtgattttatgctggagaaactggagaccaaaagcgtttag

SEQ ID NO: 190858 - DNA, 2085 bp, synthetic construct
  misc_feature 1..2085: note = Description of Artificial Sequence: Synthetic coding sequence
  source 1..2085: mol_type = other DNA
atgctgggcaccctgcgggccatggagggcgaggacgtggaggacgaccagctgctgcagaagctgagggccagccgcaggcggtttcaacggcgcatgcaaaggcttatagaaaaatacaaccagccatttgaggacacgccggtcgtgcagatggctaccctgacttatgaaacacctcagggcctgagaatctggggtgggagactgatcaaagagcggaacgagggcgagatccagcccgcagtgccgcagagccctctgaaaaatgagttaagaaggaagtacctgacgcaggttgacatacttctccagggtgccgaatacttcgagtgcgccggcaaccgtgccggaagagatgtacgtgtgaccccactgccaagcctggcatcccccgcagtgccagccccgggctactgtagtcgcatcagtaggaaatctcccggcgatccagcgaagccagctagctccccacgagagtgggatcccttgcacccatcctccacagatatggctcttgtgccacggaatgactcgctatccctgcaggagaccagttccagctcctttctgtcttcccagccattcgaagacgatgacatctgtaatgtgaccatctccgacctttatgctggcatgttgcactctatgagccggctcctgtcaaccaagccatctagcattatctctaccaaaacctttattatgcagaattggaattctcggcgtcggcaccgatacaagtcacgcatgaataaaacctactgtaaaggagccagacgcagccagcgtagctcaaaggagaactttatcccctgcagcgaaccggtgaaggggaccggagccctccgggattgcaagaatgtgctcgatgtttcttgcaggaaaaccggactaaagcttgaaaaggccttcttagaggtgaacaggcctcagatacacaaactggatccttcttggaaggagcgaaaggttaccccatccaagtattcaagtctcatttattttgacagctccgcgacttacaacctcgacgaggaaaaccgtttccgtacccttaagtggctgatctcaccagtcaagatcgtaagccgccctactatccggcagggtcacggagagaacaggcagagggaaattgagatacgcttcgatcagctccacagagagtactgcctgagccctcggaatcagccaagaagaatgtgcctgccagacagttgggccatgaacatgtatcggggtggccctgcatcccccggtggcctgcaagggcttgagaccagaaggttatccctgccatccagcaaggcaaaagccaaatccctatcagaagcttttgagaacctaggaaaacgttccctggaggctggcagatgcttaccgaaatccgattcttctagctctttacctaaaacgaaccctactcacagcgcaactcgacctcagcagacctcagatctgcacgtgcagggcaactctagcggcattttccgcaagtccgttagcccgagcaaaacattatctgtccccgacaaggaggtgcccgggcacggccggaacagatacgacgagatcaaagaagagtttgataaacttcaccagaagtattgcctgaagtcccctggacagatgaccgttcccttgtgtatcggagtgtcaacagacaaggcaagcatggaagtgaggtatcagacagaaggatttttaggtaaactgaaccctgacccccatttccagggctttcaaaagctgccatcttcacctctgggatgccggaagagtcttctcgggagtactgccatcgaggcgccttcctcaacttgcgttgccagggcgataacaagggatggaaccagggatcaccagtttccggcaaaacgacctcgtctcagcgaaccccaggggtcagggaggcagggcaattctcttggggcgtcagacggcgtggacaacactgtgagacccggcgaccagggatcctcctctcaacctaactccgaagagcgtggtgaaaacacaagttaccgaatggaagagaaaagcgacttcatgctggagaagctggaaaccaagagtgtgtag

SEQ ID NO: 190859 - DNA, 1992 bp, synthetic construct
  misc_feature 1..1992: note = Description of Artificial Sequence: Synthetic coding sequence
  source 1..1992: mol_type = other DNA
atgctgggcaccctgcgggccatggagggcgaggacgtggaggacgaccagctcctccagaagctcagggccagccgccgcagattccagcgcagaatgcaacggctgatagagaaatataatcaaccattcgaagatacacctgtggtccagatggctactctaacatacgagactcctcaaggactgaggatctggggaggcagattgataaaagaacgtaatgagggcgaaatacagtgcgccggcaatcgcgcaggtcgcgatgtgcgcgtgacgccacttccttcgctggcctcaccagcagtacccgcgcccggctactgcagcaggatttctcgcaaatcccctggggatcctgctaaacctgcttcatccccacgggagtgggaccctctacacccaagtagcactgatatggcgttggtgccacgtaatgatagcttgtccctgcaggagacatccagcagtagcttcctgagttcgcaacccttcgaggacgacgatatttgtaatgtaaccatttccgacctgtatgcaggcatgctacactccatgtccagactattaagcactaagccgagtagcattatttccactaaaacattcatcatgcagaactggaactccaggagaagacacagatacaaatccaggatgaacaaaacctattgtaaaggagccaggcgatctcagcgatcgtccaaggaaaacttcatcccctgctccgagccagtgaagggcaccggggcccttcgtgattgcaaaaacgtgttggacgtgtcatgtcgtaaaaccggcctcaagcttgaaaaggcctttttggaagttaatcgtccgcagatccacaaattagacccgagctggaaggagcggaaagttacaccatctaaatattcatccctgatctactttgattctagcgccacatataatctcgatgaggagaaccgtttccgcacgctcaagtggcttatatctcccgtcaagattgtcagtagacccacaatacgccagggacacggggagaacaggcagagggagattgagattcggtttgaccagctgcaccgagagtactgtttgtccccacgcaatcagcctcgaaggatgtgcttgcctgatagctgggcgatgaatatgtacagagggggtccagccagcccaggaggtctccaaggccttgagacgcggagattaagtttgccaagctctaaagccaaagccaaaagcctgagcgaagccttcgaaaacctgggaaaaagaagtttagaggctggtagatgcctccccaagagtgactcttcgtcatccctacctaaaaccaatcctacacattctgctactcgaccccaacaaacaagtgatctacacgtgcaggggaattcatccggtatttttagaaagtctgtgtcaccatctaaaacgttaagtgttcctgataaggaggtccctggacacggccgcaacaggtacgatgaaatcaaagaagaatttgataaactgcatcagaagtactgcctgaaatcacccggacagatgacagtgcccctctgcatcggagtttccacagacaaggcttccatggaagtgcggtatcagacggagggattcctcggcaagctgaaccccgaccctcatttccagggcttccagaagcttcccagttcaccactgggctgtcgaaaaagcctgctgggaagtacagccatagaagctccttcctccacctgtgtggccagagcaatcacacgggatgggacccgtgaccaccagtttcctgcaaagagaccacgactctccgaacctcaggggtccggccggcaaggaaactccctcggggctagcgacggagtcgataacaccgtaaggccaggtgaccagggcagtagcagccagccaaactccgaggaaaggggggaaaatacgtcttacaggatggaagaaaaatccgacttcatgctcgaaaagctcgagaccaagtctgtgtag

SEQ ID NO: 190860 - DNA, 2181 bp, synthetic construct
  misc_feature 1..2181: note = Description of Artificial Sequence: Synthetic coding sequence
  source 1..2181: mol_type = other DNA
atggaggaccggctgcacatggacaacggcctggtgccccagaagatagtatccgttcacctgcaagatagcacccttaaggaagtcaaggatcaggtgtccaataagcaagcccagatcctggagcctaagcctgagccgtccctggagatcaagcccgagcaggacggaatggaacacgtcggccgcgacgatccgaaagctttgggggaagagcccaaacagagacgtggcagcgcaagtgggtccgagccggcaggtgacagcgatcgtggcggaggccccgttgaacactatcacttgcacttgtcctcctgtcatgaatgcttggagctggaaaattctactatcgagtctgtgaagtttgcctccgccgagaatattcctgacctaccctatgactattctagtagtctcgaatccgtcgccgacgaaactagtccagaaagagaaggaaggagagttaatcttaccggaaaagcacccaatatcctcctgtacgtcgggtcagactcccaagaggccctgggtcggtttcatgaggtgcgctctgtcctcgccgattgcgtagatattgactcttacattctttaccatctactagaggacagcgccctcagagatccatggaccgacaactgcctgcttctggtgatcgctactcgggaatcgatacctgaggacttgtatcagaaatttatggcatacctctcccagggcggtaaagtcttgggccttagttcttctttcacttttggaggctttcaggtaacctccaaaggcgccttgcacaagacagtgcagaatctggtctttagcaaggccgaccagtctgaggttaagctaagcgtcctgtcaagcgggtgcaggtaccaggaaggacctgtcaggctctctcctgggcggttacagggtcatctagagaacgaggataaggataggatgattgtgcatgtaccgtttgggacacggggcggtgaagccgtcctttgtcaggttcatctggagctcccaccaagcagcaacatcgtccagaccccagaggacttcaaccttcttaagagcagcaatttcaggagatatgaagtgctccgtgaaattttgacaaccctgggactgtcctgtgatatgaagcaggtcccagctctcacacccctatacctcctttcagcagcagaggaaatcagggaccccttgatgcagtggctcggcaagcacgtcgactcggaaggcgagattaagagtgggcagctctcccttagattcgtttcttcttacgtcagtgaagttgagatcacacctagctgcatccctgtggtgactaacatggaagcgttctcctcagagcatttcaaccttgagatctacaggcagaacctgcaaacgaaacagttaggtaaggtgatactgtttgctgaggtgactccaactacaatgcgcttattggacggtcttatgtttcagacccctcaagaaatgggcctgattgttattgctgctaggcagaccgaggggaagggacgcggagggaacgtgtggctgtctcccgtgggatgtgccttgagtacgttactgatttccattcctctacgcagtcagctggggcagaggatacctttcgtgcagcacctgatgtctgtggcagtggtggaggccgtaaggagtatccctgagtatcaggacattaacctccgcgttaaatggccaaacgacatttactactcggatctgatgaagatcggtggagtgctcgtcaattctacactgatgggagaaacattttacatactgatcggttgcggatttaacgtaacaaacagtaaccctacaatctgcatcaacgacctcatcaccgagtacaataagcagcataaggccgaactcaaaccgttgcgagctgactatctgatagcgagggtcgtgactgtcttggaaaagctgatcaaagagtttcaggataaggggcccaactctgtactgcccctctattatagatattgggtgcacagtggacaacaagtgcatctggggtccgccgaaggcccgaaagtgtctatcgtgggcctggatgattccggctttttgcaggtgcaccaggaggggggggaggtggtgaccgtccatcctgacggcaattccttcgatatgctgagaaacttgattctgcctaagcgaaggtag

SEQ ID NO: 190861 - DNA, 2181 bp, synthetic construct
  misc_feature 1..2181: note = Description of Artificial Sequence: Synthetic coding sequence
  source 1..2181: mol_type = other DNA
atggaggaccggctgcacatggacaacggcctggtgccccagaagattgtgagtgtgcacctgcaggattctaccttgaaagaagtgaaagaccaggtgtctaacaaacaggcacagattctggagcccaaaccggaaccgtccctcgaaatcaaaccggaacaggatggaatggagcatgtggggcgcgatgaccctaaagccttgggtgaagagcctaagcagcgaaggggctctgcaagcggttccgaaccggccggggactccgatcgtgggggcggccctgtcgaacactatcatctccatttgtctagttgccatgagtgcctggaattagaaaacagcacaatagagtctgtgaagttcgcctcagctgaaaacatacctgatctaccttatgattacagctcgagcctggaatctgtggctgacgagacttccccagagcgcgagggcagaagagtcaacctcactggtaaagccccaaacatactactgtacgtgggaagtgattcacaggaggccctgggtagattccacgaagtgagatctgtacttgccgactgcgtcgacatcgattcttatatcctatatcacttactggaggattccgcactgcgagatccatggaccgacaactgccttctcctggttatcgccactagggagagtatccccgaagacctgtatcagaaattcatggcttacttaagtcagggaggcaaggtgctgggcctgtccagcagctttacgtttggaggatttcaggtcactagcaagggggccttgcataagactgttcaaaacctcgttttttccaaagccgatcagtcagaagtcaagctgtcggtgctgtcctcaggctgccgctatcaggaaggccctgtgcggctcagccccggaagacttcaggggcacctagagaatgaggacaaggaccgaatgattgtgcatgtgcctttcgggacaaggggcggagaggcagtcctttgccaggtgcacctggaactgccccccagctcaaatatagtgcagacgcccgaggattttaatttgttaaagtccagcaacttcagacgctatgaggtcctgcgtgagatcctcacaacactcgggttgagctgcgacatgaagcaggtgccagccctcacacctctttatctgctgtcggctgcagaagagattcgcgaccccctgatgcagtggttaggaaaacacgtcgactccgagggagagataaaatcgggacagctgtcactcagattcgtgtcgtcttacgtgagcgaggttgagatcactccctcatgcattccggtcgtgacgaacatggaggccttttccagcgaacactttaatctggagatttaccgtcagaatctccagactaaacaactcggtaaggtgatacttttcgccgaggtgaccccgacgacgatgcggttgctggacgggcttatgtttcagaccccccaggagatgggcctgattgtcatcgccgctagacagacagaagggaagggaaggggcggtaacgtgtggctttcccccgtcggatgcgccctttcaacgctcctgatttcaatccctttgcggagccaactcggccagagaatcccctttgtccagcatttgatgtcagtggccgtagtggaggccgttcggagcatccctgaatatcaggatataaaccttcgcgtcaaatggcctaacgatatttactatagtgatctgatgaagatcgggggcgttctcgtcaacagtactcttatgggtgagacattctacatactgattggctgcggattcaacgtcactaactcaaatcccacaatttgcatcaatgatctcatcacagaatataataaacagcacaaagccgagctgaagcccctgcgagccgactatctaatagctagggtggttacagtacttgagaaactcatcaaggaattccaggacaagggccccaacagcgtactccccctttactaccgctattgggtccacagtgggcaacaggtacacctgggaagtgctgaagggcctaaagtatccatagtcggtctagacgatagtggcttcctccaagtccaccaggagggcggtgaagtggtgacagtgcatcctgacgggaattcctttgacatgctgcgtaacctgattctcccaaagcgaagatag

SEQ ID NO: 190862 - DNA, 264 bp, synthetic construct
  misc_feature 1..264: note = Description of Artificial Sequence: Synthetic coding sequence
  source 1..264: mol_type = other DNA
atggaggaccggctgcacatggacaacggcctggtgccccagaagattgtgtcagtccacctgcaggacagcacactcaaggaggtgaaagaccaggtgtctaacaagcaggctcaaattttagagcctaagcccgaacccagtttagagattaagccagagcaggatggcatggaacatgttggaagagacgatccgaaggcgctgggcgaggaaccaaaacagaggcggggttccgcttctgggtccgagccggccggctag

SEQ ID NO: 190863 - DNA, 234 bp, synthetic construct
  misc_feature 1..234: note = Description of Artificial Sequence: Synthetic coding sequence
  source 1..234: mol_type = other DNA
atggaggaccggctgcacatggacaacggcctggtgccccagaagattgtctccgtccacctgcaggattctaccttgaaagaggtcaaggaccaggtgtcaaacaaacaggctcaaatcttggaaccgaagcccgagccaagcctggagatcaagcctgagcaggacggaatggagcacgtgggtcgagacgatccaaaagcgcttggcgaggagccaaagcaacgcagatag

SEQ ID NO: 190864 - DNA, 279 bp, synthetic construct
  misc_feature 1..279: note = Description of Artificial Sequence: Synthetic coding sequence
  source 1..279: mol_type = other DNA
atggaggaccggctgcacatggacaacggcctggtgccccagaagattgtgtccgtgcacctacaggacagcacattgaaagaggtgaaagatcaggtctctaacaagcaggcacagatcctcgagcctaaaccggaaccatcactggaaatcaagccggagcaggacgggatggaacatgtgggacgagatgaccccaaggccctgggggaagagcccaagcagcgcagaggatctgcgagcggcagcgaacccgccggcgattcagaccgcgggtag

SEQ ID NO: 190865 - DNA, 807 bp, synthetic construct
  misc_feature 1..807: note = Description of Artificial Sequence: Synthetic coding sequence
  source 1..807: mol_type = other DNA
atgggcctgagccccagcgcccccgccgtggccgtgcaggccagcaacgccagcgcaagtcccccttccggatgtccgatgcatgaaggcaagatgaaggggtgtccagttaataccgaaccatccggacccacttgtgagaagaagacatactctgtcccagcacaccaggaaagagcctatgagtatgtggaatgtccaatcaggggaactgcagccgagaacaaggagaatttagatcccagcaatctcatgcccccccctaatcaaactccagctcctgatcaacctttcgcactaagtaccgtccgcgaggagtcctccattcccagggccgattccgagaaaaagtgggtgtacccatccgaacagatgttctggaatgccatgctcaaaaagggatggaagtggaaagatgaggatatttcccagaaggatatgtacaacatcattagaatccataatcagaataacgaacaggcgtggaaagagatcctcaagtgggaagcactccatgctgcagagtgtccatgtgggcctagtctcatcaggttcgggggtaaagccaaagaatattctccacgggcaagaattcgcagctggatgggatatgagctgcctttcgaccggcacgattggatcatcaatcgctgtgggacagaagttcgatatgtgattgactactacgacgggggggaggtgaacaaagactatcagtttacaattttagacgtccggcccgccctcgatagtctctccgccgtgtgggatagaatgaaggttgcctggtggaggtggacatcctag

SEQ ID NO: 190866 - DNA, 807 bp, synthetic construct
  misc_feature 1..807: note = Description of Artificial Sequence: Synthetic coding sequence
  source 1..807: mol_type = other DNA
atgggcctgagccccagcgcccccgccgtggccgtgcaggccagcaatgcttccgcctccccaccttccggatgccctatgcacgaagggaaaatgaaaggatgcccagttaatacggagcctagcggaccaacctgcgaaaagaaaacttatagtgtaccggcccaccaggagcgggcgtacgaatacgtggaatgtccaattagggggacagccgcagagaacaaagagaatctagatccttccaacttaatgccacctcctaaccagacccctgcccctgaccagccttttgcactctcaacagtgcgtgaggagagtagtattccccgagcagacagcgagaagaagtgggtttatccatcagaacaaatgttctggaatgctatgctaaaaaagggatggaagtggaaggacgaggatataagccagaaggacatgtacaatattatccgaatccataaccagaataacgaacaggcgtggaaagaaatactcaagtgggaggccttgcacgctgcagaatgcccttgcggccctagtcttattcgattcggtggtaaggctaaggaatacagcccacgagccagaatccggagctggatgggttatgaacttcctttcgacaggcatgattggatcatcaataggtgcggaaccgaggtgagatacgttatcgactattatgacggtggagaggtgaataaggattaccagtttactattctggatgtgagacccgccttggactcgctgagcgctgtgtgggacaggatgaaagtcgcgtggtggcggtggacttcttag

SEQ ID NO: 190867 - DNA, 807 bp, synthetic construct
  misc_feature 1..807: note = Description of Artificial Sequence: Synthetic coding sequence
  source 1..807: mol_type = other DNA
atgggcctgagccccagcgcccccgccgtggccgtgcaggccagcaacgctagcgcctctcctccatccggttgcccaatgcacgagggcaagatgaaggggtgccctgtgaacacagagccatctggccctacctgtgagaaaaagacttattccgttcctgcccaccaggaacgcgcgtatgagtatgtggaatgtcccatcagaggtactgcagctgagaataaggaaaatcttgaccctagcaatctaatgccacccccgaaccagacacctgccccagaccaaccttttgccctgtctacggtacgagaagagtccagcattccgagggcggactctgaaaagaagtgggtatacccctcagaacagatgttttggaacgcaatgttaaaaaagggttggaagtggaaggatgaggacattagccagaaggatatgtacaatatcatccgaatacataatcagaataatgaacaagcatggaaagagattctgaagtgggaagccctgcacgcagctgagtgtccatgtggccccagcctaatcagatttgggggcaaagccaaggagtacagtccacgggcccgaatccgatcttggatgggctacgagttgccgttcgataggcacgactggataattaaccgatgcggcacagaagtgagatacgtgattgactactacgatgggggggaggtaaacaaagactatcagtttacaattcttgatgtacgacctgccctggacagcctaagtgccgtatgggatcgaatgaaggtggcctggtggcggtggacatcttag

SEQ ID NO: 190868 - DNA, 1008 bp, synthetic construct
  misc_feature 1..1008: note = Description of Artificial Sequence: Synthetic coding sequence
  source 1..1008: mol_type = other DNA
atggacaacgcccggatgaacagcttcctggagtaccccatcctgtcaagtggagactccggcacttgctcagcacgcgcatacccctccgatcatagaattacgacattccagagctgtgcagtaagtgccaacagctgtggaggagatgaccggttcctggtgggaagaggcgtccagatcggatccccacaccatcaccaccaccatcaccatcggcaccctcagccggccacctatcagacctcggggaacctgggcgtgtcttattcacattcatcatgcggccccagctacgggagtcagaatttctccgcgccctattctccatatgcactgaaccaggaagctgatgttagcggaggttacccgcagtgtgcccccgcggtatacagtggcaacctgtcctcaccaatggtccagcatcatcaccatcaccagggctatgcgggcggagctgttggatcaccacagtacattcaccacagctacggacaagagcatcaatccctggccctggccacatataacaattctctgtccccgctgcacgcgagtcaccaggaagcatgtcgttctcccgctagcgagaccagttcccccgcccagacattcgattggatgaaagtgaagcgaaacccaccaaaaacaggcaaagtgggcgaatatggctatttgggacagcccaacgccgtgcggactaattttacaacgaagcagctgacagagctggaaaaagaatttcacttcaacaagtacctgacccgtgcccgcagagtggagatagcggcctctttgcagctgaatgaaactcaggtcaaaatctggttccaaaacagaaggatgaagcaaaagaagagggagaaggaaggactgttacctatctcccctgcaactccccccgggaacgacgagaaagccgaggaatcttctgagaagtctagttcctctccctgtgtacccagccccggcagctcaacatctgatacacttaccacttcacactag

SEQ ID NO: 190869 - DNA, 414 bp, synthetic construct
  misc_feature 1..414: note = Description of Artificial Sequence: Synthetic coding sequence
  source 1..414: mol_type = other DNA
atggacaacgcccggatgaacagcttcctggagtaccccatcctgagctctggagactcggggacctgctccgcacgggcgtatccaagtgaccacaggatcactacctttcagtcctgcgctgtgtctgccaactcatgcgggggggacgataggttccttgttggacgcggtgtgcagatcggcagcccgcaccatcatcaccaccatcatcaccggcacccccaacctgctacctaccagacgtcagggaacctgggtgtctcttattcgcacagcagttgcggccccagctatggctctcaaaatttctctgccccttattctccctatgctctgaatcaggaggccgaccctccccgttcactatcacttcctcggattggcgatatatttagctccgctgacttttag

SEQ ID NO: 190870 - DNA, 1233 bp, synthetic construct
  misc_feature 1..1233: note = Description of Artificial Sequence: Synthetic coding sequence
  source 1..1233: mol_type = other DNA
atgagcgcccggaagggctacctgctgcccagccccaactaccccactacaatgtcctgctccgaatctccagctgcgaatagcttcctggtcgacagcctgatctcttcaggcagaggagaggctggcggaggcggcggcggcgcgggcgggggaggaggcggcggctattacgctcacggaggtgtctatcttcccccggctgcagaccttccgtacggcctgcagtcttgtggtctgtttccaacacttggtggaaagcggaacgaagccgccagccccggcagcgggggcggtggggggggactaggtcccggcgcccacggatacggtccaagtcccatcgacttgtggctagacgcccctcgctcgtgcaggatggaaccccctgacgggcctccgcccccaccccagcagcagccacctccccccccccagcccccccagccagcaccccaggccacttcttgctcttttgctcagaacattaaggaggagtcaagttactgtctgtacgatagcgccgacaagtgccccaaggtcagcgccactgcagcagagctcgctcccttcccacggggccccccccctgacgggtgcgccttgggaactagctccggcgttcccgtgcctggatattttaggctgtcccaggcatacggcactgcaaaaggttatggatccggcgggggtggcgctcaacagctgggggccggaccttttccggcccagccacccggccgcggctttgatctcccaccagcacttgcaagcggatccgctgacgctgcccggaaagaaagagctttagattccccgcctcccccaacactcgcttgcggatcgggtggaggttcccagggggatgaggaggcacacgcttcttctagcgcagccgaagagctgtcccctgccccttcagaatccagtaaagcatccccagagaaggactctctgggaaattcgaagggtgagaacgctgctaactggctcaccgcgaaaagtggtcgcaaaaagaggtgcccctataccaagcaccaaaccctggaattggagaaggaattcctgtttaatatgtatctgacccgcgaacggcggctggaaattagcaggagcgtccacctcaccgatcgacaagtgaaaatctggttccagaatcgccgcatgaagcttaagaaaatgaatagggaaaacaggattagagaactgaccgctaacttcaacttctcttag

SEQ ID NO: 190871 - DNA, 609 bp, synthetic construct
  misc_feature 1..609: note = Description of Artificial Sequence: Synthetic coding sequence
  source 1..609: mol_type = other DNA
atgagctgcagcgagagccccgccgccaacagcttcctggtggactcactcatatctagcggtcgtggggaggccggaggggggggcgggggcgccgggggaggcggaggtggggggtactatgctcatggaggtgtgtatctgcccccggcggccgaccttccatatggcctgcaaagctgcggcctgtttcccacattaggcggcaaaaggaacgaggcagcttcccccggaagcgggggaggtgggggcggtctaggaccaggcgcacacggctacggaccaagcccaatcgacctgtggttggatgccccccgaagctgccgaaggagagccgcaacaaggggctggccggtacccagagctgcacctggggcccgctttagaagtccagctagggcctccctgcggcttgggcggtgtggacccgagggcgcgtcacctcggtttgctgcggctccccatgccgggttacggcagagacgcggacttgctggcagacgcggcggcgctagggttgtgttaggccgtgggggtgctctgcccggaccatttagagagcagcagtccctcgccggagaaggctttccaggccagttccagcggtag

SEQ ID NO: 190872 - DNA, 285 bp, synthetic construct
  misc_feature 1..285: note = Description of Artificial Sequence: Synthetic coding sequence
  source 1..285: mol_type = other DNA
atgtgccagggcaacagcaagggcgagaacgccgccaactggctgactgcaaagtccggaagaaaaaaaagatgtccctatactaagcaccagactttggaactcgaaaaggaattcctgttcaacatgtacttgactcgggaacggagactagagatctcgcggagtgtccacctgacagaccggcaagtcaagatttggttccagaatcggcgtatgaaactgaaaaaaatgaacagggaaaacaggatcagggagctcacagccaattttaatttttcgtag

SEQ ID NO: 190873 - DNA, 942 bp, synthetic construct
  misc_feature 1..942: note = Description of Artificial Sequence: Synthetic coding sequence
  source 1..942: mol_type = other DNA
atggacttcgacgagcggggcccctgcagcagcaacatgtacctgccctcctgtacctactacgtatccggacctgacttttctagcctcccatctttcttaccacagactccgtccagcaggcccatgacgtactcttactcctctaacctgccacaggtgcagcccgtgcgtgaggtgacctttcgggagtatgcaatcgagcccgccactaaatggcatccaagaggcaaccttgctcattgctacagtgctgaggaattggtgcatagggattgccttcaggctccaagtgccgccggcgttccaggtgatgtgctcgccaagtcctctgcaaacgtgtaccaccaccctacccctgcagtctcgagcaatttctattcaacagtagggcgcaatggagtcctgccgcaggcttttgaccagtttttcgaaaccgcttacgggactccggaaaacttggcctcgtcggattatccaggagacaaatctgcggagaaaggtcctcccgctgcgacagccacttcagcggccgcagcagctgcagcaaccggcgcacccgccacctcttctagtgactctggcgggggagggggatgcagggagacagcagctgcagccgaggagaaggaacgcagaaggagacccgagagctcctcatcacccgagagcagttctgggcataccgaagacaaagcggggggctcctcaggccagcggacccggaagaaacgatgcccttataccaagtaccaaatcagggaactcgagcgcgaattcttcttcagcgtatatattaacaaggaaaaacggctacagctatccaggatgctgaacctgaccgatagacaggtgaagatctggttccaaaatcgcagaatgaaggaaaaaaagatcaatagagatagactgcaatactattcagccaatcccctgctctag

SEQ ID NO: 190874 - DNA, 918 bp, synthetic construct
  misc_feature 1..918: note = Description of Artificial Sequence: Synthetic coding sequence
  source 1..918: mol_type = other DNA
atggcccgggaggacagcgtgaagtgcctgcggtgcctgctgtacgcactaaatcttttgttctggctgatgtcaatctccgtattggcggtgagtgcctggatgcgcgactacctgaacaatgtactgaccctaacggccgagacacgagtggaggaggcagtgatcctgacctacttccccgttgtacacccagtgatgatcgccgtttgctgcttcctcattatagtgggcatgctggggtactgcgggaccgttaagaggaacttgctgttgctcgcctggtatttcggttccctcctagtgatattctgtgtcgaactcgcatgtggcgtctggacctatgagcaggagttgatggttccggtgcagtggagcgatatggtaacgctgaaagcccggatgacaaattacggtctgcccagatatcgctggctgactcacgcttggaactttttccaacgggaatttaagtgttgtggcgtagtctactttactgattggctggaaatgaccgagatggattggccacctgacagctgctgtgtgagagaatttcctggctgctcgaagcaggcccatcaggaagacctgtctgacttgtaccaggaaggatgtggcaagaaaatgtacagcttcctccgggggactaaacagctgcaggtgctgcgcttcttgggtatttctattggggtgacacagatcttagcaatgatattgaccattacactcttgtgggccctttattacgacaggcgagagcccggcactgaccagatgatgagtctgaagaatgataactcacagcacctatcttgcccgagcgtggaactgctgaagccctcattgtcccggatcttcgaacatactagcatggccaactctttcaatacacacttcgagatggaggaactgtag

SEQ ID NO: 190875 - DNA, 489 bp, synthetic construct
  misc_feature 1..489: note = Description of Artificial Sequence: Synthetic coding sequence
  source 1..489: mol_type = other DNA
atgggcctggagaccgagaaggccgacgtgcagctgttcatggacgatgattcctactcccatcactctgggcttgaatacgccgacccggaaaagtttgccgactcagaccaggatagggatccgcacagattgaacagccatctgaagcttggcttcgaggatgtgattgctgagcctgtgaccacacacagcttcgacaaggtgtggatttgctcacacgccctgtttgaaattagtaaatatgttatgtataaattcctcaccgtgttcctcgcgatcccgttggctttcatcgcggggattttgttcgctacactctcctgtttgcatatctggatccttatgcccttcgtgaagacttgtttgatggtgcttcctagtgtacaaacgatatggaaaagtgtgactgacgttatcatcgcacccttgtgcacatcagtgggacgatgcttcagttcagtttctttgcagttatcccaagattag

SEQ ID NO: 190876 - DNA, 963 bp, synthetic construct
  misc_feature 1..963: note = Description of Artificial Sequence: Synthetic coding sequence
  source 1..963: mol_type = other DNA
atgaccatgagcagcttcctgatcaacagcaactacatcgagcccaagtttccccccttcgaggagtacgcacaacacagcggatccgggggcgcggacgggggaccaggcggcggcccagggtaccaacaaccaccggccccacccacccagcacctaccgctccagcagcctcagctcccccacgccggaggtggccgcgaacccactgcctcctattacgccccacggactgcccgcgaaccagcgtaccctgccgctgctctatatcccgcccacggagcagctgatactgcctacccgtacggctatcgcggcggagccagcccagggaggccaccgcagcctgaacaaccccctgctcaggcaaaaggacccgcccacggcctgcacgctagccacgtgctccaaccacagctgccccctcccctccagcccagagctgttccccccgctgctcccagacgttgtgaggccgcccccgccacgccaggcgtgccagccggggggagtgctccagcctgtccattgctcctcgcagataagtctcctttggggttgaaagggaaagaacctgttgtttacccatggatgaaaaaaattcacgtgagtgcggtcaaccccagttataacggcggcgaacctaagagatctagaaccgcatacacacgccagcaggttctggagctcgaaaaggaatttcactttaaccggtacctcaccagacggagaagaatcgaaatcgctcacacgctatgtcttagcgagcggcaggtaaagatctggtttcaaaatcgcagaatgaaatggaaaaaagatcataagcttccaaatacaaaaatgagatctagcaattccgcctccgcctcagctgggcccccaggcaaggcccaaacccaatccccccacctccatccccacccccaccctagcaccagcacccctgtgccctcttccatctag

SEQ ID NO: 190877 - DNA, 963 bp, synthetic construct
  misc_feature 1..963: note = Description of Artificial Sequence: Synthetic coding sequence
  source 1..963: mol_type = other DNA
atgaccatgagcagcttcctgatcaacagcaactacatcgagcccaaattcccacctttcgaggaatatgctcagcatagcggcagcgggggagccgatggcggccctggcggcggtcccggttatcagcagccacccgcccccccaacacagcacctaccccttcagcagccacaattgcctcacgctggcgggggtagagagccaactgcttcttactacgcccccagaactgccagggaacctgcatatccagcagcggccctgtatcctgctcacggtgctgcagacactgcatacccttacggttatcgaggcggtgcgagtcccggacgcccacctcagcccgaacagcccccagcacaggctaaaggccctgcccatgggctccatgcttcccatgtgctgcagccacagctgcccccacctctccagccacgagcagttccgcctgcagctcctagacgatgtgaggcagcaccagcgaccccaggggttccggccggagggagcgctcccgcatgcccacttcttctcgccgacaaatccccactgggactgaaaggtaaggagcccgtcgtatacccatggatgaaaaagattcatgtgagcgcagtaaacccaagctataacggtggcgagcccaaacgtagcaggaccgcatacacacggcagcaagtccttgagctggaaaaagaatttcattttaaccgctacttaacaaggcggcgtcgaatcgagatagcccacaccctgtgtctgtctgaaagacaagtcaagatttggtttcagaatcgtaggatgaagtggaaaaaagatcacaagttgcccaataccaaaatgcgctcaagtaattccgcatctgctagtgctggccccccaggcaaagctcagacacaatcccctcacctgcatccacaccctcacccttctactagcacacccgttccttcctcgatctag

SEQ ID NO: 190878 - DNA, 1140 bp, synthetic construct
  misc_feature 1..1140: note = Description of Artificial Sequence: Synthetic coding sequence
  source 1..1140: mol_type = other DNA
atgctgaagcggtgcggccggcggctgctgctggccctggccggcgcactcctcgcctgtttgttagtgctgactgccgaccctcctccacctccccttcctgcagaaagggggcgtagagctctgaggtccctcgccgggcccgctggggcagcacccgctcccggactaggagcagccgcagccgctcctggcgccttggtgcgagacgtgcatagtttatctgaatacttcagtctgctgacccgggcgcggcgggacgccggccctcctcccggcgcagctcctaggcctgccgacggtcatccacgcccacttgctgagcccctggccccacgggacgttttcattgccgttaagaccacaaagaaattccatagagctcgtttggatctgctcctggaaacttggatctcacgtcacaaagagatgacctttatttttaccgatggtgaagacgaggcactcgccagacacacgggtaacgtcgtaattacaaattgcagcgctgcacatagccgacaggctcttagctgcaagatggccgtcgaatatgatcgttttatagaatcgggaaggaagtggttctgccacgtagacgacgacaactacgtgaacttaagagcattactgaggctgctagcctcatacccacatacacgcgatgtgtatgtgggaaaaccatctctcgaccggcccatacaggccatggaaagagtgtcggaaaacaaggtgagaccagtccatttttggttcgcaacgggtggtgctggcttctgtatcagcagagggctggcgttgaagatgtctccatgggctagcggaggacattttatgaatacagctgaaagaatccgcttgcccgacgattgcactattgggtacatcgtggaagccctacttggggtgcctctcatcagatctggactgtttcattcgcacctggagaatctgcagcaagtgcccacatccgagttacatgagcaagttacactgagttacggaatgttcgagaataagagaaatgccgtgcacgtaaaagggccttttagcgttgaagctgatccgtcccggttccgttccattcattgtcacctgtatccggacacaccgtggtgcccccggaccgccatcttctag

SEQ ID NO: 190879 - DNA, 813 bp, synthetic construct
  misc_feature 1..813: note = Description of Artificial Sequence: Synthetic coding sequence
  source 1..813: mol_type = other DNA
atgagcagctacttcgtgaacagcttctgcggccggtaccccaacgggcccgactaccagctgcataattacggagatcactcatccgtgtctgagcagttccgggactcagccagtatgcatagcggccgttacggatatggttacaacgggatggacctgtcggtgggtcggtcaggctcgggacacttcgggtcaggagagcgcgccagatcctacgctgcatctgccagcgctgccccagcagaaccccgttattcacagcccgcaactagtacccattctccacagcctgatccactgccctgtagcgccgtcgctcctagtcccgggtctgattcccaccacggcgggaaaaactccctgtcaaattcctccggcgcatccgcggatgccggcagcactcacatttcttcccgagaaggcgtcggaacagcatccggcgcagaggaggacgcgcctgccagttctgaacaggcctccgcccagtctgagccgtctcctgcgccaccagcccaacctcagatatacccttggatgcgcaaactgcatattagccacgataatatcggagggcctgagggcaagcgggctcggacagcttatactcggtaccagactttagaattggaaaaagaatttcacttcaatagatatctgacgcggcgcagacgtatcgaaatagctcacgctttgtgcctgtcagagcggcaaattaagatctggttccagaaccgccgcatgaaatggaagaaagacaacaagttaaagagtatgagcatggccgccgccgggggggcctttaggccctag

SEQ ID NO: 190880 - DNA, 693 bp, synthetic construct
  misc_feature 1..693: note = Description of Artificial Sequence: Synthetic coding sequence
  source 1..693: mol_type = other DNA
atgagcagcagctactacgtgaacgccctgttcagcaagtacaccgcaggagcttcactttttcaaaacgcagagccaacaagttgttcttttgcacctaatagccagcgaagtggatatggggccggagcaggtgccttcgccagtacagtgcctggattatacaacgtgaactcccctctctatcagagccctttcgcctctggctatggcctgggagccgacgcatatggaaacctgccctgcgcgagttacgatcaaaacattcctgggctttgttctgatctggctaagggtgcctgcgacaaaactgacgaaggcgcattacacggagccgccgaggctaacttccggatctacccatggatgagaagcagtggccccgatcggaagcggggcaggcagacttacactcgatatcagactcttgagttggagaaagaatttcatttcaatcggtacctgactaggcgccggaggattgaaattgcccatgcactctgcttgaccgagaggcagattaagatttggttccagaatcgcagaatgaagtggaagaaggagcataaagacgagggcccaactgccgctgcggcaccagagggcgctgtgccctctgcagcagccaccgccgccgccgataaggccgatgaagaagacgatgatgaggaggaggaagatgaagaggagtag

SEQ ID NO: 190881 - DNA, 93 bp, synthetic construct
  misc_feature 1..93: note = Description of Artificial Sequence: Synthetic coding sequence
  source 1..93: mol_type = other DNA
atgagcagcagctactacgtgaacgccctgttcagcaagtacaccgccggcgcctcattatttcaaaatgctgagcctacctcctgcagctag

SEQ ID NO: 190882 - DNA, 792 bp, synthetic construct
  misc_feature 1..792: note = Description of Artificial Sequence: Synthetic coding sequence
  source 1..792: mol_type = other DNA
caccactggggcggcaactactacgtggacagcttcctgctgggcgcagatgccgctgatgagctttctgtgggcatgaggagaggaccttggccccccaggcaggccgcaacattagcagagcacccggacttcagtccatgctctttccagagtaaagctaccgtatttggggcctcctggaacccagtccatagagcgccaacgctgtatcccgtttaccaccaccatcatcaccatccttatgtgcacccccaagccccggtggcggccgcagcccctgacggccgttacatgagatcttggcttgaacctacccccggtgcattgtccttcgcaggcctcccatcctctaggccatacgggattaagccagagcccctgtcagctcggcggggagactgccccactttggacactcatacgctctccctaaccgattacgcctgcggatccccacccgtagaccgcgagaaacaaccctccgaaggagcgttctccgaaaacaatgctgaaaatgagtctgggggcgacaagccccccattgaccccaacaatccagcagcgaattggcttcatgccaggtccacccgaaagaagaggtgtccatacactaaacatcagacattggaactcgagaaggaatttcttttcaacatgtacctgacgagagacaggcgatacgaggtcgcaaggcttctgaacctgaccgaaaggcaggtcaagatttggttccagaaccgaaggatgaaaatgaaaaaaattaataaggatcgcgccaaggacgagtag

SEQ ID NO: 190883 - DNA, 819 bp, synthetic construct
  misc_feature 1..819: note = Description of Artificial Sequence: Synthetic coding sequence
  source 1..819: mol_type = other DNA
atggccaccaccggcgccctgggcaactactacgtggacagcttcctactgggagctgatgccgccgatgaactgtctgtgggacgctacgcccctggaacgctggggcaaccaccacgacaggcagccaccctggcagagcatcccgacttctcaccctgctccttccaatcaaaggccactgttttcggggcctcctggaatcctgtacatgccgctggcgctaacgctgttcctgctgcggtctaccatcaccatcatcatcatccatacgtgcacccccaggcacctgttgctgcagcggctccagacggaagatacatgagaagctggttggagccaacaccgggagcactatcctttgcagggctgccatccagcagaccctatggaataaagcccgaacccttatccgcccggcgcggagactgtccaaccctcgatacccataccctttcactgaccgattacgcctgtggaagcccacctgtcgaccgggaaaagcagcctagcgagggtgctttctctgagaataatgccgagaatgagtcagggggcgataagcctcctatagatcctaataacccggccgcaaactggctgcacgccaggtcgactaggaagaaacggtgtccctacacaaaacatcagactcttgaactggagaaagagtttctgtttaacatgtatctgacccgcgacaggagatacgaggtcgcgagactgttgaaccttacagagagacaggtcaaaatttggttccagaatcgacgcatgaagatgaagaagattaataaagatcgggccaaggacgagtag

SEQ ID NO: 190884 - DNA, 591 bp, synthetic construct
  misc_feature 1..591: note = Description of Artificial Sequence: Synthetic coding sequence
  source 1..591: mol_type = other DNA
atggccggcttcagcccctggcggcggcggcagcggcggcggcggcgaaggcgacgcgccaggcagtcgcgcgcagctccggaactcgtaggggatctgggcagctttttactcctcggaagcacctttcttagcacagcaaggcactgtttcattacctccgttgagattgtgagtaggtacctttgtgcacgcgggtcaggtcgagctggacatcacggacccgggcgcgcccggccagccgtggccacgagcgcttttccagctcaggagcccagagtctttctgagaagtgccctgccagccggccgcctctcacctagcactacacatctgcacctcgtgaccgctgataatccagcagccaactggctgcatgctcggagcacccgcaagaagcgttgcccatacaccaagcatcagacgctggagctggagaaggagttcctgttcaatatgtatttaactcgtgacagaaggtatgaggttgcacgtttgctaaaccttactgagcggcaggtaaagatatggtttcagaatcgaagaatgaagatgaaaaagatcaataaggatagggctaaggatgaatag

SEQ ID NO: 190885 - DNA, 906 bp, synthetic construct
  misc_feature 1..906: note = Description of Artificial Sequence: Synthetic coding sequence
  source 1..906: mol_type = other DNA
atggactacaaccggatgaacagcttcctggagtaccccctgtgcaaccgggggcccagcgcgtacagtgctcattcagcccctacaagttttccaccatcttcagcccaagccgtggactcttacgcctccgaaggccggtacggcggggggctgagctcgccggcattccagcagaactccggctatcccgcgcagcagccacccagcacactcggcgtcccttttccatcttctgctccttcaggctacgctcctgccgcctgctcaccctcgtacggaccctcacaatactacccgctcggtcagagtgagggcgacggcggttatttccatcccagctcctatggagcacagcttggcggcctgagcgatggttacggcgctgggggggcaggtccgggcccatatccaccccagcatcccccttatggaaacgaacagacagcaagctttgctccagcctacgctgatctgctgtcagaagacaaggagacgccttgcccttctgaaccaaatactcctacagcccggaccttcgattggatgaaggtgaagcgtaacccccctaaaacggctaaggtgagcgaacctggactgggaagcccatcaggcctcagaaccaactttactacccgccagctgacagagctcgagaaggaattccacttcaataaatacttgtcacgagctcgaagggttgaaattgccgccactctggaactgaatgaaactcaagtgaaaatttggttccagaacagacgaatgaagcaaaagaaaagggaacgcgaagaaggacgagtccctccagccccaccaggttgtcccaaggaagcggccggggacgcatctgaccagtcaacgtgcacaagcccagaagcctccccttcaagcgttacttcttag

SEQ ID NO: 190886 - DNA, 855 bp, synthetic construct
  misc_feature 1..855: note = Description of Artificial Sequence: Synthetic coding sequence
  source 1..855: mol_type = other DNA
atggagcccggcaactacgccaccctggacggcgccaaggacatcgagggattactcggggcgggcgggggcaggaaccttgtggctcatagccctctgacctcccacccggccgcacccactctgatgccggccgtgaactacgctccactggatctacccgggtcggccgagccaccaaaacagtgccacccgtgtcctggcgtgcctcagggcaccagccccgcccctgtgccatacggctactttggagggggctattattcatgcagggtgagccgatcctcgctcaaaccttgcgctcaggcagctactctggccgcctatcctgcggaaacacctacggcaggggaggagtatccttcgcgacctactgagttcgcattctaccccggctaccccgggacgtatcagcctatggcctcttaccttgatgtcagcgtagtccagactctgggagccccaggcgaacctaggcatgatagcctgctgcccgtcgattcataccagtcctgggctctggccggtggctggaattctcaaatgtgctgccagggcgagcagaatcctcctggacctttttggaaggccgcattcgccgattcgtccggccagcatccgcccgatgcctgcgccttccgaaggggcagaaagaaacgtataccctactccaaagggcagctcagggaacttgagagagaatatgctgctaacaagttcattacaaaagacaagagacgtaaaatttctgcggcaacctcgctcagcgaacgccagataacaatctggttccagaatcgcagagtgaaagagaagaaagtgttagccaaagtgaaaaacagtgctacaccttag

SEQ ID NO: 190887 - DNA, 531 bp, synthetic construct
  misc_feature 1..531: note = Description of Artificial Sequence: Synthetic coding sequence
  source 1..531: mol_type = other DNA
ccccggtgcccccccggcccccgggtgcccctggacgagcgggaggagattcggcaggagactcagcccattcggcacgtttccttctctggcagactgcggaggtctggcggagtgggatcacccgcagacggacttggccgcaggctggtggccgcgggacaggcagcccatggtctgcatcaacacgctgctgccggcactggcgagtttcatttcaacaaatacctgtgtcgtcctcggcgcgtggaaattgccgcgctgctcgacctgactgagcgacaagtgaaagtttggtttcagaataggaggatgaagcacaagcggcagactcaacatcgtgagcctccggacggggagccagcctgccccggggcactggaggatatctgtgacccagccgaagagcccgcagctagtcctgggggccctcttgcagggggcgtgggtagcttgctctcccctgcgggcggaggggcaggtggcctcaaaagagggcctcccgcatttagccggagcttaaggggttag

SEQ ID NO: 190888 - DNA, 1071 bp, synthetic construct
  misc_feature 1..1071: note = Description of Artificial Sequence: Synthetic coding sequence
  source 1..1071: mol_type = other DNA
atgaacttcgagttcgagcgggagatcggcttcatcaacagccagccaagccttgctgagtgcctgacatcatttccagcagtgctggagacattccagacctcgagtattaaggagagcacattgataccaccccccccgccatttgagcagacctttccaagcctgcagcccggtgccagtaccctgcagcggcccagatcgcagaaaagggccgaagacggacccgcactgccgccccctccaccgccacctctgccagcagcccctccagccccagaatttccttggatgaaagaaaagaaatccgctaagaagccctcccagtccgccacctcaccctctcccgctgcaagcgctgtgcctgctagcggagtgggcagtcccgccgatggcctgggtctgcctgaggccgggggaggaggtgctcgccgactgaggacagcgtacaccaatacccagctgctggagctggagaaggaattccactttaacaaatatttgtgccggccgcgacgcgtggagatcgccgcactactagacctcaccgaaagacaagtgaaagtgtggtttcaaaacagacgcatgaagcataaacgacagacccagcatcgggagccaccagacggggagcccgcatgtcctggtgccttggaggacatttgtgatccagccgaggaacccgccgcttcccctggaggtccctcggccagtagagctgcatgggaggcgtgttgccatccacccgaagtggttcctggcgctcttagcgcagatcctcgccccctagcagtccgattggaaggagctggggcatcttcgcctggatgcgcactccgcggagccgggggcctcgaacccgggccactgccagaagatgtcttcagtgggagacaagattctcccttcctgcccgacttgaacttttttgccgccgattcttgcctccagttatcaggcggtttgtctccttctctgcaaggatccctggactctcccgtgcccttttctgaggaggaattggacttcttcacgtcaactctctgcgcgattgaccttcagttcccctag

SEQ ID NO: 190889 - DNA, 1296 bp, synthetic construct
  misc_feature 1..1296: note = Description of Artificial Sequence: Synthetic coding sequence
  source 1..1296: mol_type = other DNA
atgcagaaggccacctactacgacaacgccgccgccgccctgttcggcggttattcgtcctacccggggtctaacggtttcggatttgatgttccaccccaaccacctttccaggctgctacccacctcgaaggcgattaccagcgtagcgcctgttctctgcagtcccttgggaacgcagcacctcatgccaaaagcaaggagctgaacggatcctgtatgcgccctggactagcacccgagcccctgtccgctcctcccgggagcccccctccatccgccgctcccacatctgccacaagcaattccagtaatgggggaggcccctcaaagtctggaccccctaagtgtggccctggaactaactctaccctgactaagcagatctttccttggatgaaggaaagtaggcagacaagcaagcttaagaataactcccccgggaccgcggagggttgtgggggaggcggaggtggcggaggcggaggcgggtctggcggttctggcggcgggggaggagggggggggggcggggacaagtctcccccgggaagcgcggcgagtaaacgtgcccgtacagcttatacctcggcgcagttggtagagctggagaaggagttccactttaatcgctacctctgtagacctagaagggtcgaaatggctaatctgctgaacttgtccgaaaggcagattaaaatctggtttcaaaatcgcaggatgaagtataaaaaggatcagaaagcaaaaggcctggcatcatcctccggcggcccttctcccgccggctcacctcctcagcccatgcagagtaccgctggctttatgaatgcgctccacagtatgacaccaagctacgaaagtccttcaccaccagcttttggcaaggctcatcaaaatgcctacgccctgccaagtaactaccagccgccactcaagggatgcggtgcaccacagaagtatcctcccactccagcacccgaatatgaaccgcatgttttacaagccaacggaggtgcatatggtacccccaccatgcaagggtcccccgtgtacgtgggaggaggtggttacgccgatcctctgcccccacccgccgggcccagtctttacggactaaaccacctgtctcaccacccttcggggaatctggactataacggcgccccccctatggccccatcccagcaccacgggccatgtgagccccaccctacatatactgatctctccagccatcatgcaccccctcctcaggggagaatccaggaagcccctaaactgacgcacttgtag

SEQ ID NO: 190890 - DNA, 900 bp, synthetic construct
  misc_feature 1..900: note = Description of Artificial Sequence: Synthetic coding sequence
  source 1..900: mol_type = other DNA
atgaaggagagccggcagaccagcaagctgaagaacaacagccccgggacagctgagggctgcggcggtggcggaggtggtggtggcgggggaggctcaggcggctcaggcggcgggggcgggggcgggggcggcggcgataagagtcctcccggttctgctgccagcaagcgcgccagaacagcttacaccagcgctcagttggtggaactcgagaaggagttccactttaatcgttacctctgtaggccgagacgcgtggagatggctaacttgctgaatctctctgagaggcagataaagatttggttccagaatcggagaatgaagtataagaaggaccagaaggctaaggggcttgcctcttcaagcggcggtcctagcccagccggttcgccaccccagcccatgcaatccacagccggatttatgaacgccctgcattccatgacaccttcttacgagtcaccctccccaccagcctttgggaaggcacaccagaatgcctatgctctgcccagcaattaccagccccccttaaaaggctgtggagctccccagaaataccctccaactcccgctcccgagtatgagccacacgtgttgcaggccaacggcggagcttacggcactcccactatgcagggctcaccggtgtatgttgggggtggcggctatgccgatccactgccaccgccggcgggtcctagcctttatgggctgaaccatctctcccatcatccctctggtaatttggactacaatggcgcaccccctatggcgccaagtcaacaccacggaccttgtgaaccccaccccacatacactgatctgtcctctcaccatgctccgcctccccaggggcgcatacaggaggcaccgaagctcacacacctatag

SEQ ID NO: 190891 - DNA, 1296 bp, synthetic construct
  misc_feature 1..1296: note = Description of Artificial Sequence: Synthetic coding sequence
  source 1..1296: mol_type = other DNA
atgcagaaggccacctactacgacaacgccgccgccgccctgttcggaggctactcctcataccctggctctaatggctttggattcgacgttcctccccaacccccattccaggctgccactcacctggagggggattaccagcgctccgcctgttcgctacagagccttggcaatgccgctcctcacgccaagtcaaaagagctcaacggaagttgtatgcgtcccgggttggcacctgaaccactgtccgcccctcccggtagtccgcccccctcggccgcccccacctctgccacctctaactcatcgaacgggggcggaccaagcaaaagtggcccgccaaagtgcggccccggcactaattccactttgaccaagcagattttcccatggatgaaggaaagccgccaaacaagcaagcttaagaataactcacccggcaccgctgaaggttgtggagggggaggaggcggaggcggcggcggcggatccgggggttcaggcgggggaggcggcggggggggcggaggcgataagtcccctcctggtagtgccgccagcaagcgagcccggacggcttacacctcagcgcagttagtggagctggagaaggaattccatttcaacagatacttgtgcaggccccggcgagtggagatggcaaacctcctgaatctgtctgagagacagatcaagatttggttccagaacagaaggatgaagtataagaaggaccagaaggcaaagggcctggcgtcctccagcggtggtcccagccctgctggaagtcctccacagcccatgcaaagtacagccgggttcatgaacgcgctccactccatgacaccgagttatgaatcgcccagcccaccagcattcggcaaggcccatcagaacgcatacgccctgcctagcaactatcaacctcccctcaaggggtgtggcgctccccagaaataccctccaacccctgccccagagtacgagcctcacgtgctgcaggctaacgggggagcttacggtactcccactatgcagggatctcctgtgtatgttggaggggggggctacgccgacccgcttccacctccagcaggaccttccctctatgggctgaaccacctctcccatcacccaagcggcaacctggactataacggcgctcctccaatggccccttctcagcaccatggaccctgcgaaccacatccgacttacacagatctgagctctcatcacgcgccgccccctcaggggaggattcaggaagcccctaagctcacacatctctag

SEQ ID NO: 190892 - DNA, 1077 bp, synthetic construct
  misc_feature 1..1077: note = Description of Artificial Sequence: Synthetic coding sequence
  source 1..1077: mol_type = other DNA
atgcggcccggcctggcccccgagcccctgagcgccccccccggctctccccccccttcggcagcccctactagtgcaacgtcaaactcctctaacggcggaggtccttcaaagtcaggaccgcctaagtgcgggccagggaccaacagtactctgactaagcagatatttccttggatgaaggagtcccgacagaccagcaagctgaagaacaacagccctggaactgccgaaggatgcggcggaggaggcgggggcggggggggaggcgggagcgggggttccggaggcggcggcggaggggggggggggggcgataagtctcctcccggatcagccgcctccaagcgagcaaggacagcttacaccagcgcccagcttgtcgagcttgagaaggaattccacttcaaccgttacttgtgtcggccaagaagggttgaaatggccaacctgttgaacctgtctgaacgccagatcaaaatatggttccagaacaggcggatgaaatacaagaaagatcagaaagctaagggcctggcttcctcttctggcgggccatcaccagccgggagcccaccgcagcctatgcaatctactgcaggatttatgaacgctcttcatagtatgactccaagctacgagagcccctctcccccagcttttgggaaggcccaccagaatgcctatgctctgccctcaaattaccagccacccttaaagggttgtggagctcctcagaagtaccctcccacaccagcccccgaatatgaaccgcatgtccttcaggccaacggcggagcttacggtacgccaactatgcaagggtcacccgtctatgtggggggaggcggctacgctgatccactccccccacctgcaggcccctctctgtatggtctgaaccacttaagtcatcacccatcgggtaacctagattataacggtgctcctcctatggcgccttcccagcaccatggtccgtgcgagcctcaccctacctacacggacctcagttcccatcacgccccaccccctcagggccgcatacaagaggcgcccaaactcacccacttgtag

SEQ ID NO: 190893 - DNA, 1296 bp, synthetic construct
  misc_feature 1..1296: note = Description of Artificial Sequence: Synthetic coding sequence
  source 1..1296: mol_type = other DNA
atgcagaaggccacctactacgacaacgccgccgccgccctgttcggcggttactctagctacccaggttctaatggattcgggttcgatgttccaccccagcccccctttcaagcagctacacatttagaaggagattaccaacggtccgcttgctctctgcagtcgctggggaatgccgccccacatgcgaagtcgaaggagctgaatggcagttgcatgaggcccgggttggccccagagccactgagtgcgcctcccggtagtcctccaccttctgcagctccgacctccgccaccagtaacagctctaatggcggagggccttccaaatcaggaccgccgaagtgtggaccagggaccaactctactctgacaaagcaaatttttccgtggatgaaagagtcaagacaaacgtccaagttaaaaaataattcaccgggcacagcagagggatgtggtggggggggcgggggtggcgggggtggcggaagcgggggtagcgggggcggaggcggcggcggaggtggtggcgacaaatctccccctggcagcgcagctagcaagcgggcccgaactgcatacacttcagcccagctggtcgaactggagaaggaattccacttcaatagatacctttgccgacctcgccgcgtggaaatggcaaacttattgaatctatctgaacgtcagattaagatatggttccagaatcgtcgtatgaaatacaagaaggaccagaaggcgaaagggctggcttcgtccagcggtgggccctctccggccggtagtcctcctcagcctatgcagagtactgcgggtttcatgaacgccctgcatagcatgaccccatcgtacgaaagtcctagcccgcctgccttcggcaaggcccatcaaaatgcgtacgccctaccatcgaattaccagccccctcttaaagggtgcggggccccccaaaagtaccctcccaccccagctcccgagtacgagccacacgttctacaggccaacggcggagcgtacggaacacccaccatgcagggaagtccagtgtatgttggagggggcggatacgcagacccactgcctccccctgctggaccttcactgtacgggctgaaccatctttctcatcatccttcgggtaacttggactataacggcgcccctcctatggcaccatctcagcaccatggaccttgcgagccgcacccgacttacaccgacctgagtagtcaccacgccccacccccccaggggcgcatacaggaggcaccgaaactgacccacctgtag

SEQ ID NO: 190894 - DNA, 900 bp, synthetic construct
  misc_feature 1..900: note = Description of Artificial Sequence: Synthetic coding sequence
  source 1..900: mol_type = other DNA
atgaaggagagccggcagaccagcaagctgaagaacaacagccccggcacagccgagggctgcggaggcggaggcgggggcggggggggtgggggtagtggcggaagcggcgggggcggaggcgggggcggcgggggggacaagtcccccccaggctcagccgccagcaaaagagctcgaactgcttatacctctgcacagctggtcgagctcgaaaaggagttccactttaatcggtatctatgccgcccaagacgggttgagatggccaacctgttgaatctatctgagaggcagattaagatatggttccagaacaggcggatgaagtacaagaaagatcagaaagccaagggtcttgccagctcatcgggggggcccagcccagctgggtctccaccccagccaatgcaatctacggctggcttcatgaacgccctgcactctatgacaccatcctatgagagcccttcacccccagcctttgggaaggcacaccagaacgcatacgccctcccatctaactatcagcctccgttgaaaggatgcggtgcaccccagaaatatccaccaacgccggcccccgagtacgagcctcacgtattgcaggcaaacggtggtgcctatggcacccccacgatgcaagggagcccagtttatgtgggcggcggcggctatgccgacccccttcctccacctgccggcccttcactgtacggactcaaccacctgagccaccatccttctggcaatctcgattataatggggccccacctatggcaccaagtcagcaccacgggccttgcgagccacatcccacgtataccgacttatcatctcaccatgcgcctccaccccagggcagaatacaagaggccccaaagctaacccacctctag

SEQ ID NO: 190895 - DNA, 1077 bp, synthetic construct
  misc_feature 1..1077: note = Description of Artificial Sequence: Synthetic coding sequence
  source 1..1077: mol_type = other DNA
atgcggcccggcctggcccccgagcccctgagcgccccccccggcagtcctccgccaagcgccgcccctacgagcgccactagtaactcttccaacggcggtggccccagtaaatctggaccacccaaatgtggacctgggactaacagcacattaactaaacagatattcccctggatgaaggaatctaggcagacaagtaagctaaaaaataattcccctggcacggccgaaggatgtggcggaggcggcggagggggtggcggcgggggatctggaggttctgggggcggcggaggcggcgggggaggcggcgacaaatccccccccggaagcgcggcgtccaagcgagctagaacagcttacacatccgcccagttggttgaactcgagaaggagttccattttaaccgatacctgtgccgacccagacgagtcgagatggccaatctgctcaacctgagtgaaagacaaatcaaaatctggttccagaaccgccgcatgaagtacaagaaggatcaaaaagctaaaggactggcatccagctccggcgggccctcccctgcaggttcccccccacagcccatgcagtctaccgccggctttatgaacgcactgcactccatgactccatcatacgagtccccgagcccccccgccttcgggaaggcccatcagaacgcctacgctctcccttctaattatcaaccacctcttaaagggtgcggggcccctcaaaagtatccaccaacacccgccccagagtacgaaccacatgttctacaggccaacggcggcgcatacgggaccccaactatgcagggaagcccggtgtacgtgggcggcgggggttacgcggaccccctccccccacctgccggtccgtctctttatggtctcaatcatctttctcatcatccttctggaaacttagactacaacggagctcctcctatggccccatcacagcaccacgggccgtgtgaaccacatccgacctacaccgatttaagctcccaccacgctcccccaccacagggaagaatccaggaagcccctaaacttacccacctctag

SEQ ID NO: 190896 - DNA, 1296 bp, synthetic construct
  misc_feature 1..1296: note = Description of Artificial Sequence: Synthetic coding sequence
  source 1..1296: mol_type = other DNA
atgcagaaggccacctactacgacaacgccgccgccgccctgttcggcgggtactcttcataccccggctctaatggatttggtttcgatgtgccaccccaaccaccttttcaagccgcaactcacctggaaggagactatcagcgcagcgcctgctcgctgcaatcgctcggaaacgccgctcctcatgccaagtccaaagaacttaacggatcctgtatgcggcctggcctggcacctgagcctttaagcgccccaccgggcagtccccccccatccgctgcccccacaagcgccacgagcaacagttctaacggtgggggaccttcaaagtctggtccgcctaaatgcggtccgggcacaaattcaacacttacaaaacaaatcttcccatggatgaaggaatcacgacaaacgtctaagctaaagaataacagcccaggaaccgccgaagggtgcggtggcggcggcggcggaggaggtggagggggcagtggcggcagtggaggcggcggagggggtgggggcgggggagacaagtctccccccgggtctgccgcgtctaagcgcgcccgcactgcttacaccagtgcgcaactggtggaactggagaaagaatttcactttaacagatacctctgcagaccacggagggtggaaatggccaatctcctcaatctttcggaacgccagattaagatttggttccagaatcgtcggatgaagtacaaaaaggaccaaaaggccaaaggcctcgctagctcaagcggtggcccctcaccagctgggtccccaccccaacctatgcagagtacagccggattcatgaacgccctccacagcatgacaccttcctacgagagtccctcgccccctgcattcgggaaggcccatcagaatgcctatgcgctcccatcaaattaccagccacctctgaaaggatgcggcgccccgcaaaaatacccccctactcccgcccctgagtacgagcctcacgtgcttcaagcaaacggcggtgcgtacggaactcccaccatgcagggatctccggtttatgtgggaggcggagggtacgccgatcctctgcctcccccggcaggaccctccctctacggcctgaatcacttgagccaccacccatccggaaatctggactataatggagccccccctatggccccctctcagcaccacggcccttgtgaaccacatccaacctacaccgacttaagcagtcaccacgcgccacctccgcagggacggatacaagaggcgccaaaacttacccacctctag

SEQ ID NO: 190897 - DNA, 756 bp, synthetic construct
  misc_feature 1..756: note = Description of Artificial Sequence: Synthetic coding sequence
  source 1..756: mol_type = other DNA
atggccatgagcagcttcctgatcaacagcaactacgtggaccccaagttcccaccatgtgaagaatatagccagagcgactaccttcctagtgaccacagcccaggctactacgctggagggcagaggagagagtcgtccttccaacccgaggcggggtttgggagacgcgctgcctgtacggtccaacgttacgctgcctgcagagatcccggacccccccctcctcctcctcctccgccaccccccccaccaccacccggtcttagtcccagggctccagctccgcctccggccggagcactcttacctgaaccagggcagaggtgtgaggccgtgtcaagctcaccccccccacctccttgtgctcagaaccccttacacccctccccatctcattcggcttgtaaggagccagttgtgtatccttggatgaggaaggtgcacgtatctacagtgaatccaaactatgccggcggggagcccaagcgttcaagaaccgcttacactcgacagcaggtcctcgagcttgagaaagaattccactacaacaggtatctgacgaggcgccgcagagtggagatagcccacgcattgtgccttagtgagaggcagattaaaatctggtttcagaaccgtcgaatgaagtggaagaaggatcataaactgcccaacacaaagatacggtcagggggcgctgcgggaagcgccgggggcccgcctggaaggcccaatggcggccctcgggcactatag

SEQ ID NO: 190898 - DNA, 810 bp, synthetic construct
  misc_feature 1..810: note = Description of Artificial Sequence: Synthetic coding sequence
  source 1..810: mol_type = other DNA
atgagcagctacttcgtgaacagcttcagcggccggtaccccaacggccctgactaccagctcctgaattacggaagcggctccagcctctcgggctcctaccgtgaccctgcagccatgcacaccggctcgtatggctacaactataatggaatggaccttagcgtaaatcgatctagcgcatccagttctcactttggcgcagtgggcgagtcaagtagagcattccccgcccccgcacaagagcctagattccggcaggccgcctcatcttgtagcctgagcagtccggaatctctgccttgcactaacggtgactcacatggcgctaaaccgtcagcgagtagcccgtctgaccaggccacatccgcttcaagttctgccaactttactgagatcgacgaggcctccgccagctcagagcccgaagaggccgcttcgcagctgagctcacctagtctggcgcgcgcccaacccgagcctatggccacctccacagctgctcccgagggccagactcctcaaatctttccctggatgcgaaaattacatattagccacgatatgacagggcctgatggaaaacgcgctaggacagcgtacacgcgttatcagacactagagctagagaaggagttccacttcaaccgctacctcactcgcaggaggcggattgaaattgcgcacgcactctgtctgtctgaacggcagataaagatctggttccaaaataggagaatgaagtggaagaaagataataaactaaaatcgatgagcctggcgactgcaggctccgcctttcagccgtag

SEQ ID NO: 190899 - DNA, 1179 bp, synthetic construct
  misc_feature 1..1179: note = Description of Artificial Sequence: Synthetic coding sequence
  source 1..1179: mol_type = other DNA
atggccgccctgcggcagccccaggtggccgagctgctggccgaggcacgacgggccttccgagaggagttcggtgctgaacccgagctggcagtgtctgcccccggtcgagttaacctgatcggagagcacactgactacaaccaggggttggtgctccctatggccctggagcttatgacagtattggtcggaagtccccgcaaggacggcttggtgtcactactgacaacctccgaaggagcggatgagccgcagagactgcagtttcccctgcccaccgctcagcgctccctggagccgggcacccccaggtgggctaattacgttaaaggcgtgatccagtactatcctgcagcccctcttccagggttcagcgcagttgttgtaagcagcgtcccactgggcggcgggctgagtagctccgcttcacttgaggttgctacttataccttcctgcagcagttgtgcccagactcaggaacgatcgcagctagggctcaggtgtgccagcaggctgaacattccttcgctggaatgccttgcggcatcatggatcagtttatcagcctgatggggcagaagggccatgctttactgatcgactgccgttcccttgagacatccttggttcccctttcggaccccaagctagccgtgctgatcacaaatagcaatgtccgccatagcctcgccagctccgagtaccccgtgaggagacgacaatgcgaggaggtggctagggccttaggcaaagagtccctgagagaagttcagctggaagagttagaagccgctcgtgacctggtctcgaaagagggcttccgaagggcacgtcacgtagttggcgagatcagacggacggcgcaggccgcagcagcgttgcgccggggcgattatcgagctttcgggaggctcatggttgagagtcaccgcagccttcgggacgactatgaggtgtcctgccctgagcttgatcagttagtagaggcagccttagcagtgccaggcgtgtacggcagtcgtatgaccggaggcggctttggcgggtgcactgtaacgctcttagaagcatccgccgcgccccacgccatgagacacattcaggagcactatgggggaacagccacattctacttgagtcaagctgctgacggtgctaaagtactgtgcctttag

SEQ ID NO: 190900 - DNA, 675 bp, synthetic construct
  misc_feature 1..675: note = Description of Artificial Sequence: Synthetic coding sequence
  source 1..675: mol_type = other DNA
atgagcagctacttcgtgaacagcaccttccccgtgaccctggcctctggccaggagtcatttttgggacagcttcctctttacagttccgggtacgcggatcctctcagacattacccagccccctacggtccaggtccaggccaggacaaggggtttgccacaagctcttattatcctccggccggcggtggatacgggcgagccgccccctgtgattacgggcctgccccagcgttctatcgcgagaaagagtccgcctgcgcactcagtggggctgatgaacaacctccctttcacccagagcctcgaaaaagcgattgtgcccaggataaaagtgtttttggagagacagaggaacagaaatgctctacacccgtgtacccctggatgcagcgaatgaactcttgcaatagttctagttttggccctagtggacggcggggccggcagacttacactcgttatcagactctggagctcgagaaggaattccactacaacaggtacttaacgaggcgcaggcgtattgagattgcgcatgccctttgcctgaccgagcggcagatcaaaatttggtttcagaatcgtcggatgaagtggaaaaaggagagcaagctcctctccgcctcacagcttagtgctgaggaagaagaagaaaagcaggcagaatag

SEQ ID NO: 190901 - DNA, 654 bp, synthetic construct
  misc_feature 1..654: note = Description of Artificial Sequence: Synthetic coding sequence
  source 1..654: mol_type = other DNA
atgagcagcctgtactacgccaacaccctgttcagcaagtaccccgccagctcatccgtatttgccaccggcgccttcccagagcagacatcttgcgctttcgcgagtaatccacaacgcccagggtatggtgcaggaagcggagctagtttcgctgccagcatgcagggcttatacccaggggggggtggaatggctggacaatccgctgccggtgtgtacgcggcaggttatggtctggaaccaagtagcttcaacatgcactgcgccccttttgagcagaacctgtcaggggtgtgcccgggcgacagcgcaaaagctgcaggggccaaggaacaacgcgacagcgacctggctgcagagtccaactttcggatctacccttggatgagaagcagcggaactgaccgaaaacgagggagacagacttacacgaggtaccaaacactggagctggaaaaagaattccattacaatcggtatctcacccggcgacgaagaatagagatcgctcacaccctgtgcctgacggaaagacagatcaagatctggttccagaaccgtcgaatgaagtggaaaaaagagaataaaaccgctggccccggcacaacggggcaggaccgcgcagaagcagaagaagaagaagaggaatag

SEQ ID NO: 190902 - DNA, 87 bp, synthetic construct
  misc_feature 1..87: note = Description of Artificial Sequence: Synthetic coding sequence
  source 1..87: mol_type = other DNA
atgaagtggaagaaggagaacaagaccgccggccccggcaccaccggccaggaccgggccgaagctgaggaggaagaggaagagtag

SEQ ID NO: 190903 - DNA, 732 bp, synthetic construct
  misc_feature 1..732: note = Description of Artificial Sequence: Synthetic coding sequence
  source 1..732: mol_type = other DNA
atgagcagctacttcgtgaacagcctgttcagcaagtacaagaccggcgagtctttgcgacccaattactatgattgtggatttgcgcaggacctgggcggtcggccgacagtagtctacggtccatcgagtggaggaagcttccagcacccctcccaaattcaggagttctatcacggaccctctagcctctccactgccccgtaccagcaaaacccatgcgcggtggcctgccatggagaccccggcaacttctatgggtatgaccccctccaacgtcagagcctgttcggtgcccaagacccagacctagtgcagtacgcggactgcaagctggccgccgccagcggtctgggagaggaagcggaaggctcagaacagagtcctagcccaacgcagctcttcccttggatgcgtccacaggccgccgcaggccgaaggcgcggtcgacagacctacagccggtatcaaactttagagctcgaaaaagagttcttattcaacccctatctcacccgcaagcggcgaatcgaagtcagtcacgctttaggcctcactgaacgccaggtgaagatctggttccagaacagaagaatgaagtggaaaaaggagaacaataaggataaattccctagctccaagtgcgagcaggaagagcttgagaaacagaaattggaaagagcccccgaggctgccgatgaaggggacgcgcagaagggtgacaagaagtag

SEQ ID NO: 190904 - DNA, 753 bp, synthetic construct
  misc_feature 1..753: note = Description of Artificial Sequence: Synthetic coding sequence
  source 1..753: mol_type = other DNA
atgagcatcagcggcaccctgagcagctactacgtggacagcatcattagtcacgagtccgaggatgcaccacctgccaaattcccgtctggacaatacgcctcgtccagacagcctggtcatgctgagcacctggaattccccagttgcagctttcaacctaaggcgccagtgtttggcgccagctgggccccactgagcccccacgctagcgggtccttaccaagcgtctaccacccttacattcagcctcaaggagtacccccagccgagtctcgttatcttagaacttggttggagccagccccacgcggggaggcggctcctgggcaggggcaagcagctgtcaaggcagagccactcctcggcgcacctggcgaactgttaaagcaagggacgcccgagtattcccttgaaacctcagcggggagggaggcagtcttaagcaatcagcggccaggatacggcgataacaagatttgtgaaggctccgaagacaaagagcggcctgaccagaccaatccatccgccaactggctgcacgccaggtcctctcgaaaaaagcgctgcccctatacgaaataccagacactggagctcgagaaagagtttctcttcaacatgtacctgactcgggatagacgacacgaggtggccaggctgctgaaccttagcgaacgccaggtcaagatctggtttcagaaccgaagaatgaagatgaaaaagatgaacaaagaacagggtaaggagtag

SEQ ID NO: 190905 - DNA, 387 bp, synthetic construct
  misc_feature 1..387: note = Description of Artificial Sequence: Synthetic coding sequence
  source 1..387: mol_type = other DNA
atgagcatcagcggcaccctgagcagctactacgtggacagcatcatatcacatgagagtgaagacgcaccaccggctaagttccctagtggacagtatgccagctcccgacagcctggccacgccgaacatctggaatttccttcttgttcgtttcagcctaaagcccccgtctttggagcttcttgggcccctctgtccccgcatgcttcgggatcccttccatcagtgtatcacccctatatccagccgcagggcgtgccacctgccgaatcccgctacctgcggacttggctcgagccggctcctaggggtggcgcggctcagactggtcatgcaagagttcagttcggaaacttcggaggtcagggtggcagggcagtgtag

SEQ ID NO: 190906 - DNA, 1029 bp, synthetic construct
  misc_feature 1..1029: note = Description of Artificial Sequence: Synthetic coding sequence
  source 1..1029: mol_type = other DNA
atgacctgcccccggaacgtgacccccaacagctacgccgagcccctcgctgcacctgggggcggggaacgttattcccggtccgcaggcatgtatatgcagtctggttccgattttaactgcggcgtgatgaggggctgtgggctcgctccctctctgtctaaaagggacgaagggagcagtcccagcctcgctttgaatacatatccatcctatctgagccagctggacagttggggcgatccaaaggcggcatatcggctcgagcaacctgtgggcagacccctctccagttgttcgtaccctccaagcgtgaaggaggagaatgtgtgctgcatgtattctgcagagaagagagcaaaatccggtccagaggccgcgctgtactctcatcctctgccggaaagttgtctgggggaacacgaggtgccggtgcccagttattatagagcgtccccttcctacagtgctctcgacaaaacaccacactgctcgggcgcgaacgactttgaggcccctttcgaacagcgagcttccttgaacccccgtgccgaacacttggaaagcccacagctcggaggaaaggttagcttcccagagacaccaaaatcagactcacaaaccccatcccccaacgaaatcaagacagaacaaagcctggccggcccgaaagggtccccatctgaatccgagaaagagagagcaaaggccgcggatagcagccctgatacatctgataacgaggctaaggaggaaatcaaggcagaaaacaccacagggaactggctgactgctaaaagcggacgaaaaaagagatgtccttacacaaagcatcagaccctggaactggagaaggagttcctctttaacatgtacctcacaagagagcggagactcgaaatttccaagaccatcaacctgactgatcggcaggtcaagatatggttccagaatagaagaatgaagctgaaaaagatgaacagggagaatcgaatcagggagctcacctcaaatttcaacttcacatag

SEQ ID NO: 190907 - DNA, 915 bp, synthetic construct
  misc_feature 1..915: note = Description of Artificial Sequence: Synthetic coding sequence
  source 1..915: mol_type = other DNA
atgttcaacagcgtgaacctgggcaacttctgcagccccagccggaaggaaaggggggcagatttcggagagcgcgggtcttgcgccagcaacctgtatctcccgtcatgcacctattatatgcctgaattcagcacggtttcttcatttctacctcaggcacccagtcgccaaatttcatacccatactccgcgcaggtgcctccagttagggaagtctcttatgggctggaacctagcgggaagtggcaccaccggaatagctattccagctgctatgctgccgccgatgagctgatgcaccgagagtgtttgcccccatccaccgtaacagaaattctcatgaaaaacgagggaagctacgggggacaccaccacccctcggctccacacgctactccagctggattttacagttcggttaataagaatagcgtgttgccccaggccttcgataggttttttgataacgcatactgcggaggaggggaccccccagcagagccaccctgttcgggaaagggtgaagccaaaggcgagccagaagcccctcccgcaagcggattggctagccgggccgaagccggagcggaggctgaagcggaggaggaaaacacaaatccttcgtcttctggcagcgctcattcggtggcgaaggaaccggccaagggggctgcccccaacgccccccggacacgcaaaaagcggtgcccatattccaaattccaaatccgggagcttgagcgggagttttttttcaatgtttacattaataaggaaaaaaggctccagttgagcaggatgctcaaccttacagatcgtcaggttaagatctggtttcagaatcgcagaatgaaagagaagaagttgtccagagaccggctgcagtacttttccgggaatcccctactgtag

SEQ ID NO: 190908 - DNA, 849 bp, synthetic construct
  misc_feature 1..849: note = Description of Artificial Sequence: Synthetic coding sequence
  source 1..849: mol_type = other DNA
atgggcgagcacaacctgctgaaccccggcttcgtgggccccctggtgaacattcacactggagacaccttctacttcccaaactttcgggccagcggagcacagctgcctggactcccctcactttcttacccccgacgcgataacgtctgcagtctgtcctggccaagcgctgagccgtgtaacggatacccccagccataccttggatccccagtgtctctgaatccaccgtttgggagaacatgcgaactggcccgtgtggaagatgggaagggatactatagggaaccatgcgccgagggcggggggggcgggctcaagagggaggaacgtggcagggatccaggagccggccccggcgccgcactgctgcccctggagccctcgggaccaccagcactcggcttcaagtacgattacgccgccggaggaggcggcggtgatggcggtggtggggccggtccaccacacgatccccctagctgccaatcattggaatctgacagtagtagtagcctcctaaacgagggaaataaaggtgccggcgcaggagatcctggatccctggtctcaccccttaatcccgggggggggctttctgcgtccggagccccatggtatcccattaacagtcggagcagaaaaaagcggaaaccttactccaaactgcaactggcggaactcgagggcgaattcctcgtcaatgaatttataacaagacagagacgcagggaactgagcgatagactgaatttgtcagaccagcaagtgaaaatctggtttcaaaatcgtaggatgaaaaagaaacgccttcttttgagggagcaagctctaagtttcttttag

SEQ ID NO: 190909 - DNA, 993 bp, synthetic construct
  misc_feature 1..993: note = Description of Artificial Sequence: Synthetic coding sequence
  source 1..993: mol_type = other DNA
atgaccaccagcctgctgctgcacccccggtggcccgagagcctgatgtacgtatatgaagattccgccgccgagagcggcattggcggtggaggtgggggcggcggaggcggtacaggtggggcgggaggtggctgcagcggcgccagtccaggcaaagcaccgtcgatggacggactggggtcctcttgcccagctagccactgtagggacctgctcccccatcccgtgcttggtcgacccccagcgccattgggagcccctcagggagccgtctacactgacattcccgcccccgaggctgccagacaatgcgctcctccacccgcccctccaaccagtagcagtgcgacactcggctacgggtacccatttggaggttcctactatggatgtcgcttaagccataatgtcaacctacagcagaaaccgtgcgcctatcatcctggagacaaatatcctgaaccttcaggggcactgcccggcgatgatctgtccagccgcgctaaggagttcgccttctatccgtccttcgcttcatcataccaggccatgcccggttatttagacgtcagtgtcgtgcccggcattagcggacaccccgagccccgccatgacgcactgatcccagtggaggggtaccagcactgggccctatcgaacggatgggactctcaagtgtattgctcaaaggaacaaagtcagtcggcacacctgtggaaaagccccttccccgatgttgtgccactccagcctgaggtgtcctcctataggcgaggccgcaagaaaagggtgccctatacaaaagtgcagctcaaggagctcgaaaaagaatacgccgcctcaaaattcattacaaaggaaaagaggcgacgcatctcggcaacaaccaatctgtcagagcgtcaggttactatctggttccagaacaggagagtgaaagaaaaaaaagtcgtgagtaagagcaaagctcctcacctgcattccacgtag

SEQ ID NO: 190910 - DNA, 795 bp, synthetic construct
  misc_feature 1..795: note = Description of Artificial Sequence: Synthetic coding sequence
  source 1..795: mol_type = other DNA
atgatcatgagcagctacctgatggacagcaactacatcgaccccaaattccccccttgcgaagagtactcccagaactcttacatccccgagcattctcctgagtattatggacgcactcgcgaatcgggtttccagcatcatcaccaggaactctaccccccaccaccccctagaccgagttatcctgaacggcagtattcttgtacttcactgcagggacccggcaattctaggggccatggacccgcccaagccggacatcaccatccagagaagagccagtccttgtgcgaacctgctcccctcagcggagcttctgcatcgccgtcccctgcaccgcctgcgtgctcccagcctgcgccagatcacccctccagcgccgcgtcaaaacagcctatcgtctatccttggatgaaaaaaattcacgttagtaccgtaaatcccaattacaacggaggtgagccaaagcgaagccgaaccgcttataccaggcagcaggtgctggagctggagaaggaattccattataacaggtacctgactaggagacggagaattgaaattgctcacagtctttgcttaagtgaacgccagatcaaaatttggttccagaacaggcgcatgaagtggaaaaaggatcataggcttcctaacacaaaagtccggtccgcccccccagctggggcagcaccgtctaccctttcagcagccaccccagggacatcagaagaccacagtcagtcagcgacccctcctgagcagcagcgagcggaagatatcacaagactgtag

SEQ ID NO: 190911 - DNA, 795 bp, synthetic construct
  misc_feature 1..795: note = Description of Artificial Sequence: Synthetic coding sequence
  source 1..795: mol_type = other DNA
atgatcatgagcagctacctgatggacagcaactacatcgaccccaaattcccgccgtgcgaagaatattcgcagaatagttatatcccagagcacagtcccgagtattatggccgcaccagggagtctgggtttcagcatcatcaccaggaactgtatccacctccgcctccccggccctcgtaccctgagcggcagtatagttgtacctctttacagggcccgggcaacagtaggggccacggtcccgcccaggccggccatcaccacccagagaagtcacaatccctctgcgaacctgccccattgtctggagctagtgcctcaccatcgccagctccccctgcgtgctctcaaccagcccctgatcacccaagctccgccgcctctaagcagcccattgtgtacccttggatgaagaagattcatgtctccaccgtgaacccaaactacaacggcggcgagcctaagagaagtcgcaccgcatatacacggcagcaggtcctggagttagaaaaggagttccactacaaccggtatctgacaagacggaggcggatcgagattgcgcactccctgtgcctttcggaacggcaaattaaaatttggttccagaaccgtagaatgaaatggaagaaggaccacaggcttccaaatacaaaagtgcgaagtgctccgccagccggtgctgcaccatcgacactttctgctgccactcctgggaccagcgaggaccactctcagagcgcaacaccacccgagcagcagcgagctgaggacattaccagactttag

SEQ ID NO: 190912 - DNA, 669 bp, synthetic construct
  misc_feature 1..669: note = Description of Artificial Sequence: Synthetic coding sequence
  source 1..669: mol_type = other DNA
atgagcagctacgtggccaacagcttctacaagcagagccccaacatacctgcctataatatgcagacttgcggaaactacggttcggcctctgaggtccaagcttctcggtattgttacggcgggctagatctctcaattacgttcccgcctccagccccatctaattcgctgcatggcgtggacatggccgccaatccccgcgcccatccagaccgccctgcatgcagtgcagcggctgcaccgggtcacgcccccggtagggatgaggccgccccactgaacccgggaatgtactctcaaaaggctgcacggccagcactagaggagcgggcaaagagttcaggagaaattaaggaggaacaagcacaaacaggacagccagcaggtctctcccaaccaccggccccccctcagatctacccatggatgactaagctgcacatgtctcatgagacagatggcaagcgctcacgcactagttacacccggtaccaaaccctggagcttgaaaaggagttccacttcaatagatatctcacgagacggagaagaatagaaatcgccaacaacctgtgcctcaacgaacggcagataaagatttggttccagaaccgccgcatgaagtggaaaaaagacagcaagatgaagtcaaaagaagccttgtag

SEQ ID NO: 190913 - DNA, 708 bp, synthetic construct
  misc_feature 1..708: note = Description of Artificial Sequence: Synthetic coding sequence
  source 1..708: mol_type = other DNA
atgaacagctacttcaccaaccccagcctgagctgccacctggccggcggacaagacgtgttgccgaacgttgcactgaactcaactgcttacgatcccgtgagacacttcagcacctacggagccgctgtggctcaaaatcggatatatagcacaccattctacagtccccaggagaatgtcgttttcagtagcagcaggggcccttacgactacggcagcaactcattttaccaagagaaggacatgctctccaactgtcgacagaacaccttgggacacaacacacaaacaagcatcgctcaagacttttccagtgagcaagggcgtactgctccccaagaccagaaggcctccatacagatttacccttggatgcaacgtatgaactcccactcgggcgtaggctacggcgcagaccgcaggcggggacgccagatttactcgcggtatcagaccctggaactagaaaaggaattccactttaatagatatctcacacgcagacggcggatcgagatcgccaatgcactgtgcttgaccgaacgacagatcaaaatttggtttcagaacaggaggatgaaatggaagaaggaaagtaatctgacctcgacgctcagcgggggtggtggtggcgcgaccgccgactccctgggcggcaaagaggagaagagagaggaaacggaggaagagaagcaaaaggagtag

SEQ ID NO: 190914 - DNA, 462 bp, synthetic construct
  misc_feature 1..462: note = Description of Artificial Sequence: Synthetic coding sequence
  source 1..462: mol_type = other DNA
atgctgagcaactgccggcagaacaccctgggccacaacacccagacatcaattgctcaggattttagtagcgagcagggaagaactgccccccaggatcagaaggctagcatccaaatttacccgtggatgcaacgcatgaactcacactctggagttggttacggcgcagatcgccgaaggggacgacagatttacagccgttaccagactctggaacttgagaaagagtttcatttcaatcgctacttaacccgtcgccgtagaattgagatcgctaacgctttatgcctcacagagcgacaaataaagatatggttccagaatcgcagaatgaaatggaaaaaggagtccaaccttaccagcactctgtctgggggcggaggaggcgccacggccgacagcctgggcggtaaggaggaaaagagggaagaaacagaagaggaaaaacaaaaagaatag

SEQ ID NO: 190915 - DNA, 159 bp, synthetic construct
  misc_feature 1..159: note = Description of Artificial Sequence: Synthetic coding sequence
  source 1..159: mol_type = other DNA
atgctgagcaactgccggcagaacaccctgggccacaacacccagactagcatcgcgcaagacttcagctctgagcagggtcgaaccgctcctcaagatcagaaggcatctatccagatatatccctggatgcagcgtatgaatagtcattcaggatag

SEQ ID NO: 190916 - DNA, 216 bp, synthetic construct
  misc_feature 1..216: note = Description of Artificial Sequence: Synthetic coding sequence
  source 1..216: mol_type = other DNA
atgctgagcaactgccggcagaacaccctgggccacaacacccagaccagcattgcccaagacttctcatctgaacagggaaggacagctccgcaagatcaaaaggcatcaatccaaatctacccctggatgcagcgaatgaactcccactccgtttgcttcgtgcccggcagtctaggggttgggtatggggcggatcgcaggcgaggaaggtag

SEQ ID NO: 190917 - DNA, 729 bp, synthetic construct
  misc_feature 1..729: note = Description of Artificial Sequence: Synthetic coding sequence
  source 1..729: mol_type = other DNA
atgagcagctacttcgtgaaccccctgttcagcaagtacaaggccggagagtcgctagaacccgcttactacgactgccgtttcccccagagtgtgggacggagtcacgccctggtgtacgggccaggcggctctgcccctggctttcaacacgcctcccaccatgttcaggattttttccaccacggcacaagtggaatctccaattcgggatatcagcagaatccatgtagtctgtcttgccatggggatgctagtaaattctatggctacgaagctctgcccagacaaagtttgtacggggcgcagcaagaggcaagcgttgtgcagtaccctgattgtaaatcctccgccaacaccaatagctctgaagggcaggggcacctgaaccagaatagctcaccttctttaatgtttccctggatgcgaccccacgcacctggccggcgcagcggcaggcagacttactctcgatatcagacactggaacttgagaaagagttcctattcaacccttacctgacacggaagaggcggatcgaggtcagtcacgctcttggccttaccgaaaggcaggtgaaaatctggtttcaaaaccgccggatgaagtggaagaaagagaacaacaaagataagttgccaggggctagggacgaggaaaaggtggaggaagaaggaaacgaagaggaagaaaaagaagaggaggagaaagaagagaacaaggactag

SEQ ID NO: 190918 - DNA, 783 bp, synthetic construct
  misc_feature 1..783: note = Description of Artificial Sequence: Synthetic coding sequence
  source 1..783: mol_type = other DNA
atgagcgccaccggccccatcagcaactactacgtggacagcctgattagtcatgataatgaggatctgctcgcaagcagatttccagctaccggggctcatcctgccgccgcccggccgagcggtctggttcccgattgttcagatttccccagttgtagcttcgcgcccaagcccgccgtgttctcaacttcttgggcccccgtgccgtcacagtccagtgttgtgtatcacccctacggccctcaaccgcacttaggcgccgatactagatacatgaggacatggctggagcctctttctggagcagtctcgtttcccagttttcctgccggaggtcgtcattacgccctgaaacccgatgcttatccgggcagacgtgctgactgcggtccgggcgaaggacgtagctatccggattacatgtacggcagcccgggagagctgcgggacagggctccccaaacacttcctagccccgaggccgatgccctcgctggctccaaacataaggaagagaaagccgatcttgatccaagtaatccagttgcgaattggatacatgcacgttccacccggaaaaaacggtgtccctatacaaagtaccagactttggagctggagaaggaattcttattcaacatgtacctcaccagggatcggaggtacgaggtagctagggttctgaatctgaccgaacgacaggtaaaaatctggtttcaaaatagaaggatgaaaatgaagaagatgaataaagagaagaccgataaagagcagagctag

SEQ ID NO: 190919 - DNA, 783 bp, synthetic construct
  misc_feature 1..783: note = Description of Artificial Sequence: Synthetic coding sequence
  source 1..783: mol_type = other DNA
atgagcgccaccggccccatcagcaactactacgtggacagcctgatcagccacgacaacgaggacctgcttgcgtctaggttccccgcaacaggtgcccaccctgctgccgcgagaccatccggacttgtgccggattgttctgatttccccagctgctctttcgctccaaagccagccgtgtttagcacatcgtgggctcccgtcccgtctcagtctagcgtcgtctatcatccatacggccctcagccccacctgggcgctgatacacgctacatgagaacatggctggagcccctctcaggcgcggtgagcttcccatcctttcccgctggcggccgccactacgcactgaaaccagacgcatatccaggacgtcgagccgactgtggcccgggagaggggaggagctatccagactatatgtacggtagtcccggggagctgagggatcgggctccacagactctgccctcccccgaagccgacgctctggcgggaagtaagcacaaagaggaaaaggccgacttggatccaagcaaccccgtcgccaactggatacatgcccgctctacacgtaaaaagaggtgcccttacaccaaataccagaccttggagctagagaaagaattcctgtttaacatgtatctgactagggaccgtcggtacgaagtggctcgcgtgctgaatctcacagaaagacaggtgaaaatttggtttcagaaccggaggatgaagatgaagaaaatgaataaggagaaaacagataaagaacagtcgtag

SEQ ID NO: 190920 - DNA, 987 bp, synthetic construct
  misc_feature 1..987: note = Description of Artificial Sequence: Synthetic coding sequence
  source 1..987: mol_type = other DNA
atgagcagctacctggagtacgtgagctgcagcagcagcggcggcgtaggcggcgatgtccttagccttgcccccaagttttgtcgctctgacgcaagaccggttgcgctgcagccggctttccctctggggaatggggatggggctttcgtgtcttgtctgccactggccgctgcccgtcctagcccgtccccacctgccgcccccgctcgcccgtccgtgccacctcccgccgctccccaatacgctcaatgcaccctcgagggggcttacgagcctggggccgcacctgcagccgctgccggtggtgccgattacggcttcctgggatccggccccgcctatgactttccgggagtcctcggcagggctgccgatgacggggggagtcatgtgcactacgccaccagcgcagttttcagcggcgggggttcatttcttcttagcggccaagttgactatgcggcattcggagagcccggcccctttcctgcttgccttaaggccagtgccgatggacaccccggcgcattccagacggccagccccgctcctggcacataccccaagtctgtatcacctgcttcgggcctccctgccgctttcagcacctttgaatggatgaaagtgaagaggaatgcctccaaaaagggaaaactggccgagtacggcgccgccagccctagctcagccattcgcacaaatttcagcaccaaacagctgacggaactcgaaaaagaatttcatttcaacaagtacctcacaagagcgcggagaattgaaattgcgaactgcttgcatctgaacgacactcaagtgaaaatttggtttcagaacaggcgaatgaaacaaaagaagagggaaagggaagggctgctagctaccgcaatacccgtggctcctttacaactgcccctaagtggtaccaccccaacaaagtttataaaaaaccctggcagcccaagtcaatcccaggagccttcttag

SEQ ID NO: 190921 - DNA, 630 bp, synthetic construct
  misc_feature 1..630: note = Description of Artificial Sequence: Synthetic coding sequence
  source 1..630: mol_type = other DNA
ctggagcgggccgcccgggtggagcgggccggcggcgccgcccagacagccgcagtccttctatccctttgtccagccccttactcgggaccgggattgaggccacacttagcttttgccccaggcagaccccgtgccgccgtgaggactgctagcggtagggcacccgtcagggctgttcacccagggggaggcttgcggacctggtgccggacctgccgggggagctggggccgcggactgcgacttcctggtgtgcgtgcaggagtaaggctccccgggagggcaggggctggcggaccattcccagcctgtctgaaagctagtgcggatgggcaccctggagccttccagacggcttccccagctcccggcacatacccaaaatccgtgagtcctgcttctggtctccccgctgctttctcaacgtttgagtggatgaaggtgaaacggaatgcaagtaaaaaagatagcgggttagggtttgtggaggaaacccggtctagagctaatagcatggagtctgcgtcaagcaccgactctgaaaacgtgccaggcatcgagaaaatcagcgggaggtcctcaccctggaacttttcgtggcagaccaggcgggtgtggggaaggtag

SEQ ID NO: 190922 - DNA, 1023 bp, synthetic construct
  misc_feature 1..1023: note = Description of Artificial Sequence: Synthetic coding sequence
  source 1..1023: mol_type = other DNA
atgagcttccccaacagcagccccgccgccaacaccttcctggtggacagcctcattagcgcctgtagaagcgactctttctactcttcttctgccagcatgtacatgcctcctccctctgccgacatgggaacgtacggaatgcaaacttgtggactgctacctagcctagcaaaacgggaggttaaccatcagaacatgggaatgaatgtgcacccatatatcccccaggtagactcatggaccgacccaaataggtcatgtagaatcgaacagcccgtaactcagcaggtgcctacatgttcctttacaacaaatataaaggaagaatccaattgctgcatgtatagcgacaaacgcaataagctgatctcagcagaggtgcctagctaccagcgcctcgtcccagagtcttgtccggtggagaatcccgaagtgccagtgccaggttatttccgcctgtctcagacctacgcgaccgggaagactcaggagtataacaattccccagagggatcaagcaccgttatgctgcagctaaatccaaggggtgcagcgaagccccagctgtccgccgcgcagttgcagatggaaaagaaaatgaacgagcccgtgtccggtcaagaacctactaaagtgagtcaagtggaatctccagaggccaaaggaggcctccctgaggagcgatcttgtttggctgaagttagtgtttcatcccctgaggttcaagaaaaggagtccaaggaagagattaagtccgataccccgactagcaattggctcacagccaagagcggcaggaaaaaaagatgcccgtacacgaagcatcagactctagaactcgaaaaagagtttctgtttaatatgtatctgacgagagagaggcgcctcgaaatcagcaagtctgtgaaccttacagataggcaggtaaagatctggtttcagaacagacgtatgaaactgaaaaagatgtcacgagaaaacaggatccgcgaactcaccgcgaatctcacattctcgtag

SEQ ID NO: 190923 - DNA, 1017 bp, synthetic construct
  misc_feature 1..1017: note = Description of Artificial Sequence: Synthetic coding sequence
  source 1..1017: mol_type = other DNA
atgaacgacttcgacgagtgcggccagagcgccgccagcatgtacctgccaggctgcgcctactatgttgcaccctctgacttcgcttccaaaccaagctttctgtcccagccatcttcctgtcaaatgacattcccatatagcagcaacctggctccgcatgttcagcctgtcagagaagtggcatttagagattatggactggaacgggcgaaatggccctatcggggtggtggtgggggaggtagcgccggcggagggtcctcgggcgggggtcccggaggcggtggggggggggcaggaggatatgctccttactatgccgccgccgccgccgctgccgccgcggccgccgctgccgaggaagctgcgatgcagagggagcttctacctccggccggacgaagacccgatgttctgtttaaagcaccagaaccagtgtgcgctgccccagggcctcctcacgggcccgcaggtgccgcctcaaacttctatagtgccgtcggtcgaaacggtatcctgccgcagggattcgaccaattttacgaggccgctcctggcccgccctttgccggtcctcagccaccaccccctccagccccaccgcaacccgagggcgcagcagataagggtgaccctcgcactggtgccgggggcggaggcgggagcccttgcactaaggcaacaccagggagcgagccaaaaggcgctgccgagggatccggcggggacggtgaggggccgcctggcgaagcaggagccgagaaaagttctagcgcggtcgctccacagagaagccgcaaaaagcgctgtccttatacaaaatatcagatcagggaactagagcgagagttcttcttcaatgtttacattaacaaagaaaagcgcctgcaactgagcagaatgcttaacctgactgatcgtcaggtcaagatctggtttcagaatcgaaggatgaaagagaaaaaactgaatcgcgacagactgcagtatttcaccggtaatcctctgttctag

SEQ ID NO: 190924 - DNA, 480 bp, synthetic construct
  misc_feature 1..480: note = Description of Artificial Sequence: Synthetic coding sequence
  source 1..480: mol_type = other DNA
atgtacctgcccggctgcgcctactacgtggcccccagcgacttcgcttccaaaccaagctttctgagtcagccaagctcatgtcagatgacttttccctactccagtaacctggctcccggaggaggctccccatgtaccaaggctacacccgggtcggagccaaagggggccgcagagggctctggaggcgatggggaggggcccccaggagaggccggagctgaaaaatcgtcatcggcggttgccccgcagcgaagccggaagaaacggtgcccttacacaaagtatcaaattcgggagctggaaagagagtttttcttcaatgtctatattaacaaagagaagcggctgcagctaagcagaatgttaaatttgactgacaggcaggtaaagatatggttccagaatcgacgcatgaaagaaaagaagctgaatcgggatagattgcagtattttaccggcaatcctctgttttag

SEQ ID NO: 190925 - DNA, 813 bp, synthetic construct
  misc_feature 1..813: note = Description of Artificial Sequence: Synthetic coding sequence
  source 1..813: mol_type = other DNA
atgtgcgagcggagcctgtaccgggccggctacgtgggcagcctgcttaacctccaatcccccgattccttctattttagtaacctgagacctaatggtggacagctagcggcactcccacctatcagctacccgaggggcgctctgccatgggccgccactcctgcatcttgcgcgcctgctcaacctgccggcgccaccgcatttgggggattcagtcagccctacctcgccgggagcggtccactggggctccaaccacccacagcaaaggacggaccagaggaacaggctaagttttacgccccagaggccgccgcaggacccgaagagcggggtagaacgaggccatcatttgccccagaaagttctcttgctcccgcagtggccgcactgaaagcagccaagtatgactacgctggggtcggccgagctacgcctggatccacgactttgctacagggagccccgtgtgcgcccggttttaaggacgatactaaggggccgcttaatctgaatatgaccgtacaggccgcaggtgtggctagttgccttcgacccagtctaccagatggactgccgtggggagccgccccaggaagggcccggaaaaaaagaaaaccatacacaaaacaacaaatcgctgagctggagaatgaattcctggtcaacgagttcatcaatcgtcaaaagagaaaggagctaagtaatcgactcaatttaagtgatcaacaggtgaagatttggtttcaaaataggagaatgaagaagaagcgagtcgtgctaagggaacaggctcttgccctttactag

SEQ ID NO: 190926 - DNA, 1299 bp, synthetic construct
  misc_feature 1..1299: note = Description of Artificial Sequence: Synthetic coding sequence
  source 1..1299: mol_type = other DNA
atgctgttcgagcagggccagcaggccctggagctgcccgagtgcaccatgcaaaaggccgcctactacgaaaacccaggactctttgggggctacggctattctaagaccacagacacctacggttacagtaccccccaccaaccctaccctccccctgctgctgccagcagcctcgacactgactacccgggcagtgcttgttctatccagtcttccgccccgctgcgggctcccgcccataaaggcgcagagttaaatgggagctgtatgagacccggaactggcaacagccaaggaggcggcggtgggagccaaccccccggtctcaattctgagcagcagccaccccaaccccctcccccaccccccacactccccccatcgtcaccaaccaacccaggcggcggtgtgcctgctaaaaaacctaaagggggccctaacgctagcagcagcagtgccaccataagcaaacagatttttccctggatgaaggagtctcggcaaaactctaagcaaaaaaactcctgcgccaccgcaggagaaagttgcgaagataagagcccccccggacccgcaagcaaacgagtgcgcaccgcttatacttccgcccaacttgtagaattagagaaagaattccacttcaatagatatctctgtagaccacgtcgggtggagatggcaaatctgttgaatctcaccgaaagacagattaagatatggtttcagaaccgacgcatgaagtacaagaaggatcagaaggctaaaggtatcctgcattcccccgcctctcagagccctgagcggtctcctcctttaggtggtgctgctgggcatgtcgcctatagcggtcagctcccacccgtaccagggctagcgtatgatgcccctagtccgccagcctttgcaaagtcccagcccaatatgtacggattagcagcttatacggccccgctgagctcttgccttccgcagcagaagcggtacgccgccccagagttcgaaccccaccctatggcatccaacggtggcggcttcgctagtgccaatctgcagggatctcccgtctatgtcgggggcaatttcgtcgagtctatggcaccggcctccgggcccgtgttcaacctcggacacctgtcacacccatcctctgcttcagtggactactcatgcgctgcacagattccaggcaatcatcaccacggtccctgcgatccccaccccacctacacagacttaagcgcccaccatagtagtcagggtcgactgccagaggcgcctaaattgactcacctgtag

SEQ ID NO: 190927 - DNA, 1299 bp, synthetic construct
  misc_feature 1..1299: note = Description of Artificial Sequence: Synthetic coding sequence
  source 1..1299: mol_type = other DNA
atgctgttcgagcagggccagcaggccctggagctgcccgagtgcacaatgcagaaagcggcttactacgagaacccgggtctgtttggggggtacggatattcaaaaaccaccgatacttacggatactccacccctcaccagccttatccaccgcccgccgctgcgagctcactagatactgattatccagggtctgcttgttcaatccagtctagtgcaccactcagagctccagctcataaaggggccgaactcaatggcagttgcatgcgccccggaacagggaattcccaaggaggaggcggaggcagccagccccccgggcttaactcagagcagcagccaccccaaccccctccacccccacccaccctcccgccctcatcccctaccaatcctggaggaggcgtgcccgctaagaaaccaaagggaggacccaacgcctcttcaagctccgcaaccatcagtaagcagatcttcccttggatgaaagagagccgacagaatagtaagcagaagaattcctgtgcgacggcaggggaaagctgtgaagacaagtccccccccggtcctgcctctaagcgggtccgtacagcttacacctcagctcagctggtggagttggagaaggagttccacttcaatcgctatctctgtcggccccggcgtgtcgaaatggccaatctgctgaacctcactgagcgacagattaagatttggtttcagaatcgccgcatgaaatacaagaaagatcagaaagcaaagggcatactacatagccctgcctctcagtctcccgaacggtccccaccacttggcggcgctgctggccacgtagcctacagcggtcagttaccgccggtccctgggttagcctatgatgcgccctctccaccagcattcgccaagagtcagcctaacatgtacggccttgccgcctacactgcgcctctttcctcttgtctgcctcagcagaagaggtacgcggctccagagtttgagccacaccccatggccagcaacggtggcgggtttgccagcgccaatctgcaagggtccccggtgtacgttggaggcaactttgtcgagtccatggctccggcctctggccccgtctttaacctcggacacttgtctcaccctagctcagcctcggtcgactattcttgcgccgctcagatcccggggaatcaccatcacgggccatgcgatccccacccgacatacacggacttatccgcacatcactcctcacagggcagacttcctgaagcgcccaagctgacgcacctttag

SEQ ID NO: 190928 - DNA, 303 bp, synthetic construct
  misc_feature 1..303: note = Description of Artificial Sequence: Synthetic coding sequence
  source 1..303: mol_type = other DNA
atgctgttcgagcagggccagcaggccctggagctgcccgagtgcaccatgcagaaggctgcttactacgagaacccgggtttgtttggcggctacggatatagtaagacaacagatacgtacggatacagtactccccaccagccatatccaccccctgcagccgcctcatccctcgacaccgactatcctgggtccgcgtgttccattcaaagtagcgcccccctgcgagcacccgcacataagggagcagaactgaacggatcctgtatgagaccaggcacaggaaattcccaaggctag

SEQ ID NO: 190929 - DNA, 1299 bp, synthetic construct
  misc_feature 1..1299: note = Description of Artificial Sequence: Synthetic coding sequence
  source 1..1299: mol_type = other DNA
atgctgttcgagcagggccagcaggccctggagctgcccgagtgcacaatgcaaaaagcggcttattacgaaaatcccggccttttcggtggctatggatactccaagactaccgacacttatggctatagcactccccaccagccctacccacctcctgctgctgcgagctccttggatacagattatcccgggagcgcctgttctatacagagttctgctcctctcagagcgcctgctcacaagggtgctgaactaaatggatcatgtatgcgacctgggaccggaaactctcagggaggaggtggcgggagtcaaccccccggtctcaactctgagcaacagcctccgcagccacctccccctcctcccacactaccaccatccagtcccaccaatcctggtggtggcgttccggccaaaaagcccaaaggcggaccgaacgcctcatcatcatccgctacaatatccaagcagattttcccctggatgaaggaatctcgtcaaaattcaaagcagaagaatagttgcgcgacggccggcgaatcatgtgaggacaagtctcccccggggcccgccagcaagcgcgttcggacagcctacactagtgcgcagctcgtggaactagaaaaagaattccacttcaatcgctacctgtgccggcctcgtcgggtagagatggccaacctccttaacctgaccgagaggcagatcaagatctggtttcagaatcgcagaatgaagtacaagaaggatcagaaggccaaaggaatcttacatagtcccgcctcacagtctcctgaacgcagcccacctcttggtggagcggctgggcacgtggcctattcggggcaactgcccccagttccaggcttggcgtacgacgcgcccagccctccagctttcgcgaagtctcagccgaatatgtacggactggccgcatatacggcacctctctcctcctgcctcccccagcaaaagaggtacgcggcccccgagtttgaaccacaccctatggcctcgaacggcggaggctttgcgtccgccaacttgcagggatcacccgtttacgttggtggtaattttgtagaatccatggccccggcctctgggccagtgttcaacctgggccacctgagtcatccatcctctgcttcagtggattactcatgcgctgcccagatacctggtaaccatcaccacggcccctgcgacccccaccctacttatactgaccttagcgctcatcatagtagccaagggcgtctgccggaggccccaaagctcacgcatctgtag

SEQ ID NO: 190930 - DNA, 768 bp, synthetic construct
  misc_feature 1..768: note = Description of Artificial Sequence: Synthetic coding sequence
  source 1..768: mol_type = other DNA
atggtgatgagcagctacatggtgaacagcaagtacgtggaccccaagtttccaccttgcgaggagtatctgcagggcgggtatctcggagagcaaggcgccgattactacggcggcggtgctcaaggcgcagacttccagcccccgggattatacccccgccccgactttggggaacagccttttggtggcagcggaccaggacctggttctgcactccctgccaggggccatgggcaagaaccaggtggacccgggggacactacgctgctccaggcgaaccatgccctgctcccccagccccaccccccgcaccactgcccggcgctcgcgcctattctcagtctgaccccaagcagcccccttccggaacagccctgaagcaacccgcagtcgtgtatccttggatgaaaaaggtccatgtaaactctgtgaatccaaactacacaggtggcgaacctaagaggtctcggacagcctacacgcgtcaacaagtgttagagctagagaaggagttccacttcaaccggtacctcacacgcagacggcgaattgagatagctcacactctgtgcctgtccgagaggcagataaaaatctggtttcaaaaccggaggatgaagtggaagaaagatcacaaactgccaaataccaagggccggagttcctcttcttcatctagcagttcttgctcttcgagcgtggctcccagtcagcacctgcaaccgatggccaaagaccaccacaccgacttgaccacattgtag

SEQ ID NO: 190931 - DNA, 873 bp, synthetic construct
  misc_feature 1..873: note = Description of Artificial Sequence: Synthetic coding sequence
  source 1..873: mol_type = other DNA
atgagcagctacttcgtgaaccccctgtacagcaagtacaaggccgcagccgcggctgctgccgctgccggtgaggccattaaccctacttattacgattgccacttcgccccagaggtggggggcaggcatgctgccgccgctgccgccctccagctctatggaaactctgcagcaggcttccctcacgctccacctcaggcccacgcccatccacaccctagtccccccccatcaggcaccggctgtggcggcagagagggtcggggccaggaatatttccaccccggaggaggatcccccgcagcggcctaccaggctgccccgccaccccccccacacccgcccccacccccccctcccccgccctgtggcggcatcgcctgccatggcgagcctgcaaagttctacggctacgacaacctgcagagacagccaatatttaccacacagcaggaggctgagttagttcaatatcctgattgcaaatcaagcagcggcaacattggcgaggaccctgaccacctgaatcagtctagctccccctcacagatgttcccttggatgcgacctcaagctgcgccagggaggagacgtgggaggcagacttatagccgattccaaactttggaacttgagaaagaatttctcttcaacccgtacttaactagaaagaggcgcatagaagtaagccatgctctggccttgaccgagcggcaggtgaagatctggttccagaaccgcagaatgaaatggaagaaggagaataacaaagataaatttccagtgagcaggcaagaggttaaagatggggagactaagaaggaggctcaggaactggaggaggacagagccgaagggctgactaactag

SEQ ID NO: 190932 - DNA, 870 bp, synthetic construct
  misc_feature 1..870: note = Description of Artificial Sequence: Synthetic coding sequence
  source 1..870: mol_type = other DNA
atgagcagctacttcgtgaaccccctgtacagcaagtacaaggccgccgcagccgcagcggctgctgccggcgaagctatcaaccccacttattatgactgtcacttcgcacctgaagtgggcgggaggcacgccgcggctgcagcggcgcttcagctttatggtaacagtgccgccggtttccctcacgcgcccccccaagcgcacgcgcatccacatccgtccccccccccatctgggacagggtgtggcggacgggagggtaggggacaggaatattttcacccaggtggcggatctcctgcagctgcctaccaggccgcacctcccccacctccccaccccccacccccaccacctccaccaccctgcgggggtatcgcctgccatggcgagcccgccaagttctacggctatgacaatttgcagaggcagccaatttttaccacccaacaggaagcagagctggtgcagtacccagattgtaagtcaagttccggcaacattggtgaagacccagatcatttgaaccagtcaagttctcctagtcagatgtttccatggatgaggccccaggcccctgggcgcaggagaggtaggcaaacatattcacggtttcaaaccctcgaactcgagaaagagttcttatttaatccttacctgaccagaaaacggcgcattgaagtgtcccacgccctcgcattaacagagagacaggttaaaatatggttccagaacaggagaatgaaatggaagaaggagaataacaaggacaagtttcctgtaagcagacaagaggtcaaggatggcgagacaaaaaaggaggcccaagagctggaggaagatagagcagagggcctgacaaactag

SEQ ID NO: 190933 - DNA, 870 bp, synthetic construct
  misc_feature 1..870: note = Description of Artificial Sequence: Synthetic coding sequence
  source 1..870: mol_type = other DNA
atgagcagctacttcgtgaaccccctgtacagcaagtacaaggccgctgccgctgcagccgcggccgcgggcgaggccatcaacccgacttattatgactgtcactttgctccagaggtgggcggtaggcatgccgccgctgctgcagccctacagctgtatggcaattctgcggctggcttccctcatgcccctccgcaagcccacgctcatccccacccaagtcctccaccgtcaggaaccgggtgtggcggcagggaggggagagggcaagagtactttcacccaggaggaggctctccagcggcggcctatcaggctgcaccacctccgcctcctcacccaccccctcctccgccacctcccccatgtggtggcatagcttgtcacggtgaaccggctaagttctatggatatgacaatctgcaacggcagcctatcttcaccacacaacaggaggctgagctggttcaataccctgattgtaaaagcagttctggaaacatcggcgaggatcccgaccacctgaatcagtcgagcagtccttcccaaatgtttccgtggatgagaccacaggcacctggtcgacgtcgcgggcgccagacgtactcccggtttcagaccctcgaactggagaaagagttcctcttcaacccttacctgacaagaaagcggcgtatagaggtaagccacgctctagccttgaccgagcggcaagtaaaaatctggtttcagaaccgaaggatgaagtggaaaaaggagaacaataaagataaatttcctgtgagcaggcaggaggtgaaggacggtgaaacaaagaaagaggcccaagagcttgaagaggacagagccgaagggttaacaaattag

SEQ ID NO: 190934 - DNA, 321 bp, synthetic construct
  misc_feature 1..321: note = Description of Artificial Sequence: Synthetic coding sequence
  source 1..321: mol_type = other DNA
atgttcccctggatgcggccccaggccgcccccggccggcggcggggccggcagacttacagccgctttcaaacactggagctggagaaggaattcttgttcaatccctacctgactcgtaaacgccgaattgaagtgagtcatgcgctggccctgaccgaacgacaggtgaaaatctggtttcaaaacaggagaatgaagtggaaaaaggaaaacaataaagataaattcccagtcagtcggcaggaagtgaaggacggagaaacgaaaaaggaggcccaggagctggaagaggatcgagcagagggtctgactaactag

SEQ ID NO: 190935 - DNA, 1059 bp, synthetic construct
  misc_feature 1..1059: note = Description of Artificial Sequence: Synthetic coding sequence
  source 1..1059: mol_type = other DNA
atgctgggcggcagcgccggccggctgaagatgagcagcagcggcacactgtcgaattactacgttgatagtcttatcggacacgaaggagacgaagtatttgcggcacgcttcgggccacccggcccgggagctcagggacgcccagccggagtcgctgatggacctgccgcaactgccgctgagtttgcgagttgttcctttgcgcccaggagcgcagtgttctctgcctcatggagtgcggttcccagccagccgcctgcagcggccgcaatgagcggcttgtaccacccttacgtaccaccacctccgctggctgccagcgccagcgaacctgggagatatgttcgtagttggatggaacccctgcctggatttcctgggggcgctggtggtgggggcggcggcggaggtggcggcccaggccgcggtcccagccctggcccctctgggcccgctaacggacgacactacggtatcaaacccgaaacgagggccgcacctgctcccgctaccgcggcatccactacatcatcctcatctacaagcctctcttcttcctcaaagcgcaccgagtgttcagttgcgcgggagtcacaagggagtagcgggcccgaattttcctgcaacagcttcctgcaagagaaagccgccgccgcaacaggcggaactggtcccggcgctgggatcggtgcagcgacaggcactggaggatcatctgagccaagcgcctgcagcgaccatcccattccaggctgttctctaaaggaggaagagaagcagcattctcagccacaacagcagcagttggaccccaataaccctgcagccaattggatccacgcccgcagcacaagaaaaaaaagatgtccatacacaaagtatcagacgttggaactggagaaggagttcctgtttaacatgtatctcaccagagataggaggtacgaagtcgcgcgcattctgaacctgaccgaacgtcaggttaaaatttggttccagaaccggcggatgaagatgaaaaaaatgtcaaaagaaaagtgtccaaaaggcgattag

SEQ ID NO: 190936 - DNA, 2757 bp, synthetic construct
  misc_feature 1..2757: note = Description of Artificial Sequence: Synthetic coding sequence
  source 1..2757: mol_type = other DNA
ctgcagcccgtgtacgagagcatggccagccacgtgcaggtgttctcgccacacaccctgcagtcttctgctttctgttctgtgaaaaaacttaagatcgaaccttcatccaactgggacatgacgggctatggaagtcatagtaaggtctacagtcagtccaaaaacattccactgtcccagccggcaacaactacagtttccacctcactgcccgtacctaaccccagcctgccctacgaacaaacaatcgttttcccaggatcaacgggccacattgtagtgacatcagcatcatccacttctgtgaccgggcaggtacttggaggcccccataatcttatgagacgtagcacagtgtcccttttagacacctatcagaagtgtgggcttaagagaaagagcgaagaaatcgagaacacttcatccgtgcaaatcatcgaagaacacccccctatgatacagaacaacgcctccggggcaacagtcgccacagccactacttcaacagcgacatccaaaaatagcggaagtaactccgagggcgactaccaactagtgcaacacgaggtgctatgcagcatgaccaatacgtacgaggtgctggagttcctaggacgcggaacatttggccaagttgtcaagtgctggaagagaggaacaaatgagatcgtagctatcaagatacttaaaaatcacccctcctatgctaggcagggccagatagaggtaagcattctggcacgcctatctaccgaaagtgctgatgactataactttgtgcgggcatacgaatgcttccagcataaaaaccacacatgcctggttttcgagatgctcgaacagaatctgtacgacttcctaaaacagaacaagttctccccacttccgctgaaatatattaggcctgtcctgcagcaggtggcaacggcgttgatgaaacttaaatccctggggcttatccatgccgaccttaaaccggagaacattatgctggtcgacccatctcggcagccataccgcgtcaaggttatcgattttgggtcagcctcgcacgtgtcaaaggcagtgtgcagtacctatctgcagtcaagatattatcgcgcgcctgaaattatacttggattgccgttctgtgaagctattgacatgtggtcgctcggatgtgtcattgccgagctgtttctgggatggccactctaccccggcgcttctgaatatgatcaaattagatatatatcacagacacagggactgccagccgagtatctcctcagcgctggtaccaaaacaacaagatttttcaaccgcgacaccgacagcccgtatccactgtggcggttgaaaacccctgacgatcacgaagccgagactgggatcaagagtaaggaggcccgcaaatacatttttaattgtctggatgacatggcacaggtcaatatgacaacagacctggagggaagtgacatgctcgtcgaaaaagccgaccggcgtgagttcattgacctgctgaagaaaatgctcaccatcgatgcagataaacgcattacgcccatcgagactctgaaccatccctttgtaaccatgacacatctgctggacttcccccacagcacccacgtgaagtcatgtttccagaacatggagatatgtaaacgacgagttaatatgtatgacaccgtgaaccagagcaaaacccctttcataacccatgttgccccttccacatctacgaatctgaccatgacatttaataaccagctgacaacggtgcataaccaggcccccagcagcactagcgctacaatttccctggccaacccagaagtgtcaattctgaattacccgtccactctgtaccagccaagcgcagccagcatggccgccgtggcacaacggtccatgccactccaaacaggaacagcacagatatgtgcacgccctgacccttttcaacaagcacttatcgtgtgcccgccaggcttccaagggctccaggcatcaccttcaaagcacgcaggttattctgtgcgcatggaaaatgccgtccctatagtgacacaagcaccgggagctcagcctctgcagattcaacccggcctcctcgcccaacaggcctggccaagtggaacccagcagattctgctaccgcctgcctggcaacaactaacaggagtggccacacacacgtcagttcagcatgcaaccgtaatcccagagaccatggccgggacccaacaacttgccgattggcgaaatacacacgcccacggttcgcactataaccccattatgcagcagccagctcttctgactggccatgtgactcttccagccgcccaaccgctcaacgtcggagtggctcatgtgatgcggcagcagccaacaagcactacctcctcacgcaagagcaagcaacatcagtccagccagaggaagaacgtcatctcatgtgtcacagtccatgattcaccatactccgattcctcatcgaacacttcaccctattctgttcagcagagggccggccacaataacgccaacgcatttgatactaaaggaagtctggaaaaccactgcacgggcaacccaagaacaatcattgtgcctccgcttaaaacccaggcatctgaagtgctagtggagtgtgacagcttggtacccggcaaccttgggcccgggcaggggagaaacctgtccttagagtctggcttcccagcttttctgctgttagaaatgctcctctacggctcatag

SEQ ID NO: 190937 - DNA, 3597 bp, synthetic construct
  misc_feature 1..3597: note = Description of Artificial Sequence: Synthetic coding sequence
  source 1..3597: mol_type = other DNA
atggcccccgtgtacgagggcatggccagccacgtgcaggtgttcagcccccacaccctgcagtctagtgcattctgttccgtgaaaaaacttaaaatcgagccttcatccaattgggatatgacaggttatggatcgcacagcaaggtgtacagccaaagcaagaatatccctctctcacagcctgctacaacgactgtgagcactagcttacctgtgccgaatcccagtctaccttatgaacagaccatcgtatttcccggtagcaccggccatatcgttgtcaccagtgccagctcaactagcgtgacaggccaggtgttgggggggccacacaacctcatgcgtcggtccaccgtgtctctgttggatacttatcagaagtgtgggttgaaacggaaatctgaggagattgaaaatacctcttctgtacaaataatcgaagaacatccccccatgatacagaataatgcctctggagccacagtggctaccgcgaccacatctacagccacctcaaagaattcaggcagtaactctgagggagactaccaacttgtgcaacacgaagtcctgtgttcaatgaccaatacttatgaggtcctagaattccttggccgaggcacttttgggcaggtagtgaagtgctggaagaggggaactaacgaaatcgtggccatcaagatcctaaaaaatcaccctagctacgccaggcagggccaaatcgaggtgtccatcctggcgagattgtctactgagagtgctgatgattataatttcgtgagagcctacgagtgcttccaacacaagaaccacacgtgtctggtctttgagatgctggagcaaaacctgtacgacttcttgaaacagaacaaatttagtccactgccactcaagtatatacgccccgttctgcagcaggtagcaacagctttaatgaagctcaaaagcttgggcctcattcatgcggacctgaagccagagaacatcatgctagtggaccctagccgccaaccgtatagggtgaaggtgatcgattttggatcagctagccacgtgtcaaaggctgtctgctcgacgtatcttcagagccggtattatagagcccccgagattattttagggttacccttctgcgaagcaatcgatatgtggagtctcggttgtgtgatagctgagcttttcctaggatggccactatatcccggagcgtccgaatacgaccaaattaggtacatttcacagacccagggactccccgccgaatacctcctttccgcaggaactaagaccacccggttcttcaaccgcgatactgactcaccctatccactttggcgactcaagacccccgacgatcatgaggctgaaaccggcattaagagtaaagaggcacgtaagtatatctttaactgcctggatgacatggcccaggtgaatatgaccacagatttggaagggtcagatatgttggtcgaaaaagctgatcgtagagaattcattgacctcctgaagaagatgttaacaatcgatgcagataaacgtattacccccatcgagacactcaaccaccccttcgtgactatgacccaccttctcgactttccgcactcaacccacgtaaagagttgttttcagaatatggagatctgcaaaaggagagtgaacatgtacgacactgtcaatcagagcaaaaccccttttattacccacgtggccccaagcacaagtacgaacctgacaatgacctttaacaatcaattaactacagtgcataaccaggccccgtctagcaccagcgccacaatctcattggcaaatcccgaagtttcaatactcaattacccctccaccttgtaccaaccttccgcagcaagcatggcggcggtcgcacagcggtctatgcctctgcagacgggtacagcacaaatctgtgccaggccagatccctttcagcaagccctgatcgtttgccccccaggattccaaggactgcaggctagtcccagtaagcacgccggatattcggtcagaatggaaaacgcagtccccatcgttacgcaggctcctggcgcacagcccctgcagattcagccgggtctgttggcacagcaggcctggccatcaggaacccagcaaattcttctgccccctgcctggcagcagctcaccggtgtggcaactcacacatccgtccagcacgccaccgttattcctgagacaatggccggaacccagcagctggcagactggcgaaacactcacgcccacgggtcccactataaccctataatgcagcaacctgctctgctgactggtcatgttaccttaccggccgcccaacccctgaacgtcggggtggctcatgtcatgcggcagcagcccacctccaccacaagctctcggaaatccaaacagcatcaaagcagtgtaaggaacgtctccacctgcgaggtgagttcttctcaagccattagctctccacagcgatcaaagcgcgtgaaggagaataccccccctaggtgtgccatggttcattcctcgcccgcgtgtagtacttccgtgacctgtggctggggcgatgtggcatccagcactacccgggaacgacagcgccaaacaatcgtcattcccgatactccatctcccactgtgtcagtgattactatcagttctgacaccgatgaggaggaagaacagaaacacgctcctacgagcactgttagcaaacagcgaaagaacgtgatatcttgtgtcactgtgcacgatagcccctatagtgattcatcgagtaatacaagcccttattctgtgcaacagagagccggccacaacaacgccaacgctttcgatacaaagggatccctcgaaaatcactgtacgggcaatcccagaaccatcatcgtgccacctctcaagacacaagctagtgaggtcctcgtcgagtgcgactcactggtgcctgtgaacacgagccaccactcatcttcctataagtccaaaagcagttcgaatgtcacatctactagcggtcacagctctgggtcctcttccggcgcaatcacttaccggcagcagcgccccggaccccactttcagcagcagcagcctctgaatctctcacaggcacagcagcacattaccacagacagaaccgggtctcaccgccggcagcaggcctatatcaccccgacaatggctcaggcaccgtacagtttccctcacaactctcccagccacggcacagtccatccccacctcgctgctgcagccgccgcagctcaccttcctacccagcctcacctgtatacgtacaccgctccggctgctctgggatctactggcaccgtggcccacttagtggcatcgcaggggagcgcccggcataccgtgcaacataccgcttatcccgccagtattgtgcaccaggtgcccgtttccatgggtcccagagtgctgccatcacccacaatccacccgagccagtatccggcccaatttgcacaccagacgtatatatctgcaagccctgcatcgactgtttatactggctatccattgtccccagctaaagtcaaccagtatccctatatctag

SEQ ID NO: 190938 - DNA, 3516 bp, synthetic construct
  misc_feature 1..3516: note = Description of Artificial Sequence: Synthetic coding sequence
  source 1..3516: mol_type = other DNA
atggcccccgtgtacgagggcatggccagccacgtgcaggtgttctccccccacactctgcagtcttcagcattttgctccgtcaagaagctgaaaatcgagccctcctcaaactgggacatgacaggctacggtagccacagtaaggtttattcacaatcaaagaatattcccctgtcccaaccagcaactaccactgtgtcaacatcccttcccgtgccgaacccttctttgccttatgagcaaacaattgtgttccctggctcaacaggacatatcgtagtgacatcggcttcaagcacgagcgtcaccgggcaggttttaggaggccctcacaatttgatgcgccgctcaacagtgagtttgctggacacctatcagaaatgcggactgaagcgcaaatctgaagaaatagaaaacacctctagcgttcaaataatcgaagaacaccccccgatgatccagaataacgcaagcggggctactgttgccacggcgaccactagcacggcaacgagcaaaaatagtggaagcaacagtgaaggcgactaccagttggtacagcacgaggttctctgcagcatgacgaatacctacgaagtgctcgagtttttaggacgtgggactttcggtcaggtggtgaagtgctggaaacggggtacgaacgagatagtcgccattaagattctgaagaaccaccctagctacgccagacaaggacagatcgaggttagcatactggcacgactgtctactgaaagcgctgatgactacaactttgtgagggcatatgagtgtttccagcacaaaaatcacacctgtttagtctttgagatgctcgaacagaatctatatgattttctgaagcagaacaaattctccccattacctctgaagtatattcggcccgtactacaacaggtggcaaccgctctgatgaagctgaaatcactaggcctcattcatgccgatctcaagcccgagaacataatgctggtggacccatctcgccaaccctatagggttaaagtgatcgattttgggagcgctagccatgtctccaaggcagtctgttccacatacctgcagagccggtactacagggctccagagatcatcttaggacttccattctgtgaggcaattgatatgtggagccttggttgcgtgattgccgagctgtttttgggctggcccctgtatccaggcgcctccgaatacgaccagattcgatacatcagccagactcagggtctacccgccgaatatttactgagtgctggtaccaaaactacccgattcttcaatagggacactgactctccctatccgctgtggaggttgaaaactcccgatgaccatgaagccgagacagggattaaaagtaaagaggctcgcaagtatatcttcaactgtttggacgatatggcgcaagtaaatatgacaacagatctggagggtagcgacatgctcgtggagaaagccgatcggagagaatttatcgacctgctgaagaagatgctaacaatcgacgcggacaaacggattaccccaattgagactctgaaccaccctttcgtcaccatgacacacctcctggattttccacactccactcatgtgaagtcttgtttccagaatatggagatctgtaaaagaagggtgaatatgtatgacacagttaatcagtctaagacaccttttattacacatgtcgctccctcaacttcaaccaatctgactatgaccttcaacaaccagctgacaactgttcacaaccaaccttctgctgcctccatggctgccgtcgcacagcgctctatgccattacaaaccggaacagcccagatttgcgctagacctgacccctttcaacaggcactcatagtgtgcccccccggttttcagggactgcaggccagcccctcaaaacatgcaggctactctgtcagaatggaaaacgctgtgccgattgtcacacaggcacccggggcccagcccttgcagatacagcccgggctccttgcacagcaggcctggccaagcggaacccaacagattcttctgccccccgcgtggcagcaactgacaggcgttgcaacccatacctccgtgcagcacgccaccgtgatccccgaaactatggcaggtacacagcagctcgccgattggagaaacacccacgcccacggcagccattataatcctatcatgcaacagcctgccctgctgacaggacatgtgacgttgcctgccgcacagcccctgaacgtgggtgtcgcacacgtgatgcggcagcagcctacttccaccacaagcagccggaaatccaagcagcaccagagcagtgttagaaatgtgtccacctgtgaggtttccagtagccaagcgatttcttcaccacagaggtccaaacgggttaaggagaatacacccccccgatgtgcaatggtgcactcaagtccagcttgttcaacctccgtaacttgcgggtggggtgacgtagctagcagcacgacacgggaacgacagcggcaaacaattgttatacctgatacaccctctcctacggtgagcgtgatcacaatctcttcagataccgatgaagaggaggaacagaagcacgcccctacctctaccgtgagtaaacagagaaagaacgtaatctcatgtgtgacagtgcatgattccccttatagtgacagcagctccaacacgtccccatactcagtgcaacagcgagcagggcacaacaacgccaacgcttttgatacaaaggggtctttggaaaatcactgcactggcaacccaagaactattatcgtgccccctctcaaaactcaggccagcgaagtgctggtggagtgcgacagcctcgtcccagtgaacacttcccaccattcttccagctataagagtaagtctagttcaaatgtgacaagcacaagcggccacagcagtgggagcagttcaggagcaattacttacaggcaacaaaggccaggccctcactttcagcaacagcagcccctcaatttgagtcaggcccaacagcatatcaccactgatagaactgggagtcatcggaggcagcaagcatacataactcccaccatggctcaggcaccttacagtttcccgcataattcaccttcccacggcaccgtgcacccccacctggctgctgccgccgccgccgcacatttgccgactcagcctcatctgtatacatacactgccccagccgccctcggctccacaggtaccgtcgctcatcttgttgccagccaaggttcagcccggcatacagtgcaacacaccgcatatcccgcctctatcgttcaccaggtgccagtatccatgggaccaagggtcctaccttctcccactattcaccctagtcagtaccctgcccagttcgcacaccaaacctatatttctgccagccccgcctcgacagtatacaccgggtatcccctttcgcccgccaaggtgaaccagtacccatacatctag

SEQ ID NO: 190939 - DNA, 3648 bp, synthetic construct
  misc_feature 1..3648: note = Description of Artificial Sequence: Synthetic coding sequence
  source 1..3648: mol_type = other DNA
atggccagccaggtgctggtgtaccccccctacgtgtaccagacccagagctccgcgttttgttctgttaagaagcttaaggtggaaccttcctcctgcgtgtttcaagaaagaaactaccctcggacttacgtcaacggacgtaattttgggaacagccacccgcccacaaaggggtctgcattccaaactaagattccgttcaatcgcccgcggggccataacttctcactacagacctctgccgttgtgctaaagaataccgctggcgcaaccaaggtcatcgctgcccaagcacagcaggcccatgttcaggcaccccaaatcggagcctggcgtaatcgcctacatttcctggaaggaccgcagaggtgtggacttaagcggaagagcgaggagctagacaatcactccagtgccatgcaaatagttgatgagctcagtatactgcccgctatgttgcagacaaacatgggaaatccagtgacagtggtgactgctacaactggcagtaagcaaaactgcactactggagaaggcgactatcagctggtgcagcatgaagtgctgtgttcaatgaaaaatacctacgaggtgctcgatttcctgggcaggggcaccttcggccaagtagttaagtgctggaagaggggcactaatgagattgttgctatcaagatcttgaaaaaccatccatcctacgcgcggcaaggtcagatcgaggtatccattctggcgaggctttcgactgagaacgctgacgaatacaacttcgtgcgggcgtacgaatgcttccagcaccgcaatcacacctgtttagtctttgagatgctggaacagaatctgtacgacttcctgaagcaaaacaaattttcacctctacctcttaaggtcatcaggccgatcctacagcaggtcgctacggcccttaaaaaactgaaatctcttggcctcatacacgcagatctgaaacccgaaaatattatgcttgtggatcctgtgcgacagccctaccgggtgaaagttattgactttggctcggcgtcccacgtgtctaagacagtgtgctcaacttatctgcaatctcgatattacagagcccccgagattattctgggcttgccattctgcgaagcaatcgacatgtggagcctgggctgcgttatagccgaactgtttttgggatggccactgtaccccggagcactcgaatatgaccagatcaggtacatctcccagactcagggattaccgggggaacagctgttaaacgtgggcaccaaaagcactagatttttttgcaaggaaactgatatgtcgcactcaggctggcggctcaagactttggaggagcatgaagcagagaccggtatgaaatcaaaagaagcccgtaagtacatatttaattccctggacgacgtggcacacgtcaataccgtcatggacctcgaagggagcgacctcctggctgagaaggccgatcggagagaatttgtttctcttctgaagaaaatgcttcttatcgacgccgatctacgcataactccagcagagaccttgaatcaccccttcgtcaacatgaagcacttgttggacttcccgcatagtaaccacgtgaagtcctgctttcacattatggatatctgtaaaagtcacttgaactcttgtgacactaacaatcacaacaaaacatccctcctgcggcccgtggccagtagctcaaccgccactctcaccgctaactttaccaaaattgggacactcaggagccaggcactgacgacctcagcccatagcgtggtgcaccacggaattcctctgcaagctggcacagcccagttcggctgcggcgatgcgtttcaacagactcttatcatctgcccgcccgcgatccaggggatccccgcaacacatggcaagcccacgtcgtatagtatcagggtagataataccgttcctctagttacgcaggcaccggctgtgcagcccctccaaataaggccgggcgttctgtctcagacatggtccggacgcacccagcaaatgctggtccccgcatggcagcaagtgacgccgttggcacccgcaactacaacccttacttctgagagcgtggcgggtagccacagattaggcgattggggcaagatgatatcctgcagcaaccactacaactccgtcatgccccaacccctcctcactaatcagatcactctctctgcccctcagcccgtgagtgttggaattgcacacgtggtgtggccacaacctgctacaactaagaagaacaaacagtgccaaaaccgcggcattctggttaagctgatggaatgggagcccggaagggaagagatcaacgccttctcttggagcaactctctgcaaaataccaatattccccatagcgcctttatttctcccaaaatcattaacggaaaagacgtagaagaggtgtcttgcatagagacacaggacaaccagaacagcgagggggaggcaagaaattgttgcgagacctctattcgccaagattctgactcttcggtctctgacaagcagaggcagacaatcataattgccgacagccccagcccagcagtgtccgttattactatcagtagcgatacagatgaagaagagacgtctcaacgccattcattgagagagtgtaagggctccctggattgcgaagcctgtcagtcaacactgaacatcgatcggatgtgctccctgagttcgccggactctactctatctacaagcagcagcggccaatccagcccctctccctgtaaacggcctaattctatgagtgatgaagagcaggaaagctcatgtgataccgtagatggctcccccacgagtgactcctcaggccacgactctccctttgccgagagtaccttcgtcgaagacacccacgagaacaccgagttagtgtcctccgcagacactgagactaaaccagccgtgtgctccgtagttgtgccaccagtggagcttgaaaacggccttaacgccgatgagcacatggcaaatacggatagcatttgtcagcccctgatcaagggacgcagcgcgcctggcaggctcaaccagccatctgctgtcggtacaagacagcaaaagctgacaagcgccttccagcagcagcatctcaactttagccaggtgcaacactttgggagtggacaccaggagtggaacggaaattttggacacagaagacagcaggcctatatccctactagtgtcacaagcaacccctttacgctgagccacggaagtcctaatcatacagctgttcacgcccatttggctggcaatacccatcttggaggccagcctaccctcctgccttatccctcatctgctaccttgtccagtgcagctccggtagcacacctcttagctagcccctgtacatcacgacctatgctccagcatcccacctacaatatatcccaccctagcggcatagtacatcaggtgcctgttggactcaaccctcggctcctgccctctccaaccattcatcagacacagtacaaaccaattttccctccacattcttacattgcagcctccccagcttacacaggattcccgcttagccccacaaaactgtcacagtatccttacatgtag

SEQ ID NO: 190940 - DNA, 3585 bp, synthetic construct
  misc_feature 1..3585: note = Description of Artificial Sequence: Synthetic coding sequence
  source 1..3585: mol_type = other DNA
atggccagccaggtgctggtgtaccccccctacgtgtaccagacccagtccagcgctttctgttcagtcaagaagcttaaagtggaaccttcttcatgtgttttccaggagaggaactacccaaggacctacgttaacggccgtaatttcggaaatagccacccgcctaccaagggttcggctttccagactaagatcccatttaatcgaccccgcggccataacttctcactgcagacaagcgccgttgtgctgaaaaacaccgcaggcgctactaaggtgattgccgcgcaagcccaacaggctcacgtgcaggctcctcagattggggcttggcgcaaccgccttcactttttggaagggcctcagcgatgcggactgaaaaggaagtccgaggagctcgataaccattcctccgctatgcagatagtggatgaactctccatcctcccggctatgcttcagactaacatgggcaaccctgtcacagttgttaccgctactactggcagtaagcagaattgtactactggagagggcgattatcagttagtccagcatgaggtgttatgcagcatgaagaacacttacgaagttctcgatttcttaggtcgaggcacctttgggcaagtagtgaagtgctggaagagggggacaaacgagatcgtagctattaagattctgaagaatcacccctcttatgcgcgccaggggcagatcgaggtttcgattctcgcccgactgtccactgagaacgcagatgaatacaactttgtccgggcctatgaatgttttcagcatagaaaccatacatgtctcgtctttgagatgttggaacagaatctgtacgattttctgaaacagaacaagtttagccctctgccgctaaaagtgattaggccaatccttcagcaggtagccacagccctgaagaagctgaaaagcttgggtctgatacatgctgatctgaaaccagagaatattatgctcgtggatcctgtccgccagccttaccgagtgaaggtcatagactttgggtccgcttctcatgtctcaaagaccgtttgttccacatacctgcaatcccgctactatcgggctcccgaaataatcctgggactgcctttctgcgaagccatcgatatgtggtctctgggatgtgtgatcgctgaactcttcctcgggtggcctctgtatcccggcgcattggaatacgaccagataaggtatataagccaaacccagggactgccaggcgaacagctccttaatgttgggactaaaagtacccggttcttttgtaaagaaactgacatgtcccacagtggttggaggctgaaaaccctggaggagcacgaggccgagactggtatgaaatccaaggaggctaggaagtatatattcaacagtttggacgatgtggcccatgtgaatactgtcatggacttggaagggtccgacctgctggccgaaaaagccgatcgaagggagtttgtctctctgctgaaaaagatgctattgatcgacgccgacttgcgtatcacacctgctgaaaccctgaaccatcccttcgttaacatgaaacacctgctggacttcccccattctaaccatgtaaagtcctgttttcatatcatggacatatgtaagtcacacttgaatagttgtgatactaataaccataataagacctcactcctccggcccgttgcctcttctagtacagcgactctgacagctaacttcaccaagatcggtaccctgcggtcgcaagccttaaccacttccgcacactccgtcgtgcatcatggcattccactacaggccggcaccgcacagttcggctgtggggacgcctttcagcagactctgatcatttgcccgccggcaatccagggtatccccgctacccacggaaagccaacctcctatagcataagagttgacaacacggtgcctctggtcacgcaggctcccgctgtgcagccgctccaaatccgaccaggtgttctatcgcagacctggagtggccgcacacagcaaatgctggtgcccgcctggcagcaagtcaccccactggctcctgccactactacactgacctccgaatctgtcgcaggtagtcacagactgggagactgggggaaaatgatctcctgctcaaatcactacaactcagtcatgccccaacccttactgacaaaccagatcacactgtctgccccccaaccagtgagtgtgggcattgcccatgttgtctggccccagccggctaccaccaaaaaaaacaagcagtgccagaatagaagtaattccttacagaacaccaacattccacattccgccttcatctcccccaaaatcatcaatggtaaggacgttgaggaggtgtcctgtattgaaacacaagacaaccagaacagcgaaggcgaggcccggaactgctgtgagacctccatacgccaggattcagactcctcagtcagtgataaacagcgccagaccatcatcattgcggacagcccgagccccgccgtgtccgttataacgatttcctctgatactgatgaagaagaaactagccagcggcattcactcagggagtgcaaggggtccctggactgtgaagcctgccagagcaccctgaacattgatcgtatgtgttcactgtcaagcccagattcaaccctgtccacgagctcttccggccaatcttctccctcaccgtgcaaaaggcctaatagcatgagcgacgaggaacaggaaagctcttgcgatacagttgacgggtcccctaccagtgactcttccggccacgattctccttttgccgaatcaacatttgttgaagatacacacgagaatacggaactcgttagtagcgccgacaccgaaactaaaccagccgtgtgcagcgtcgtcgtaccccctgtggagctggaaaacggtttgaatgccgacgaacatatggctaacacagactctatctgccagccactcattaagggtagatctgctccaggccgactgaatcagccgtcggcagtgggaacccggcaacagaagctgacaagtgcgtttcagcagcagcacttaaacttctctcaggtccagcatttcggaagtggccaccaagagtggaatgggaattttggccacagacggcagcaggcttatatccccacatctgttacctccaacccttttactttaagtcatggttccccaaaccacactgccgtgcatgcacaccttgctggcaatactcacttgggcggtcagccaacgttactcccttaccccagcagcgcaactttgtcatctgcggcccccgtggcccatctacttgcgtccccttgtacatcacggcccatgctgcagcaccctacctacaatatcagtcacccttcaggtattgtacaccaggtacccgtgggactcaaccctcgcctgctgccatctcccacaatacatcagacacagtataaacctattttccccccgcatagttatattgccgcctcacctgcttacacgggattcccactgtctcctaccaagttgtcacagtatccctacatgtag

SEQ ID NO: 190941 - DNA, 3585 bp, synthetic construct
  misc_feature 1..3585: note = Description of Artificial Sequence: Synthetic coding sequence
  source 1..3585: mol_type = other DNA
atggccagccaggtgctggtgtaccccccctacgtgtaccagacccagtcttccgctttctgctctgtgaagaagctgaaagtggagccatcaagctgtgttttccaggaaagaaattatcctcgtacttatgtgaatgggagaaactttgggaactctcatccacctacgaaaggtagcgcctttcaaactaaaataccattcaacagaccacgggggcacaacttctcgctacagacatctgctgttgtgctcaagaataccgcgggtgcgactaaagtgattgcagcacaggctcagcaagctcacgttcaggctccccaaattggcgcttggcgtaaccgcctccacttcctggagggtccacagagatgcggtctgaagcgcaaatccgaggaactggataaccactctagtgctatgcagatcgtggatgagttgtcaatcctaccggccatgctccagacaaatatggggaatccagtgaccgtggtcactgccaccacaggcagtaagcagaactgtacgaccggtgagggagattatcagctcgtgcagcacgaggtgctctgtagcatgaagaacacatacgaggtgctggactttctggggagggggactttcggacaggttgtaaaatgctggaaacgcgggacaaacgagattgtggccatcaagatcctaaaaaaccatccatcctatgctcgacagggacagatcgaggtgagtatactggctagactgtcaaccgagaatgctgatgaatacaactttgttagggcatacgaatgctttcagcatcgcaatcatacctgtctggtgtttgagatgctcgagcagaacttgtatgattttttaaagcaaaacaaatttagtcctctgccacttaaggtgatccgccctattctgcaacaggttgccacagccctcaagaaactcaaaagtctgggcttaatccatgccgacctgaagccggaaaatatcatgcttgtggatcccgttagacaaccctatcgcgtgaaagtgattgatttcggaagtgctagccacgtgtccaagaccgtttgctcaacatatttgcaatcccggtactaccgcgccccagagatcattctgggcctgcctttctgcgaagcaatagacatgtggtccttgggttgcgtaatagccgaactgttcctggggtggccgctatacccaggagccttagagtacgatcagatcaggtatatcagccaaacacagggattaccgggggaacagctactgaacgttgggactaaatcgaccaggtttttctgcaaagagaccgatatgagccatagcggatggagactgaagacattggaagaacacgaagccgaaactggtatgaaatctaaggaagctcgcaagtacatctttaacagcttggacgacgtggcccatgtgaacactgttatggacctggaggggtcagatctgttggcggaaaaggcagaccgaagggagttcgtgtccctactcaaaaagatgctactgattgatgccgacctgagaattactccagctgagaccctgaaccatccattcgtgaacatgaagcacctcctcgatttcccacatagcaaccacgtgaagagctgctttcacattatggacatctgtaagagccacttaaacagctgtgacaccaacaaccataataagaccagtcttttgcgccccgtggcgtcatcttcaactgcaactctgacggctaactttactaagatcgggacgctgaggagccaagccttgacaactagcgcacatagcgtggtgcaccacgggattcccttacaggccgggacagcgcagttcgggtgtggtgacgccttccagcagacgctgatcatctgccccccagccatccaaggaattcctgcgacgcatggcaagcctaccagttatagtatccgcgttgataacacagttccacttgtgactcaggcccccgcagttcagccgctgcagattagacccggagtcctgtcccagacatggtcggggcggacacaacagatgctggtgcccgcatggcagcaggtgacccctttagcacccgcgaccactacactgactagcgagtctgtggcaggatctcaccggctgggagactggggaaagatgatcagctgtagcaatcattataactccgttatgccccagccactgctgactaaccaaatcacactgagcgcccctcagcctgtgtccgtcggaatcgctcacgtggtgtggcctcaacccgcaaccaccaaaaagaacaaacagtgccagaacaggtccaacagcctgcagaatacaaacatcccgcacagtgcattcatttcccctaaaatcatcaatggcaaggatgttgaagaagtcagctgtatcgagacccaggataaccagaacagcgaaggcgaggcgagaaactgctgcgagacaagtatcaggcaggattccgattctagtgttagcgacaaacaacggcagactatcattatcgccgactccccatcccccgcggtatccgtaattactatctcatctgacaccgacgaggaagaaacgtcccagagacattcactgagggagtgcaagggtagcctggactgtgaagcctgccagagcacactgaatattgatagaatgtgttccttgagctccccagacagtacactgtccacttctagctcaggccagtcatcaccaagcccttgcaagcgaccaaatagtatgtccgatgaagagcaggaatcctcctgcgatacagtggacggcagtcccaccagtgattccagcggacacgacagtccattcgctgagagcacgttcgtggaggatacgcacgagaatactgaactggtgagctctgccgacaccgaaactaagccagccgtctgctcagtagtggtacccccagtagagttagagaacgggttaaacgcggatgagcacatggccaacacagactccatttgccagcctcttattaaagggagatccgctcccggacgcctgaatcaaccctctgcggttgggacacggcaacaaaaactcacatctgcctttcagcagcagcacctgaacttttcacaggtacagcatttcggcagcggccaccaggagtggaatggaaactttgggcatcgaagacagcaggcatatatcccaacatccgtgaccagcaatccattcactctgtcccacggatcaccgaaccataccgctgttcacgcccatctggccggtaacacccacctgggcggacagccaactctgctcccgtacccctcctctgccaccctgtcctcggctgcccccgttgcccacctgcttgcgagcccttgcacctcacgtccaatgctccaacatcctacgtataacatcagccacccatcaggaatcgtgcatcaggtgccagtgggactcaacccccgacttctgcccagtcccacaattcatcagactcagtataaacctatttttccgccacactcatacatagctgcttcgccagcatatacaggattccccctgagtcctacaaagctgagccaatacccatacatgtag

SEQ ID NO: 190942 - DNA, 3585 bp, synthetic construct
  misc_feature 1..3585: note = Description of Artificial Sequence: Synthetic coding sequence
  source 1..3585: mol_type = other DNA
atggccagccaggtgctggtgtaccccccctacgtgtaccagacccagagcagcgccttttgtagcgtgaagaagctgaaggttgagccctcatcttgtgtcttccaggagcgtaactacccacgtacatacgtgaacggacggaactttggtaattcccaccccccaaccaagggttcagcctttcagaccaagatccccttcaatcgcccccgcggtcataacttttctctacagacttctgctgtagttctaaaaaacacagctggggccaccaaagttattgcagcccaagcccagcaggctcatgtgcaggccccacagatcggtgcctggcgtaatcgcctccactttcttgaggggccacagagatgtggcctcaagcgaaagagtgaagagctagacaatcactcttcggcgatgcagatcgtggatgagctgagcatcctcccagctatgttgcaaacaaacatgggaaacccagtgactgttgtgacagccaccacaggaagtaaacagaactgtactaccggagaaggtgactatcagctggtgcagcatgaagtgctttgttccatgaagaatacctatgaggtcttggactttttgggtagggggacatttggacaggtggtcaaatgctggaagcgaggcaccaacgagatagttgccatcaagatactcaagaaccaccccagttacgctagacaaggccagatcgaagtctccatacttgctcgtctatcaaccgagaatgcagacgaatacaactttgtacgggcttatgagtgcttccagcatcgcaatcacacctgcctcgtgttcgagatgctcgaacagaacttgtatgactttctaaaacagaacaagttctcacctctgccccttaaggtgattcggccgatcctgcagcaggtggcaacagcacttaagaaattaaaatcgctgggcctcatccacgctgacctgaagccagaaaacataatgcttgtcgacccagtcagacaaccataccgggttaaagtcatcgactttggcagcgcgtcccatgtatcgaaaactgtctgcagcacttacctgcagtcccggtattaccgcgcccccgaaattattctgggcctgcctttttgtgaagctatcgatatgtggtccctggggtgtgtaattgccgaattatttctcggatggcccctgtatcctggtgcacttgaatacgatcagattcggtatatcagtcagacccagggacttcccggggaacagttgcttaatgtggggaccaaatcaacccgcttcttctgcaaagagaccgatatgtcccactcaggatggcgtttgaagacccttgaggaacacgaggctgagactggtatgaagagtaaggaagcccgcaaatatatcttcaattcactcgatgacgttgcccacgtgaacacagttatggacctggagggctcagatctccttgcagagaaggctgacagaagggaatttgtgagccttcttaagaagatgctgctgattgatgccgacctgagaatcacacctgccgaaactctaaatcatccgttcgttaacatgaagcacttacttgattttcctcacagtaaccatgtcaagagctgcttccatatcatggacatctgcaagtctcacctgaatagctgcgatactaataaccataacaagacctctctcttgaggcctgtagccagctcctctacagccactcttactgcaaacttcactaagatcgggaccctccggtcgcaggcattgaccacttcagcccatagcgtcgtgcaccatgggatccccctgcaggccggaaccgcgcaatttggatgtggcgacgcatttcagcagaccctcattatctgcccaccagcaatccaaggcatccccgccactcacggaaaaccaacctcctattccatcagagtggacaatacagtgcccctggtgacacaagcccctgccgttcagcccctccagatccgtccaggcgtcttgagtcagacttggtctggaagaacacagcagatgcttgtgccagcctggcaacaggtcacccccctggcccctgctactaccacgttaacttctgaatccgttgctggatcgcaccggctcggagattggggtaagatgatttcttgctccaatcattacaattcggttatgcctcagcctttgctcactaaccaaatcacactgagtgctccacagcctgtgtccgtagggattgcccatgtagtgtggcctcaaccagccacaactaagaagaacaagcaatgtcagaaccggtccaatagcctgcagaacactaacattccccactctgcttttattagtcccaaaatcattaacggaaaagatgtagaggaggttagctgtatcgaaacccaggacaatcagaactccgaaggagaagccaggaattgctgtgaaacttctatccggcaggactcagacagctcagtgtcagataaacagaggcagaccatcatcatcgcagattctccatctcctgctgtcagcgtcattacaattagcagcgatactgacgaagaagagaccagtcagcggcactcactgcgggagtgtaagggaagcctggattgcgaggcatgccagtccactttgaacattgacagaatgtgcagtctgagttcccctgactccaccctttcaacgtcatcgtccggccagtctagcccttccccgtgcaagaggcccaattctatgagcgacgaagagcaggaatcttcctgtgacacagtggacggtagcccgaccagcgactcgtctgggcacgacagtccgtttgcagagagcacatttgtagaagatactcatgagaacacagagttggtctcaagtgcagacacggagaccaagccagctgtatgcagtgtggtcgtcccgcccgttgaactagaaaatgggctgaatgccgatgaacacatggcaaatacagattccatttgccagccactgattaaaggaaggtcagccccggggaggctcaaccaaccatcagccgttggaaccaggcagcaaaaactcacttcagctttccagcagcagcacctgaatttttcccaggtccagcattttgggtctggccaccaggagtggaacgggaacttcggtcaccgcaggcagcaggcgtacattccgacctcagtgacctctaatccatttactctgtcccatggcagtcccaatcacaccgctgtccacgctcacctggctggcaatacgcacctgggcgggcagcctacacttctcccatacccttcctcagcaacacttagtagcgccgcacccgtagcgcatctcttggcctccccttgtacaagccgtcctatgcttcagcatccaacatacaacataagtcacccttcaggcatcgtgcatcaggtgcccgtgggattgaatcctcgattgctaccctcccctacgatccatcaaacacagtataagcccatctttccaccccatagttatatcgcagcctcaccggcttatacagggtttccccttagtcccaccaagctgtcccagtacccctatatgtag

SEQ ID NO: 190943 - DNA, 231 bp, synthetic construct
  misc_feature 1..231: note = Description of Artificial Sequence: Synthetic coding sequence
  source 1..231: mol_type = other DNA
atggccagccaggtgctggtgtaccccccctacgtgtaccagacccaatcttcagcattctgttccgtgaagaagttgaaggtggaaccttcttcttgcgtgttccaggaacgtaactatcctcgaacctacgtgaacggacggaatttcggcaacagtcaccctcccaccaagggctccgcattccagacaaagatccccttcaacaggccacgaggccacaacttttag

SEQ ID NO: 190944 - DNA, 1851 bp, synthetic construct
  misc_feature 1..1851: note = Description of Artificial Sequence: Synthetic coding sequence
  source 1..1851: mol_type = other DNA
atgagcaccatccagagcgagaccgactgctacgacatcatcgaggtgctgggcaagggcacgttcggcgaagttgctaaggggtggcgccggtccacgggtgaaatggtggcaattaaaatccttaagaatgatgcctaccggaatcggatcataaaaaatgagttgaagttgcttcactgcatgcggggcttggacccagaggaagctcacgtgattaggtttttagagttctttcacgatgctcttaaattctacttagtttttgagctgctcgagcagaatcttttcgagttccaaaaggagaacaattttgccccgctgcctgccaggcatatacgaactgtgaccttgcaagtcctcacagcccttgcccggctgaaggagttagccatcatacacgccgatctgaaacctgaaaatatcatgctggttgaccagacccgctgcccattcagggtcaaagtcatagatttcggctcggcgtccatcttctccgaggtgcgctatgtgaaagagccatatatacaatcccgcttttatagggccccagagattctactggggctccctttttgcgagaaggtagatgtgtggagccttgggtgtgtgatggccgagttgcacctggggtggccactgtacccaggcaataacgagtatgatcaagtgcggtacatttgcgaaacacagggactcccaaagccacatctattgcacgctgcctgtaaggcccaccacttttttaagcgcaacccccatcccgatgccgccaacccatggcagctcaagtcttccgctgactacctggcggagacaaaagtaagacccttggaacgcagaaagtatatgctgaagtcacttgaccagatcgaaacagtgaacggtggctcagtggcctctaggctgacctttccagaccgtgaagctctggcagaacatgccgatctgaaatccatggtggagctcattaaaagaatgctcacttgggaaagccatgaaaggatcagtccttcggcggctttgaggcacccatttgtttcaatgcaacagttacgcagtgcccatgagactactcactactaccagttgagcctgcgtagttacagactgagcctccaggtcgagggcaagcctcccactcccgtcgtcgctgcggaagacgggaccccgtattattgcctggctgaggagaaggaggctgcaggaatgggttcggttgcaggcagctccccattctttagggaagagaaggctcctggaatgcagcgcgccatcgatcagctcgatgatctcagcttgcaagaagctggtcatggcctgtggggggaaacttgcacgaacgcagtgtctgacatgatggttcctctgaaagctgctattacagggcatcacgtgcctgactctggtccggagccaatcttggccttttactcgagccggctggccggaagacataaagccaggaaaccccccgccggaagcaagagtgatagtaacttttccaatctgatccggctgagccaggtgtccccggaagatgaccgcccatgccggggctcgtcttgggaggagggggaacaccttggggcctctgcagaaccattagcgatcttgcagagagatgaggatggacccaatatagacaatatgaccatggaggctgagaggccagatccagagctcttcgatccttcttcatgtcccggggagtggctttcagagcccgattgcactttggagagtgtgagaggtccacgggctcagggactcccgcctagacggtcccatcaacatggccccccccggggagctacgagctttctacaacacgtgactgggcaccattag

SEQ ID NO: 190945 - DNA, 1746 bp, synthetic construct
  misc_feature 1..1746: note = Description of Artificial Sequence: Synthetic coding sequence
  source 1..1746: mol_type = other DNA
atggtggccatcaagatcctgaagaacgacgcctaccggaaccggatcatcaagaacgagctaaagctgctgcactgcatgcgtgggctggacccagaagaggcgcatgtgatcaggtttttggaattctttcacgatgccctgaagttctacctggtttttgaactactggagcaaaacctgttcgaattccagaaggagaacaattttgcacccctgcctgcccgtcacatcagaactgttacccttcaggtattgactgccctcgctcggctgaaagagcttgccatcatccacgcagacctgaaaccggaaaacataatgcttgtggatcagaccaggtgcccattcagagtgaaagttatagacttcggatccgcttcaattttcagtgaagtccgctacgtgaaggaaccttatatccaatcaaggttctatagagctcccgagatccttctcggccttcccttttgcgagaaagtggatgtctggagtctcggatgtgtgatggctgaattacacctgggctggccactttatccgggcaataatgagtacgaccaggtcaggtacatctgtgagacccagggacttccgaaaccacacttgttgcatgctgcgtgtaaagcccaccatttttttaaaagaaatccccatcctgatgctgccaacccttggcagcttaaatcctcggccgactatctggctgaaactaaagttcggcccctggagcggcgaaagtatatgttgaagagtttagaccagatagagaccgtaaatggcggcagtgtggcctctcggttaacttttcccgacagagaagccctagcggagcatgccgacttgaagagcatggtcgagctaattaaacgaatgctgacatgggaatcacatgagcgcataagcccaagtgcggccctgagacatccattcgtttccatgcagcagttacgtagtgcccacgagacaacacattactatcagctatctctcagatcctatcgactgagcctgcaggtagagggtaagccgccaactcccgttgttgcggcagaggatggtaccccatactattgtttggccgaggagaaggaagctgccggaatgggatcagtggccggctcctctccattttttagggaggagaaggcaccaggcatgcagcgggcaatcgaccagctggatgatctaagtcttcaggaggccggccatggactctggggtgaaacttgcactaatgctgttagcgacatgatggttcctctcaaagctgctataactggtcaccacgtgccagatagcggaccagaacctatcctggctttctactcttctaggttggctgggcgacacaaggcaagaaaaccgccagcaggcagcaaaagtgactcaaacttttccaaccttatcagactgtcccaagtctctcctgaagatgatcggccatgtcgcggatctagttgggaggagggtgaacacctgggggcttcagccgaacccctggctatccttcagagggatgaggatgggccaaatattgacaacatgaccatggaggctgagcggccggaccctgagttgtttgacccaagctcctgccctggcgagtggctgtccgagcccgattgcaccttggaatccgtcaggggccctcgggctcagggtttgccgcctagaagatcccaccagcatgggcccccaaggggcgccacctcctttctccagcacgtgactggacaccattag

SEQ ID NO: 190946 - DNA, 675 bp, synthetic construct
  misc_feature 1..675: note = Description of Artificial Sequence: Synthetic coding sequence
  source 1..675: mol_type = other DNA
atgggcgagcagcccatcttcagcacccgggcccacgtgttccagattgacccaaacaccaagaagaattgggtccctacctctaagcacgcggtgactgtttcctacttttatgattctactaggaatgtgtatcggattatttccctggacggaagcaaggcgatcattaactcaaccataacgccaaacatgacattcacgaaaacatctcagaagttcgggcaatgggcagactccagagcaaacacagtttatggtctcggattttcctcagaacaccacttatccaaggtaacagagctcgagtgcgtctcgtctcaggcaaacgccgtccatacccacaagacagagcttaatcagactattcaggagctggaggaaacactcaaactgaaagaggaagagatcgagcgccttaagcaggagattgacaacgcccgggaactgcaggagcagcgcgacagcttaacgcagaagctccaggaagtggaaattcgtaacaaagacctggagggccaactgagcgacctagagcagcgcctggagaagtctcagaacgaacaggaggcattccgaaacaatctgaaaacattacttgaaattctggacggcaaaattttcgaactgacagaactgcgtgacaacctggcgaagctgctagagtgctcatag

SEQ ID NO: 190947 - DNA, 1065 bp, synthetic construct
  misc_feature 1..1065: note = Description of Artificial Sequence: Synthetic coding sequence
  source 1..1065: mol_type = other DNA
atgggcgagcagcccatcttcagcacccgggcccacgtgttccagatagaccctaacaccaagaaaaattgggtacctacttctaagcatgccgtcacagtcagttatttctacgacagtacccgcaacgtctatcgaatcatcagtctggacggatccaaggcgattatcaactcaactataactcctaatatgaccttcacaaagacctctcagaagttcggccagtgggccgattcaagagccaatacggtgtatggattgggattttctagcgaacaccacttgagcaagtttgccgagaagtttcaggaattcaaagaagctgctcggttagctaaggaaaaaagtcaggaaaagatggaactcacatccacaccttctcaggagtccgctggtggcgatcttcagtcacccctcactccagagagcatcaacgggaccgatgacgaaagaacccccgacgtcacacagaacagtgagccgagagctgaacccactcaaaacgctctcccttttagccactccagcgcgatttcaaaacactgggaagcagagttagccaccttaaagggcaataacgccaagctcacggccgctctcctggagtcgacggctaacgtcaagcagtggaaacagcagttggctgcgtatcaggaagaagccgagagactgcacaagagagtgaccgagttagaatgcgtgtcctcccaagccaatgccgtccacacacacaagaccgagctgaatcagactatccaggaactcgaggagacacttaagctgaaagaggaggaaatcgaaaggctaaagcaggagatcgataatgcccgcgagctgcaggagcagagggactccctcactcagaagctccaagaagtggagatcagaaataaggacctggaagggcaactgagcgatttggaacagcgcctggaaaaatcccagaatgaacaggaggccttccggaacaacctcaagacgctgctcgaaattctggatgggaaaatttttgaactcaccgagctgcgtgataatctggctaagcttttagagtgcagttag

SEQ ID NO: 190948 - DNA, 534 bp, synthetic construct
  misc_feature 1..534: note = Description of Artificial Sequence: Synthetic coding sequence
  source 1..534: mol_type = other DNA
atgggcgagcagcccatcttcagcacccgggcccacgtgttccagattgatcctaacacgaaaaagaattgggttccaacttcaaaacatgctgtgaccgtatcctacttctatgatagcactcgaaatgtgtatagaattatttccctcgatggcagtaaggctatcattaattcgacgattaccccaaacatgactttcaccaaaacgtcacagaaatttggacagtgggctgactcacgagctaatacggtatacggacttggatttagttcagaacatcatctgtctaaattcgccgaaaagttccaagagttcaaggaagctgctcgcctggctaaggagaagtcacaagaaaaaatggagctcacctctaccccttcgcaagagtccgccggcggtgacctgcagagccccctgactccggagtcgattaatggtactgacgacgagcgtactccagatgttacacaaaacagcgaacctcgtgctgaacccactcagaacgccctgcctttctctcacaggaaatag

SEQ ID NO: 190949 - DNA, 543 bp, synthetic construct
  misc_feature 1..543: note = Description of Artificial Sequence: Synthetic coding sequence
  source 1..543: mol_type = other DNA
atgggcagcgccatcagcaagcactgggaggccgagctggccacccttaaaggcaataacgcaaaactcacagcagcactgctcgagagcactgctaatgtgaaacagtggaagcagcagctggctgcttatcaggaagaagcagagcgactccataagagggtcaccgagctggaatgcgtgtcatcccaggctaacgccgtgcacacacacaagacggaacttaatcagaccatccaagaactggaggaaacactgaagctcaaggaggaagagatagaaagactgaagcaagagatcgacaacgccagggagctgcaggaacagcgcgactccctgacccagaagttgcaagaggtggagattcgcaacaaggacttagaaggccagttgtccgatctcgagcagaggctggaaaagtctcaaaacgagcaggaggcgttcaggaataacttgaaaaccttgttggaaatcctggacgggaagatctttgagctgactgaactgagagacaacctcgctaagctgctggagtgttcatag

SEQ ID NO: 190950 - DNA, 1065 bp, synthetic construct
  misc_feature 1..1065: note = Description of Artificial Sequence: Synthetic coding sequence
  source 1..1065: mol_type = other DNA
atgggcgagcagcccatcttcaccacccgggcccacgtgttccagattgatccaaataccaagaagaattggatgccggcaagcaagcaggcagtcactgttagctatttttacgacgtcacaaggaatagttacaggatcatatccgtggacggcgccaaagttatcattaacagtactataacccccaatatgacatttaccaagacctcccaaaagttcggacagtgggcggattcccgggccaatacagtgttcggactggggtttagcagcgaacaacagctgacaaagttcgccgaaaaattccaggaggttaaggaagcagccaaaatcgccaaggataaaacacaagagaagatcgagacgtcatctaatcactcccaggagtccgggcgagaaaccccttcttccacccaggcttcatcagtgaatggaacggacgacgagaaggcctctcacgcaggcccagccaatacacacctaaaaagcgagaacgacaagctgaaaatcgcactgacacagagcgccgccaacgtgaagaagtgggaaattgagttgcagacattaagggagtcgaacgcccgtctgaccactgctcttcaggagagtgcggcctccgttgaacaatggaagagacagttcagtatatgtcgagacgagaacgatcgcctaaggaacaagattgatgagttagaggaacagtgttctgagataaatagagagaaggagaaaaacacccaattgaaacgccgtattgaagaactcgaggccgagcttagagagaaggaaactgagctgaaagatctgcgaaagcagtccgaaataattccacagttgatgagcgagtgcgagtatgtgtccgaaaaactcgaagctgccgagagagataaccaaaatctggaagacaaagtgaggtcgctgaaaacagatatagaagagagcaagtaccggcaacggcatctaaaagtggagctgaaatccttcctcgaagtcctcgatggaaaaatagacgatctgcatgatttccggcgtggattgtctaaactgggaacggacaattag

SEQ ID NO: 190951 - DNA, 867 bp, synthetic construct
  misc_feature 1..867: note = Description of Artificial Sequence: Synthetic coding sequence
  source 1..867: mol_type = other DNA
atgggcgagcagcccatcttcaccacccgggcccacgtgttccagattgaccctaatactaaaaaaaactggatgccagcatcaaagcaggctgttaccgtctcctacttttatgatgttacccggaattcctaccgtatcatttctgtggacggggccaaagtcattattaactcaacgattacgcctaacatgaccttcaccaaaacaagccagaaattcgggcaatgggctgattcccgcgccaacaccgtctttggcctcggattttctagtgagcagcagctaaccaagttcgcagaaaagttccaggaggttaaggaggcggcgaagattgctaaggataagactcaggaaaagatcgagacttcaagcaatcattcacaagcgtcaagcgtgaacggtaccgatgacgaaaaagcctcccacgcaggcccagcgaacacccatcttaagagcgagaatgataagctcaagatcgctctgactcagtccgccgccaacgttaagaacgagatcaaccgggaaaaggagaagaacacacagctcaaaaggcgcatcgaggaactggaggccgagctgcgagagaaggagacggaattgaaggatctgcgaaagcagtccgaaatcataccccagttgatgagcgagtgtgagtacgtgagcgaaaagcttgaggcagccgagcgcgacaaccagaatttggaagataaggtgcggtcattaaaaaccgacattgaggagagcaagtacaggcagagacacctgaaagtggagttgaagagcttccttgaagtcctcgatggaaaaattgatgacttgcatgatttccgaagagggttgtctaagttgggaacagacaactag

SEQ ID NO: 190952 - DNA, 900 bp, synthetic construct
  misc_feature 1..900: note = Description of Artificial Sequence: Synthetic coding sequence
  source 1..900: mol_type = other DNA
atgggcgagcagcccatcttcaccacccgggcccacgtgttccagatcgatcctaatacaaagaaaaactggatgcctgctagtaagcaggccgtgacggtcagctacttctacgacgttacccgcaatagctacagaatcattagcgtggacggggctaaagtgatcataaactccaccatcacccctaatatgacctttactaaaacctctcaaaagttcggacaatgggccgactccagagcaaacaccgtgtttggcctcgggttttcgtccgaacagcagttaacaaagttcgccgagaaatttcaggaggtaaaggaggctgcgaagatcgccaaagacaaaactcaggagaaaatcgagacgagcagtaaccacagccaggagtcaggccgggagaccccatcctctacccaggccagttccgtaaacggaaccgacgacgagaaagcatctcatgcgggcccagctaacactcatctgaagagtgaaaatgataaacttaaaatcgctcttactcaatcagccgctaatgtgaagaacgagataaatagagagaaagaaaaaaatacccagctcaagaggcgaatagaggagctggaggccgaactcagagagaaagaaacggagcttaaagacctcaggaaacagtcagagataattcctcaattgatgagcgagtgcgaatatgtgtcagagaaactggaggccgcagaaagagataaccaaaatttagaggataaagtgcgcagtctgaagactgatatcgaggagagcaagtacaggcagaggcacttaaaggtagagctgaagtctttcctcgaggtgctggacggtaagatcgacgacctgcacgacttccgacggggtttatcaaagctggggactgacaattag

SEQ ID NO: 190953 - DNA, 1032 bp, synthetic construct
  misc_feature 1..1032: note = Description of Artificial Sequence: Synthetic coding sequence
  source 1..1032: mol_type = other DNA
atgggcgagcagcccatcttcaccacccgggcccacgtgttccagattgatcctaataccaagaaaaactggatgccagcgtccaagcaagccgtgactgtgagctacttctatgatgtaacaagaaactcttacagaattatctccgttgacggggctaaagtgatcattaactctactatcaccccaaatatgacttttacaaagacatctcaaaagttcggtcagtgggcagattctagagccaacacagtctttggattggggttcagtagcgagcagcaactcactaagttcgcagagaagtttcaggaagtgaaagaagcagcgaaaattgcaaaagataagacacaggagaaaatagagacgagctccaaccacagtcaggcgtcatctgtaaacggaaccgacgacgagaaggcttctcatgccgggcccgccaacactcatctgaaaagcgaaaatgacaagttaaagattgcattgacccaatccgccgctaacgtgaagaagtgggagattgaattgcagactttacgggagagtaatgcccgcctgacaacagcgctgcaggagtctgctgcaagtgtggagcagtggaaaagacagttttcaatctgccgggatgagaacgataggcttcggaataagattgatgaactggaggagcagtgctctgagatcaacagggagaaggaaaagaatacacagttgaagagacgaatcgaggaacttgaggctgagttacgtgaaaaagagacagaactgaaggacctgaggaagcaaagcgaaattattccacaactgatgtcggagtgcgagtacgttagcgagaaacttgaggctgctgagcgtgataatcagaacctcgaagataaggtgagatccctgaagaccgacatcgaggagtcgaagtaccgccagcgccatctcaaggtcgaactcaaaagcttcctcgaggttcttgacggtaagatcgatgacctgcacgatttcagacggggattgagtaagctaggcaccgataactag

SEQ ID NO: 190954 - DNA, 15 bp, synthetic construct
  misc_feature 1..15: note = Description of Artificial Sequence: Synthetic coding sequence
  source 1..15: mol_type = other DNA
tgaaccgacaactag

SEQ ID NO: 190955 - DNA, 4176 bp, synthetic construct
  misc_feature 1..4176: note = Description of Artificial Sequence: Synthetic coding sequence
  source 1..4176: mol_type = other DNA
atggccgtggagggcagcaccatcaccagccggatcaagaacctgctgaggtcaccttcgatcaaattgcggaggtccaaagcaggcaacaggcgcgaagacctgtccagtaaagttacattggagaaggtgctcggaattacggtgagtggcggccgggggctcgcctgcgatcctaggtctggcctggtggcttacccagccgggtgtgtagttgtgctgtttaatccaaggaagcataaacagcatcacatcctgaattcgtctcggaagaccattacggcactggcgttcagtcccgacggcaagtatctggtgaccggcgagtctggtcatatgcccgccgttcgggtgtgggacgtggcagagcatagccaggttgctgaactacaggagcataagtatggagtcgcctgtgtcgccttctcacctagcgccaaatatatcgtatcagtgggctaccagcacgacatgatcgtgaatgtgtgggcctggaagaagaatatcgttgttgccagtaataaagtttcctctagagtgaccgccgtgtctttttcagaagactgctcttatttcgtgaccgccggtaaccgccatattaagttctggtacttagacgactccaagacgagtaaagttaatgcaactgtgccacttcttggtcgaagtggtctgctcggcgagctgaggaataacctgttcaccgacgtagcctgcggacgaggcaaaaaggccgattctacattctgtatcacctcaagtgggctgctatgtgagttctctgatcgcagactgctagacaagtgggtcgaacttcgtgtctatccagaggtaaaagactctaaccaggcctgcctgcccccatcctctttcattacgtgttcctctgataacaccatcaggctatggaatactgaatccagcggcgtgcacggttcaacattacatcgaaatatcctgtcctcagatctgataaaaatcatctatgtggacggcaacacgcaagcccttctcgatactgaactgccaggaggagataaagcggatgcgtccctgttggatcctcgcgtggggatcaggtccgtttgtgtgtctcctaatgggcaacacctggcctccggtgataggatgggtacactgcgggtccacgagctgcaaagcctgtccgagatgttgaaggtcgaagcccatgattccgagatcctgtgtcttgagtacagcaagcccgataccgggctgaagctgctagctagcgccagtcgcgataggctgatccatgtcctggacgccggccgggaatactctctgcagcagacccttgacgagcattctagtagcatcaccgcggtcaagttcgctgccagcgacggacaggttagaatgattagctgcggcgctgataagtctatctatttccggacagcccagaagtcaggggacggcgtccagttcacccggactcaccacgtggttcggaaaacgacactttatgacatggacgtggagccatcctggaaatataccgccatcggctgccaggatcgcaacattcggatcttcaatatttcaagcgggaagcaaaaaaagttattcaaaggaagtcagggggaggatggaacccttatcaaagttcagactgaccccagcggcatttacattgccacatcatgctcagataagaacttatctatcttcgacttttcatccggtgagtgcgtggctaccatgtttgggcacagcgagattgtcacagggatgaaattttcgaacgactgtaagcatctcattagcgtgtccggcgatagctgcatattcgtatggagactatccagtgaaatgactatcagtatgcggcagcgtctcgccgagcttcggcagcgtcagaggggaggcaaacagcagggcccatcatctcctcagcgcgcttcaggcccaaatcgacaccaggctccctctatgctcagccccgggccggcactgagctcagattctgacaaggagggcgaggacgagggcaccgaggaggagctgccagccctgcccgtcctcgcgaaatctaccaaaaaggccttagcgtctgttccgtcacccgctctcccacgttcactgtcacactgggagatgtcacgcgctcaagagagtgtcgggttcttagatccagctccggcagcgaaccctgggccaagacggcggggcaggtgggtccaacctggcgtggaactaagcgtgaggagcatgcttgacctacgacaactggaaaccttggccccaagcttgcaggacccctcccaggattccttagcaatcataccatctggcccgaggaagcacggccaggaagctcttgagacgagcctcacttcgcagaacgaaaaacctccccgtccccaggcttcacagccttgtagttacccccacattataagactgttatctcaggaagaaggagtgttcgcccaggatttagagccagctcccatcgaggatggcatagtgtaccccgagccgtcagataaccctactatggacacgtccgaatttcaggtgcaagccccggctagaggcaccctgggccgggtatatcccggatcgcggtcctcggaaaagcactcacccgactcggcctgttcagttgattactccagctcttgtcttagctctcccgagcatccaaccgaagacagcgaaagcaccgaaccactgagcgtagacggcatatcttctgacttggaggagcctgccgaaggcgacgaagaagaagaggaggaggagggggggatggggccctatgggttacaagaagggagcccccagacccctgaccaggaacagttcctgaaacagcactttgagacactagcatcaggtgctgctccaggtgcccccgtgcaggtccccgagcgatcagagagtcgatcgattagcagccggttcctgctgcaggtgcagaccagacctcttcgagagccttctcctagctcttcatcacttgccctgatgtctcgaccagcccaagttccgcaagcctctggagagcaaccaagaggtaacggtgcaaatccacccggcgccccaccagaagtggagccctcttccggcaatccatctcctcagcaagccgcaagcgtcctacttcctcgatgcagattgaatccagatagctcttgggcaccaaagcgggtggctacagccagcccattctccggcctgcagaaggctcagagtgtgcactccctggtcccacaggagaggcatgaagcgtctttgcaggcaccaagccctggcgccctgctcagccgtgagatcgaggctcaggatggtctgggaagtctcccccccgcagacggccggccatctagaccgcactcctaccagaacccaacaacatcttcaatggcgaagatctccaggtctatttccgtgggggagaacctcgggcttgtggcagaaccacaagcacacgcccccattagggtctcacccttaagcaaactggctctaccatcaagagcccaccttgttcttgacatacctaaaccactgcctgacagaccaaccttggccgcgttcagtcctgtgacgaaaggaagagcccctggggaggctgagaaacccggctttcctgttgggctgggaaaggcccacagcactactgagcgctgggcttgtctaggggagggaaccactccaaaacccaggaccgagtgccaggcccatcctggaccctcctctccatgtgcacagcaactgcccgtgtcttccctgttccagggccccgaaaatctgcagcctcctccacctgaaaagacccccaaccccatggaatgcactaagcccggggccgccctcagtcaggacagcgagcctgccgtgagtctcgaacagtgcgagcagctggtggcagagctccgcggctccgtgcgccaggcggttcgtctctaccattcggtggccgggtgtaagatgcccagcgccgagcagagtcgcatcgctcagctcctccgcgataccttttcctccgttagacaagaacttgaggccgtcgctggagctgtcctctcaagccccggctcctcgcctggagcagtcggggctgagcaaactcaggccctgctcgaacagtatagcgagcttctgctccgggcagtagagcggaggatggagcgcaagctatag

SEQ ID NO: 190956 - DNA, 1077 bp, synthetic construct
  misc_feature 1..1077: note = Description of Artificial Sequence: Synthetic coding sequence
  source 1..1077: mol_type = other DNA
atgagcaccgcccgggagcagcccatcttcagcacccgggcccacgtgtttcaaatcgaccctgccaccaagagaaactggatccccgcaggtaagcatgccctgactgttagctacttctacgatgcaacccgcaacgtgtacaggattatttcaatcggcggtgccaaagctattatcaactcgactgtgacccccaatatgacctttaccaaaacctcgcagaagttcggacaatgggcagacagccgggcaaatacggtatatggcctcggattcgcatcagagcaacacttgacccaatttgccgaaaagtttcaggaagtgaaagaagccgcccggctggcaagggagaagtcccaggatggaggggagctcacatctccggccctaggcctggcgtcacaccaggttccaccctctccactggtgagcgctaatggtcctggggaagaaaagctgtttcgatcccaatccgccgacgcacccggcccaacagaaagagaaaggttgaagaaaatgctgagtgagggctccgtcggagaggtgcagtgggaagctgagttctttgctctccaggacagcaacaacaaactagccggagcgctgcgcgaggccaatgctgctgcagcccaatggcggcaacaacttgaagcacagagagcagaagcagaaagactgcggcagagagtggcagagctagaagctcaggccgctagcgaagtgactcctacaggcgagaaggaaggtcttggccagggccaatcgctggaacagctcgaagcactggtacagactaaagaccaggaaattcagaccctcaagtcccagactggtggccctcgagaggccctggaggccgctgagagagaggagacccagcagaaggttcagacgaggaacgccgaattggaacaccagctacgcgctatggagagaagcctagaggaggcacgagccgagagagagcgcgcccgcgcagaagtcgggagggcagctcaactcttagatgtgtcactctttgaactgtcagaactgagagaaggattggctaggctcgccgaagctgctccttag

SEQ ID NO: 190957 - DNA, 438 bp, synthetic construct
  misc_feature 1..438: note = Description of Artificial Sequence: Synthetic coding sequence
  source 1..438: mol_type = other DNA
atgagcaccgcccgggagcagcccatcttcagcacccgggcccacgtctttcagattgaccctgcaaccaagagaaattggatccccgccggaaaacacgccctaacagtgagctacttctacgatgccacaaggaacgtgtacagaattatctccatcggcggggctaaagctatcatcaattcaaccgtgacccctaatatgacctttacaaagacctctcagaagtttgggcagtgggccgactcaagagctaataccgtgtacggcctcggtttcgcctctgaacagcacttgacacagttcgctgaaaagttccaggaagtgaaagaggctgctcggctggcccgagagaagtcacaggatggatggggtgggccacagtcagcccttgtagtgggaagtttcggagcagtgtttgagctgctgatcgtttag

SEQ ID NO: 190958 - DNA, 1086 bp, synthetic construct
  misc_feature 1..1086: note = Description of Artificial Sequence: Synthetic coding sequence
  source 1..1086: mol_type = other DNA
atgagcaccgcccgggagcagcccatcttcagcacccgggcccacgtctttcagatcgatccagccactaagagaaactggattccagccggcaagcacgcactcacggtttcctacttttacgatgccacacgtaacgtgtacagaatcatctccatcggaggggcaaaagctatcattaacagtacagtgacccccaacatgacatttacaaagacctctcagaagttcggccagtgggctgactctcgagccaatactgtctacgggctaggatttgcttcagaacagcacctcacccagtttgctgagaagtttcaggaggtcaaggaagccgcccgattagcaagagaaaaatcccaggatggaggtgagctgactagccccgcccttggactagcttctcaccaggtgcctccttccccgcttgtgtccgctaatggtcctggggaagaaaaactctttaggtctcagtcagcagacgccccaggtccaacagagcgggaaaggctgaagaagatgctgtcagaaggttcagtcggagaggtgcaatgggaagctgagttctttgctctgcaagactccaacaacaagctagctggagctctgagagaggcaaatgcagccgcggcccagtggaggcagcagctcgaagctcaaagagccgaagccgagaggctccgccagcgcgttgctgagctcgaggcccaggcagcctcagaagttacaccaaccggggaaaaggaggggctgggccagggccagtcacttgagcaactggaggccctcgttcagactaaagatcaggagatacaaaccctcaagtcccaaaccggcgggccacgcgaggcacttgaggcagccgagcgtgaggagacccagcaaaaggtgcaggacttggagacacgtaacgccgaactggagcatcaactccgggccatggaacggtccctggaggaagcccgcgctgagcgggagagagcgagggcggaggtgggcagagctgcccagctgttggacgtcagtctcttcgagctgtctgagctccgcgaaggcctggcgagactcgcagaagcagctccctag

SEQ ID NO: 190959 - DNA, 1077 bp, synthetic construct
  misc_feature 1..1077: note = Description of Artificial Sequence: Synthetic coding sequence
  source 1..1077: mol_type = other DNA
atgagcaccgcccgggagcagcccatcttcagcacccgggcccacgtcttccagatagatcctgctactaaacgcaactggatcccagcggggaaacacgcactcaccgtctcttacttctacgacgcaaccaggaacgtttacagaatcatttcgattggcggggccaaagcaatcataaattccacggtcacccccaatatgacctttaccaaaacctctcagaagtttggacagtgggccgatagtagggccaacacagtgtacggactgggcttcgctagcgaacagcatctgacccagtttgccgagaagttccaagaggtcaaagaggccgcccgactcgccagggagaaaagccaggatggcggagagttgacatctcccgcactgggcttggcctcccaccaggtgcctccttcacctctcgtgtccgccaacggccccggagaagaaaagctgttccgctcccaatctgcggatgcgccagggcccacagagagggaaaggctgaaaaagatgctcagtgagggcagcgtcggcgaagttcagtgggaggctgaattttttgcactgcaagattcgaacaacaaactggctggtgctctcagagaggctaacgcagcggcagcccagtggaggcagcagctggaggctcagagggccgaagccgaaagattgcgccagcgtgtggcagaattagaagcacaggctgcttcagaagtgacccccaccggagaaaaagagggcctcggccagggtcagtccttggaacagctggaagcactcgtgcagaccaaagatcaggagattcaaaccctcaagtcacagacaggcggaccaagagaggcccttgaagccgctgaaagagaggaaacccagcaaaaggtgcagaccaggaatgcggagctagagcatcagctgagagccatggagcggagtctcgaagaggccagagctgagagagagagagcccgagcagaggtcggacgggccgcgcagctcttagacgtctcgctatttgagcttagtgaattgagggaggggctcgccagactcgccgaggccgccccctag

SEQ ID NO: 190960 - DNA, 1086 bp, synthetic construct
  misc_feature 1..1086: note = Description of Artificial Sequence: Synthetic coding sequence
  source 1..1086: mol_type = other DNA
atgagcaccgcccgggagcagcccatcttcagcacccgggcccacgtgttccagattgaccccgcaacaaagcgcaattggatccccgcaggcaaacatgcgctcacggtatcgtatttttacgatgcaacacggaacgtctatcgcataatcagtatcggcggtgctaaggccataatcaactcaacagttaccccgaacatgacattcaccaagacttcccagaagtttggccagtgggcggactccagagccaataccgtgtatggcctgggctttgcgagcgagcagcatttaacacaatttgctgagaagtttcaggaggtgaaggaggccgctcggctcgctcgcgaaaagtcccaagacggaggcgagctcacatcgccagctctgggactcgcctctcaccaggtgccgccctcccccttggtgtccgctaacggacccggggaggagaaattatttagaagccagtctgccgatgcccctggtcccactgaaagggagcgtcttaaaaaaatgctttccgaggggagtgtcggggaagtgcagtgggaggctgagttcttcgctctccaggacagcaacaacaagctggctggagcgcttcgggaagccaacgccgcggctgctcagtggcgccaacagctggaggcacagcgagcagaggctgagaggctgcggcaaagagtcgcagagctagaggcccaggcggcttctgaggtaacacccacgggagaaaaagagggtctgggccagggtcagtcccttgaacaactagaggctctcgtgcagacgaaggatcaagaaatacaaacactgaagagccaaacaggcggtccgagagaggcgttggaggccgcggagcgcgaagaaacacagcagaaagtccaagaccttgaaaccaggaatgcagaactggaacaccaactccgggcgatggaaagatccctggaagaagccagagccgagcgggagagagcccgagcagaagtggggagggcagcgcagctccttgatgtgagtcttttcgaactgagtgaactgagggagggcttggcgaggctcgctgaggctgctccatag

SEQ ID NO: 190961 - DNA, 1086 bp, synthetic construct
  misc_feature 1..1086: note = Description of Artificial Sequence: Synthetic coding sequence
  source 1..1086: mol_type = other DNA
atgagcaccgcccgggagcagcccatcttcagcacccgggcccacgtgtttcagatcgaccccgctaccaaacgcaactggattccagcgggtaaacatgctctgaccgttagttacttttacgacgccaccaggaatgtgtacagaatcattagcatcggcggcgccaaggctatcataaattctacggtcacacctaacatgacgtttaccaagacctcacaaaagtttggacagtgggcagattcacgagcaaatacagtgtatggactgggtttcgcaagtgagcagcatctcacccagtttgccgagaaattccaagaggtcaaggaggctgctcgcttggcccgagagaagagccaggacggtggcgaactcacaagccctgcactcggtctggcctcccaccaagtgcccccatccccattagttagcgctaacggaccgggagaagaaaagttattccgatcccagagcgcagacgcccctgggcccactgagagagaacgtctcaaaaaaatgctttcggagggcagtgtgggcgaggtccagtgggaagctgagttctttgcacttcaggattcaaataataagctggctggcgccctccgagaagctaatgctgccgctgcacagtggcggcagcagctggaggcacagagagccgaagccgagagacttcggcaacgtgttgccgagttggaagctcaggcagcatcagaggttacccctacaggagagaaagagggattaggccagggacaaagcctggagcagctggaagcgttggtccagaccaaggatcaagagattcagaccttgaaaagtcagaccggtggtccacgggaggcccttgaggcagccgaaagggaagaaacacagcagaaagtccaagatcttgaaacccggaatgccgaactggagcaccagttgagagccatggagcgtagccttgaagaagccagagccgagcgggaacgcgctcgcgccgaggttggccgagccgcccaactgctcgacgtgtcactctttgaactgagcgagcttagggagggcctggctaggctggctgaggccgctccctag

SEQ ID NO: 190962 - DNA, 978 bp, synthetic construct
  misc_feature 1..978: note = Description of Artificial Sequence: Synthetic coding sequence
  source 1..978: mol_type = other DNA
atgagcaccgcccgggagcagcccatcttcagcacccgggcccacgttttccaaatagatcctgctaccaaacgaaactggattcctgctggcaaacatgccctaacagtcagctatttttatgatgctacccgcaatgtatatcgcattatttcaatcggcggagccaaggcaattataaatagcacggttactccaaacatgacttttactaagacatctcagaagtttggtcagtgggccgactccagggcaaacacagtttacggcctgggcttcgcaagtgagcagcacttgacgcaggtgcccccatcacccctggtgagtgccaacgggcccggcgaagagaaactgttcaggagtcagtccgcagacgctcccggcccaacagagagggagaggttaaagaagatgctgtcagagggcagcgtaggagaggtgcaatgggaggcagagttctttgccctgcaggactccaataataagctggcaggcgccttaagagaggccaacgcggcggctgcacagtggcgacagcaactggaggcccagcgggcagaagccgagagattacgtcagagagttgccgagctggaggcacaggctgcctctgaagttactcctacgggggaaaaagagggtctcggccaggggcaaagcctggagcagctggaggctttggtgcaaactaaagaccaggagatacagaccctcaagtcccaaaccggcgggccacgtgaggctcttgaagccgccgagcgcgaagagacacagcagaaagtgcaggatcttgaaacacgcaacgccgaactggaacaccagttacgcgctatggagagatctctcgaagaagcccgggctgagcgtgagcgcgcccgcgcggaggttggacgcgcggctcagttgctcgatgtcagccttttcgaattgtccgaactaagagaaggcttggcacgtttggcagaggccgcaccatag

SEQ ID NO: 190963 - DNA, 1176 bp, synthetic construct
  misc_feature 1..1176: note = Description of Artificial Sequence: Synthetic coding sequence
  source 1..1176: mol_type = other DNA
atggagagcgagaccgagcccgagcccgtgaccctgctggtgaagtctcccaaccaacgtcaccgcgaccttgagctctctggagaccgggggtggtcagtcggccatcttaaggcacatctttctcgtgtctaccccgagcggccccgccctgaggaccagcgcttaatttactcgggaaaattgcttcttgatcaccagtgcttgagagacctcttaccaaaacaagagaaacggcatgtcctacacctggtgtgcaacgttaagtcgccttccaaaatgcccgaaatcaacgcgaaggtcgccgagtcaacagaggaacctgcgggcagcaatcggggccagtaccccgaggacagttctagcgatggactacgtcaacgcgaggttctgagaaacctttcttctccaggatgggaaaatatcagcaggcctgaagccgcacagcaggcttttcaaggcctgggacctggcttttccggatataccccttatggctggctgcagttatcttggtttcagcagatttatgccagacaatactacatgcagtacttggcggctaccgccgcaagcggtgccttcgttcctcctccttctgcccaggaaatacctgtcgtttccgcccccgccccggctccgatccacaatcagtttccggctgaaaatcagcctgcgaaccagaacgccgccccgcaagtcgtggtgaaccccggggcgaaccagaaccttcgcatgaatgcccagggtgggccaattgttgaggaagatgatgaaattaatcgggactggcttgattggacctattcagccgccaccttctcggtattcctcagcatcctgtacttctactcgtctctttctcgcttcctgatggttatgggggctacagtggtgatgtatctgcaccacgtcggctggttcccattccggccacgtcccgtacagaatttcccaaacgatggtcctccacccgacgttgtgaaccaggaccccaacaataatttgcaagagggtactgatcccgagacagaagatcccaatcatctgccacctgatagggatgtcctagacggtgaacagacttccccttcgttcatgtctacggcttggctcgtttttaaaactttttttgcatcgttgctgccggaaggcccaccagctatcgccaattag

SEQ ID NO: 190964 - DNA, 699 bp, synthetic construct
  misc_feature 1..699: note = Description of Artificial Sequence: Synthetic coding sequence
  source 1..699: mol_type = other DNA
atggagagcgagaccgagcccgagcccgtgaccctgctggtgaagtcccccaatcagagacatcgtgacttggaactttccggcgataggggttggtccgtagggcaccttaaggcacatcttagtcgagtgtaccctgagagacctcgacccgaagaccagaggctaatttatagtggaaaactgctcctggaccatcagtgtctcagagacctgctgcccaaagagaaaaggcatgtgctgcacctcgtctgcaacgttaagtcgccctctaaaatgcctgaaattaatgctaaagtagctgagagcacagaggaacccgcaggcagcaaccgtggccaatatcctgaagatagttcatctgacggcttgaggcagagggaagtcctgagaaacttatcttcacctggatgggagaatatctctcggcaccacgtcggatggttccccttcagacctcggcccgttcagaacttccccaacgacgggcctccacctgacgttgtgaatcaggaccctaataataatctgcaggagggcactgacccagaaaccgaggatcctaatcatttacctcccgatagggatgtgcttgatggcgaacagacatcaccttcattcatgtctacagcctggttggtgtttaagacattctttgcttccctcttacccgaaggaccgcctgcaattgccaattag

SEQ ID NO: 190965 - DNA, 1101 bp, synthetic construct
  misc_feature 1..1101: note = Description of Artificial Sequence: Synthetic coding sequence
  source 1..1101: mol_type = other DNA
atggagagcgagaccgagcccgagcccgtgaccctgctggtgaagtcaccaaaccagcgacatcgcgacctggaattgagcggtgacaggggttggtcagtcggacatcttaaggcacacttgtccagagtttaccccgaaagacctagacccgaagaccagaggctgatttatagcggcaaattattactcgatcatcagtgtttgcgagatctgctccccaaagtggccgaaagcaccgaggagcctgccgggtctaaccgtggccaatatcccgaggattcaagctccgacggcctccgtcagagggaagtactgagaaatctgtcaagtcccgggtgggagaacattagtagacctgaggccgcccagcaagctttccaggggctgggtccagggttcagcgggtacacaccttacggatggctccagctctcctggttccagcagatatacgcgagacaatactacatgcagtatttggctgctaccgcagcaagtggcgccttcgtgccacctcctagcgcccaagagattccggtggtgtctgccccagccccggcccctattcataatcagttccctgcagagaaccaaccagccaatcagaatgctgccccacaagtggtggtgaatcctggtgctaatcagaatttacgcatgaacgcgcagggaggacccatagtggaggaggatgacgagatcaaccgggattggctggattggacctactcagcagcaacgttcagtgtattcctcagtatcctttatttctacagtagcctgagccgtttcctgatggtgatgggagcaacggtggtcatgtacctgcaccacgtcggctggtttcccttccgccctagaccagtccagaatttccccaatgacggcccaccacccgatgtggtgaaccaggatcctaataacaatctgcaggaaggaacagatcctgaaacggaagatcctaatcatttgcctccggaccgggatgtactggacggcgagcagacttctccatctttcatgagtactgcttggctggtgtttaaaaccttttttgcttcgctactgccagagggcccccctgccatcgctaattag

SEQ ID NO: 190966 - DNA, 1173 bp, synthetic construct
  misc_feature 1..1173: note = Description of Artificial Sequence: Synthetic coding sequence
  source 1..1173: mol_type = other DNA
atggagagcgagaccgagcccgagcccgtgaccctgctggtgaagtctcccaatcagcgccacagggaccttgagctgtccggggatagagggtggagtgtgggccatttgaaggcgcacctgtcccgggtctatccagaaaggcctagacccgaagatcagcgtcttatatactccggcaagctgctgttagaccatcagtgcctccgggacttgttgcccaaagaaaaaagacatgtgttgcatttggtttgcaatgttaagtccccttctaagatgccggagattaatgctaaagtggcagagagtacagaggagccggccggatccaacagaggtcagtaccctgaggattcatcttccgatggcctccgccagcgggaggtcctacggaatctgagctcaccaggctgggagaacatatcccgccctgaagcagctcagcaggcctttcaggggctcggccccgggttcagcggctacactccgtacggctggctgcaactatcctggtttcagcagatctatgcccgccagtactacatgcaatatctggccgccacagccgccagtggcgcttttgttccccctccttctgctcaggagatcccagtggtttctgcccccgcccccgctccaattcacaatcagttccctgcggaaaaccagccagccaaccagaacgccgcccctcaagtggttgtgaatcctggcgccaaccagaacctcaggatgaacgcccagggggggcccatagtggaggaagacgatgaaattaaccgcgactggctggattggacgtactcagcagccacattttccgttttcctttccatcctgtatttttacagtagtctgtcccggttcctgatggtcatgggcgccactgtggtgatgtatctccatcacgtgggctggtttcccttccgcccccggcccgtccagaactttcccaacgatggccccccccccgacgtcgtgaaccaggacccgaataacaacctccaggagggaacggatcctgaaacagaggaccccaaccatctgccccctgacagggacgtcctggacggcgagcagactagtcccagttttatgagcacggcctggctggtgtttaaaacattcttcgccagtctcctacctgaggggccccctgctatcgccaactag

SEQ ID NO: 190967 - DNA, 1338 bp, synthetic construct
  misc_feature 1..1338: note = Description of Artificial Sequence: Synthetic coding sequence
  source 1..1338: mol_type = other DNA
atggccgagctgaagtacatcagcggcttcggcaacgagtgcagctccgaagacccgaggtgtccgggttcactccccgagggccagaacaatcctcaggtgtgtccttacaacctatacgccgaacagctttccggctctgcttttacttgcccaaggtctactaataagaggtcttggctataccgcatactgccttctgtgagtcacaagcccttcgaatctatcgacgagggccaggttacgcataattgggatgaggtggatccagacccgaatcagcttcggtggaaaccatttgaaattcccaaggcgagccaaaaaaaggtggattttgtgtccggactacacaccttgtgtggtgctggggatattaaatcaaataacggactggcgatacacatttttctgtgcaacacaagcatggaaaaccgctgcttttataattcagacggcgacttcctaattgtgcctcaaaagggcaatctcctcatttacaccgagttcggaaagatgttggtgcagcccaacgagatctgcgtgatacagaggggcatgagattcagtatcgacgtgttcgaagaaactcgtggctacatcctcgaggtatatggtgtgcactttgagttacccgacctgggtcctataggggctaatgggttggccaatcctagagacttcctgatcccgatcgcctggtacgaagacagacaggtgccgggaggttacacagtgataaacaaatatcagggaaaactttttgctgcaaaacaggatgtcagcccttttaatgtggtcgcttggcatggaaattacacgccctacaaatacaatctgaaaaacttcatggtgattaactccgtggcatttgaccacgcagatcctagcatttttactgtactaaccgcaaaaagcgtaagacccggggtagcaattgctgacttcgtgattttccctcctcgttggggtgtggctgataaaacttttagacctccctactaccatagaaattgtatgtccgagttcatgggcctcattcgcggccactacgaggccaagcagggggggttcctgcccggggggggaagcctacactccacgatgacccctcatggaccagatgccgattgttttgagaaagcctcaaaggtcaaacttgcccctgagcgtattgccgacggcacaatggcctttatgttcgaatcatcattaagcctggccgtgaccaaatggggcctgaaagcctcaagatgtttggacgagaactaccataagtgctgggaaccactaaaaagccacttcacacctaatagtagaaatcccgctgaacccaactag

SEQ ID NO: 190968 - DNA, 2187 bp, synthetic construct
  misc_feature 1..2187: note = Description of Artificial Sequence: Synthetic coding sequence
  source 1..2187: mol_type = other DNA
atggaggagacccagccccccccccagcccaagctgcccctgtgcgacagccttatgatttggctacagacttttaatacggcaagcccatgccaggatgttaagcagctgacatcaggagttgctatggctcaggtacttcaccaaatagacgccgcctggtttaatgagagctggctgagcagaatcaaggaggatgtcggagacaattggcgaatcaaggccagcaatgtgaaaaaagtgctacaaggtattatgagttattaccacgaattcctgggtcagcagatctcggaagcattaatacccgatctgaatcagataacggagtgttctgatcccgtggagttggggagattgctccagttaattctgggatgcgccataaactgcgaaaaaaagcaggagcatatacagaatattatgactctcgaggagagtgtgcagcacgttgtaatgacagccattcaggagctgatgagcaaggaaatcctgtcaagtccaccaaatgatgccgttggggagctggagcagcagctaaagagagcactcgaggagttgcaagaagcgctggcggagaaggaggagctgagacaaaggtgcgaggaactagatatgcaggttactacgcttcaggacgagaaaaactcactggtctccgaaaacgagatgatgaacgagaaactcgaccaactggatggctcattcgacgacccaaacaccgtcgttgcgaagaaatactttcacgcgcagctccagctggagcagctgcaagaagagaattttagattggaagccgcgaaggatgactacagagtgcactgcgaggaactagaaaaacaacttatcgaatttcaacacaggaacgacgagctcacatctctagccgaagagactcgagcattgaaggacgagattgacgtgcttagggccacgagtgataaagccaataaacttgaatcgactgtggagatttaccgccagaagttacaggacttgaacgatttgcggaaacaagtcaaaaccttgcaggagacgaatatgatgtatatgcataacactgtctcacttgaagaggaactgaaaaaggccaacgccgcaaggactcagcttgagacctacaaacggcaagttcaggacttgcatgtgaagctgtcctccgagtcaaagagagcagacacccttgcctttgaaatgaagcggctcgaggagaagcatgaagccctgctgaaagaaaaagagagattgatcgagcaacgggatactctgaaagagactaacgaggagctgcgctgcagtcaagttcaacaggatcatcttaaccaaacggacgccagtgctactaagagctacgagaatcttgcagcagaaatcatgcctgtcgaatacagagaggtgtttattcgccttcagcacgagaacaaaatgctcagacttcagcaggagggctctgagaatgaaagaatcgaagaactgcaagagcagttagagcagaagcaccgtaaaatgaacgaattagagacggagcagaggctgagcaaggagcggattagagagttgcaacagcagattgaagatctgcagaaatcattacaggagcagggttccaagtccgaaggtgaatcaagtagcaaactgaaacaaaaattagaggcccacatggaaaaactgacggaagtacatgaggagctgcagaaaaagcaggaacttatcgaagatttgcaaccagacataaatcagaacgttcagaagatcaacgagctcgaggcagcccttcagaagaaggacgaggacatgaaagccatggaggaacggtataagatgtatctggaaaaagcccgcaacgtgattaagaccttagatcccaagctaaatccagccagcgcggaaataatgctgctgcgcaagcagttagccgagaaggagcgccggatagaaatcctcgagagtgaatgtaaggtcgccaagttcagagattacgaagagaagctgatcgtgagtgcttggtacaacaagagcctcgctttccagaagttaggtatggagtcgaggctcgtctccgggggtggtgcatgtagcgacacaggtgcttgtactccagctcgaagttttctggctcagcagagacacatcactaatacacgccggaacctctctgtcaaggtcccagccacaacttccgactag

SEQ ID NO: 190969 - DNA, 2061 bp, synthetic construct
  misc_feature 1..2061: note = Description of Artificial Sequence: Synthetic coding sequence
  source 1..2061: mol_type = other DNA
atggcccaggtgctgcaccagatcgacgccgcctggttcaacgagagctggctcagtaggataaaggaagacgtgggtgacaattggagaatcaaggcttccaacgttaagaaggtgctgcaaggcattatgtcttattatcatgagttcctcgggcagcagatttcggaggcactgattcccgacctgaaccagatcacagagtgcagtgatcccgtggaacttggacggctactgcaattgatcttaggatgcgccattaattgcgagaagaaacaggaacatatccagaacatcatgactctggaagagagcgtacagcacgtggtgatgaccgcgattcaggaactgatgtcaaaggagatcctgagctcacctcccaacgatgcagtgggagagctggagcagcagctcaaacgtgccctagaggaactacaggaagcgctggctgaaaaggaggagctccgccaaaggtgcgaggaactcgacatgcaggtgacaacactgcaggacgaaaaaaactcccttgtttctgaaaacgagatgatgaacgaaaaactcgaccagctggatggctctttcgatgaccccaatacggtggtggccaaaaagtacttccacgctcaactacaactggaacagctccaggaagagaacttcaggcttgaagcagccaaagacgattatcgtgtacactgtgaggagctggaaaaacagttgatcgagtttcagcatcgaaacgacgaacttacaagcttggctgaggagacgagagccctgaaggacgaaattgatgtgctacgggctaccagtgacaaggccaataaactggagtctacagtggagatttatcgacaaaagctgcaggatctgaatgacctgcggaagcaggttaaaaccctccaagaaacgaatatgatgtacatgcacaacacagtgtccctggaggaagaacttaaaaaggcgaatgcagccaggactcagcttgagacgtacaagaggcaggtgcaagatttacatgtcaagctgtcctctgagtctaagagagccgacaccctggccttcgaaatgaaaagattagaggaaaaacatgaggcactactgaaggaaaaagagagactgatcgaacagagggacaccctaaaagagaccaatgaagagttgcgctgcagtcaggtccagcaagatcacttgaaccagactgatgcctctgctaccaagtcgtacgagaatcttgccgcagaaatcatgcctgtcgaatatagggaggtttttattcggctgcagcacgagaataaaatgctcaggttgcagcaggagggcagtgaaaatgagagaattgaagaacttcaagagcagctggagcagaagcaccgaaagatgaatgaactcgaaaccgaacagaggctttcgaaggagcggatcagagaactccaacagcagatcgaggacctccaaaaaagcctacaagagcagggaagcaaatccgagggcgaaagctcgtctaaactgaagcaaaagctggaggcccacatggaaaagctgactgaggtgcatgaggaactccagaaaaagcaagaactaattgaggatctacagcctgatattaatcagaacgtccaaaaaattaacgaactggaagcagccttgcagaaaaaagacgaggacatgaaggccatggaggaaagatataaaatgtatctggaaaaggcacgcaacgtgatcaagacgctggacccgaaactgaaccccgcatcagcagagattatgttgctcagaaaacagttagcagaaaaggaacggcggatagaaattctggaaagcgagtgtaaagtggcgaagttccgagattacgaagaaaagttgattgtgagcgcgtggtacaacaagtccttggccttccagaagttggggatggaatctcgcctggtttcgggaggcggcgcctgttccgatacaggcgcctgtactcctgcacggtcttttcttgcccagcagcgccatataactaatactcgcagaaatctgtctgtgaaggtgcctgccaccacaagcgactag

SEQ ID NO: 190970 - DNA, 414 bp, synthetic construct
  misc_feature 1..414: note = Description of Artificial Sequence: Synthetic coding sequence
  source 1..414: mol_type = other DNA
atggaggagacccagccccccccccagcccaagctgcccctgtgcgacagtcttatgatatggttgcagacctttaacacagcatccccttgtcaagacgtaaaacagctcacctcgggtgttgccatggctcaggtgctacatcaaatagatgcggcctggttcaacgagagttggctctcaaggattaaggaagacgtcggcgataactggaggatcaaagcctctaacgttaagaaggttctgcaagggataatgagctactaccacgagtttctgggccagcagatcagtgaagccttaatccccgacctcaaccagattaccgaatgctccgaccccgtggaattaggacggttgctccagctgatactggggtgcgcaatcaactgcgagaagaagcaggaacactag

SEQ ID NO: 190971 - DNA, 2154 bp, synthetic construct
  misc_feature 1..2154: note = Description of Artificial Sequence: Synthetic coding sequence
  source 1..2154: mol_type = other DNA
atgagcgtggacaaggccgagctgtgcggcagcctgctgacctggctccaaacattccatgtcccatccccctgcgccagcccacaggatctaagcagtggacttgcggtagcctacgtcttaaaccagatcgacccctcttggttcaatgaagcctggttgcagggtatttctgaagatcctggcccgaattggaaactcaaagtgtcaaacttgaagatggtgttgaggagcctggtggaatattcccaggacgtccttgcacaccccgtgagcgaagaacatctgccagatgtgagcctgatcggggaattctcggaccccgcagagctcggaaaattgctacagctcgtattaggctgtgcaatctcctgcgagaagaagcaggaccatatccagcgtataatgacgctggaggaatctgttcagcatgttgtgatggaagccattcaggagctcatgaccaaggatacccctgactccttatcaccggaaacctacggtaacttcgatagtcagagcaggagatactatttcctgtcagaggaagccgaggagggtgacgagctgcagcagaggtgccttgacttggagcgtcagctaatgctgttgagcgaagagaaacagtccctggcgcaagaaaacgccgggctgagggagcggatgggacggcccgaaggggagggtacgcctggcctcacagccaagaaacttctactgctgcaaagtcagctggagcagctccaggaggaaaacttccgtctcgagtccggacgggaagacgaaagactgcgttgtgctgaacttgagcgggaggtagccgaactgcaacatcgcaatcaggcactgaccagcctcgcccaagaggcgcaagccttaaaggatgaaatggatgaacttagacagtccagtgaacgtgctggccaattggaagcgacactcaccagttgcaggaggcgacttggggaacttcgcgagctgcgaagacaagttcggcagcttgaggagagaaatgcggggcacgccgaacgcacaagacagctggaggacgaactgcgccgcgccggcagcctgcgagcacagctcgaggcacagcggaggcaagtacaagagctgcagggacagcgtcaggaagaggccatgaaagcagaaaagtggctttttgagtgccgaaatctggaggaaaaatacgagtctgtaaccaaagagaaggagaggctgctggcagaacgagactcattgcgtgaggctaatgaagaacttcgctgtgcacagctccagccccgcggcttgactcaggccgatccctcgcttgaccctacttcaacccccgtcgacaatctcgcggcagaaatcctaccagcagagctgcgcgagactctgctgaggctgcaactagagaataaaaggctttgtagacaggaggctgccgatcgcgaacgacaggaggaactgcagcggcatctggaagacgcgaatagagccaggcatgggcttgagacacaacaccgcctgaatcaacagcaactgtccgagcttcgcgcgcaggtcgaggacttgcaaaaagcgttgcaagagcagggtggcaaaactgaggattccatcttgctcaagcgcaaactggaagagcacctccagaaacttcacgaggctgatctcgagttgcagcggaagagggagtacattgaggagcttgaaccaccaacggattcttccacagccagaaggattgaagagctccagcataaccttcagaagaaggacgccgatctgcgcgccatggaggaacgttaccggcgctatgtggacaaggctaggatggtaatgcagaccatggaaccgaagcagcgcccggctgctggtgctccgcctgagctgcactcacttagaacacagttgagagagagagatgtcagaatcaggcatttggaaatggattttgaaaaatctcggagccagagggagcaggaggagaagctgctgatctctgcctggtacaacatgggaatggctctgcagcagagggcaggcgaggagagggcgcctgcgcatgctcagtcctttctagctcagcagcggttggccacaaattcacgtagggggccattaggcagattggccagtttgaatctgcgccctacggacaagcattag

SEQ ID NO: 190972 - DNA, 2160 bp, synthetic construct
  misc_feature 1..2160: note = Description of Artificial Sequence: Synthetic coding sequence
  source 1..2160: mol_type = other DNA
atgagcgtggacaaggccgagctgtgcggcagcctgctgacctggctacagacatttcatgtacccagcccttgcgcttctccccaggacttgtcaagcggcctggctgtcgcttacgtgctgaaccaaatcgaccctagttggttcaatgaggcctggcttcagggcatctctgaggaccccgggcccaattggaagctgaaggtctcaaacttgaagatggttctgagaagcctcgtggagtatagccaggatgtgctcgcccacccggtgagcgaagagcacttgcccgatgtcagtttgattggggaattctccgatccagcagagctcgggaagcttctccaactagtgttaggctgcgccattagctgtgagaagaaacaggatcacatccaacggataatgactctggaggagtcagtccaacacgtggttatggaagcaatccaggagcttatgacgaaggatacacctgactctctgagccccgagacgtacggaaatttcgacagccaatcccgaaggtattacttcctttcagaggaagcagaggagggcgacgagctgcagcagcggtgtctggacctggagcgccaattaatgctgctgagcgaagagaagcaatctctagcacaggagaacgctgggctccgcgaaagaatgggacgcccggagggggaggggactccaggcctcactgcgaagaaacttttactgctgcaatcccagcttgagcagctacaggaagaaaatttccgattggaatccggccgcgaggatgagagactaaggtgtgctgaactagagcgcgaggtggccgaacttcagcaccgaaaccaagccctgacctccttggcacaggaagcacaagcgctgaaagatgagatggatgaactgcggcagagctcagagcgagccggtcaacttgaagctacacttacatcatgccgacgaaggttgggggagctaagagaactgcggaggcaggtcagacagctcgaagagcgaaacgccgggcacgccgagagaacgcgccaattggaggatgagctaaggcgcgcagggagcctcagagcacagctagaagcacagaggaggcaggttcaggagctacaaggccaacggcaggaggaggctatgaaggccgagaagtggcttttcgagtgtaggaacctggaggagaaatacgagagcgtgactaaggagaaagaaaggctattggctgagcgggattctctccgggaggcaaacgaggaattgcgatgcgcccagcttcaacctcgagggctaactcaggctgacccaagccttgaccccacttccacacccgtagataaccttgccgcagagatcttgcctgccgagctgcgggaaacgttactgcgacttcagctcgagaataagagactctgtcggcaagaagccgccgacagagaaaggcaggaggagttacagaggcacttggaagatgctaaccgggcaagacatggactcgaaactcaacaccgactcaatcagcagcagttatctgagttgagggcacaagtcgaagaccttcagaaagcgctgcaggagcaagggggcaaaactgaggatgctatttccattctgctgaagagaaaactggaagaacatctgcagaaactccacgaagctgatctcgagttgcagcgcaagcgggagtacattgaggaattggagccgcctacggactcctctacggcaagaagaattgaagaactccaacacaatctgcagaaaaaggatgcggatcttagagcaatggaagagagatacaggcggtacgttgacaaagccagaatggtgatgcaaacaatggaacccaaacagaggccagcagcgggggctccaccagaattacactctctgcgcacccagctgagagagcgcgacgtgaggatccggcacctggaaatggacttcgaaaagtccaggtctcagcgtgagcaggaggaaaaactgctaatctccgcatggtacaacatggggatggccctgcaacagcgagccggcgaagagcgggcccccgcacacgcccaatctttcctggcacagcagcggttggctaccaacagccggcgcggccccttagggcgattggccagccttaatcttcgccctacagacaagcactag

SEQ ID NO: 190973 - DNA, 2157 bp, synthetic construct
  misc_feature 1..2157: note = Description of Artificial Sequence: Synthetic coding sequence
  source 1..2157: mol_type = other DNA
atgttcagcgtggagagcctggagcgggccgagctgtgcgagagcttactgacatggattcagacatttaatgttgatgcaccttgtcagacggtcgaggatctgacaaacggagttgtcatggcacaagttctgcagaaaatcgaccctgcctattttgacgaaaattggcttaaccgaattaagactgaagtcggcgacaactggcgactgaagattagcaacctgaagaagatattaaaaggtatcctggactacaaccacgaaatattaggacagcagattaacgactttaccctcccagatgtgaatctgatcggcgagcacagtgatgctgctgaactcgggcgtatgcttcaactgattctaggatgcgcagtgaattgtgaacagaaacaggagtatattcaagccataatgatgatggaagaatccgtgcagcatgtcgtaatgaccgccatacaggagctgatgtccaaagaatcacctgtgtcagccggtaatgatgcctacgtcgacctggaccgacagctcaaaaagacaaccgaagagctcaacgaagccttgagcgccaaagaggaaattgcccagaggtgccacgagcttgacatgcaagtggccgccttgcaggaggagaaaagctccctcctggccgagaatcaggttctgatggaacgactgaatcagtctgatagcatcgaggatcccaactcccccgccgggagaagacacctgcagctccaaacacagttggagcagctgcaagaggagaccttccgcctcgaagctgcaaaggacgattatagaatcagatgcgaggaactggagaaagagatatcagaactccgccagcaaaatgacgaactgactacccttgctgatgaggcccagagcctgaaggatgagattgacgtcctcaggcacagcagcgacaaagtgtctaagttggaagggcaagtcgaaagctacaagaagaagcttgaggatctcggggatctcaggcgacaagtaaaactgctggaagaaaaaaacacaatgtatatgcaaaacactgtttccctcgaggaggagctaaggaaagccaacgctgcgagatcacagctggagacctataagcggcaagttgtcgagctacagaatcggctatccgaggagtccaaaaaggcagacaagctggacttcgaatataagcgcctaaaggagaaagtggactcacttcagaaagaaaaggaccggctcagaacagagagagactcactgaaagagacaatagaagagctgaggtgtgtgcaggcacaggaaggccagctgaccacccagggcctgatgcccctgggttcacaggaatcttcggactctctggcagcagaaatcgttacgcccgagattcgggaaaagcttatccgcctgcagcacgagaataagatgttgaagctaaatcaggagggaagcgacaacgagaagatcgcactgctacagagcttgctggatgacgcaaatctccgcaaaaatgaactggagaccgagaacaggctggttaaccaacggcttctagaagtgcaaagtcaggtagaggagctgcaaaagtcactccaagatcaaggctccaaagcagaggattccgtgctgctcaaaaagaagctagaagaacaccttgaaaaacttcatgaagcaaataatgaattgcagaaaaaacgggccatcattgaagatctcgaacctagatttaacaattcatcactgaaaattgaagagctgcaggaggcccttagaaaaaaggaggaagaaatgaaacagatggaggaaaggtataaaaaatacttagagaaagccaaaagcgtaattaggacgttggacccaaaacaaaaccaaggggcggctcctgaaatccaggctctcaagaatcagttgcaggagcgtgatagattgtttcattcacttgagaaggagtatgaaaagactaaatcgcagcgcgagatggaggagaaatacattgtgagcgcttggtacaacatgggaatgaccctgcacaaaaaagcagctgaagaccggctggcctctactggatccggtcagagtttcctcgcccggcagcgacaggccacctcttcccggagaagttacccaggccatgtgcagcctgcaacagctagatag

SEQ ID NO: 190974 - DNA, 222 bp, synthetic construct
  misc_feature 1..222: note = Description of Artificial Sequence: Synthetic coding sequence
  source 1..222: mol_type = other DNA
atgagcgccgagaccgccagcggccccaccgaggaccaggtggagattctggagtacaatttcaataaggtcgataaacacccagatagcaccacactctgcttaatcgctgccgaagccgggttatctgaagaagagactcagaaatggtttaaacaacggctggcgaagtggcgccggagtgaggggttgccatccgagtgtaggtcggttaccgactag

SEQ ID NO: 190975 - DNA, 222 bp, synthetic construct
  misc_feature 1..222: note = Description of Artificial Sequence: Synthetic coding sequence
  source 1..222: mol_type = other DNA
atgagcgccgagaccgccagcggccccaccgaggaccaggtggagatactggagtacaacttcaataaagtggacaaacaccccgatagcaccactttgtgtctcatagcagctgaggcagggctgtcagaagaggagacacagaaatggttcaaacagcgcctcgccaaatggcgacgctcagaaggtctccccagtgagtgtcgctctgtgacggactag

SEQ ID NO: 190976 - DNA, 222 bp, synthetic construct
  misc_feature 1..222: note = Description of Artificial Sequence: Synthetic coding sequence
  source 1..222: mol_type = other DNA
atgagcgccgagaccgccagcggccccaccgaggaccaggtggagatcctggaatacaacttcaataaagtagacaaacatccggattcaacaaccctctgcttgattgccgccgaagccggactctcagaggaagagacccagaaatggtttaaacagcgattagccaaatggaggaggagtgagggtctgccgtcggaatgtaggtctgttacagactag

SEQ ID NO: 190977 - DNA, 285 bp, synthetic construct
  misc_feature 1..285: note = Description of Artificial Sequence: Synthetic coding sequence
  source 1..285: mol_type = other DNA
atgagcgccgagaccgccagcggccccaccgaggaccaggtggagatcctcgagtataacttcaacaaagtggacaagcatcccgattctaccacactgtgcctgattgccgcagaggcgggtctgtccgaagaggaaacccagggctcagatcttatatcaaggtccaaaatatggcatcccgagtcgtctccacaaagggagggatatccacacgatagtttgccctgccttgccttcgactatttcagcctcctccctccccaatgtaaggagatggtgtag

SEQ ID NO: 190978 - DNA, 276 bp, synthetic construct
  misc_feature 1..276: note = Description of Artificial Sequence: Synthetic coding sequence
  source 1..276: mol_type = other DNA
atgctgatcttcctgggctgctaccggcggcggctggaggagcgggcgggcacaatgtcagctgagaccgcgagcggtccaaccgaagaccaggtggaaattctggaatacaactttaacaaggtggataagcacccagattcaacaactctttgtctaatcgctgcagaagccggcttaagcgaggaggaaactcagaagtggttcaaacagagactggctaagtggcgacgaagcgaaggcctgcccagtgagtgtcgatcggtcaccgattag

SEQ ID NO: 190979 - DNA, 222 bp, synthetic construct
  misc_feature 1..222: note = Description of Artificial Sequence: Synthetic coding sequence
  source 1..222: mol_type = other DNA
atgagcgccgagaccgccagcggccccaccgaggaccaggtggagattctggagtacaattttaacaaggtggacaaacatccagacagtactacactctgccttatcgcagctgaggccggactgagcgaggaagagactcaaaagtggtttaaacaaagactcgctaaatggcggcgatctgaaggactgccctccgagtgtcgctccgttaccgattag

SEQ ID NO: 190980 - DNA, 285 bp, synthetic construct
  misc_feature 1..285: note = Description of Artificial Sequence: Synthetic coding sequence
  source 1..285: mol_type = other DNA
atgagcgccgagaccgccagcggccccaccgaggaccaggtggagattctggagtacaactttaacaaagtcgacaagcatcccgactcaactacgttatgtctgatcgctgccgaagccggcctgagtgaggaagagactcagggctcagatttgatatcgcggagcaagatctggcaccctgaaagctcgcctcaacgggaggggtaccctcatgactctctgccatgcctagcatttgactatttctccctcttaccccctcaatgcaaagaaatggtttag

SEQ ID NO: 190981 - DNA, 222 bp, synthetic construct
  misc_feature 1..222: note = Description of Artificial Sequence: Synthetic coding sequence
  source 1..222: mol_type = other DNA
atgagcgccgagaccgccagcggccccaccgaggaccaggtggagattctcgaatataactttaacaaggtagacaaacaccctgactctacaaccttgtgccttatagccgccgaagcgggattatccgaggaggaaacacagaagtggttcaaacaaagattggctaaatggaggcgctccgaaggtttacccagcgagtgcaggtccgtcaccgattag

SEQ ID NO: 190982 - DNA, 276 bp, synthetic construct
  misc_feature 1..276: note = Description of Artificial Sequence: Synthetic coding sequence
  source 1..276: mol_type = other DNA
atgctgatcttcctgggctgctaccggcggcggctggaggagcgggcaggaactatgagcgcagaaacggcctccgggccaacagaggatcaggtggaaatcctcgagtataactttaataaggttgacaagcatcctgattctacgactttatgtcttatagcagctgaagcagggctctccgaggaagagactcaaaaatggtttaaacaacgccttgcaaaatggagaaggagcgaggggctgccatccgagtgccggtctgtgacagactag

SEQ ID NO: 190983 - DNA, 285 bp, synthetic construct
  misc_feature 1..285: note = Description of Artificial Sequence: Synthetic coding sequence
  source 1..285: mol_type = other DNA
atgagcgccgagaccgccagcggccccaccgaggaccaggtggagattctggagtataacttcaacaaggtagataagcaccctgactccacaaccctgtgtctgattgctgccgaggccggtcttagtgaagaagaaacacaggggtcagatctgatttcgcggtccaagatatggcatcctgagtcctccccccagcgggaagggtatccccacgattccctgccttgccttgcctttgactatttcagccttctcccaccccagtgcaaggaaatggtctag

SEQ ID NO: 190984 - DNA, 222 bp, synthetic construct
  misc_feature 1..222: note = Description of Artificial Sequence: Synthetic coding sequence
  source 1..222: mol_type = other DNA
atgagcgccgagaccgccagcggccccaccgaggaccaggtggagattctggaatacaatttcaataaggtggacaaacaccctgatagcaccacgctgtgcctgatcgctgctgaggctggcctctcagaggaagagacacagaaatggtttaagcagaggctcgcgaaatggaggcggtccgagggcctgcccagcgaatgccggtctgtgacagactag

SEQ ID NO: 190985 - DNA, 222 bp, synthetic construct
  misc_feature 1..222: note = Description of Artificial Sequence: Synthetic coding sequence
  source 1..222: mol_type = other DNA
atgagcgccgagaccgccagcggccccaccgaggaccaggtggagatacttgagtacaacttcaataaagttgataaacaccctgactctaccactctgtgtctgatcgccgcggaggctggcttgtcagaggaagagacccagaaatggttcaagcagcgcctcgccaagtggagacgctcggaggggttgcccagcgaatgtaggagcgtgacagattag

SEQ ID NO: 190986 - DNA, 339 bp, synthetic construct
  misc_feature 1..339: note = Description of Artificial Sequence: Synthetic coding sequence
  source 1..339: mol_type = other DNA
atgctgatcttcctgggctgctaccggcggcggctggaggagcgggccggaaccatgagtgcggagacggcctccggcccaactgaggaccaggtcgagatactcgagtataacttcaataaggtggataaacatccggattcaaccacactgtgtctgattgctgccgaggccggcctgtcggaggaggagacgcaggggtcagatctgatctccagatctaagatctggcatccagagtccagccctcaacgcgaaggatatcctcacgatagtctcccatgcctggcatttgattatttttctctgctaccgcctcagtgtaaagagatggtgtag

SEQ ID NO: 190987 - DNA, 222 bp, synthetic construct
  misc_feature 1..222: note = Description of Artificial Sequence: Synthetic coding sequence
  source 1..222: mol_type = other DNA
atgagcgccgagaccgccagcggccccaccgaggaccaggtggagatactcgaatataatttcaataaagtcgacaagcacccagatagcaccacactttgtcttattgccgccgaagccggcctgtcagaagaagagactcagaaatggttcaagcagaggctggccaagtggcgccgatctgaggggctgccgtccgagtgtcgctcagtcacggactag

SEQ ID NO: 190988 - DNA, 222 bp, synthetic construct
  misc_feature 1..222: note = Description of Artificial Sequence: Synthetic coding sequence
  source 1..222: mol_type = other DNA
atgagcgccgagaccgccagcggccccaccgaggaccaggtggagattcttgagtataactttaataaagtggataaacaccctgacagcacaactttgtgccttatagcagcggaggcgggcctctccgaggaggaaactcagaagtggttcaagcagcggctggccaagtggcggcgtagcgagggtcttccgagtgagtgcaggtccgttaccgactag

SEQ ID NO: 190989 - DNA, 222 bp, synthetic construct
  misc_feature 1..222: note = Description of Artificial Sequence: Synthetic coding sequence
  source 1..222: mol_type = other DNA
atgagcgccgagaccgccagcggccccaccgaggaccaggtggagattctcgagtataattttaacaaggtcgataagcaccctgactcaacaaccctctgcctcatcgctgctgaggccggactgtctgaggaggagacacagaaatggttcaagcagagactggcaaagtggcgacggtcagaaggcttgccctcagagtgtaggtccgttacggactag

SEQ ID NO: 190990 - DNA, 144 bp, synthetic construct
  misc_feature 1..144: note = Description of Artificial Sequence: Synthetic coding sequence
  source 1..144: mol_type = other DNA
atgagcgccgagaccgccagcggccccaccgaggaccaggtggagattctggaatataatttcaataaagtggataaacaccccgacagcaccaccctctgcctgatcgccgccgaagcgggcctctcagaagaggaaacttag

SEQ ID NO: 190991 - DNA, 1164 bp, synthetic construct
  misc_feature 1..1164: note = Description of Artificial Sequence: Synthetic coding sequence
  source 1..1164: mol_type = other DNA
atggccaccgcccagctgcagcggacccccatgagcgccctggtgtttccaaataagatcagtaccgaacatcagtcactagtgcttgtgaagcgtctccttgcagtcagcgttagctgcattacataccttagaggcatattcccagaatgcgcctacggaacacgctatctggatgatctttgcgttaaaatcctaagggaagataagaattgtcctgggagtacacagcttgtcaaatggatgctcggttgctatgatgctttacagaaaaaatacgtttataccaatcccgaggacccccagactatttctgaatgctatcagttcaaattcaagtacacaaataatggtccgctgatggacttcatctcaaagaaccagtccaacgagtccagcatgctgtcaacagataccaagaaggctagcatcctcctcatccgcaagatttatatcctaatgcagaatctcgggcccctgccaaacgacgtttgcttgaccatgaaactcttttactacgacgaagtgacaccacctgactatcagccaccaggttttaaggacggcgattgcgagggagtcatatttgagggtgagcccatgtacttgaacgtcggcgaagtgtctactcccttccacatctttaaggtcaaagtaaccaccgaaagagagaggatggagaatatcgattcaaccattctgagcccaaaacaaattaaaacaccgtttcaaaaaatcttgagggacaaggacgttgaagatgagcaggaacattacacttccgatgacctagacattgagaccaagatggaagaacaagagaagaaccccgcctcttctgaactggaagagccaagcctcgtatgcgaagaggacgaaatcatgagaagtaaggagtctccggatctgtccatctcacacagccaggtagaacagctggtcaataaaacaagtgagctagatatgtctgagagcaaaacgcgttctgggaaagtgtttcaaaataagatggctaatggtaatcagccagtgaagagtagtaaagaaaaccggaaacgttcacagcatgagtccggcaggatcgtgctccatcactttgattcgagtagtcaggaatctgtgccaaaaagaaggaaattctccgaaccgaaggagcacatatag

SEQ ID NO: 190992 - DNA, 1185 bp, synthetic construct
  misc_feature 1..1185: note = Description of Artificial Sequence: Synthetic coding sequence
  source 1..1185: mol_type = other DNA
atggccaccgcccagctgcagcggacccccatgagcgccctggtgttccccaataagatctctaccgaacaccagtcgctggtcctggtaaagcggctgctggccgtgagcgtctcttgtattacttaccttcgaggcatattccccgagtgcgcctacggcactcgatacctcgacgacttgtgcgtcaaaatccttagagaggataagaactgtcctggctcaacgcaactagttaagtggatgcttgggtgctacgatgccctgcaaaagaagtacctcagaatggtggtcttagctgtgtacaccaacccagaggatcctcagacaatttctgagtgctaccagtttaaattcaagtacaccaacaacggtccactaatggacttcatcagcaagaaccaatctaacgaaagctctatgctctcaacggacacgaaaaaggcttcaattttgttgatccggaaaatttacattctcatgcagaatctaggtcctctgccgaacgatgtgtgcttaaccatgaaactgttttactacgacgaagtcaccccaccggattaccagcccccaggattcaaagacggggactgtgagggtgtgatcttcgaaggggaacctatgtaccttaacgttggggaagtgagtacacctttccatatcttcaaggttaaggtgacaacagaacgggagcgcatggaaaacattgactccaccatcctgtcgcccaagcaaattaagaccccctttcagaagattctccgggataaggatgtggaggatgagcaggagcactatacttcggatgacctagacattgaaaccaaaatggaggagcaagaaaagaaccctgcctctagcgaactggaggaaccctccctggtgtgcgaagaggacgagattatgcgtagcaaggaatcacctgatcttagcattagccactcgcaggtggaacagctcgtaaacaaaacgtctgaattggatatgtcagagtcaaagactaggagcggtaaggtctttcagaataagatggccaatgggaaccagcctgtaaagagcagcaaagaaaatcgaaaaagaagtcaacatgaaagcgggagaatagtgctccaccacttcgactcttctagccaggaaagcgtgccaaaaaggcggaaattctcggagccaaaggagcacatctag

SEQ ID NO: 190993 - DNA, 573 bp, synthetic construct
  misc_feature 1..573: note = Description of Artificial Sequence: Synthetic coding sequence
  source 1..573: mol_type = other DNA
atgcggctgtggaacaagatcagccggtggatgctgggctgctacgacgctctgcagaagaaatatctccggatggtcgtgctcgcagtgtacacaaatccagaagacccccagacaattagcgagtgttaccagttcaagttcaagtatacaaacaacggcccacttatggacttcatcagtaaaaatcagagcaacgagtcttcaatgctgtccacggacaccaaaaaagctagcatactcttaatccgcaagatttacatcctcatgcagaacctcggacctctgcccaatgatgtgtgcttgacgatgaagctgttctactatgacgaggtcaccccccccgactatcagcccccagggttcaaagacggcgactgcgagggagttatctttgagggggagccaatgtacctgaacgtgggggaggtctctacacccttccatatctttaaggtgaaagtaacgaccgagcgcgagcgcatggagaacatcgactctacgattctgtctccgaagcagattaagaccccattccaaaagatccttagggataaagatgtcgaggactag

SEQ ID NO: 190994 - DNA, 972 bp, synthetic construct
  misc_feature 1..972: note = Description of Artificial Sequence: Synthetic coding sequence
  source 1..972: mol_type = other DNA
atgcggctgtggaacaagatcagccggtggatgctgggctgctacgacgcactccagaagaaatatctcaagatcatggaactgactgtgtatacgaatcctgaagacccacaaactatttccgaatgttatcagtttaaattcaagtacactaataatggaccgcttatggattttatctctaagaatcaatccaacgagtccagcatgttgagtacggatacaaagaaagcttccattttgttgattcggaaaatctacatattgatgcagaatctaggcccactcccaaatgacgtttgcctgactatgaaactgttctactacgacgaggttacacccccagattatcagcctcccggattcaaagacggggactgtgagggggtcatatttgaaggtgaacccatgtacttgaatgtcggagaagtcagtacacccttccatattttcaaggtgaaggtaactaccgaaagggaacggatggagaatatcgactcaacgatcctttcgccgaaacagataaagactcctttccaaaagatactccgtgacaaggatgttgaggatgagcaagagcattatacaagcgacgatctggatatcgagaccaagatggaagaacaggagaagaatcctgcctccagcgagctcgaggagcccagcctcgtctgtgaggaggacgagataatgaggtctaaggaatcaccagacctgtctatctcccatagccaagtagagcagctggttaataagacttcagaattggacatgagtgaatctaaaactcgctccggcaaggtattccagaataaaatggctaacggcaatcaaccagttaaatcatccaaggagaaccgtaagcgttctcagcatgagtcaggtcggattgtgctacaccacttcgatagcagctcacaagagtctgtcccaaagcggcggaaatttagcgaacccaaggaacacatttag

SEQ ID NO: 190995 - DNA, 1185 bp, synthetic construct
  misc_feature 1..1185: note = Description of Artificial Sequence: Synthetic coding sequence
  source 1..1185: mol_type = other DNA
atggccaccgcccagctgcagcggacccccatgagcgccctggtgttccctaacaaaatctctaccgagcaccagtcgttggtactggtcaaaaggttactcgcggtctccgtatcatgcatcacctacctgcgggggatcttccccgaatgtgcatatgggacaaggtatctcgatgacctgtgtgtgaagatactgagggaggacaagaactgtcctgggtcaacacaactggtgaaatggatgctcgggtgttatgacgcgctgcaaaagaaatacctcaaaatcatggagctgaccgtgtacaccaatccagaggatccacagaccatttcagagtgctaccagttcaaattcaaatatacaaataatggaccacttatggacttcatctctaagaaccagtccaacgagtccagcatgctttctacagacaccaaaaaggcctccatcctccttatcaggaagatctacatcctcatgcagaacctggggccactgcctaatgacgtgtgcctgacaatgaaactgttctactatgatgaggttactcctcctgactatcaaccaccaggctttaaggatggtgactgcgagggagtaatctttgaaggggaacctatgtaccttaatgtgggagaagtaagcaccccctttcacatcttcaaggtcaaggtgacaacagagagagagcgaatggaaaatatcgattcaacgatcctgtcccccaaacagataaagacgccctttcagaaaattctgagagacaaggatgtggaagacgaacaggagcactacacttctgacgatctggacatagagacaaagatggaagaacaggaaaagaatccagcctcttccgagctggaggaaccctccctagtgtgtgaggaagatgagattatgaggtctaaagagtcacctgacctaagcataagtcactctcaggtggaacagctggtgaacaaaactagcgaactggacatgtctgaatcaaagaccaggtccgggaaggttttccagaacaagatggccaacgggaatcagcctgttaagagctcgaaagagaacaggaagaggtcgcagcacgagtcgggacggatcgtcctgcaccacttcgactcctctagtcaagagtcagtgccaaagcgcaggaaattttcggagccaaaggagcacatctag

SEQ ID NO: 190996 - DNA, 945 bp, synthetic construct
  misc_feature 1..945: note = Description of Artificial Sequence: Synthetic coding sequence
  source 1..945: mol_type = other DNA
atgcggctgtggaacaagatcagccggtggatgctgggctgctacgatgctctccaaaagaaatatttgaggatggttgtgctcgctacaattagcgaatgttatcagtttaagttcaaatacacgaacaacggtccactgatggacttcatctctaaaaaccaatccaatgagtcatcgatgctctccacagataccaaaaaggcttcaatccttttaattaggaagatctacatcctgatgcaaaatctcggcccgttgcctaacgatgtttgcctgacgatgaaactgttctactacgatgaggtcacccctccagattaccagcccccgggtttcaaagatggggattgtgagggggttattttcgaaggcgagccaatgtatctgaacgtgggtgaagtgtctacaccattccacatcttcaaagtaaaggtcacgactgagcgggagaggatggagaacatcgactctaccattttgagtcccaagcagattaaaactccctttcaaaagatcctgagggataaggacgtggaggatgaacaagagcactacacgagcgatgatctggatatcgagaccaaaatggaagaacaggaaaagaatccggcatcatcagaactggaagagccatccctggtttgtgaagaggacgaaatcatgcggtctaaggaatctccagacctctccatcagccattcgcaggtcgagcagctcgttaacaagacaagcgagctcgatatgtccgaaagtaaaacccgctcaggcaaagttttccaaaacaagatggcaaatggaaatcagcctgttaaaagttctaaggaaaaccgcaagcgtagccagcatgagtcgggccggatcgttctacatcattttgatagctctagtcaagagtccgtccccaagagaaggaaatttagcgaaccaaaagaacacatctag

SEQ ID NO: 190997 - DNA, 495 bp, synthetic construct
  misc_feature 1..495: note = Description of Artificial Sequence: Synthetic coding sequence
  source 1..495: mol_type = other DNA
atgcggctgtggaacaagatcagccggtggatgctgggctgctacgacgccctccagaaaaagtacgtgtacaccaaccctgaggacccccaaaccataagcgagtgttaccagttcaaattcaaatataccaacaacggcccgctgatggatttcatttcaaagaaccaatcgaacgaaagttccatgctctccacagataccaagaaggcttctattcttctgatacgcaagatttacatccttatgcagaacctcggacctttgcctaatgacgtttgcttgaccatgaaactcttttactatgacgaagtgactccgcccgattatcagccaccgggatttaaagatggcgactgtgaaggagtgatattcgagggggagcccatgtacctcaatgtgggcgaagtcagcacaccctttcacatctttaaggtgaaagtaactaccgagcgagaacgcatggagaacatcgattcaactatcctttcctag

SEQ ID NO: 190998 - DNA, 945 bp, synthetic construct
  misc_feature 1..945: note = Description of Artificial Sequence: Synthetic coding sequence
  source 1..945: mol_type = other DNA
atgcggctgtggaacaagatcagccggtggatgctgggctgctacgatgcactgcaaaagaagtatttgcgatacttcctttttaagacaatcagcgagtgttaccagttcaaatttaagtataccaataatggacccctgatggattttatctccaagaatcaatccaacgaatcttctatgctcagtactgacactaagaaggcatccattctgttgatacgtaagatttatattctgatgcaaaaccttggtcctctgccaaacgacgtgtgtctgacaatgaaactgttctactacgacgaagtgaccccacctgactaccaacctcctggtttcaaggacggagactgcgagggagtgatctttgaaggggaacctatgtacctgaatgtcggggaggtttccacaccctttcatatctttaaggtgaaagtcacaactgagcgggagagaatggagaacatcgattccacaatcctgtctcctaagcagatcaaaacacccttccagaagattcttcgggacaaagatgtggaggatgaacaggagcactacaccagcgacgacctagatattgaaaccaaaatggaagaacaggagaaaaatcccgccagttcggagctggaggaacctagcctggtatgcgaagaggacgaaattatgagatccaaagagtctcctgacttgtccatttctcattcacaggtggagcagctggtgaacaagacgtcagagctggatatgtcagaatccaagacacgatcgggcaaagttttccagaataagatggccaatggcaaccagcccgtcaagtcctcaaaggagaaccggaagagaagccaacacgaaagtggacgcatcgtgctccatcattttgatagctccagccaggaatctgtgcccaagcgtcggaaattctctgaacccaaggaacacatctag

SEQ ID NO: 190999 - DNA, 6108 bp, synthetic construct
  misc_feature 1..6108: note = Description of Artificial Sequence: Synthetic coding sequence
  source 1..6108: mol_type = other DNA
atggccagcgccgtgagccccgccaacctgcccgccgtgctgctgcagcctaggtggaaaagagtggtaggctggagtgggccagtgccccgtccccgccatggtcatagggccgtcgctataaaggagctgatcgtagtgttcggggggggcaatgagggcatcgttgatgagctacacgtctacaataccgctacaaatcaatggtttattccggcggtgcgaggagacatcccaccaggatgtgccgcttacggctttgtatgcgatggtacgcggctgctggttttcgggggaatggtggagtatggcaagtattccaacgacctgtacgaactccaggcaagccggtgggaatggaagagactaaaggccaaaacaccaaaaaacggacctcccccctgtcccaggctgggtcatagcttctcccttgtgggcaacaagtgttatctctttgggggcctggccaacgactccgaagatcccaaaaataacatccccaggtatttgaacgatctgtatatcctcgagcttagacctggcagcggagtcgtagcctgggacattccaatcacatacggtgtactgcccccacccagagaatctcacactgctgttgtatatacggagaaggataacaaaaaaagcaaactggtgatttatgggggcatgagtggctgccgcctaggcgacttatggaccttagatattgacacgctgacctggaacaagccaagtctgtcaggagtggcacccctcccaagaagtctgcactccgctacgactatcggcaacaagatgtacgtcttcggcggctgggttcctctcgtgatggacgacgtgaaggtggccacccacgagaaagaatggaagtgcaccaacacacttgcctgtctgaatctggacactatggcatgggaaactattctgatggacaccctggaggataacatcccccgagcaagagctggacactgcgctgtggccatcaatacaaggttatacatatggtcagggagggatgggtatcggaaagcctggaacaatcaggtctgttgcaaagacctatggtacctagaaacagagaagccacctccacctgctcgagtccagctcgtgagagcaaacacaaactccctcgaggtgtcatggggtgccgttgctacagcagattcctatttgctgcagctgcaaaaatatgatatccctgccacagctgctaccgctaccagccctactcctaatcctgtaccaagcgtacctgcaaatccccctaagagtccagcacccgccgcagccgcccctgccgtccaaccgcttacacaggtaggaattaccctgcttcctcaggctgcaccagccccgcccacaactactactatacaggttctcccgacagtcccaggatcatccatctccgtccccactgccgctcgaacacagggtgtgcccgccgtcctgaaggtgaccggcccccaagctaccactggcacaccacttgtgaccatgaggccggctagtcaagctggtaaggctcccgtgactgtcacgagtctgccagctggtgtacggatggttgttcctacccagtctgcgcagggcaccgtaatcgggtcaagtccacagatgtcaggaatggctgccctggcggccgccgcagcggcgacacagaagatccccccttcatccgcacctactgttctgagcgttccagccggcacaacaattgtaaaaaccatggcagttacccctggcacaacaacgctgccagcaacagtgaaggtggctagttcaccagtaatggtgagtaatccggcaaccagaatgctcaagactgctgccgcgcaggtcggaactagcgtatcgtcagcgacaaacacttctacaagacccatcatcaccgtccataagagcggtactgttaccgtcgctcagcaagcacaggtagtgacaactgtggtgggcggggtcactaagacgattaccctggtgaagagcccgatcagtgttccaggcggttcggccctgatttccaacctgggtaaggtgatgagcgtggtgcagaccaaaccggtacagaccagtgctgtcaccggtcaggccagtacaggtcccgtcacgcagatcatacagacaaagggacctctgcccgccggaacaatcctgaagcttgtgacaagcgccgacggaaaaccgacgaccattattacaaccacacaggccagcggtgcagggaccaagcctacaatcttgggtattagctcagtctcccctagcactaccaaacccgggacaactacgatcatcaagactatccctatgagcgctatcatcacgcaggccggagcaaccggtgtgacttccagtccagggatcaagtcccctattaccatcattactaccaaggtaatgacgagcgggacaggcgccccagccaagattatcaccgctgtaccgaagatcgctacgggccacgggcagcagggtgttactcaggttgtgctgaagggcgcacctggccagcctgggaccatcctgagaacggtgcctatgggaggagtgcgccttgtgacccccgtcacagtctcggccgttaagccggccgtgactaccctcgtcgtaaaggggacaaccggagtgacaactctaggaactgtgacaggaacagtctccactagcctcgccggggccggtggtcacagtacctccgccagcctggctactcccatcacaacccttggaacaattgccactctgagttctcaggtgataaatcctacggcaatcactgtgagtgcagcccaaaccaccctgacagccgcaggcggcttgacaacacccacaataaccatgcagcccgtctctcagccaactcaagtaaccttaatcactgccccttctggcgtagaagcccagccagtccacgatctccctgtctctattcttgcctcacccaccacagagcaacccactgccacagtaaccattgcagattcaggccagggggatgttcagccaggcaccgtaactctggtatgctccaacccgccctgcgagactcacgaaacaggtaccaccaataccgctaccaccactgtggtcgctaacctgggaggacaccctcagcccacacaagtacagttcgtctgtgatcgccaggaggcagcggcatccttggtgactagcacagtgggccagcaaaacggaagtgtcgttagggtctgttcaaatcccccgtgtgagacccatgagacaggcactactaataccgccaccacagctactagcaatatggctggacagcacgggtgttctaacccgccttgcgaaacacatgaaaccggaactaccaacacagccacaacggccatgagctcagtcggcgccaaccatcaaagggacgcaagacgagcttgcgcagccggcaccccggcggtgatccggatcagcgtggctacaggcgcattagaggccgctcagggatcaaagtcccagtgccagacgcgccaaacatccgccacatccaccaccatgaccgtcatggcaaccggggccccctgttctgctggtcccttgctgggccctagcatggctcgtgaacccggagggcgcagccccgctttcgtccagctggctcctctcagtagtaaggtgagactctcgtctccatctatcaaagacctgcccgccgggagacattcacatgcagtgagcaccgctgccatgacccggagcagcgtgggcgcaggagagccacgtatggccccggtctgcgagtccctgcagggaggaagtccctctacaaccgtgactgttacagcgttagaggctctgctgtgcccctcggccactgtgacccaggtctgtagcaaccccccttgtgagacgcatgaaacaggcactaccaacacagccaccacatccaatgcggggtccgcccagagagtctgttccaaccccccctgcgaaactcacgaaactggcacaacccacacagccacgacagccacctccaacgggggaaccggacagcccgagggaggtcaacaacctcccgcgggtcgaccatgtgagacacaccagaccacttccacgggtactacaatgtcagtgtccgttggcgcactgctccccgatgctacttccagccaccggaccgtcgagagtggcctggaagtcgcagccgcaccctccgtgacacctcaggctggaacagccctgttagctcccttccccacgcagcgtgtttgttcaaatcctccctgcgaaacacacgaaacaggaacgacccatactgcgacaactgttacaagcaatatgagctcaaatcaggatcctcctccagccgcttcagatcagggggaagtggagtctacacagggcgattctgtcaacattaccagcagttccgccataaccaccactgtgtcctctacccttacaagagcagtcacaactgttacccaaagtactcccgtacctggcccatccgttccaccccccgaagagctgcaggtgtcaccaggtccccgccagcaactccccccccgtcaactgctgcagtccgctagcaccgctctgatgggtgagtccgctgaggtgctgtcagcctctcaaacaccagaattgccagcagctgtggacctatctagcactggcgaaccttctagcggccaggagtcggccggttccgctgtggtcgccacagtggtggttcagcctccaccccctacccagagcgaggtggatcaactatctctacctcaggagctgatggctgaagcccaggcaggaacaactactctcatggttacaggactgacgcctgaggaactggctgttactgcagctgctgaggcagccgcacaggctgcggcgacagaggaagctcaagctctcgcgattcaggcggttttgcaggctgctcagcaggccgtaatgggcactggggaacccatggacacatccgaggccgcagcgaccgtgacacaggccgagctggggcatctgtcggccgagggccaagaaggacaggccacgacgatcccaattgtactgactcagcaggagctagctgcactcgtgcagcagcagcaactgcaggaggcccaggcccaacagcagcatcaccatctgcctaccgaggcactggcacctgcagactcgctcaacgaccctgccattgaatctaattgtctgaacgagctggctgggactgtaccaagcactgtcgctctcctgcctagcacagcaactgaaagcttagccccaagtaacacttttgtagcaccacagcccgtggtggtagcaagtcctgctaagctgcaagcggctgcgactctgacagaagtcgccaacgggattgagtccctaggagtgaagcctgatttgccccctcctccatccaaggccccgatgaagaaagaaaaccagtggtttgatgttggtgttatcaaggggacaaacgttatggtaacacattactttctgccaccagacgacgcggttcctagtgacgatgacctgggcactgtccctgattataaccaactgaagaaacaggagctgcagccaggcactgcgtacaagttcagggtggctggaatcaacgcttgtgggcgcgggcccttcagtgaaatttcggcctttaagacatgcttaccaggattcccgggtgccccttgtgccatcaagataagtaaaagtcccgatggagcccacctcacttgggaacccccatccgttacctcaggaaagatcatcgaatacagcgtctacctggcaattcagtcctctcaggccgggggcgagctaaagtccagcacccccgcgcagcttgctttcatgcgcgtgtattgtggtccaagtcccagttgcctggtgcaaagttcatctctcagcaatgcccatatcgactacactacaaagccggctataatatttaggatagcggcacggaacgagaaggggtatggcccagctactcaggtgagatggctccaagagacaagcaaggatagctccggaacaaagccggctaataagaggcccatgagtagccccgaaatgaagtccgctcctaagaagtcgaaggcagatggacagtag

SEQ ID NO: 191000 - DNA, 5901 bp, synthetic construct
  misc_feature 1..5901: note = Description of Artificial Sequence: Synthetic coding sequence
  source 1..5901: mol_type = other DNA
atggccagcgccgtgagccccgccaacctgcccgccgtgctgctgcagcctcggtggaagcgggtggtgggttggtctggacctgttcctaggcccaggcatggacacagagccgtggctatcaaggaacttatagtagtctttgggggtggcaacgagggcattgtcgacgagttacacgtatacaacacagccacgaaccagtggttcatcccagcagttcggggggatatacctcctggttgcgccgcatacggctttgtatgcgatggaacacggctgctggtatttgggggtatggttgaatacggcaagtacagcaatgacctgtatgaacttcaagcctcccggtgggagtggaagagactcaaagcaaagacaccaaaaaacgggcccccaccctgcccgcgtcttggccacagtttttctctagtggggaataaatgttatctgttcgggggcctcgcgaacgatagcgaggatccgaaaaataacatacctaggtacctcaacgatttatacatcttggaattgagacccggctctggagtcgttgcttgggatatccccatcacgtacggagtcttgcccccacccagagagagtcacacagctgtggtttatacagaaaaagataataaaaaatcaaaacttgtgatctacggtgggatgagcggctgcagattaggggatctgtggacactcgacatcgataccctgacatggaataagccctcactgtccggggtggcgcccctgcccagatccttgcacagtgctaccacaatcggcaacaagatgtacgtgttcgggggttgggtccccctcgttatggacgatgtcaaggtagccactcacgaaaaggagtggaaatgtactaatactctggcttgtttaaatctcgataccatggcctgggagacaatcttaatggatacattagaggacaatattccccgcgcccgcgccgggcactgtgccgttgcgattaacactagactctacatctggtcaggtagagacgggtatcggaaggcatggaacaaccaagtgtgttgcaaagacctgtggtatcttgaaacagagaagccgccgccacctgccagagtccaattggtgagagctaatacaaattctctagaagcggccccggctccccccacaaccacaaccattcaggtcctgcccactgtccccggaagctctattagcgtgcccaccgctgcgaggacacagggagtgcctgcagtactgaaggtgaccggcccccaggcaacgaccggcacacccttggtgacgatgcgtccagcttcgcaggcaggcaaagctcctgtgaccgtcaccagcctcccagctggtgtccggatggttgtgccaactcagtcagcccagggaacagtcattggctcctctccccagatgagcggcatggccgctctggcagctgctgctgctgccacacagaagattccaccctcatcagcccctaccgttttgtcagtgcccgcaggaactaccatcgtcaagactatggctgtgacccctggaactacgaccctgcctgctacagtaaaggtggccagtagcccagttatggtgagcaacccagcaacaagaatgctgaagaccgccgccgcacaagttggaacctcggtctccagcgctaccaacacctctacaaggcctatcataactgtccataagtcaggcaccgttacagtggctcagcaggcgcaagtggtcaccaccgtggtgggcggcgtgaccaagacgatcactctggttaagagcccaataagcgtcccagggggtagcgccctcattagcaatctgggtaaggtcatgtcagtggtccagaccaaaccagttcagacttcggcagtgacgggccaggccagtactggaccggtgactcagattatacaaaccaaggggcctctacccgccgggacaattctgaaacttgtgacctcagccgacgggaaacctactaccatcatcacgactactcaggccagcggagccggaactaaacctacaatcctcggcatcagttctgtgagccccagtaccactaaacctggcaccacaactatcatcaagacaatccccatgtccgcaatcatcacacaggcaggggcaacaggggtgacatcaagcccaggcattaagtcacccataactattattacaacaaaagtgatgaccagcggcaccggcgcccccgccaaaataataactgctgtgccaaagatcgctacagggcatggccaacaaggtgttactcaggttgtgcttaaaggcgcacctggacaaccaggtactatcctcaggactgtgcccatggggggtgtccgccttgtgaccccggtcaccgtctcagccgttaaacctgccgtcactaccctggtagtcaaagggaccacgggagtgacaactttgggcactgtgaccggtactgtgagcaccagcttagctggcgctggcggccactccacctccgcttcccttgccacgccaataaccactctggggactatcgccaccctgtcaagtcaagtgatcaacccaactgctatcacggtaagcgccgcgcagactactctgacagcagccggtgggctgactacgcccaccattaccatgcagcccgtcagtcagcccactcaggtgactctcatcacagccccctccggcgttgaggcacagcccgtgcacgacctccccgtgagtattttagcgagcccgacgactgaacaacctaccgcaacagtaaccatcgccgacagcgggcagggtgatgtccaaccagggacagttacattagtgtgctcaaatccaccctgtgaaacccacgaaacagggaccacaaataccgctaccacaactgttgtcgcaaacctgggaggacaccctcagcctacccaggtgcaatttgtgtgcgatcgacaggaggctgccgccagtctggtaacatctacagttgggcagcagaatggctcagtggtgcgggtgtgttcaaatcctccctgtgagactcatgagaccggcactaccaacactgccacgaccgctacaagtaatatggctggccaacacggttgctctaatcctccatgcgagactcatgagaccggcactaccaacactgccacaactgcgatgtcaagcgttggtgccaatcatcagagagacgccagacgagcctgtgctgcaggcacccctgctgtcatccgtataagtgtcgctacgggtgctctagaagccgctcagggcagtaaaagccagtgccagacgagacagaccagcgctacatctactacaatgaccgtgatggccacaggtgcaccttgcagtgctggccctctcctcggcccctcaatggcccgcgaaccgggcgggcgatcccccgcatttgttcaattggctcctttatcctctaaggtaagattaagtagtcctagcattaaagatctgccggcggggcgacattcacatgctgtttccaccgcagcaatgaccagaagttccgtaggtgctggcgagccccgtatggcccccgtatgcgaatctttacaggggggatcacccagcacgacagtcaccgtgactgccttggaggctctcttatgcccttcagccaccgtgactcaggtttgctcaaatccaccctgcgaaacacacgaaacaggtaccactaatacggctacaactagcaatgctggtagcgcacagagagtttgtagcaaccccccctgcgagacccacgaaacgggtactacgcataccgcaaccacagctacttctaatggcggaacaggtcagcctgagggcggccaacagccacccgcgggacgtccctgtgaaacccatcagaccacaagcaccggcactactatgtctgttagtgtgggtgcccttctccctgacgctacttcttcacacagaactgtggagagcggattggaggtcgccgccgctcccagcgttacgccccaggctgggacagctctgctcgcaccctttccaacccagagggtctgcagcaacccaccatgcgaaacccatgagactggtactacccatactgcaaccaccgtcacctccaatatgagctccaaccaggatcccccaccggcggcttcggaccagggggaagtggagtctacacagggcgatagtgtcaacattactagctcctccgctatcactaccactgtaagctccacgctcacccgtgccgtgacaacagtcacccaatcaacacctgtccctggccctagcgtgccaccaccagaagagctgcaggtctccccagggcccaggcagcagctgccccctcggcagctgctccagtctgcctcaaccgctttaatgggcgaatcagctgaagtcctgtctgcaagtcagacccccgagctgccggcagccgtggacctgtcctctacgggcgagccttcttccgggcaggagtctgcgggcagcgcggtggtggctactgtcgtggtgcagccacctcccccgacccagagcgaggtggaccaactgtcgctgccccaggagctaatggctgaggcacaggctgggactacaacactgatggttaccggactaacccccgaagaactggccgtgactgccgccgccgaggccgcagctcaggcggccgccaccgaggaggcgcaggcactcgctatccaagctgtgctgcaggcggcgcagcaagctgtgatgggcactggagagccaatggacaccagtgaagccgccgcaaccgtgacacaggccgagcttggtcatttgagcgccgagggacaggaaggtcaggccacaacaattcccatcgttcttacacaacaggaattggcagccctggtgcagcagcaacaacttcaggaagcccaggcccaacagcagcatcaccatctccctactgaagcactggcccccgccgattcactcaatgaccccgccattgagtctaattgccttaacgagctcgccggaaccgtcccttcaacggtggcccttctgccttctaccgccactgaatcacttgccccttccaataccttcgtggctccccagcccgtcgtggtcgcctcaccggcaaagctgcaagccgcggcgactttaacagaggtggcgaacggaattgagagtcttggggtgaagcctgatctgcccccacccccttctaaggctcctatgaagaaagagaaccagtggtttgatgttggggtgattaaaggcacaaacgtcatggtgacacactactttttgccacctgatgatgcggtaccgtccgatgacgatctggggaccgttcccgattacaatcaattaaagaagcaagaactacagccaggtacagcatacaagtttagagtagccggcatcaacgcctgtggccgggggccattttctgagatctcagcattcaagacgtgtttaccggggttcccgggtgcaccttgcgccattaaaataagcaagtctcccgacggagcccacctcacatgggagccaccgtccgttaccagtggaaaaattatcgagtactctgtgtacctggctattcagtcatcgcaagcaggaggcgagttaaagagttcgacaccggcgcagctcgctttcatgagggtctattgcggtccgtcccccagctgtctggttcagtcctctagtctgtcaaacgcccacatcgactacactaccaaacccgccataattttccgcattgcagcacggaacgagaagggatacggaccggccacccaggtgcggtggctgcaggagacttctaaggactcatccggcacaaagcccgccaacaaacgcccgatgtcaagcccagaaatgaagagtgcaccaaaaaaatccaaggcagacggccagtag

SEQ ID NO: 191001 - DNA, 6243 bp, synthetic construct
  misc_feature 1..6243: note = Description of Artificial Sequence: Synthetic coding sequence
  source 1..6243: mol_type = other DNA
atggccagcgccgtgagccccgccaacctgcccgccgtgctgctgcagcctcgctggaagcgggtcgtagggtggagtggtcccgttccaaggcccagacacggtcaccgtgctgtagcaatcaaggagctgattgtggtattcggggggggtaacgaagggattgttgatgaactccacgtgtataacaccgccactaaccagtggtttatccctgcagtcaggggagatattccgccaggatgcgctgcttacggtttcgtttgcgatggcactaggttgctggttttcggtggaatggtggagtatggcaaatacagcaacgacctgtacgagctgcaggcttccaggtgggagtggaagcgcctgaaagccaagaccccaaaaaatgggccacctccatgccctaggctgggtcatagttttagccttgttggaaataaatgttatctgtttgggggtctggcaaacgactctgaggatccgaaaaacaatatcccccgctaccttaacgacctgtacatcctggaactgcgaccgggatccggcgttgtggcttgggacattcccattacctatggcgtgttgccacctcctcgggaaagtcatacagcggttgtgtacaccgagaaggacaacaaaaaatccaaactcgttatttacggcggaatgagtggctgtcgactgggcgacttgtggacactcgacattgacaccttaacttggaataaaccttccttgtccggggtggcccctttgccacggtctctgcattctgctaccaccattggcaacaaaatgtatgtgttcgggggatgggtgccacttgtcatggacgacgtcaaggtagccacacacgagaaagaatggaagtgcactaacacactggcctgcctgaatttagataccatggcttgggagacaattctaatggacacccttgaagacaacatccccagagctagggcaggccactgcgcagtagcaataaatacgagactgtatatttggtcgggacgggacggctatcgcaaagcatggaataaccaggtgtgctgtaaggacctgtggtatctggagaccgagaaacctccacctcccgcgagagtgcagctggtaagggcaaacactaacagtctcgaggtctcttggggtgcagtcgctacagctgattcatacctgctgcaactgcagaaatacgacattccggcaaccgctgcaaccgctacctcccccacacccaaccccgtgccttccgttcctgccaaccctcctaagtccccagcccctgcagctgcagcgccagctgtccaaccactaacacaagtcgggattactcttctgcctcaggccgcccccgcacctcccactacaacaacaatccaggtgttacccaccgtgcccggttccagcatcagcgtgcccactgccgctaggacacaaggagtaccagcagttctaaaggtcaccggcccgcaggctacaacggggacccctcttgttactatgagaccggccagtcaggcgggaaaggcccctgtcaccgtgacatccctccccgctggtgtcagaatggtggtacccactcagtctgcccagggtaccgtgatcggatcctctccccagatgtcaggcatggccgctttggccgccgccgccgctgcaacccagaagatccctccaagtagcgcccccaccgtgctttccgtccctgcaggcacaaccatcgtgaagacaatggcagttacacccgggaccaccacactaccagccacagtgaaagtagcatcaagtcccgttatggtgtcaaacccggccaccaggatgctaaaaacagccgcagcccaggtcggcacatcggtttctagcgccaccaacaccagcactcgtccaattattaccgtacataagagtggtactgtcacagtcgcacagcaggcccaggtggtcacgacagttgtcggtggagtcacaaagactattactctggtgaagagcccaatctccgttcccggaggctccgcactgattagcaatctcggcaaagtgatgtccgtggtccagactaagcccgtccaaacgtcagctgtgaccggtcaggcttccacaggccctgttacccagatcatacagaccaagggcccccttccagctggcacaatactgaaactggttacctccgccgacggcaaaccaaccaccatcatcaccaccacccaagcgagtggggctggcaccaaaccgacaatcctcggaatctcaagcgtttccccttctactaccaaaccgggtacaaccactattatcaaaactattccgatgtcagctattattacccaggcgggagcaaccggggtcacatcctccccgggaataaaaagtccaatcacaataatcaccaccaaagttatgacatcgggtacgggcgccccagcaaaaattattaccgccgtgcctaaaattgcaactggccatggacaacagggggtgacacaagtagtgctgaaaggcgcccccgggcagcccggcacaatcctacggactgtcccaatgggtggagttaggctggtgacacctgttaccgtgtctgcggttaagcctgccgtgacgaccctggttgtcaagggcaccaccggcgtcacaacacttggtacagtgaccggtaccgtttctacatctctggccggagcaggtggccacagcacctcagcttccctggccaccccgataacaaccctggggaccatcgcaacactgtctagccaggtcatcaatcctacagccatcacagtcagcgccgcccagacaactctcactgccgctggtggactgactacacccactataacgatgcagcctgtgagccaaccaacacaggtgaccctcataactgcaccctccggggtcgaagcccaacctgttcacgatctcccagtgtccatcctcgcatcgcctacaactgaacaacccaccgcaaccgtaaccatagcagattctggacaaggggatgtccagccaggaaccgtgacactggtgtgctcgaatccaccgtgtgagacacacgagactgggacaactaacacggccactaccaccgttgtagctaatttagggggccatccacagccgactcaggtgcaattcgtctgcgatcgccaggaagccgccgcatctctggtgacttccactgtcggtcagcagaacggtagtgtcgtgcgggtgtgttccaatcccccatgtgagacacacgagactggtaccacaaacaccgccaccaccgcaacaagcaatatggcaggccagcatggatgttccaaccctccctgtgaaacacacgagactggaaccaccaataccgctaccaccgcaatgtcgtccgtgggagctaaccaccagcgtgatgcacgccgggcgtgcgccgccggaacacctgcagtaattaggatttctgtggctacgggagctctcgaggctgcccagggaagtaaaagccagtgtcagaccaggcagacctctgccactagcacaaccatgaccgtgatggcaactggagcgccatgctccgctggaccgctgttgggaccaagcatggctagagaacccggggggcgcagtcctgcatttgtccagctggctcccttgtcctctaaggtgagactcagctccccctcaattaaggaccttcccgccggcagacattcacacgctgttagtacggctgctatgacccgcagttccgtgggagctggcgagccgagaatggcccctgtatgcgagtcgttgcagggtgggtccccatcgaccactgtgaccgtcaccgccctggaggctctgctgtgcccgagcgccaccgtgacccaggtgtgcagcaacccgccttgcgagactcatgagacaggcacaactaatacggctacaacaagcaatgcaggctccgcccagagagtctgctctaacccgccctgcgagactcatgagacaggaacaacgcacacggccaccactgctacctccaacggaggtactggccagcctgaaggaggccagcaaccccccgccgggcggccctgcgagacgcaccagactacctcaactggcacgaccatgagtgtgagtgtaggggccctactaccggacgccactagctcccacagaacagtcgaatccggtcttgaagtggcagccgctccatccgtcaccccacaggctggcaccgctctgctggctccattccctacgcaacgcgtgtgctctaaccccccttgtgaaactcacgagactggtacaactcacacagcaaccactgtcacatcaaacatgtcctcaaaccaagaccccccccctgctgcatcagaccagggcgaagtggaaagtacacagggagatagtgtgaatatcacatcatcttctgccatcaccaccaccgtgtcctccacgctgactagggctgttacaaccgtcacccagtccaccccagtcccaggcccctccgtaccaaaaattagctcgatgaccgagacagctcctagagccctgaccactgaagtcccaatacccgctaagattacagtaaccattgctaatacagagacgagtgacatgccattctcagccgtggatatcctgcagccgcctgaggaactgcaggtaagcccagggcctcgccagcagttgccaccccgacagcttcttcagtcagctagcacagcattaatgggagaaagcgccgaggtactctcagccagccaaacccctgaacttcccgcagcggttgatctgtcatcaaccggagagccctcctccggccaggagagtgctggctcagctgtggtggctaccgttgtcgtacagccccctcctcccacacagtctgaggtcgaccagctcagcctcccgcaagagttgatggcagaggcacaggccggaacaaccactctgatggtgactggtttaactccggaggaactcgctgtaactgccgccgcagaggctgccgctcaggccgcagccacggaagaggctcaggcactggcgatccaggctgtgctccaggcagctcaacaggcagtaatggcagggactggggaacctatggacacatcagaagcagctgcaacagtcacacaagcagagctgggacatctgtctgcagagggccaggagggtcaagcgacgaccattccaatcgtgctaactcagcaagagctggccgctctggtccagcaacagcaattgcaggaggcccaggcccagcagcagcaccaccatttgccaacagaggccctcgcacccgcggattcgttaaatgatcccgcaatcgagtccaattgtctgaacgagctcgctggaacagttccttccaccgtagcccttttgccctcaaccgcaaccgagagcttggcccctagtaacacctttgtggcccctcaacctgttgtcgtggccagtcctgccaaattacaggccgcggcgacactcaccgaggtggccaatggcatagaatctctgggcgtgaagcctgacctgcctcctcctccttcaaaagctccgatgaagaaggaaaaccagtggttcgatgtcggggtcatcaagggaacaaacgtgatggttacacattactttttgccccctgatgacgccgtgccatcggatgacgatctgggtacagtccccgattataatcagctgaagaagcaggaactgcagcccggtacggcatataaatttagggtcgctggtatcaatgcctgtggacgtgggcctttcagcgagattagcgcctttaaaacctgtcttccagggttcccaggcgcaccatgtgccatcaaaatctccaagagccctgatggcgcccatctaacctgggaaccccccagcgtgacttccgggaagatcatcgagtacagcgtgtacctggccatccagagttctcaagcgggaggcgaactcaagtcttctacccctgcgcagctcgcttttatgcgggtttattgcggccccagcccctcttgtctggtgcaatcaagcagcctcagtaatgcgcatatcgactacaccactaaacctgcaattatctttcgcattgccgcgagaaatgaaaaagggtacggacctgctactcaggttcggtggcttcaggaaacttctaaagactcaagcggaactaaaccggccaacaagagacctatgtctagccctgaaatgaaatcagctcccaagaaatctaaggccgacggacagtag

SEQ ID NO: 191002 - DNA, 1305 bp, synthetic construct
  misc_feature 1..1305: note = Description of Artificial Sequence: Synthetic coding sequence
  source 1..1305: mol_type = other DNA
atggacagcgtggagaagggcgccgccaccagcgtgagcaacccccgcggtcgtccatcccggggaagaccaccaaaacttcaaagaaacagtaggggaggccagggccggggagtagagaaaccaccacacctcgctgccctgatccttgcacggggcggatccaagggcataccccttaagaatataaaacaccttgcaggggtgcccctcatcggatgggtgctgagggctgccttggactccggggctttccagtctgtgtgggtgagcactgaccacgatgagatcgaaaacgtcgctaaacagttcggggcccaggttcatcgcagatcttctgaggtgagtaaggatagctctacctcgctggatgctatcatcgagttccttaactaccataatgaagttgatatcgttggcaacatccaggccacaagcccctgcctgcatccaactgacctccaaaaggtagctgaaatgatcagggaagaagggtatgactccgttttctccgtcgttcgtcgtcatcagtttcggtggagcgagatccagaagggagtgagagaagtaaccgaacccctgaaccttaatcctgccaaacgcccccggagacaggactgggatggcgagctgtacgagaacggaagcttttactttgctaagcgccacttgattgaaatgggatacctgcagggtggaaaaatggcttactatgagatgagggcagagcacagtgtggacatcgacgtagatatagattggccaattgccgagcagcgggtgcttcgatatggttattttgggaaggaaaagttgaaggaaattaagttactggtgtgtaatatcgatgggtgtttgactaacggccacatctatgtgagtggcgaccagaaggagatcatttcttatgacgttaaagacgcgataggcatatctttacttaaaaagagtgggattgaggtgcgcctcatctccgagagagcctgctctaagcagactctttccagcctgaagctcgattgtaaaatggaggtgagtgtgtccgataaactcgcggtggttgatgagtggagaaaggaaatgggcctgtgctggaaagaggtagcgtatctaggaaacgaggtatctgacgaagaatgcctaaaaagggttggactttccggggcacccgcagatgcctgctccacagcacagaaagccgtgggctatatctgcaagtgtaacggcgggagaggcgccatccgcgagttcgcagagcacatctgcctgctcatggagaaagttaacaattcctgccaaaaatag

SEQ ID NO: 191003 - DNA, 507 bp, synthetic construct
  misc_feature 1..507: note = Description of Artificial Sequence: Synthetic coding sequence
  source 1..507: mol_type = other DNA
atggccttcaacgactgcttcagcctgaactaccccggcaacccctgccctggcgatcttattgaggtgttcagacccggataccaacattgggctctgtacctcggcgatggatacgtcatcaacatcgcacccgtagacggtattcccgcgagctttacatcggctaagtccgtgttttccagtaaggctctggtcaagatgcagttactgaaagatgtggtcggcaacgacacataccgaattaataacaagtatgacgagacatatcctcctctgcccgttgaagaaattataaaacggagcgaattcgtgattggacaagaggtggcctataacctgctggtcaacaactgcgagcactttgtcaccctgttgaggtacggagagggcgtgtcggaacaagctaacagagctatcagtaccgttgaatttgttaccgccgcagtgggcgtcttttcattcttgggcctcttccccaagggccagagggcgaagtactactag

SEQ ID NO: 191004 - DNA, 489 bp, synthetic construct
  misc_feature 1..489: note = Description of Artificial Sequence: Synthetic coding sequence
  source 1..489: mol_type = other DNA
atggccctggcccggccccggccccggctgggcgacctgatcgagatctctagattcggctacgcccactgggctatttacgtgggagacggctatgtagtccatttagcacctgcgtccgagatcgccggcgctggcgccgcgtccgtgctttccgcattaactaataaagctattgtcaaaaaagagctgctttcggtggtcgctggaggcgacaactatcgagtgaataacaaacacgacgaccgatatacccctctgccgtccaacaagattgtgaagcgtgcggaagagttggtcggccaagagctaccttactccctgacttcggataactgcgagcacttcgtgaatcacctgcgctatggcgtgtcccggtcagaccaggtgacaggggctgtgaccacggtcggggtggccgcagggctgcttgcagccgctagtctggtgggcattcttctcgcccggagtaaacgcgaacggcagtag

SEQ ID NO: 191005 - DNA, 1023 bp, synthetic construct
  misc_feature 1..1023: note = Description of Artificial Sequence: Synthetic coding sequence
  source 1..1023: mol_type = other DNA
atgaaggaggaccaggtggtggccgaggagcccggcttccaggacgaggaagagagcttgtttcaggatatcgaccttctgcaaaaacacggcattaacgtggccgacatcaagaagctgaagagtgtggggatatgcactattaagggaattcagatgactacgcgtcgcgccttgtgtaatgttaagggcctctctgaggcaaaagtcgacaaaataaaagaggccgcaaacaagctgattgagccagggttcctgacagcctttgagtacagtgagaaaaggaagatggtcttccacattacaactggtagccaggaattcgacaaactcttggggggcggcattgagagtatggcgatcacagaagccttcggtgaatttcgaaccgggaaaactcaattgtctcacacactctgcgtaacagcccagctgcctggcgccgggggctacccgggcggaaaaatcatattcatcgacacagagaacacattccggcccgaccgcctgcgcgacatcgccgatcgattcaatgtggatcatgacgccgttctagacaacgtcctgtatgcccgagcatatacaagcgagcaccagatggagctccttgattacgtggcagccaagtttcatgaggaggctggaatctttaagctccttataattgactctataatggccctgttcagggtcgactttagcggcaggggggagctggctgaacgtcaacaaaaactagcccagatgttgagtcgcctccaaaaaattagcgaggagtacaacgtggccgtgttcgtcaccaaccagatgaccgccgatccgggagcaactatgacattccaggctgatcccaaaaaacccattgggggccacatcctggcacacgcaagtaccactaggatttccctgaggaagggccgcggagaactgcgtatcgccaagatctatgacagcccggaaatgcccgagaatgaggctacattcgcaattaccgccggcggcattggcgatgctaaggaatag

SEQ ID NO: 191006 - DNA, 1080 bp, synthetic construct
  misc_feature 1..1080: note = Description of Artificial Sequence: Synthetic coding sequence
  source 1..1080: mol_type = other DNA
atgagcgacgagggcagccggggcagccggctgcccctggccctgccgccagcttctcagggttgcagttctggaggcggcggggggggcagtagtgccgggggctccggaaacagcaggccacccaggaatctgcagggccttctccagatggcaatcactgctggtagcgaagaacccgaccctccccccgaacctatgagtgaagaacgcagacaatggcttcaggaagccatgtctgcggctttccggggacagcgagaagaagtagagcagatgaagagctgcttgcgcgtcctgtctcagcccatgccccctaccgccggcgaagccgagcaagccgccgatcagcaggagcgggaaggggcccttgagctcctggccgacctgtgcgagaacatggacaacgcagccgacttctgccagctgagcggcatgcacctcctggtgggccgctatcttgaggctggtgccgccgggctgaggtggagagcagcccagcttatcgggacctgcagccagaacgttgcggcaattcaagaacaagtgctgggactaggcgccctgcggaaacttctccgtctactggacagagacgcctgtgacaccgtgagggtcaaggccctgtttgcgatttcatgtttagtccgggagcaggaagcaggcctcctccagttcctgaggctggatggattttcagtgctgatgcgggcaatgcagcagcaagtgcagaagctgaaagtgaaaagtgcctttctgctacagaacctgcttgtgggccaccctgaacacaagggcactttatgttcgatggggatggtgcagcagctggtggcgttggtgcgaaccgagcactccccatttcacgagcatgtgctgggcgcattatgttctctcgttactgattttccacaaggggtgcgcgagtgcagagaacccgaactagggctggaagaactactgcggcatcggtgccagctgctgcagcagcacgaggagtatcaggaggagctggagttctgcgagaagctgctgcagacatgtttcagcagccccgcggatgactcaatggacaggtag

SEQ ID NO: 191007 - DNA, 774 bp, synthetic construct
  misc_feature 1..774: note = Description of Artificial Sequence: Synthetic coding sequence
  source 1..774: mol_type = other DNA
atgagcgacgagggcagccggggcagccggctgcccctggccctgccccccgcatcccagggctgttcttcaggtggcggggggggaggatccagcgccggcggaagcggaaattcccggccacccaggaacttacagggcctgcttcagatggccatcaccgcagggtccgaggagcccgaccctccccctgagccgatgtccgaagaaaggcgccagtggctgcaagaggctatgtctgctgctttcagaggccagcgggaagaggtggaacagatgaaatcctgcctgagagtactgtctcaacccatgcctccaaccgccggtgaagctgagcaggctgctgaccagcaggaacgtgagggcgctctggagctgctggctgatctgtgcgagaacatggacaatgcagctgatttttgccaattaagcggtatgcacctgcttgtggggagatacctggaagccggggctgccggtcttcgctggagggccgctcagctcatcggcacatgtagtcagaacgtcgcagcaattcaggagcaagtcctgggcctgggggctcttcgcaagctgctacgccttctggatagggatgcctgtgatacaggagtgcgggagtgccgagaacctgaacttggcttggaagaacttctcagacatagatgccaactactgcaacaacacgaggagtaccaggaagagctagagttttgcgagaagctgttgcagacttgtttctcttcgccggccgacgatagtatggaccgatag

SEQ ID NO: 191008 - DNA, 1080 bp, synthetic construct
  misc_feature 1..1080: note = Description of Artificial Sequence: Synthetic coding sequence
  source 1..1080: mol_type = other DNA
atgagcgacgagggcagccggggcagccggctgcccctggccctgccacccgcatctcagggatgctcatcaggtggaggcggaggaggttcaagcgctggaggctccggaaatagcaggcccccccgcaatttgcagggactactccagatggctattaccgccggctcagaagagcctgatcctcctccggagccaatgtccgaggagcgcaggcagtggctccaagaggcaatgtccgccgcctttcgcggccagagggaggaggtggagcagatgaaatcttgtttgcgcgtgcttagccagcccatgccaccaactgcaggtgaagcagagcaggcagccgaccagcaggagcgggagggggcactggaactcctggccgacttgtgtgaaaacatggataatgccgctgatttctgccagctctctgggatgcatctgctggtaggtcgatacctggaggccggagccgctggcctaaggtggcgggcagcacaattaattgggacttgtagccaaaacgttgctgctatccaggagcaagtgctgggcttgggcgccctccgaaagctgttacgcctgctggaccgcgatgcgtgtgatacagtcagggtaaaagctctattcgctatatcttgtttggtcagagaacaagaagccgggctgcttcagttcctgagacttgatggcttctcagtgttgatgcgtgcaatgcagcagcaggtccaaaaactgaaagtgaagagcgcattcctcctgcagaatctcctggtcggacaccccgagcataaggggaccttgtgttctatgggcatggtgcagcagctggtggctttagtcaggacagagcactccccattccatgaacatgtgctgggcgccctgtgtagcctggtgaccgactttcctcagggagtccgagagtgtcgcgagccggagttgggcctcgaggagctgctgcgccacaggtgtcaactgctccagcagcacgaagaataccaggaagaattggagttttgcgaaaagttgttgcagacatgcttctcgagccctgcagacgatagcatggatcggtag

SEQ ID NO: 191009 - DNA, 1443 bp, synthetic construct
  misc_feature 1..1443: note = Description of Artificial Sequence: Synthetic coding sequence
  source 1..1443: mol_type = other DNA
atgcagatcccccgggccgccctgctgcccctgctgctgctgctgctggcagctcctgctagtgcgcagcttagtcgagccgggagatcagcacctctggccgcagggtgtcccgatagatgcgagccagcacgatgcccaccacagccagaacactgtgaaggcgggcgagcccgggacgcctgcgggtgttgtgaagtctgtggcgcaccggaaggcgccgcatgtggactacaggagggaccttgtggcgagggactgcagtgtgttgtccctttcggagtaccagcatccgcaactgtgcgacggagagcgcaggccgggctgtgtgtttgtgcgtcttctgaaccggtttgtggatctgacgcgaacacttacgcaaacctctgccagctcagagccgcctccagacgatcagaaagactccaccggccacctgttatagtcctgcagcgaggcgcatgcggacagggccaagaggatccaaatagcctgagacataaatacaatttcattgcagacgttgtggagaaaatcgcaccagctgtcgtgcatatcgagctgttcaggaagctgcccttctccaaacgagaagtgccagtggccagcgggagcggcttcattgtcagcgaggacggtttgattgtgaccaatgcccacgttgtgacgaacaagcaccgggtaaaggtggaactgaagaacggcgccacctatgaggcaaagattaaggatgtagatgagaaagccgatattgctcttattaagattgaccatcagggcaagttgccagtgctcttactggggcgctcatcggaactgcgcccgggggagtttgtagtcgccataggaagccccttctctttacagaacacagtgacaaccgggattgtttccacaacccagcggggtgggaaggagctgggactaagaaactccgatatggattatatccagaccgatgcgattatcaattacggaaattctggcggaccactcgttaatctggatggggaagtgatcgggattaacactttaaaggtgactgctggcatttcgttcgctatccccagtgataaaatcaagaagttcctgacggagagccatgataggcaggcaaagggtaaggccatcactaagaaaaagtacatcggcattcgaatgatgtccctcacctcatcaaaggccaaggagctaaaggataggcaccgcgacttccctgacgtcattagcggcgcatacattatagaagtcatcccagacacaccagccgaggcaggcggcctgaaggagaatgacgttatcatttccattaacggtcagagtgtggtgtctgctaacgatgtaagcgacgttatcaaacgagaatcgaccctaaatatggtcgtgcgccgagggaacgaggatatcatgatcaccgttatccccgaagagattgacccctag

SEQ ID NO: 191010 - DNA, 666 bp, synthetic construct
  misc_feature 1..666: note = Description of Artificial Sequence: Synthetic coding sequence
  source 1..666: mol_type = other DNA
ggcaagctgcccgtgctgctgctgggccggagcagcgagctgcggcccggtgaattcgtagttgctatcggctccccattctcactgcaaaataccgttacgacaggcattgtgtcgactacccagaggggcgggaaggagctcgggctacggaattctgacatggactatatccagaccgacgcaattatcaactatggaaacagtggggggcctttggtgaacctagacggtgaagtcattggcataaacactctaaaagtgaccgctggcatatccttcgcgatcccctctgacaagattaaaaagttcctcaccgaatctcacgaccgtcaggctaaaggcaaagctattaccaaaaaaaagtatatcggtattcgtatgatgagcctaacctcttctaaagcaaaagagttgaaggaccgtcaccgcgattttcctgatgtaattagcggggcttacatcattgaagtgattcccgatactcccgcagaagcggggggccttaaggagaacgacgttattatatctattaacggacagagtgtagtgagtgctaacgacgtcagcgatgtgatcaagagagagagcactctgaacatggtcgtccggcggggcaacgaggatataatgatcacagtcattcccgaagagatagacccctag

SEQ ID NO: 191011 - DNA, 1344 bp, synthetic construct
  misc_feature 1..1344: note = Description of Artificial Sequence: Synthetic coding sequence
  source 1..1344: mol_type = other DNA
atgggctgggccgcccggccccgggccctggcccccgccgcccccgaggccttgttgcacagcccaagaaggagatcacccgcattagcacttagcgcagctacagcagctgcggctcgcggacccgggcgagtacgccttctgcgtggcgtccggcgggctcgcgggcgcagagtgcgcccagcaggggggcctgttcggaggggcgccgcagtgcggggggcactgcggggagcttctctaggccatggcgccgccgcccgcgcagggagacccctgtgcgtcagacagcaactccgggcagcatcgcggcgaagcgaacgtctgcataggccgccagtaatcgtgctccagagaggagcctgcgggcaggggcaagaggacccaaacagtctcaggcataagtataattttattgccgacgttgtggagaaaatcgcccccgctgttgtacatatcgaactctttcggaagctgcctttttctaagcgggaggttcctgttgcctccggcagtggatttatcgtcagcgaggatggccttatcgttacgaacgcccacgttgtcaccaacaagcatcgtgtaaaggtggaactgaagaatggagccacctacgaggctaagattaaggatgtggatgaaaaggcagatattgcccttattaagatcgaccatcagggaaaactcccagtgttactgctcgggcgctcctcagagctcaggcctggagagttcgtggttgcaattgggtcacctttttcactccagaacacagttactactggaattgtctcgaccacgcaacggggcgggaaggaactggggctccggaactctgatatggattatatccagactgacgccattattaattacggtaattccggggggccgctggtgaatctggatggcgaagtgatcggcattaacacgctgaaagtgacggctggcatatccttcgccatccctagcgacaaaattaaaaagtttttgaccgaaagccatgacaggcaagctaaaggtaaggctataaccaagaaaaaatatataggtataagaatgatgtcacttacaagttccaaggctaaagagctaaaagaccggcatcgcgactttcccgatgtgatttcaggggcatatatcatcgaagtgattccagacaccccagccgaagctggcggacttaaggagaacgacgtgatcattagtatcaacggccagagcgtggtttctgccaatgatgtttctgacgttataaaaagggagtccaccctgaacatggtcgtgcgcagaggcaacgaggacattatgatcacagttattccagaagaaatcgacccatag

SEQ ID NO: 191012 - DNA, 1377 bp, synthetic construct
  misc_feature 1..1377: note = Description of Artificial Sequence: Synthetic coding sequence
  source 1..1377: mol_type = other DNA
atggccgccccccgggccggccggggcgccggctggagcctgcgggcttggagggctctggggggaatccgctggggtcggaggcctaggttaactcccgatctgagagccctgctcacaagcggcaccagtgacccccgagccagagtgacctatggcacccccagcttatgggcccggctctccgtgggtgttaccgagcctcgagcctgcctgacctccggcacgcctggcccccgcgcccagctgactgcagtcactcctgacacccgcacccgtgaggcctcagaaaattctggtaccagatccagggcttggctggccgtggctctgggagccggcggagcagtgctgctcctcctttgggggggagggaggggcccacctgccgtgttggcggcagtcccgagtccaccgcctgccagtccacgctctcaatataatttcatcgcggatgtcgttgagaaaacggctccggcggtggtctacatcgagatcctggatcgccatccttttttgggcagagaggtgcctattagcaatgggagcggattcgtggtggcagccgacggcctgatcgttactaacgctcacgtcgtggccgacaggagacgggtcagggtgcgacttctgtctggggatacttacgaagcagttgttacagcagtggacccagtcgccgatatcgccactctaagaattcaaaccaaagaacccctcccgactctcccattgggacgcagcgctgacgtccggcagggcgaatttgttgtggccatgggtagccctttcgctctgcagaacaccataacgtccgggatcgtgagtagcgcacaacgccccgcccgagaccttggccttccccagaccaacgtggaatatatacagacggacgcagcaatcgacttcgggaactccggaggaccactggtgaacctagacggcgaggttatcggcgtgaatactatgaaagttaccgccgggatttccttcgcaatacctagcgatcggctgagagaattcctacacagaggagaaaaaaagaatagtagtagcggcattagtgggagccagaggcgctacattggtgttatgatgctgacgctgtccccatccatcctcgctgaattgcagcttcgcgagccaagctttccagacgtacagcatggcgtattaattcataaggtcattctggggtccccggctcaccgagccggtttacggcctggagacgtcatcctcgctattggagagcagatggttcagaacgccgaagatgtgtacgaagctgtgagaactcagagccaactggcagtccagataagacgcggcagagagacactgaccctgtatgtgaccccagaagttacggaatag

SEQ ID NO: 191013 - DNA, 1086 bp, synthetic construct
  misc_feature 1..1086: note = Description of Artificial Sequence: Synthetic coding sequence
  source 1..1086: mol_type = other DNA
atggccgccccccgggccggccggggcgccggctggagcctgcgggcctggcgggctttaggggggatcagatggggccggcgcccacgtctgactcccgacctgcgcgccctgctcacttctggcaccagcgaccctcgggctcgggtaacatatggaactccttcactttgggcaagactttcagttggcgtcaccgaaccgagagcctgcttaactagtgggacccccggaccaagggcacagttgaccgccgtcaccccagatacccgcacccgggaagctagcgaaaatagtgggactagatcaagggcttggctggcggtagcccttggcgccgggggcgcggtcctcctgcttctttggggtggcggacgcggacctcctgcagtcctggctgctgtccccagcccgcccccagcttctccccgctcgcagtacaacttcatcgccgatgtggtcgaaaagaccgcgccagctgtggtatatattgagattctcgatcggcacccctttctgggccgcgaagtcccaatttccaatggcagcggcttcgttgtcgctgctgatggtctgatagtgaccaacgcccacgtggtggcggatcgcaggcgcgtcagggttagactcctttcaggtgacacctatgaggccgtcgttaccgcagtagaccctgtggctgatattgctactcttcgaatacagactaagttcggaaacagtggcggacctctagtaaacctggacggtgaggtaatcggagtgaacaccatgaaagttaccgccggcataagcttcgctatcccttcagaccgcctgcgtgaatttttacaccggggcgagaaaaagaatagcagctcggggatttctggcagtcaaagacggtatatcggcgtcatgatgctcactctgagtccgagagcaggcctgcgccctggtgacgtgatcctcgctatcggcgagcagatggtccagaacgctgaagacgtgtatgaggcggtccggacacagtcccaactggcggtgcagatacgcaggggccgggaaactctgacgctgtatgttacacctgaggtgacagaatag

SEQ ID NO: 191014 - DNA, 1362 bp, synthetic construct
  misc_feature 1..1362: note = Description of Artificial Sequence: Synthetic coding sequence
  source 1..1362: mol_type = other DNA
atgcaggcccgggccctgctgctggccgccctggccgccctggccctcgcccgggagcctccagcggcaccatgccctgcaagatgtgatgtaagccgatgtccatcgccccgatgtccaggcgggtatgtgccagatctgtgcaactgttgtcttgtctgcgccgcttcggaaggcgaaccatgtgggggacctctcgactctccttgtggggaaagtctcgagtgtgtgcgtgggctgtgtaggtgccggtggagccacgccgtttgcggaaccgacgggcacacttatgcaaacgtgtgcgctttgcaggcagcgagtcggagggcattgcagctatcaggcacccctgtcaggcaactgcagaagggggcgtgccctctcggacttcaccaactgtcaagccccaggtataagttcaacttcatcgcagatgtggtggaaaaaatcgcccccgcagtcgtacatattgaactcttcctgcgacaccccctcttcggtaggaacgtgcccctctcctccggctcagggtttatcatgagtgaggctgggttgattatcacaaacgcccacgtggtgagttcaaattccgccgcccccggaagacagcagctgaaggtgcagctgcagaacggcgactcgtatgaggccaccattaaagatattgataaaaagagcgatattgcaacgattaagatccacccaaagaagaagctacctgtcttgctcctgggtcattctgctgaccttagaccaggcgagttcgtagtcgccatcggtagccccttcgcactccagaataccgtgacaacaggcatagtgagtacggcccaaagggagggcagagagctgggattgcgagacagtgatatggattacattcaaaccgatgctataattaactatggaaactcaggcggcccgctggtgaacctggatggagaagtgatcggcatcaataccctcaaggtgactgccggaattagcttcgccatcccatccgatagaatcacaaggtttcttaccgagttccaggacaagcaaataaaggattggaagaaaagatttataggcatccggatgagaaccatcacaccttcccttgttgacgaactgaaggctagcaaccctgattttccagaggtcagcagcggaatctacgtccaggaggtggccccgaatagcccctcacaacggggcgggatacaggatggagatatcatagtgaaggttaacggacgccccctggtggacagtagcgagcttcaggaggccgtgcttacagagtctccactgctgctggaggttagacggggcaacgacgacctccttttctctatagcccccgaggtagtaatgtag

SEQ ID NO: 191015 - DNA, 1431 bp, synthetic construct
  misc_feature 1..1431: note = Description of Artificial Sequence: Synthetic coding sequence
  source 1..1431: mol_type = other DNA
atgatccggccccagctgcggaccgccggcctgggccggtgcctgctgcctggcctccttttacttctggtccccgtgttgtgggcaggggccgaaaagctgcacacacaacccagctgcccagctgtgtgccagccgaccaggtgccccgccttacccacctgcgcacttggaacaaccccagtgtttgacctttgtagatgctgtagggtttgcccagccgcggagcgcgaggtctgtggaggtgcacagggccagccatgtgctcctggattgcagtgtttgcagcctctgcggccgggcttcccgagtacttgcgggtgccccaccctagggggtgctgtgtgtggcagtgataggagaacttatcccagcatgtgtgcgcttagggcagaaaatcgcgctgccagacggctaggcaaggttccagcagtgcccgtgcagtgggggaattgcggtgacacaggaactagaagtgctggacccttgagaagaaactacaacttcatagctgcagttgtggagaaggtcgctccaagcgtcgtccatgttcagctctggggccggctcctgcacgggtcccgtttggtacctgtttatagcggtagcggcttcatagtctctgaagacgggttaataataaccaatgcacatgtcgttcgaaatcagcagtggatagaggtcgtgttgcagaacggtgctagatacgaggccgtagtgaaggatatcgatctgaaactcgacctggcagtcatcaagattgagtccaacgcagagctgcctgtccttatgctcggcagatccagtgacctacgggccggagagttcgttgtggcccttgggagccccttctccctccaaaacacagctactgccggcattgtgagtacgaaacagcgcggcggaaaggaactaggtatgaaggattccgatatggactatgtgcaaattgatgctacaatcaactatggtaactctggcggtcctttagtaaaccttgacggtgacgtaattggggtgaacagcctgagggtgacggatggtattagcttcgccatcccatccgaccgggtgagacagtttttagccgaatatcacgaacaccagatgaaaggaaaggctttctccaataagaagtatcttggcctgcagatgctgtccctgacggttcccctgtcagaggaactcaagatgcactatcccgactttccagatgtgtcttcaggcgtgtacgtgtgtaaggtggttgagggaacagcagcacagtcatctggcctccgcgaccatgacgtgatcgtcaatatcaacgggaagcccattaccacaacaacagacgtggtcaaggccctagatagcgactccctaagcatggccgtattacgaggaaaagataatctgctccttacagtgattcccgagacaataaattag

SEQ ID NO: 191016 - DNA, 8157 bp, synthetic construct
  misc_feature 1..8157: note = Description of Artificial Sequence: Synthetic coding sequence
  source 1..8157: mol_type = other DNA
atgccccggaccaagcagatccacccccggaacctgcgggacaagattgaagaggctcagaaggagcttaatggggcggaggttagcaaaaaggagattctgcaagctggcgtgaaagggacaagcgagagcctcaagggagtgaaaagaaaaaagatagtggccgagaaccatttgaaaaagatccccaaatctccactgcgaaacccgctgcaagccaaacacaagcagaacactgaggaatccagttttgccgtgctccactcagctagcgagtctcataaaaaacagaattacattcctgtcaaaaacggaaagcagtttacaaagcagaacggtgagacaccaggcattatcgctgaagccagcaaatctgaagaatcagtgagccctaaaaaaccactgttcttacagcagccatcggagctgaggaggtggagatctgagggagcagatccagccaagttctctgatctggatgaacaatgcgactcctcctccctcagctctaagaccagaactgataactcagagtgcataagctcccactgcgggaccaccagcccaagctatacaaacaccgcctttgatgtgctgctgaaggctatggaaccagaactgtcgacgttgagtcagaagggctccccatgtgctataaaaacagaaaaattgaggcccaataagacagcgaggagccccccgaagctgaaaaactcctctatggatgcccccaaccagaccagtcaggagctcgtggccgaaagccagtcaagttgtacgtcatacactgtacacatgtcggccgcacagaagaacgaacagggcgctatgcagtcagcctcccacctgtaccaccagcatgagcatttcgtccctaagagcaaccagcacaatcagcagctcccgggatgtagtggtttcacaggtagcctgaccaatctgcaaaatcaggaaaatgctaagcttgagcaagtatacaacatcgccgttacttccagtgtcgggctgaccagtccatcgtcccggtcccaggtaaccccacagaaccagcaaatggacagcgccagccccctgtccatttcacctgccaattctacacagtctccacccatgcctatatacaattcaacgcacgtcgcatcggtggtaaaccagagcgtggagcaaatgtgtaacctccttctgaaggatcagaagcctaagaagcaaggcaaatacatctgcgaatactgcaatcgcgcttgcgctaagccatccgtcctgctaaagcacatacgttcccacaccggtgagagaccctatccctgtgtaacttgtggattctctttcaaaaccaaaagcaacctgtataaacacaagaagtcgcacgctcacacaatcaagctggggttagtgttacaacccgacgcggggggcctttttctttctcacgagtcccccaaagccctttccatacacagcgacgtggaagactcaggggagagcgaggaggaaggtgccacggacgagcggcaacatgacctgggggcaatggaactgcaacctgttcacataatcaaacgcatgtccaatgcggagaccctattgaagtcttccttcacaccctcctcaccagaaaacgtgatcggcgacttcctgctgcaggacaggtcagcagagagccaagctgttacagagcttccaaaggtagtggtgcaccatgtgaccgtgtcccccctcaggactgacagccctaaggctatggatcccaaacctgaactctcaagtgcccagaagcaaaaggatctccaagtcactaacgtgcagcctcttagcgctaatatgagccagggaggcgtatcacggctcgagacgaatgaaaattctcatcagaaaggagatatgaatcccttagagggcaaacaggactcccatgtgggcacagtccacgctcagctgcagcgacagcaggctaccgattactctcaagagcaacagggcaaactgctgtctcctcgctcattgggcagcacagatagcggctatttctccagaagcgagtcagcagatcaaactgtttctccaccaaccccattcgccagacgccttccaagcaccgagcaggactccggcagatctaatgggccgtctgccgccctggtgaccactagcacgccatctgctttacccactggtgagaaagcccttcttttacccggccaaatgcgaccaccgctagcaacaaagactcttgaggagagaatctccaagctgatatctgacaacgaagccctcgtcgatgataaacagctggattctgtgaagccgcgacgcacatccctttctcgtagaggcagtatagacagcccgaagtcctacattttcaaagacagttttcagtttgacctcaagccagtcgggcgaagaaccagctcctctagcgatattcccaagagtccgtttactcctaccgaaaagtcgaagcaggtattcctgctctccgtaccatcattggactgtttacccattacccggtcaaatagcatgccaacaaccggatatagtgctgttcccgccaatatcatcccaccacctcatccgctgcgcggcagccagtccttcgacgataagatcgggactttttatgatgatgtctttgtttcagggccaaacgctccagttccccagtcaggccatccccgcactcttgtgcggcaggccgcaatcgaagactcctcagccaacgagtctcacgtgctaggtaccggccagtcgctcgacgagtcacatcaggggtgccacgccgcaggtgaggctatgtcagtgcgaagcaaggcactggctcaagggccacacattgagaaaaaaaagtcacaccagggtcgtggaaccatgttcgaatgcgagacctgtagaaatcgttacagaaagttagagaactttgagaaccacaaaaaattctactgttcagaactgcatggtcctaaaacgaaggtggccatgagagaacccgaacattctcctgtccctggcggactgcagccacagattctccactaccgcgtggccggatcgagcgggatatgggagcagacgccgcagatacgcaagcgccgaaaaatgaagagcgtaggggatgatgaggaattgcagcagaacgagtccggcaccagcccgaagtcttctgaagggctgcaattccagaatgccctgggatgcaatccctctcttccaaagcataacgtcaccattcgttccgatcagcagcataagaatatccagttacagaatagccatattcatctggtggcgcgcggcccggagcagacaatggaccccaagctgtcaaccataatggagcagcagatctctagtgccgctcaggacaagattgagctgcagcgacacggcacaggcattagcgtcattcagcacaccaatagcctttctaggcctaactccttcgataagcctgaaccattcgaacgagcatccccagtgtccttccaggagctcaatcgaacgggcaagtcaggttctctgaaggttatcggaatttcccaggaggaatcccaccccagccgggacggtagccacccccatcagctggcactgagcgacgccctgaggggcgagctgcaggaaagttctagaaaatcaccatcggaaagacatgttttggggcagccttctcggctcgtcaggcagcacaatatacaagtcccagagattctggtgacagaagaacctgaccgggatcttgaggcacagtgtcacgaccaggaaaaaagcgagaagtttagttggcctcagagatccgagactttgagtaagctcccaactgaaaagcttccaccgaagaaaaagcggctgaggctagccgagattgagcacagctcaaccgaatcatccttcgattcaacacttagccgatctctttctagagagtcctcactgagtcatacttccagcttttctgcctcactggacatagaggatgttagcaagactgaagcctcaccaaaaatagactttttgaacaaagccgagttcctcatgatcccggcaggcctcaatacccttaatgtccctggatgccaccgggagatgcggcggaccgcatcggagcagataaactgtacacaaacttctatggaagtctcagatctgaggtctaagtcctttgattgtgggtccattacccctccccagaccacccctcttacagagctgcagcccccttcgagtccttccagggtgggggttactggacatgtgccccttttggaacgacggcgcggccccctggtacgtcagatttcccttaacattgccccggattcacacctgagtcccgtccaccctactagctttcagaacacggccttgccatccgttaatgccgtcccatatcagggcccgcaactaacttctacctctctggctgagtttagtgctaacactttgcacagccagacccaggtgaaggacctgcaggctgagacctctaacagcagttccactaacgtctttcccgtacagcaactgtgtgatatcaacctactgaatcaaattcatgctccgccttctcaccagtctacccagctgagtctgcaggttagtacccaaggctccaaacctgataagaattcagtgctgtcgggatcatcaaagtcagaggactgttttgcgcctaaataccaactccactgtcaggtttttacatccggcccatcctgttcttccaaccctgttcattcacttcccaatcaagtcatcagcgacccagtcggaacagatcactgcgtcacatctgctaccctgcctaccaagctgatcgactccatgtctaatagccatcccctccttccacccgagctccggcccctgggatctcaggttcaaaaggtgccaagttcttttatgctgccaatcagacttcaatcaagcgtcccagcatactgctttgcgaccctgacctcattaccacagatccttgtcacccaggacctaccgaatcagcctatttgtcagaccaatcactccgtggtgcctatttccgaggagcagaacagcgtccctacattacagaagggccaccagaacgcactgcctaatcctgagaaagaattcctatgtgagaacgtattctctgaaatgagccagaattcttccctctctgagagcctccctataactcagaagatttccgtaggaaggctatcacctcagcaagagagcagtgcatcctcaaagcgaatgcttagtcctgccaactccttggacattgctatggagaagcatcagaagcgtgctaaggatgagaatggcgccgtgtgcgcaaccgacgtgagaccactcgaggcactctcctctagggtcaatgaagcctcaaagcagaaaaaacctatcctggtgcgccaggtgtgcactacggagcccttagatggcgttatgttagagaaggacgtctttagccagcccgaaattagcaacgaggccgtgaatcttactaacgtgctcccggccgataacagttctaccgggtgttctaaatttgtcgtgattgaacctatctctgaacttcaggaattcgagaatattaagtcaagcacctccttgactctgaccgtcagaagcagccccgctccttcggagaatacacatatctcacccctgaaatgcactgacaataaccaagagcggaaatctcccggggtgaaaaatcaaggagacaaagtcaacatacaggagcagtctcagcagcctgtaacatccttgtctctgtttaacattaaagacactcagcagctggcctttccctccctcaagactactactaattttacttggtgctacctgctgcggcagaaatcactgcaccttccccagaaggatcaaaaaacctccgcatatacagactggaccgtatctgcaagcaatccaaacccactaggcttgccgacgaaggttgctctggctcttctgaattcaaaacagaacaccgggaagagtttgtattgtcaggcaataacgactcattctaaatcggacctacttgtgtacagcagcaagtggaagagctctttgtcaaaacgggccctcggtaaccagaagtcaacagtggtggaattctcgaacaaggacgcatctgaaataaactcggagcaggataaagaaaattccctcattaaaagcgaaccacgacggattaaaattttcgatggcgggtataagagtaatgaagagtacgtgtatgtgcgcggcaggggacggggaaagtacatctgtgaagaatgtgggattcgatgcaaaaaaccatccatgctgaaaaagcatattcgcactcataccgatgtccggccctaccattgtacttattgcaatttcagttttaaaaccaagggtaacctgacgaaacacatgaagtctaaggcccacagcaaaaagtgcgtcgacctgggagtgtctgtgggtctgatagatgaacaggatacagaggaatcagatgagaaacaacggttctcgtatgaaaggagtgggtacgatctggaggagagtgacgggccagatgaagacgataatgagaacgaagacgacgacgaggattctcaggcggagtcagttctgtcagccactcccagtgtgaccgctagtccacaacacctgcctagccgtagctctctccaggacccagtgagcactgatgaagatgtcagaataaccgactgtttttccggcgtgcatactgatccaatggacgtgttgccccgggcgctgctgaccagaatgaccgttttgagcaccgctcaatccgactataacaggaaaaccctgtctccgggcaaggcaagacaaagggctgcaagagacgagaacgacacaattcccagtgtggatactagccgatctccttgccatcagatgtctgtggactacccagagtctgaagagatcctgcgctcctcaatggccgggaaggccgtcgcaattactcagagtccgagtagtgtgcgcctgcctcctgcggccgcagagcacagcccccagacagctgctggaatgccttctgtcgcgtccccacaccccgacccacaggaacagaagcagcaaatcacactacagcctactcccggtctgccctccccacacacccacctgttttcgcatctccccctgcattcccaacagcagtctagaactccctataacatggttccggtgggaggaatccacgtggttccagccgggctgacgtattctacattcgtccctttgcaggccgggcctgtccaattgactataccagctgtgagtgtagtgcatagaacccttggcacccaccgcaacacagttaccgaggttagtggaaccactaaccccgccggggtcgcagaattatcttcagtggttccgtgcatacccattggacagatacgtgttcccgggctgcagaatctgagcacgcccggattacaatccctgccttctctgtctatggaaacagtcaatattgttggtcttgctaacactaacatggctcctcaggtgcacccaccaggcctcgccctgaatgccgttggtctgcaagtcctgacagccaatcccagctctcaaagttcccccgcgcctcaggcccacatcccgggcctgcagattttgaatatcgctctcccaacactaattccctctgtgagtcaggtggcggtggacgcgcagggtgcccccgagatgcccgcatcacagagcaaggcatgtgaaacacaacccaaacagacctccgtggcttctgcaaaccaggtatccagaaccgaatcgccccagggcctcccgacggtacaaagagagaacgctaagaaagttctgaacccaccagcaccggctggagaccatgccagactggatggactctctaagatggatacggagaaggccgcttccgctaaccacgtgaagcccaagcctgagctgacctccatacagggacagcccgctagcactagccaaccactactgaaggcccacagcgaagtatttactaagccctcaggccagcagactctctctcctgaccggcaggtgcctcgaccaaccgctctgccccggagacaaccaacagtccatttctctgatgtctccagcgatgatgatgaggatcgtctggtgattgcaacttag

SEQ ID NO: 191017 - DNA, 387 bp, synthetic construct
  misc_feature 1..387: note = Description of Artificial Sequence: Synthetic coding sequence
  source 1..387: mol_type = other DNA
atgccccggaccaagcagatccacccccggaacctgcgggacaagatcgaagaggctcagaaagagctaaacggtgcggaagttagtaagaaggaaatcttgcaggccggtgtgaagggcacaagcgagtctctgaagggggtaaaacgcaaaaagattgtggcagaaaaccatctcaaaaaaatcccaaaatctcctttgagaaatcctctgcaggccaaacacaaacaaaataccgaggagtcatccttcgctgtcctccactctgcctcagagagtcacaagaaacaaaattatatccctgtgaaaaatggcaaacaatttaccaagcagaacggagagaccccaggtataattgccgaggctagcaagtccgaggagtcgtag

SEQ ID NO: 191018 - DNA, 429 bp, synthetic construct
  misc_feature 1..429: note = Description of Artificial Sequence: Synthetic coding sequence
  source 1..429: mol_type = other DNA
atgccccggaccaagcagatccacccccggaacctgcgggacaagatcgaggaggcccagaaagaactgaatggggcggaagtgtctaaaaaggaaattctgcaagcgggagtaaagggcacttccgaatcattaaagggtgtgaaaagaaagaaaattgtggccgaaaaccatctgaaaaagatccccaagagcccactcaggaatcctctacaggctaagcacaaacagaatacagaggaaagcagttttgctgtgcttcatagcgcatccgaaagtcacaagaaacagaactatattcccgttaaaaatggcaaacaattcacaaagcagaacggcgagacgcctggtatcatcgcagaggcatccaaatccgaagaaagtgtgtcccccaagaaaccgcttttcctgcagcagccatcagaatag

SEQ ID NO: 191019 - DNA, 363 bp, synthetic construct
  misc_feature 1..363: note = Description of Artificial Sequence: Synthetic coding sequence
  source 1..363: mol_type = other DNA
atgccccggaccaagcagatccacccccggaacctgcgggacaagattgaggaggcccaaaaggagctaaatggagcagaggtttcaaagaaggagatactgcaagcgggggtcaaaggtacctctgaatcattgaagggcgtgaaaaggaaaaaaatcgtcgccgaaaaccaccttaagaagatcccgaagtctcccctgaggaatcccctccaggcgaagcacaagcagaacaccgaagaaagctccttcgcggtgctccacagcgcgtcagagtcccacaaaaagcagaactacatcccagtgaagaacgggaagcaatttacaaagcaaaacggcgagacacctggcattatcgcatag

SEQ ID NO: 191020 - DNA, 1752 bp, synthetic construct
  misc_feature 1..1752: note = Description of Artificial Sequence: Synthetic coding sequence
  source 1..1752: mol_type = other DNA
atgctgaagaagcacatccggacccacaccgacgtgcggccctaccactgtacatactgcaatttttcttttaagaccaaggacgagaagcagaggttctcttacgagcgatccggctacgaccttgaagagtccgatggaccagacgaggacgacaacgaaaacgaagatgacgacgaggattcccaagctgagtccgtgctcagcgccactccatctgtgacagcctctcctcaacacctccccagccgcagctccctgcaagaccctgtgtctactgatgaggacgtaaggattaccgattgtttctctggggtgcacacagaccccatggatgtgcttccacgcgctttgttaaccaggatgactgtgctgtcaacggcgcagagcgattacaaccggaagactcttagtcccggaaaggcccgccagcgagccgctcgagatgaaaatgacaccatccctagtgtcgatacaagtcgctccccctgtcatcagatgtccgtcgattatccagagtctgaggaaatcctgcgttcttcaatggctgggaaagctgtcgcgataacgcagtccccctcttcagtccgcctgcccccagccgctgcggaacactctccccagactgccgctgggatgccgtcagtggctagccctcacccggatcctcaggaacaaaagcagcaaatcacccttcagcccacccctggcctgccctccccacatacccatctgttcagccatctgcccttgcatagtcagcagcaatctagaacgccctataacatggttcctgtcgggggaatccacgtcgtaccagcgggactgacgtactctactttcgtccccctgcaagctgggcccgtacaacttaccatccctgccgtgtccgtggttcatcgaacacttggcactcataggaatacagtcacagaagtgtctggtacaactaatcctgccggtgttgccgagttgtcttcagtggtcccatgcattcccatcggacaaatccgcgtacccggacttcagaatctttccacacccgggctgcagtcactgccgagcctttccatggagactgtcaacatcgtgggtttggccaacaccaacatggccccacaagtgcacccccccggcctggccctgaatgccgtagggttgcaagtcctgaccgctaatccttcgtctcaaagtagtcccgccccccaggcccacatacccggactgcagattctgaatattgcccttccaacgttgattcctagtgtatcacaggtggctgttgatgctcagggagcgcctgaaatgcctgcatctcagtcaaaggcttgtgagacccagccgaaacaaactagcgtcgcttcagccaaccaggtcagccggactgaatcaccccaaggcctgccaactgtgcaacgcgaaaacgccaaaaaggtcctgaaccccccagcgcctgctggggatcacgcccggttggacgggctctctaagatggacaccgaaaaagctgccagcgcaaaccatgtgaaacccaagcctgagctgacctccattcaaggccagcccgccagcacaagtcaacccttgcttaaagctcattcagaagtctttacaaaaccttccggccaacagaccctgtccccagacagacaggtgccaaggccgacggcactgcccagacgacaaccaactgtgcacttctccgacgtatcatcagacgatgacgaggatagactggtgatcgccacctag

SEQ ID NO: 191021 - DNA, 2103 bp, synthetic construct
  misc_feature 1..2103: note = Description of Artificial Sequence: Synthetic coding sequence
  source 1..2103: mol_type = other DNA
ggcgacaagttcagcttccagcgggccctgggcaaccagaagagcacggtcgtggaattcagcaataaggacgctagtgaaattaactcagaacaagataaagagaattctttgattaaatcagaaccccggcggatcaaaatttttgatggcggatataagtccaacgaggagtacgtgtacgtgcggggccggggtagaggcaaatacatctgtgaggaatgtggaatacgatgcaaaaaaccctccatgttgaagaaacacatccgtactcataccgatgttcgcccataccactgtacctattgtaatttcagtttcaaaactaaaggtaatctcactaaacacatgaagtccaaggcccacagcaagaaatgcgtggacctgggtgtcagcgttgggctcattgacgaacaagataccgaggaaagcgacgagaaacagagattctcctacgagcgctctgggtatgatctggaggaatctgacggacctgacgaagatgataacgagaatgaggacgatgatgaggattctcaagccgaatctgtgctcagcgctaccccgtctgtcactgcctcccctcagcatctcccaagtcgcagctctctgcaagatcccgtgtctaccgatgaggatgtccggatcactgactgctttagtggagtccatacggaccctatggacgtattgcctcgggcgttactgactaggatgactgtcttgtctacagcgcagagcgactataatcgcaagactctgtcacccggcaaggctcggcaaagggccgccagagatgagaatgatacaatcccttccgtggacacatcccgaagcccatgccaccagatgtcggtggattaccccgagtcggaggaaatactgcgatcatctatggcgggcaaggcggtggcgatcactcagtctccctcctcagtccggttgccacctgccgcagcagagcacagcccacaaaccgccgctgggatgccttccgtggcttctccccatcccgatcctcaagagcagaaacaacagatcacactgcagccaactccgggactcccaagcccacatacacacctgtttagccatctccctctccactctcagcagcagtccagaacaccgtacaatatggtgcctgtcgggggcattcacgttgtgccagctggccttacctatagcacgttcgtgccacttcaggcgggaccagtacagctgacgattccagcagtcagtgtggtgcaccgcacgctgggcactcacagaaacacggtaaccgaggtttctggcaccactaaccccgccggagtcgcagaactctcaagcgtcgtgccttgtatcccaattggccagataagggtacctgggctccagaatttgtcgacacctggcctgcagagcctcccatccttgtctatggagacagtgaacatcgtcggcctcgccaacaccaatatggctcctcaggtgcatcctcccgggctggccctaaacgctgttgggctacaagtccttacggccaatccctctagtcagagctctcccgccccccaagcccacattcccggcttgcaaattcttaatatcgccctgccaactctgattccttctgtgagccaggtggctgtggacgcacagggtgctcctgagatgccagcatctcagagcaaggcttgtgagacccagcctaaacagacctccgttgcttcagccaaccaggtctcccgcacagagtctccacaaggcctgcctactgtgcagagggagaatgctaaaaaggtcctgaacccccctgctcccgctggtgaccatgcccggttggatgggctgagtaaaatggacacagagaaagccgcctctgccaaccacgttaagcctaaaccagaactaaccagtatccagggacagcccgcctctactagccagccgctactgaaagcccacagcgaggtgttcaccaagccgtccggccagcagacattgtctcccgataggcaagtgccaaggcctaccgctctgcccagacgacagcctacggttcatttctccgacgtgtccagtgacgatgatgaggatagattagttattgcaacctag

SEQ ID NO: 191022 - DNA, 7341 bp, synthetic construct
  misc_feature 1..7341: note = Description of Artificial Sequence: Synthetic coding sequence
  source 1..7341: mol_type = other DNA
atggacaccggcgacaccgccctgggccagaaggccaccagccggagtggcgagaccgataaggcatctggccggtggcggcaggagcagagtgccgtgattaagatgagcaccttcggttcacacgagggccagcggcaacctcagatcgaacccgaacagattggtaataccgcgtcagcccaactcttcggttcaggtaaacttgccagcccctctgaagttgtgcagcaggtggccgagaagcaatatcccccccaccgcccatccccttatagttgccagcattctctgagctttccgcagcacagccttccacagggagtaatgcactccactaagcctcaccagtccttggaaggccccccctggctgtttcctgggcctttgccttcagtggccagcgaagatctgtttccattccctatccatgggcacagcggcggttatccgagaaagaagatctccagccttaatccagcatattcacagtactcccagaagagtatcgagcaggccgaagaggctcacaagaaagaacataagccaaaaaagcccggcaaatacatctgcccctattgctctcgggcttgtgcgaagccttccgtgctgaagaagcatatccggtcacatacgggagaacggccctacccatgcattccttgcggcttcagctttaagaccaagtccaacctttacaagcatcgaaagtcccatgctcacgctattaaggccgggctcgtgcccttcacagaaagcgcggtgtcgaagttggaccttgaggctggattcatagatgtagaggccgagatccacagcgatggagaacagtctacagatacggatgaggaatcttctctctttgccgaagctagcgataaaatgtccccggggcccccaattcccctcgatatagccagtcgaggaggctatcacggtagtttggaagagtccctcggtggacccatgaaggttccaatcttgatcatccctaaaagtgggatcccactccctaacgaatcttcacagtacataggtcctgacatgttaccaaatccctcactcaataccaaagctgatgacagccacacggttaagcaaaaactggcgctgcggctgagcgagaaaaagggccaggacagtgaaccttctctcaacctgttatcaccacatagtaaggggagcacggacagcggatatttttctcggtctgagtccgccgaacaacaaattagtccacccaacaccaacgctaagagctacgaagaaatcattttcggtaagtattgtcggctctccccacggaacgccctctcagtcacgaccacatctcaggagagagctgccatgggacgtaaagggataatggaacctctgcctcacgtaaatactcgcctggatgtgaagatgttcgaggatcctgtttcccagctcatacccagcaaaggggacgtggacccgagccagacgtcaatgctcaagtccaccaagttcaactctgaatcaaggcaacctcagataatcccctcttctatacgcaatgaagggaaactatatcctgccaacttccaggggtcaaaccctgtgctgctggaagctccagtggacagctcaccactaatcagatccaattcggtgcccacaagctcagctacaaatctgaccatccctcctagtctgagagggtcgcatagctttgacgagagaatgacaggaagcgatgatgttttttatccaggcaccgtgggtattcctccgcagaggatgctccgcagacaggctgccttcgagttgccctccgtgcaagaaggccacgtggaggtggagcaccatggtcgaatgttgaagggaatttctagttcctccttgaaagaaaagaagctttcaccaggggacagagttgggtacgactacgacgtttgccggaaaccgtacaaaaaatgggaagattcagagacccctaagcagaactaccgtgatattagctgtttaagttctctgaagcatggcggcgaatactttatggatcccgtagtaccactgcagggtgtcccgagcatgttcggaacgacttgcgagaatcggaagaggaggaaagagaagtcagtgggtgatgaggaggacacaccaatgatttgcagctctatagtgagcactcccgtgggaatcatggcgtcggattatgatcccaagctgcaaatgcaggaaggcgtccgctctgggttcgcgatggcagggcatgaaaatctgtcccatgggcacacagagcggttcgacccctgtagaccccagttgcaaccgggcagcccatcgcttgtaagcgaagagtcaccttccgccattgatagcgacaaaatgagcgacttgggtggccgaaagccgcctgggaatgtgatcagtgtgatccagcacaccaatagcttatcgcgccccaacagttttgagagatccgaaagcgccgagctcgttgcctgtacccaggacaaagccccatctccatctgagacatgcgactctgagatcagcgaggcgccagtgagccccgagtgggcacctcctggtgatggtgcagagtcagggggcaaacccagcccatcccagcaggtgcaacagcagtcctaccatacacaaccaaggctggtaagacaacacaatatccaggtgccagagattcgcgttactgaggaaccagataaacccgaaaaggaaaaggaggcccagtcaaaggaacccgaaaaaccagttgaagaattccagtggccccagcgctctgaaacgttgtcacaacttcctgctgaaaagctgcctccaaagaaaaagcgtcttcgtctcgccgacatggagcattctagtggggaaagctccttcgaatctaccggcaccggactgtctcgctccccaagtcaagaatcaaatctctcccactcatccagcttcagtatgtcctttgagagggaagagacatccaagctgagtgctcttccaaagcaggacgagttcgggaagcactccgagttcttgaccgtccccgccgggtcctatagcctgtctgttccaggccaccatcaccaaaaggagatgaggcgctgcagcagtgagcagatgccatgtccccaccctgcagaagtgccggaggtccgttccaagagtttcgattacggaaacctctcccatgcccctgtaagtggagcagccgccagcactgtgtcaccatccagggaacgtaaaaagtgcttcttagtgaggcaagcctcttttagtgggagccctgaaatctctcagggtgaagtcggcatggaccagtcggtaaagcaggagcagttggagcatctccacgccggactacgaagtgggtggcaccacggcccccccgccgtgctgcctcccctgcagcaggaagatcccggtaaacaggttgcaggtccctgcccaccactgtcatccgggccactccatctagcacagccacagattatgcacatggacagccaggaatcattgcgtaaccccctgattcagcccacgagctatatgaccagtaagcacctacctgaacaaccccacttgtttcctcatcaagaaacaatcccattttcacctattcagaatgcattgtttcagtttcagtacccaaccgtctgtatggtgcatctgccagctcagcagcccccctggtggcaggctcactttcctcaccccttcgcacagcacccgcagaaaagctatggaaaacccagctttcagacagaaattcacagtagctatcccctggaacacgttgctgagcacacaggcaagaagcccgccgagtacgcccataccaaagaacagacctacccatgctattccggagctagcggactgcaccccaaaaatctcctgcctaagttcccaagcgatcaatcttcaaagtctactgaaacaccgtcagaacaggtgcttcaggaagattttgcctctgcaaatgccggctcacttcagagcctccctggcaccgtggtccctgtgagaatacagacacacgtgccaagttatggctccgtgatgtatacatctatatcccaaatcctggggcagaatagtccggctatcgtcatctgcaaggtggatgaaaatatgacccagcgcacgcttgtcacgaacgccgcaatgcaaggaatagggttcaatattgcccaggtgctcggccaacacgctgggctagaaaagtaccccatctggaaggctccccagaccctcccgctcgggctggagtcatccatcccactctgccttccaagcacatctgattctgtggcgacactaggcggatctaaacgcatgctgtcacccgccagcagcttagagctgtttatggagaccaaacagcagaagagggtgaaagaagaaaaaatgtacggtcagatcgttgaagagctgagtgccgtcgaactcacaaattcagacattaagaaggacctgtcaagacctcagaaacctcaattagtccgccaaggatgcgcgagcgagcctaaagacgggctacagagtggaagttcctcattctccagtttatctcccagctccagccaggactacccatctgtgagcccgagcagccgcgaaccctttctgccctccaaagagatgctgagcggctccagagcacccctcccagggcaaaagagttcagggccttcggagagcaaggagtccagtgacgagctcgatattgacgaaacggctagtgatatgtctatgtctcctcagtctagctctttacccgccggtgatggccaattggaggaggaaggtaagggccacaaacggccggtgggcatgctggtgagaatggcaagtgccccatccggtaacgttgctgacagcactctcctgctcacagacatggcggatttccaacagatcctgcagttcccctctctgaggaccaccacaaccgtgagttggtgtttcctgaactatactaagccaaattacgtccagcaggccacatttaaatcatctgtgtacgccagctggtgcatttctagttgtaatcctaacccctcaggtttgaacactaagacaacactcgcactcctccggtccaagcagaagattacggctgaaatctacacactagccgcaatgcatcggcctggcactgggaagcttactagttcgtcagcctggaagcagtttacccagatgaaacctgacgcaagttttctctttggcagcaagctggagcgcaaactcgtaggcaatatactgaaggaacgaggcaagggcgacatccacggtgataaggatatcggctcaaaacaaaccgagccaatccggattaaaatctttgagggtgggtataagtcaaatgaagactatgtatacgtcagaggacggggccggggtaagtacatatgcgaggagtgtggcatcaggtgtaagaaacccagcatgttgaagaaacatatccggactcataccgatgtgaggccatatgtttgtaaactctgcaatttcgcgttcaagaccaaaggtaatctcactaagcatatgaagagtaaagcccatatgaaaaagtgtctggagttaggagtttctatgactagcgtcgacgacaccgagaccgaggaggccgaaaacttggaagatctgcacaaagccgccgagaaacatagcatgagctccatcagcaccgatcatcaattttctgatgctgaagagagcgacggtgaagacggggacgacaatgacgatgatgacgaagacgaggatgatttcgacgaccagggggacctcacaccgaaaactcgatctagaagcaccagcccccagcctccaaggtttagtagtctgccggtaaacgtgggtgccgtgccacatggggtgcctagtgactcatccttgggtcacagttcactgatttcatacctggtcactctcccgtcaatccgcgtgacccagttgatgactccatccgactcttgtgaggatacacagatgactgaatatcagcgactctttcagtctaagtccaccgactctgagcccgataaggaccggctggatataccaagctgcatggatgaggaatgtatgctgccatcggagccaagcagctccccaagagacttcagccctagcagccaccactcctctccaggctatgattcttccccatgtcgcgataacagccccaagaggtacctgattccaaaaggtgatctgtcaccacggcgccacttgtctcctaggcgggacctgagcccgatgcgccatcttagtcctaggaaggaagccgcgctccggagagagatgtcccaacgcgacgtatctccgcggaggcacttaagcccccgccggcctgtctctcccggcaaggatattacagcgcgtcgggacctgtccccccgcagagaacgtcggtacatgaccaccattcgcgccccctccccacgcagagcgctctaccacaacccaccgttgtccatggggcagtatctacaggcagagcctatcgtcctcggcccacccaacttgagaagggggctgccacaggtgccttattttagcctgtacggagatcaggaaggtgcatatgagcaccctggctcctctttgtttccagagggacccaacgattacgtgtttagccacctgccactgcatagccagcaacaagtacgggcccccatccccatggtccctgtgggagggattcagatggtgcatagtatgccccctgccctatctagtcttcacccctctcccacactgcctctgccaatggaggggttcgaggaaaagaaaggagcatccggcgagtccttctcaaaagacccctatgtcctcagcaagcagcacgagaagaggggacctcatgcgcttcagagcagtgggccaccatccactccttctagcccccgcctgcttatgaagcagtctacctcagaagacagcttaaatgcgaccgaaagagagcaggaagaaaatattcagacatgcaccaaagctatcgcttcattgaggatcgccactgaagaggccgccctgcttggtccggaccaacctgctagggtgcaagagccccaccagaaccctctcggatcggcgcacgtctctatccgccatttcagccgacccgagccagggcagccttgcacctcagcaacccacccagacctgcacgatggagagaaggacaacttcggtacctctcagacacccttggcacatagtacgttttacagcaagagctgcgtagatgataaacaattggacttccacagtagtaaggaactttcaagctccactgaagagagcaaggatccttcatctgaaaagagccagcttcattag

SEQ ID NO: 191023 - DNA, 7341 bp, synthetic construct
  misc_feature 1..7341: note = Description of Artificial Sequence: Synthetic coding sequence
  source 1..7341: mol_type = other DNA
atggacaccggcgacaccgccctgggccagaaggccaccagccggagtggcgaaacggataaggcttcaggccgatggcgccaggaacagagcgcagtaatcaagatgagtacattcggcagccacgaaggccagcgtcaacctcagatcgaacctgaacagatcggaaatacagcctccgcacagctcttcgggagcggaaagctagccagcccgagtgaggtcgtgcaacaggttgccgaaaaacagtaccccccccaccggccctctccttattcttgtcagcatagcctgtctttcccccagcactcactgcctcaaggtgtgatgcactctactaaaccacaccagtcattagagggcccgccgtggctgttccctggacccttaccctctgtcgcctccgaggatctgtttccattcccaattcacggacattctgggggttatccacggaaaaaaatctccagtctaaaccccgcctacagccaatatagccagaaaagcatcgagcaggccgaggaagcccacaagaaggagcataagcctaagaagcccggcaagtacatttgtccttactgtagcagagcatgcgccaagccttccgtgctgaagaagcacataagaagccatacgggtgagcgcccgtacccctgcatcccatgcggcttttccttcaaaaccaagagtaatttatacaagcaccgcaagagccatgcccacgcaatcaaggctgggctggtgccttttacggagagtgcagtatcgaagttggacctggaagccgggttcattgatgtggaggccgaaatccactccgatggtgagcagtccaccgacactgacgaggaatcaagtcttttcgctgaggcgtccgacaagatgagccctggaccacctattccactggacatcgctagtcgcggtggctaccatggttcactagaagagtctctcgggggtcccatgaaggtcccaattctgatcattcctaagagcggaatcccgctccctaacgagagctctcagtatatcggaccagatatgctccctaatccaagtctgaacaccaaggcagacgatagtcataccgtgaaacagaaactggctctgcggctttcagaaaagaaaggacaggatagtgaaccttctctgaatctgctatcccctcactccaagggaagtaccgactccggctacttctcgcgctcagagagtgccgagcagcagatcagcccccccaacactaacgccaagagttatgaggaaatcatctttggaaagtattgccggctgagccccaggaacgctctgagcgtaactacaacgagccaggaacgcgctgcgatggggcggaagggcatcatggagccactgccacacgtgaacacccgtttggatgtgaagatgtttgaagatcccgtgagccagctgataccaagcaagggcgatgtcgacccgtcccagacctctatgctgaagagcaccaaattcaacagcgaatcgagacaacctcagatcataccttcaagcataaggaatgagggcaaactttaccccgcaaactttcagggctctaatccagtgttgctggaagcaccggtagactcttcccccctgattagatccaacagcgtgcctacaagctccgcaacaaatctgaccatacccccatccctgagggggagccactcatttgatgagcggatgacgggcagcgatgacgtgttctaccccggaactgtaggtattcccccgcagcgtatgctgaggaggcaagctgctttcgagcttccatcagtccaggagggccatgtggaagtcgaacatcatggcagaatgttgaaagggatctcgtcgagttctctcaaagagaagaagctgtctcccggagatcgggttggatacgattatgacgtgtgccggaagccgtataagaaatgggaagatagcgagaccccaaagcagaactatcgagacatctcgtgtttatcttccctgaaacatgggggagagtactttatggaccccgttgtgccactccagggagtgccctctatgtttgggacaacctgcgaaaacagaaaaagacggaaagagaagagcgtcggcgacgaggaggacacgcccatgatctgcagtagcattgtgtccacacctgtcggaatcatggcttccgattacgatccaaagcttcaaatgcaggagggagtgaggtctggtttcgcaatggcggggcatgagaacttgtctcacggtcatacggagcgcttcgatccatgccggccccagcttcagccaggctctccgtcgctggtgtccgaggaatccccgagtgcgattgatagtgacaagatgagcgatttgggcggaaggaagccccctggtaacgtgatctccgtgattcagcacacaaactctctcagccggcccaactccttcgagcggtctgagagcgcagaactggtggcatgtacccaggataaagccccttctccttcagagacctgtgatagtgagatctccgaagctccagtcagtccggagtgggctcctcccggggacggcgccgagtccggcggtaagccctccccctctcagcaggtgcagcagcagagctaccacactcagcctagactggttcgccagcataacattcaggtacccgaaattcgagtcaccgaggaaccagacaagccagaaaaggagaaagaggctcaatctaaggagccagagaaacccgttgaagagttccagtggcctcagaggtctgagaccctgagccaactgcctgcggaaaaactgccgcctaagaaaaagcggctcaggctggcggatatggagcattcctccggagagagctcctttgaatccacagggacgggattatccagaagtcctagccaggaaagcaacctgtcacacagcagctccttttctatgtcattcgaacgcgaagagacaagcaagctatccgccctcccaaaacaagacgagtttggcaagcattccgaattcctgacagtgccagccggttcttactccctttcagttcccgggcatcatcaccagaaggaaatgcggcgttgtagctcagagcagatgccctgccctcaccctgcagaggtcccagaagtgaggtcgaagtcttttgactatggaaatcttagccacgcccctgtgagcggcgctgccgcctccacagtgtcccccagcagggaacgcaaaaagtgcttcctggttaggcaggcctctttcagcggctctccagaaatctcccagggcgaagttggtatggaccagtctgttaaacaagagcagctggagcatctccacgcggggttacggagcggctggcatcacgggcctcccgccgtgctaccccctttacagcaggaggatcctggcaagcaagtggctggaccttgcccgccactatctagtgggccgctgcacctggcacagccacagatcatgcatatggattcccaggaatcccttcgaaaccctctcatacagccaacatcatatatgacttcaaaacacctgcccgagcagccacatctttttccacatcaggagactattcccttctcccccatccaaaacgctctgttccagtttcagtaccccaccgtctgcatggttcatctgccggcccagcagcccccgtggtggcaggcccatttcccacacccttttgcccagcatccacagaaatcatacggtaagccatccttccagacagagatccactcctcatatccgttggaacacgtggcagaacataccggcaaaaaacccgccgaatatgcacatacaaaagaacaaacgtacccttgctactctggggcctcaggcctgcatcccaagaacttgctgcccaaatttccaagtgatcagagcagcaagtctacagagactccttcagagcaggtcctgcaggaggactttgcaagcgcaaacgccggttcactccagtcgttaccaggaacggtggtcccagtcagaatccagacacacgttccttcctatggaagcgtcatgtacacctccatcagtcaaatcctggggcagaactccccggctatcgtcatttgtaaggtcgatgagaacatgacccaacgaactctggttaccaacgctgccatgcagggcattggctttaacatcgctcaggtgctagggcaacatgccggtctggagaaataccctatatggaaagcccctcaaactctgccgctcggactggagtccagtatccccctgtgtcttcctagtactagcgactcagtcgccacactgggggggtcaaaacgcatgctgagtcctgcctcttctctagaactttttatggagacaaaacagcaaaaaagagtgaaagaagagaagatgtacggccagatagtagaggaattgagcgcggtagaactaaccaatagcgatattaagaaggatttatccaggccacaaaagccgcagctggtgcgccagggatgtgctagtgagccaaaagacggcctacaatccgggtcctccagtttctctagcttgagtccatcctcatctcaggactatcctagcgtaagtccaagctccagagagccattcctgccatctaaagaaatgctgtcaggatccagagctccgttacctggccagaagagtagcggtccctcggagagcaaggagtcatccgacgaactcgacatcgacgaaacggcgtctgacatgagcatgagcccccaaagctcatctttaccggcaggagacggccagctggaggaagaagggaaaggtcataaacggcccgtgggaatgctggtgcgaatggctagcgcccccagcgggaatgtggctgatagcacactcctactgaccgacatggctgattttcagcagatcctgcagtttcctagccttcgaaccaccaccacagtgagttggtgctttctcaactacacaaaacctaattatgtacagcaggctaccttcaaatcttctgtctacgcaagttggtgcatctcatcctgcaaccctaatccatctggcctgaatacaaagaccacccttgcgttgctgcggagcaaacaaaagattactgctgagatctacactctcgctgcaatgcaccgacctggaacaggaaaactcacctctagtagcgcttggaagcagtttacacagatgaaacctgacgcctccttcctatttggctctaaactggagaggaagctcgtggggaatattctgaaagagagaggcaagggcgacatccacggcgataaggacatcggaagcaaacagactgagccaattcgaatcaagatcttcgagggaggatataagtcaaacgaagactatgtctacgttcgggggcggggtagggggaagtatatctgcgaggagtgtggaattaggtgcaaaaaaccttccatgcttaagaagcatattaggactcacacagatgtcaggccttacgtttgcaagctgtgtaatttcgcctttaagactaagggcaacctgactaaacatatgaagagcaaggcccacatgaaaaagtgcctggaactgggggtctcaatgaccagcgtggacgacaccgaaaccgaggaagctgaaaacctggaggatcttcacaaggcggcagagaagcacagcatgtcctctattagcaccgaccaccagttttcagacgcggaggagtctgacggcgaggacggggatgacaatgatgatgacgacgaagacgaggatgatttcgatgaccagggagatctgacccccaaaacccggagcagatcgacatcccctcagcccccccgctttagttccttaccagtgaatgtaggagctgtgcctcacggagttccctcggattctagtcttggtcactccagtctgattagctacctcgtcacactcccaagtattcgggtgactcagctgatgactcctagcgactcgtgtgaagacactcagatgaccgaataccagagactgttccagtccaagtcgacggatagcgagccagacaaggaccggttagatataccaagttgtatggacgaggagtgtatgctcccgtctgagcccagcagttcaccacgagatttctcgccatcgtcccatcattcctcccctggctacgattcctccccctgtagggacaattcaccgaagcgttacttgatccccaagggagatctgagcccacgacgacatctgtcccccagaagggacctctccccaatgcgtcacctgtcccctcgaaaagaggccgctcttaggcgggagatgtcccagagagatgtttcccctcgtagacacctgagcccaaggaggccagtgtccccaggtaaggatattacggcacggcgcgatctgagccccaggagggaaagaaggtacatgactacaatcagggcgccgtcaccgcgtcgcgctttataccacaacccccctttgtccatgggacagtatctgcaggccgagcctatcgtcctggggccccccaatctcagacgtggtcttccacaggtgccttatttttccttgtacggggaccaggaaggcgcatacgagcatccagggagctccctgttcccagagggacccaatgactacgtgttttcccacctgcccttacactcccagcagcaagtgagggcgcccattccaatggtgccggtcggcggcatccaaatggtccactctatgccacctgccctgtcctctctgcacccatcgcctacactgcctctgccaatggaggggtttgaagaaaagaaaggggccagtggtgagagtttttctaaggatccctacgtgctgtctaagcagcacgagaagagaggaccccacgctctccagagctcagggccacccagtactccctcatcccccagattgctgatgaagcagtccacctccgaggactccctcaatgccaccgaaagggagcaggaggagaacatccagacttgcaccaaagcgattgccagtctccgcattgccactgaggaagctgcactgctcggccccgaccagcccgcaagagtccaggaaccccatcagaaccccttggggtcagcacatgtgtctattagacacttctcacggccggagcctgggcagccgtgcacaagcgcaacccacccagaccttcacgacggagagaaggacaacttcggcacgtcgcagacccctctggcccacagtacattttatagtaagtcatgcgttgacgataaacagctagatttccatagttccaaagaactttcatcatccacggaagagtctaaagatccgtcaagtgagaagtcgcagctgcactag

SEQ ID NO: 191024 - DNA, 7341 bp, synthetic construct
  misc_feature 1..7341: note = Description of Artificial Sequence: Synthetic coding sequence
  source 1..7341: mol_type = other DNA
atggacaccggcgacaccgccctgggccagaaggccaccagccggagcggagaaaccgataaagcctctggaaggtggcggcaagaacaaagcgccgtaattaagatgtccacctttgggagtcatgaaggtcagagacaacctcagattgagcctgaacagatcgggaatacagcatcagcccagctcttcggcagtggcaaattagccagcccctcagaggtggtgcaacaggtcgccgagaagcagtatcctcctcaccgtccttcaccttactcttgtcagcattctcttagttttccacagcactcacttccacagggggtcatgcactcaactaagccgcaccagtcactggaggggcccccatggctgtttcccggccccctgcctagcgtcgcgagcgaagacctcttcccgttcccgatccacggtcactcaggtggttatccgagaaaaaagatttccagcttgaacccagcttattctcagtactctcagaagagtatcgagcaggccgaggaagcacacaagaaagaacacaagcctaagaagccaggtaagtatatctgcccatactgtagccgtgcttgcgcaaagccatctgtgctaaaaaagcacatacgctcccataccggcgagcgtccttatccatgtattccgtgcgggttctccttcaagactaaaagcaatttgtacaaacatcggaagtcccatgcccacgctatcaaggctggtcttgtgccctttactgagtcagccgtgtcaaagctggacctagaagctggctttattgatgttgaggctgagatacactccgatggggagcagtccacagatactgatgaggaatcctccctgtttgctgaagcctccgacaaaatgtccccaggaccccctatcccactcgatatcgcctcccgtggtgggtatcatgggtcattagaggagtcactgggcggacccatgaaggtcccaatccttatcattcctaagtctggtattccacttcctaatgagagctcccagtacattgggcctgatatgctcccaaatccgagcttgaatactaaagctgatgattcccacaccgtgaagcagaagctggcgctccggcttagcgagaaaaagggacaggattcagaacccagcctcaacctgctgagccctcacagtaaggggtctaccgactctggctacttctcaagaagcgagagcgcggagcagcagatcagcccacccaacaccaatgcaaagtcatacgaggaaattattttcggaaaatattgtcggctttccccccggaacgctctgtccgtcaccaccacaagtcaggagcgcgctgcaatgggccggaagggaattatggagcccctcccccatgtgaacactcgacttgacgttaagatgttcgaggatcccgtttctcagctcatcccgtccaaaggtgacgtggacccatcacagacctcaatgctcaaaagtacaaagtttaactcggaatcgaggcagccccagatcattccgtcttcaatccggaacgagggtaaactctacccggcaaattttcagggttccaacccagtgctcttggaagcacctgtagacagttcacctcttatcagaagtaactctgtgcccacctcctctgcgactaatctgaccatcccgccaagcctaagggggtctcattcgttcgacgaacgcatgacgggttctgacgacgttttttaccccggaaccgtagggattccccctcaacgaatgctacggaggcaagctgcatttgaactgccatccgtgcaggaaggccacgtagaagtggagcaccatggacgtatgctcaagggaattagttcttcctcactgaaggagaagaaactgtctcccggggaccgggtgggctatgactacgacgtgtgccgcaagccctataagaagtgggaagatagcgagacgccaaaacagaattaccgggatatcagttgtttgagtagcctgaaacacggcggagagtatttcatggaccctgttgtgccactacagggggtaccctctatgttcgggaccacttgtgaaaatcgaaaacgccgcaaggaaaaaagcgttggcgatgaggaggacaccccaatgatatgttctagtattgtctccactcctgtgggaatcatggcctctgattatgacccgaagctccaaatgcaggagggagtgcgtagcggcttcgccatggccgggcatgaaaatcttagccatgggcatacagagaggttcgacccatgtagacctcagctacaacctggttcacctagcctcgtgagcgaagaaagcccttctgctattgactctgataaaatgtccgatctgggagggcggaaaccaccaggaaacgtcatttccgttattcagcatactaatagcttgtctagaccaaatagctttgaacgctccgagagtgccgaactcgtggcctgtacccaagacaaggctcctagcccgtctgaaacttgcgacagtgagatctccgaggctcccgtctcacccgaatgggccccgccgggcgatggggcagagtccggaggcaaacctagcccaagccagcaggtacaacagcagtcttatcatacgcaacctagattggtaaggcagcacaatatccaagtgcccgaaattcgagttacagaagagccagataagcccgaaaaagaaaaagaggcccaaagtaaggagccggaaaaaccggtggaggaattccaatggccacagcggagcgagaccctgtcccagttgcctgctgaaaaattacctccaaagaaaaaacgcctccgcctggctgatatggagcactcctctggcgagtcatcttttgaatctacagggactggcctgagccggtcccccagtcaagagtccaatctgagccattcttcttccttttcaatgtcttttgagagagaggagacatcaaagctttctgcgctgccaaaacaggatgaatttggaaaacattccgagttcttaactgtacctgcagggagctactcccttagtgtgccaggacaccaccaccagaaggagatgagaagatgttcgtctgaacaaatgccttgtccacacccggccgaggtgccagaggtgagatccaagtcatttgattatgggaatctgtcccacgcacccgtgagcggagcagctgcaagcaccgtgagcccaagcagggaaaggaaaaaatgcttcctggttagacaagcctcctttagcggatctcccgaaatatctcagggcgaagtaggtatggatcaaagcgtcaaacaggagcaacttgaacatctgcatgctggattaaggtccggatggcaccacggcccaccggccgtcctgccccccctccaacaagaggatcctgggaaacaggtagccggcccctgtcctcccctgtccagtggtcctttgcatctagcacaaccacaaatcatgcacatggacagtcaggaaagcctgagaaatccgctgatccagcctacgagttatatgacctctaaacatctccctgagcagccccacctgtttcctcaccaagagacaataccttttagtccaattcagaacgctctcttccagttccaatatccaactgtctgtatggtgcatcttcctgcccagcaacctccttggtggcaggcccattttccacacccttttgcccagcaccctcaaaaaagttatggtaagccaagcttccagaccgagatccactcttcctatcctctggagcacgtggctgagcacacaggtaagaagccagctgaatacgcacatacgaaggaacagacgtacccttgctattccggcgcctctggactgcatccaaagaacctgctcccaaagttcccatctgaccaaagcagtaagtccacagaaacaccttccgagcaggttctgcaagaggacttcgcctcagccaacgcagggagcttgcagtcccttcccgggacagttgtacctgtgcgcattcaaacccatgtgcctagctatggcagtgtgatgtatacctcgatatcacaaatcctgggacaaaacagtcccgcaattgtcatttgcaaggttgacgaaaatatgacccagcgtacactcgtcaccaacgcagccatgcaggggatcggcttcaatatcgcacaggttctggggcaacacgccggtttagaaaaatatcccatttggaaggcccctcaaacattgcctttggggctcgaatcttctattcccctgtgcctcccaagcacttcagactcggtggcgactcttggaggctctaaaaggatgttatcgcccgcatcgtctcttgaactgtttatggagaccaaacagcagaaacgggtcaaagaggaaaaaatgtacggccagatagttgaagagttgtccgctgtcgaactgactaattccgatattaaaaaggatctgtctcgcccacagaagccccagttagtgcgccagggttgtgcaagtgagcccaaagatggcctgcagagcggtagtagctcattctcatccttgagtcctagtagcagtcaggactatcccagtgtgtcaccctcgagtcgggaaccttttcttccttccaaggaaatgctctctggctctagagcaccactgcctggccagaagagttcagggccttccgagtccaaggaaagtagcgatgaattggatatcgatgaaaccgcttccgacatgtctatgtcccctcaatccagttcactgcctgccggagatggtcagctggaagaagaaggaaagggtcataagaggcccgtcggaatgctcgttcggatggccagtgccccctccgggaatgttgctgatagcacactgctgcttactgacatggccgatttccagcagatcctccaatttcccagtctgcgcacaacgactaccgtatcttggtgctttctcaattacacgaaacccaactatgtgcagcaggctacctttaaaagctctgtttatgcctcctggtgtatttcatcctgcaaccccaatcccagcggcctgaacacgaagacaacattagcactactccggagcaagcaaaaaattaccgcagagatatacactctggcagctatgcatcgcccagggacggggaagctaaccagctcaagcgcttggaaacagtttacacagatgaagccagacgcctctttcctcttcggaagcaaacttgagcgcaaactcgtgggcaatatcctcaaggagagaggaaagggcgatatccatggggataaggatattggaagtaagcagactgaaccaattcggattaaaatcttcgaaggcgggtacaagagtaacgaggattacgtgtacgttcggggaagaggaagaggaaagtacatatgcgaggaatgtggaatcagatgtaagaagccctccatgctgaaaaaacatattcgcacacacactgatgtcaggccctatgtgtgtaagctgtgcaattttgccttcaaaactaaaggtaatctgactaaacacatgaagagtaaggcccacatgaaaaaatgcctcgagctaggcgtatccatgacctccgttgacgacactgaaactgaggaggctgaaaatctggaggatttacataaggccgccgaaaagcatagcatgtctagtatctcgaccgatcaccagtttagcgacgcagaggagtctgacggagaggacggagacgataatgatgatgacgatgaggatgaggatgactttgatgatcaaggggacctgacccctaaaacccgcagtagatcaacgagtccccagcccccccgtttctcgtctttacccgtaaacgtgggggccgtgccccatggagtgccctccgactcgagcctgggtcacagttctctaatttcttacctggttacacttccgagtattcgcgtcacccaacttatgactcctagcgactcttgcgaggatacacagatgacagaataccagagactgttccagtccaagtccacagactccgagcccgataaagatcgcctcgacatcccaagttgcatggacgaggagtgtatgctgcccagcgagccatcgtctagtccccgggacttctctccaagcagccatcatagctctccaggatacgacagctcaccatgtagggacaattccccaaaacgttaccttatccccaaaggcgatttgtcacctcggaggcacctttctcccaggcgggacctcagtcccatgcggcacctgagccctaggaaggaggccgctttacgaagagagatgtctcagcgcgacgtgtccccccgacgccacttgtcccccaggcggcccgtgtctccgggcaaagatataacggctagacgcgatctcagtccaagacgggagcggcgttacatgacgaccatccgagcgccatctcctcgtcgagccctctatcataacccaccactctctatgggtcagtacttgcaagcagagcctattgtgctgggaccgccaaatcttcgccgagggctaccccaggttccttatttctctctctatggagaccaagagggggcgtacgagcatcctgggtcgtctttgttccctgaggggcccaacgattatgtgttcagccacctcccgctgcacagccaacagcaagtcagggccccaattccaatggtgcctgtaggtggcattcaaatggtgcacagcatgcccccggccctctcaagtctgcacccatctccaactctgcccctgcccatggaggggtttgaggaaaagaaaggcgctagcggagaaagcttttctaaggatccatatgtgctctctaaacagcacgaaaagagaggaccacacgcactccagtcaagtggtcctccgagtactccttcctcacctcggctgctcatgaagcagtctacctcagaggattccctgaatgctaccgagcgtgagcaagaggaaaatattcagacctgcaccaaggccatcgctagcctccgcatcgctactgaggaggcggctttactgggacccgaccagcccgcacgcgtgcaggagccacaccagaatcccctgggatccgcacatgtcagcatccgtcactttagccgccctgaaccgggacagccttgtacctcagccacccacccagacttacacgatggagagaaggataactttggcacgtcccagactccacttgcgcacagcactttttatagcaagagctgcgttgatgacaaacagctggacttccattccagcaaggagctcagctcctctacagaagagtccaaagacccgtcgtccgaaaaatcacagctgcactag

SEQ ID NO: 191025 - DNA, 7221 bp, synthetic construct
  misc_feature 1..7221: note = Description of Artificial Sequence: Synthetic coding sequence
  source 1..7221: mol_type = other DNA
atggaccccgagcagagcgtgaagggcaccaagaaggccgagggctcgccgagaaaaaggctgactaaaggggaggcaatacagactagcgtgagttccagcgtcccgtaccccgggtccgggacagccgccacccaggaatctccagcgcaggagctgttagcacctcagccatttccgggacccagctcggtcctacgtgaagggagtcaggagaagacaggccaacagcagaaaccaccgaaaaggccacctatagaagcatccgttcacataagccaactgccccaacaccctctgactccggcctttatgagtccaggaaagcccgaacacctactggaggggtccacctggcagctcgtggatcctatgcgcccaggaccttccggcagcttcgttgcccccggactacatccacagagtcagctgctgcctagccacgcctccattatcccccctgaagacctccctggagtccctaaagtgttcgttcctcgaccctcgcaagtgtctctaaaacctacagaggaggctcataagaaagaacggaagcctcaaaaacccggtaagtatatctgccagtattgtagtaggccctgcgcaaagccctccgtactgcagaagcatatccgctcccacacaggagagagaccatatccgtgtggcccatgtgggttcagttttaaaactaaaagtaatctgtataagcatcgcaaaagtcatgctcatcggatcaaggccggtcttgccagtggaatgggtggagagatgtatccgcatggcttggaaatggagaggatcccaggggaggaattcgaagagccaactgagggagagtctactgacagtgaagaagaaaccagtgctacctccgggcacccagccgagctctcaccccgccccaagcagccgttgctatcttccggactgtacagcagcggctcccactcatcctctcacgagcgttgctctctgtctcagagcagtactgcccagtcactggaggaccctccaccgttcgtggaaccttcatctgaacacccactcagtcacaagcccgaagatacccacaccattaagcagaaattagcactcaggctgagcgagcggaaaaaggtgatcgacgaacaggcattcctttctcctggcagtaaagggtccaccgagtcaggctacttctcccggagtgagagtgccgagcaacaggtcagtcctcccaataccaatgcgaaaagttatgccgaaatcatattcgggaaatgtggtcgcataggacagcggactgctatgttgacagcaactagcacccagccacttctgccgctcagtaccgaagataaaccatctctcgtgccattatccgtcccacgaacacaggttatagagcacattactaaattaatcaccataaatgaggctgtcgtagatacaagtgagattgacagcgttaagccccgcagaagctccctttcccggagatcatccatggaatctcctaaatcaagcttgtatagggagcctctttcatctcacagcgaaaaaaccaagcctgaacagtcccttctgtcactccaacacccccctagtaccgccccacccgtgccattgctgagaagtcacagcatgccttccgctgcatgtacaatctctactccccatcatcctttccgcgggtcatacagctttgacgaccacataacagattctgaagccctgagtcattcatctcatgtttttacatcccatccaaggatgctcaagcgtcagcccgccattgaactgcccctcggaggtgaatatagctctgaggagcctggccccagcagcaaagacaccgcgtcaaagcctagtgacgaggtggagcccaaagagtctgagctcacgaaaaaaaccaagaagggtctgaagaccaaaggcgtcatttacgaatgcaatatatgtggggcgcgctataaaaagcgggacaattatgaagcccataagaagtattattgcagcgaattgcaaatagctaagccgatcagtgcaggaacacataccagccctgaagcagagaagagccagatcgaacacgaaccttggagccagatgatgcactacaaactagggactaccctggagctgaccccactcagaaaacgccgcaaggaaaaatccctcggcgatgaggaagaaccccctgcttttgagtctaccaagagccaatttggcagcccagggccatctgatgcagcaagaaacctgccactagagtcaacaaagtctccggcggagccaagcaagagtgttccttccttagaaggacctacagggttccagcccaggacaccgaagccaggaagcgggtcagagtcagggaaggaacgcaggaccacaagcaaagaaatttcagtgattcagcatactagctccttcgaaaagtcggattccctggagcagccttcgggcctcgagggcgaggacaaaccgttagctcaattcccatcaccaccgcctgccccacatgggagaagcgcccattctctgcaaccaaagctggtgagacagccaaacattcaagtacccgagattttggtgacggaagagcctgaccggccagacaccgagccagaacctcccccgaaagagcctgagaagaccgaggagttccaatggccacagcgtagtcagacgctggcccagctgcctgctgagaagctacccccaaagaagaagaggctacgcttggctgagatggcacagagttcaggtgaatcctcttttgaaagctccgtccccctgtcccgaagtccctctcaggagtcgaatgtgtcactctcagggtcttccaggtctgcgtccttcgagagagatgatcatggaaaagccgaagccccctctccctcatcggatatgagacctaaacccttgggcactcatatgctgacggtgccgagccaccatccacacgctcgcgagatgcgcaggtctgcctcagaacaaagcccaaatgtgtcacactctgcgcacatgaccgaaacccggtcaaagtcattcgactatggatccctgtctctgacagggccctcagctcccgctcccgtcgcaccacccgcaagggtggcgcctccagagcgcaggaaatgcttcctggtgagacaagccagtctatcacggcctccagagagtgagctggaggtcgcccccaagggacgccaagagagtgaggaaccacagccttcctcaagcaagccatcagccaagtcttccttatctcagatctctagcgccgcgacaagccatggaggccctcctggcggaaaagggcccggacaggatcgaccacccttagggcctaccgttccctatactgaggccctgcaagtctttcaccaccccgtagcccaaacaccactgcatgaaaaaccctatctgcccccccccgtgtccctgtttagtttccagcacctggtacagcatgaacccggccagtcccccgaatttttttccacgcaggcgatgagtagtctactcagttctccttactctatgccccctttgcccccaagccttttccaagccccccctctccccttgcaacctaccgtgctgcacccgggacagctgcatttgccccagctgatgccacaccccgctaacatcccattcaggcaaccaccatcgttcttgccaatgccctacccgacttcgagtgctctgtcgtcaggcttttttctgccattgcagtcccaatttgctttgcaacttccgggagatgtcgagtctcacctcccacagatcaagacatcactcgcacctctagcaacaggctccgcaggcctgtcaccctctacagagtattcaagtgatatccgacttccacccgtcgcaccaccagctagttcatccgcccccacatccgctccacctcttgctttgccggcgtgccccgataccatggtgtccttagttgtgccggtccgcgttcaaaccaacatgccttcttatgggtctgccatgtataccacactaagccagatcctggtcacgcagtctcagggttccagtgccaccgtggccctccctaagttcgaggaaccacctagcaagggaactacggtctgcggcgccgatgtgcacgaggtagggcctggaccatccggcttgagcgaggaacagtcccgggcctttccaactccttatcttcgagtaccagtcacgctgccggagagaaaaggaacgagcctttcttcagagagcatcttatcattggagggcagctctagtacggcagggggcagcaaacgggtcttgagtcccgcagggtcccttgagcttacaatggaaacccagcagcagaagcgtgtgaaagaggaggaagcttccaaggccgacgaaaaattggagttagttaagccctgttctgttgtgctaacctcgaccgaggacggtaagaggcctgagaaaagccatttagggaatcagggccagggtaggcgtgagctggaaatgttgtcctccctttcatctgacccctccgatacaaaagagattcccccactgccccacccagcacttagtcacggcacagcacctggtagcgaggcgctgaaggaatacccccagccttccgggaaaccacaccgccgtggcctcacaccactgtccgtcaaaaaggaggactctaaagaacaaccagacctgccctctctggcaccaccatcttcactgcctctgagcgaaacctcctcgagaccggccaaatctcaagaaggaacagactccaagaaagtgctgcagttcccatccctccacacaaccacaaatgtgagttggtgttatctcaactacatcaaacccaaccacattcaacatgccgatagaaggtcaagcgtgtacgccggttggtgtatttcactgtacaaccccaacctccccggcgtgtccacaaaggcggcattgagtctcctccgttctaagcagaaagtttctaaggagacatatacgatggccactgcaccccacccagaagccggaaggctcgtgccatcctcctccaggaagcctcggatgaccgaagtccatttgccaagtcttgtcagccccgaggggcagaaagatctagctagggttgagaaggaagaggagcggaggggcgaaccagaggaagatgccccggcttctcagcggggggagccggcccgaattaagattttcgagggcggctataagagtaacgaagagtatgtgtacgttcgggggagaggacgcggaaaatatgtctgcgaagaatgcggcatccggtgcaaaaagccttccatgctgaagaaacacatacgcactcacactgacgttcgtccctatgtatgtaaacattgccattttgcttttaagaccaagggcaatctgactaaacacatgaaatcaaaggcgcactccaagaagtgtcaggaaacaggggtgctggaagaacttgaggcggaggagggcacaagtgacgatctgttccaggactcggaaggacgagagggatctgaggcagtcgaggagcatcagttttcggacctggaagacagcgacagtgatagtgacttggacgaggacgaagacgaggacgaggaggaatcacaggatgagttgtccaggccctcaagcgaggccccccccccgggtcccccccacgcactgcgggctgactccagtccaatcctgggccctcagccgcctgacgccccagcatcaggaaccgaagccacgcgcggttcaagtgtgagcgaagcagagcgccttacagcttccagctgctccatgagctctcaatctatgcctggtttaccttggttgggcccagcaccactcgggagtgtcgagaaggacaccggttctgcgctgtcctataaacccgttagcccacgccggccctggagtccaagcaaggaagcagggagcaggcctccccttgcaaggaagcactcacttacgaaaaatgacagcagccctcaacggtgctctcctgccagagagcctcaggcgtctgctccttcaccccccggcctgcacgtcgaccctggccgaggaatgggggcgttgccttgcggcagtcctcggttacaactgtctcctctgacactctgtcccctaggaagagagcttgctcctcgcgctcatgtgctctctaagctggaagggaccacggaccctgggcttccacggtattcacccacgcgccgctggagccctggccaagctgagtcacctccaaggtcagccccccctggcaagtgggcactcgcgggccctggctcgccctcagcaggcgagcatggacctggccttggtcttgaccctagggtgcttttcccccccgcccccctgccccataaactgttgagccgcagtcctgaaacatgcgccagcccctggcagaaagccgagagcaggagccccagctgctcccctgggccggctcaccctcttagcagtaggcccttttccgccctgcacgacttccatggccatatcttggcgcggaccgaggagaacatcttttcacatctaccgctccactcccagcacctgaccagggcgccatgtccccttatcccaattggcggaatccagatggtccaggccagaccaggcgcccatcccaccttactacctggccccacggccgcctgggtgagcgggttctccggtggaggcagtgacctcaccggggcgagagaggctcaggagcgaggacgctggagccccaccgagagcagcagcgcgtcagtatccccggtggctaaggtcagcaagttcaccctgtctagcgaacttgagggaggggactatcctaaagagcgcgagagaaccggcggcggaccaggacggccacccgattggacaccccatggcactggcgcccccgctgagcctacgccaactcactctccgtgcactccaccagataccctaccgcgcccgcctcagggacgccgcgccgctcaatcctggtccccgagattagagtctccccgtgctcccactaacccagagccttcggcaacgccccccctggatcgcagtagctccgtgggctgtctggccgaagccagtgcaaggtttcccgctagaactcggaatctaagcggggagccccgcacaagacaggactcgcctaaaccgtccggcagcggcgaaccgcgggctcatcctcaccaaccagaggaccgagtgccgcctaatgcgtag

SEQ ID NO: 191026 - DNA, 7221 bp, synthetic construct
  misc_feature 1..7221: note = Description of Artificial Sequence: Synthetic coding sequence
  source 1..7221: mol_type = other DNA
atggaccccgagcagagcgtgaagggcaccaagaaggccgagggcagcccccggaagaggttgaccaaaggagaggcgatacagacatctgtgagcagctcagtcccttatcccggctctggcacagccgcgactcaggagagccctgctcaggagctgctggccccccagccttttcccggacccagttcagtgttgcgtgaaggttctcaggagaagaccgggcagcagcagaagcccccgaaacggcctcctatcgaggcctcagtacacattagtcagctgcctcagcaccctctcactcccgcgttcatgagtcccggtaagccagagcatcttctagagggcagtacttggcaattagttgatcccatgagacccgggccttcaggaagcttcgtcgcccccggcctccatccacagtctcagttgctcccgtcccacgcctcaattatcccccctgaagatttacctggtgtacctaaggtctttgttcccagaccaagtcaggtttcattgaaacccactgaggaagcacataaaaaggaaaggaagccgcaaaagccaggtaagtatatttgtcagtattgttctcgaccatgtgcaaaaccttccgtgctccagaagcacattaggagccatacaggagagcggccctacccctgcggcccgtgtgggtttagtttcaagacaaagagtaacctgtacaagcaccggaaatcacacgctcacagaattaaagccggattggcatccggaatgggcggcgagatgtaccctcacggactcgagatggaacgtattcctggagaagaatttgaagagcctacagagggtgagtccaccgattccgaggaagaaacctccgcgacctccggacaccctgctgagctctccccaaggcctaagcagccactgctttcttcaggcctgtattcctctgggtcccattcttctagtcatgaacgatgctccctaagccagtcctctactgcccaatccctcgaagaccctcctccctttgtcgagccttcttccgagcaccccctgagtcataagccagaagatacacataccattaagcagaaactcgctcttagattaagtgaaagaaaaaaagtgattgatgaacaagcattcctctctcctggaagtaagggctcaactgagagcgggtactttagcagatcggaatctgcagagcagcaggtcagccccccgaacacaaatgcaaaatcttatgccgaaattatctttggtaagtgcggacgaattgggcaacgaactgccatgctcaccgcgacatcaactcaaccactgctgccactgtccacagaggacaaaccctcactggtgcctctatccgtcccaaggacacaggtgatcgagcatattacgaagttgattactattaacgaggctgtggtcgacacctccgagattgactctgtaaagccaagacgatcatccctcagtcggcgctcgagtatggagagtccgaagtctagcttgtatagagaaccgctctcaagccacagtgaaaagaccaaacccgagcagtctctgttatccctgcagcatcctcctagcacagccccgccggtaccgttattacggtcgcattccatgccctcagcagcgtgtaccatctctacccctcatcaccccttccggggttcctattcttttgacgaccacatcactgactctgaggccttaagccattcgagccacgtgttcacaagtcatcctcgaatgctcaagcgccagcccgccattgaactgccactaggcggcgagtatagcagcgaggaaccaggaccaagtagcaaggatacagcatcgaaaccaagtgacgaagtagaacctaaggaatcagagctaaccaagaagacaaagaaggggctgaagacaaagggagttatctatgagtgcaacatatgtggtgcccggtacaaaaagagggacaattatgaggctcacaaaaaatactactgtagtgaattacagatcgctaaacccatttcagcaggcacccatactagcccggaggcggagaagtcccaaatcgaacatgaaccatggagccagatgatgcactataagctcggtactacacttgaactgacccctctgagaaagcggagaaaagagaaatctctgggcgatgaggaggagccccctgccttcgagtcgactaaaagtcagtttggatcccctggcccatcggacgcagcaagaaacttgccactggagagtacaaagtctcctgcggaaccgagcaaatccgtgccttcactcgaaggtccgacagggtttcagcctcgcacccccaaacctggctctgggagcgaaagcgggaaagagcgcagaactacttccaaagaaatctcagtcatacagcacacttcatcattcgagaagagtgacagtctggaacaaccttcgggcctcgagggcgaggataaaccactggcacagtttccatcaccacccccagccccacacggacgcagtgctcattccctgcagcccaagctggtgcgccagcctaacattcaagtgcctgagatcctagttactgaagagcctgataggcctgacaccgagcccgagcctccgccgaaggaacctgagaagacagaagaattccagtggcctcagcgaagccagaccttggcccagcttcctgcagagaagctgccacctaagaagaagcggctgaggctggcggaaatggcacagagttcgggagagagttcctttgagtctagcgtgcccttgtcacggtcaccctcacaggagtctaacgtgagtctcagcggctcctcccgcagcgcatccttcgagagagatgatcacgggaaagcagaagcccccagcccaagctccgatatgaggccaaagcctctcggcactcacatgctaacagtcccgtctcaccatcctcatgcccgggaaatgagacggtctgccagcgagcagagcccaaatgtttcacacagtgcacacatgacagaaaccaggtccaaatccttcgattatggatcactctcactcacagggccgagcgcccctgcccctgttgctcctccggctcgagtggccccacctgagagacggaaatgcttcctggtgcgccaggcctcactgtctcgtccgcccgagagtgaacttgaagttgcaccaaaggggcggcaggagagcgaagagccacagccaagttcatccaaacctagtgcgaagtcctcactctctcagatcagcagtgccgctaccagccatggagggccccctgggggcaaggggccgggccaggacaggccccctctaggaccaacagttccctacactgaggccctgcaggtatttcaccaccccgtggcccaaacacctctccatgaaaagccttaccttccacccccggtatctttatttagttttcagcacctggtgcagcacgagcctggtcaatctccggaattcttctccacacaagcgatgagcagtctcctgtcatcaccttattcgatgccacccttgccaccatccctgttccaggctccgccactgcccctgcagcccacagttctgcacccaggacagctccaccttccgcaactaatgccgcatccagcaaatattcctttccgccaacctccgagtttcctgccaatgccatatccgaccagtagtgctctgtcatccggtttcttcctgcctctccaaagccagttcgcgctgcagctcccaggcgacgttgaaagccatcttccccagataaaaacatcactcgcacccctggctactggctctgccggactctctccttcgaccgagtactcgtccgacatccggctgccccccgtagctccacctgcttcgagcagtgcccctacctcggcaccccccctggccctaccggcttgcccagatacaatggtttctctggttgtccctgtaagggttcaaacgaacatgccttcctatggaagtgctatgtacactacattaagtcagatccttgtgacacagagccaggggagctctgccaccgtcgcactgccaaaattcgaggaaccgcccagcaaaggcaccaccgtgtgtggagccgacgtgcatgaggtagggccaggcccaagcggcctgtctgaagagcagagcagagcgtttcccactccatatctcagggtgcccgtcaccctgcctgagcgaaaagggaccagtctgagcagcgaatcaatcctgtccttggaggggagctcatcgaccgctggcggttcaaaacgcgtactgagccccgccggctccctagagctgactatggaaacacaacagcagaaaagagtgaaagaagaggaggccagcaaagccgatgaaaaactggagttggtgaagccatgttctgtcgttctcaccagcaccgaagatgggaaaaggcccgaaaaatctcatctgggtaaccaaggacagggaagacgggaactagaaatgctgagcagcttgagctccgaccctagcgatacaaaggagattcctccactgcctcatcctgcactgtcacacggcactgcccctgggagcgaagcgttgaaggaatatccccagccttcaggaaagccacacaggcgcgggttgacaccgctgagtgtcaaaaaagaagacagcaaagaacaacccgatcttccttccctggcacctccctcctcccttcctctgtctgagacttcttccaggccagccaagagtcaggaggggacagactctaagaaggtgctacagtttccttctctgcacacaactactaatgtcagctggtgctacttaaactacattaaacctaaccatatccagcacgccgaccgccgttccagcgtctatgccggctggtgcatcagcttgtataaccctaatctaccgggtgtttccactaaagccgccctaagcctgctcaggtccaagcagaaggtctcaaaggaaacgtatacgatggcaacagctcctcaccctgaggcagggaggctggtgcctagcagctccagaaagccaaggatgacagaagtgcacctaccttccctagtctcacccgagggccagaaggacctcgcgcgcgtggagaaagaggaggaacggagaggcgagccggaggaggatgctcctgccagtcaacgcggagagcccgcgcgaatcaagatcttcgaggggggctacaagtctaacgaggagtacgtgtacgtcagagggcgcggacgtggaaagtatgtctgtgaagaatgtggaatccgctgcaagaagccaagtatgctcaaaaaacacattaggacccacacagatgttcgcccatatgtttgcaaacattgtcacttcgcatttaagacaaagggcaacttaacaaagcatatgaagtccaaagctcacagtaagaagtgccaagaaaccggagtcctggaagagctggaggctgaagaggggacctctgatgacctgttccaggacagcgagggcagagaaggctccgaggccgtagaggaacaccagttttccgatttggaagatagtgacagcgattcggacttggatgaggacgaagacgaagatgaagaagaaagtcaggatgagctttctcggcctagcagcgaggccccgccacctggtcctcctcacgctttgagggcagattcatctcccatcctggggccacaaccacctgacgctcccgcctccggcactgaggcgacaaggggttcttcagtgagtgaagccgagcggcttacagcatcctcttgtagcatgtcttcccaaagcatgcctggcttgccctggctgggccctgcacctctgggcagtgtggaaaaggacacaggctctgcgctgtcttacaagccagtgtctcctagacggccttggtcaccgtcaaaagaagctggctccagaccaccgctcgccaggaaacattccctcacaaagaatgattcctctccccagaggtgcagccctgccagagagccccaggcatccgcaccttctcctcccggcctgcatgtggacccagggcgcggaatgggggctctgccctgtggcagcccgcgtctgcagctgtccccactaacactgtgtccactgggcagagagctcgctcctcgggcccatgtgcttagcaagctggagggcactacagatccgggattaccccggtacagcccaacgcgaaggtggagcccgggtcaagccgagtctccgcccagatctgccccccccggcaaatgggccttggctggccccggcagcccctccgcaggcgagcacggacccgggctgggacttgacccaagggtgctgttccctccagcccccctccctcacaagcttctgagtagatcccccgagacttgtgcctcaccgtggcagaaggccgagtcgcggagtcctagctgctccccaggtccagcgcaccccctgagctcgcggccgttcagcgcactgcatgatttccatggccacattctagcacgcacggaagaaaacatcttctcccacctgccactccactctcaacatctaaccagggctccctgtcccctgattccaatagggggaatccagatggtgcaagcccggcccggcgcccatcccactcttcttccaggcccgaccgctgcttgggtcagcggattctccggcggcggttctgacctaacaggcgcaagggaagcccaggagcgagggcgctggtcccctactgaaagctcttccgcttctgtgagccccgtcgcaaaagtctctaaattcacgcttagcagcgagctagaaggtggcgactatccgaaagaacgagaacggaccggaggcggcccaggccggccccccgattggactccacatggcacaggggccccagcggagccgacccccacacactccccgtgcacccctccagacaccctccctcgccctcctcagggaaggcgcgcggcacagtcctggagccccaggctcgaatctccgcgggcgcctactaacccggaaccttctgccacccctcccctcgacaggtcatccagcgtgggctgcctggccgaagcttccgctagatttcctgctcggacaagaaacctgagcggggagcccaggactcgccaggattctccaaaacccagcggatccggagaaccccgggctcacccacaccagcccgaagatcgtgtacctcctaatgcctag

SEQ ID NO: 191027 - DNA, 7218 bp, synthetic construct
  misc_feature 1..7218: note = Description of Artificial Sequence: Synthetic coding sequence
  source 1..7218: mol_type = other DNA
atggaccccgagcagagcgtgaagggcaccaagaaggccgagggctccccgcgcaaaaggctgaccaaaggcgaggcaatccaaacaagcgtctccagctcggtaccttaccctggctctgggaccgctgcaactcaggagtcccctgcgcaagagctgctcgcgccgcaaccgttccctgggccttcatccgtgctgcgcgagggcagccaggagaagacagggcagcaacagaagcctcctaagcggccccctattgaagcgtcagtccacattagccagttgccgcagcacccactgaccccggctttcatgtcccccggaaaacccgaacatctgttggaagggtcgacctggcagcttgtggatcccatgaggccgggcccaagtggaagttttgttgcaccaggcttgcacccacaaagtcagctcctaccctctcacgccagcatcataccgcctgaagacttaccaggggtccctaaagtgtttgtgcccaggccctcacaggtgagcctaaaacccacagaagaggcacacaagaaagagcgcaaacctcagaagccagggaaatacatttgtcaatactgcagtagaccttgtgccaagcccagtgtactccaaaaacatatacggagtcatacaggagaaaggccttacccatgcggaccctgcggattctcatttaagactaagtctaatctgtacaaacatcgtaagtcccatgctcaccgcataaaggccggcctagcgagcggaatgggcggggaaatgtacccccacggactggagatggaaaggatccccggtgaggagtttgaggagcctacggagggtgaatctacagatagcgaagaggagaccagtgctacaagtggtcatcccgccgagctgtcacctcgcccgaagcagcctctcctgtcaagcggcctgtatagcagtggaagtcattcttccagccacgagaggtgttcgttatcacaaagtagcacagcacagagcctggaagacccgccaccattcgtagagccctcttcagagcaccccttgtcacataagcctgaggatacacatacgatcaagcagaaattggcccttcgactgagtgaaaggaaaaaggtgatagacgagcaagcctttctctcccctggctcaaagggcagcaccgagagcggttacttctctcgttctgaatcagcagaacagcaggtgagcccgccgaataccaacgctaaatcctacgctgaaattatcttcggcaagtgcgggagaatcggtcagaggaccgctatgctgaccgccacttccacgcaaccgctgctgcctctgtccactgaagacaaaccgtctctggtgcccctgtcagtaccacggacgcaggtgattgagcacatcaccaagctcattactatcaacgaggctgttgtagatacctccgagattgattctgtcaagccaagaaggtcttcccttagtcgcagatccagcatggagtcccctaaatcctccctttatcgagagcctctgtcttcccatagtgaaaagaccaagccagagcagtcactgctgagcctccagcaccctcctagtacggcacctcccgtgcctcttctgcggagccattctatgccatctgccgcgtgcactatcagtactcctcaccacccttttcgaggttcatattcctttgatgaccatataaccgacagcgaggcgctttcgcactcttcccatgtgttcacctcccatccaagaatgcttaaaaggcagcctgctattgagctgccccttggtggcgagtattctagcgaggagccgggtccatctagcaaagatactgctagcaaaccctccgatgaagtcgaacctaaagaaagtgagctcacaaaaaaaacgaaaaagggattgaagacaaaaggagtgatttatgagtgtaacatttgcggcgctagatataagaagcgagataactatgaagctcacaaaaagtactattgcagtgagttgcaaatcgctaagccgatctctgccggtacacatacctcacctgaggccgaaaaaagccaaatcgagcacgagccctggagccagatgatgcattacaagctgggaactacactcgaactaacgccactaagaaagaggcgtaaggagaaaagcctcggagacgaagaggagccaccagcctttgagagcactaaatcacagtttgggagtccaggaccctctgatgctgcacggaatcttcctctcgagagtactaagtcgccagcagagccaagtaagtcggtcccctcactcgagggcccaaccggctttcagccaagaactccaaaaccagggagcggaagcgaatcagggaaggagcgcagaacgaccagcaaggagattagtgtaatccagcatacttcttcctttgaaaaaagcgactcactggagcagccttccggcctggaaggggaggacaagcctctcgcccaattcccatccccaccccccgctcctcacggacggagcgcgcactccctgcagcccaaactcgtgaggcagccaaatatccaggttcctgaaattctcgtcactgaggaacccgatagacccgacacagaacctgagcctcctcccaaggaacctgaaaagaccgaagaattccagtggccccagcgctcccaaacactggcccagctcccagctgagaaactgcccccaaaaaaaaaaaggcttcggcttgcagagatggcccagtcatctggagaatcttctttcgagtcctctgtacccctgtcaagatccccctcccaggaatcaaacgtgagcctaagcggatccagtcgttccgcaagcttcgagcgagatgatcatggtaaggcagaggctccctcgcccagcagtgacatgcgccctaagccactaggaacccacatgctgactgttccatcgcatcacccacatgcccgcgaaatgcgccgatccgcgagtgagcagagtccaaatgtgtctcacagcgctcacatgactgagacacgaagtaagagttttgactacggttcgctgagcctcacaggtccctccgcacctgcccccgtcgcccctcctgcgagggtcgcgccccctgagaggaggaagtgctttcttgtccgacaggcctcattatcacgccctcctgagtcagaactggaggtggcacccaaagggaggcaggagtccgaagaacctcagcccagcagcagcaaaccaagtgccaaaagtagcttgtctcagatcagctccgctgccactagtcacggggggcctccgggaggcaagggtccagggcaggacagacccccactggggcctacagtcccgtacacggaagccctgcaggtgttccatcatccagtggcacagacccccctacatgagaaaccctacttgcctccccccgtgagcctgttcagctttcaacacctggtgcagcacgagcccggacagagtcctgagtttttctctacgcaggcaatgagctcgttgttatcctctccatactcgatgccacctctgcccccatccctgtttcaggcaccccccctgcctttgcagcctactgtgctacaccccggacagctgcaccttccacagcttatgcctcaccccgcaaatataccattcagacagcctccctcattcctgcccatgccctatccaaccagcagcgccctgtcctcaggctttttcttgcctctgcaatcccagttcgcgttgcagctgccaggagacgttgagtcacacctgccacagattaagaccagcttggcccctttggccacaggctcggccggcctttctcctagtactgagtatagtagtgatattcgccttccaccagtggcccctcctgctagtagttcggcccccaccagcgcacctcctcttgccttaccagcgtgcccagatacaatggtgtctctggtggtgcctgtgagggtgcagacaaatatgccttcatatggaagcgctatgtatacgactctgtctcagatactggtgacccagtcacaaggttcgagcgctacggttgccctgcccaagtttgaagagcccccatctaagggaacaaccgtctgtggggccgatgtgcatgaggtcggacctggcccaagcggcctcagtgaggaacaatccagagctttcccgacgccatatctgagggtgcccgtcacactgccagagagaaagggaaccagcctctcaagcgagtccatactctcattggaagggtccagttccacggctggcggctccaaacgagtcctgagtcccgccgggagcttagagcttactatggaaacacaacagcaaaagagagtgaaggaggaagaagcctctaaggctgatgagaaactggagcttgtgaagccatgttctgtcgtgctcacttcaaccgaggacggaaaacgaccagaaaagagccatctcggcaatcagggccaggggcgcagagagctggaaatgctgtcttccctctcttcagatccttcggatacaaaagagattccccccctgccacatcctgcactgagccacggaaccgcccctggatcagaggcgctaaaggaatatccacagcccagtggcaaaccccacagaagaggcctcaccccgctgtcggtgaagaaggaggattcaaaggaacagcccgacttaccgtcgctggcgccaccctcaagcctacctttgagcgaaacttcatctcgtcctgccaaatcgcaggaagggaccgactctaagaaggtgctgcagtttccatctctgcatactactacgaatgtctcttggtgctacctgaattacattaagccaaatcatattcagcatgcagaccggcgatcttccgtctatgccgggtggtgtatatcactgtacaatcctaatcttccgggtgtcagcacgaaagctgccctctctctcctgcggagtaagcaaaaggtgtccaaagaaacatatactatggccaccgcccctcaccctgaggctggaaggctggtgccaagctcaagtcgaaaacccaggatgaccgaagttcacctgccttccttggtgagcccagagggccaaaaggatttagccagagtggagaaggaagaagagagacggggcgaacctgaagaagacgctcccgctagccagcgtggggagcccgcccgcatcaagatcttcgaaggtggctataagagcaatgaggaatatgtatatgtacggggtcgcggccgcggcaaatatgtgtgtgaagagtgtggaatccggtgcaaaaagccctcaatgcttaaaaagcatatacgcacgcacaccgatgtgcgtccctacgtgtgtaagcactgccactttgccttcaagacaaagggaaacctgaccaagcacatgaagtctaaagcacactcaaaaaaatgccaggaaacaggggtcctggaggaacttgaagccgaagaggggacatctgacgacttatttcaggattccgagggaagagagggttccgaggccgtggaagaacaccagttctcagatttggaggattccgactcagattccgacttggatgaggatgaagacgaggatgaggaagaatcccaagatgagcttagtagaccatcttccgaagctcctccaccaggtcccccccacgctctgagagcggatagctccccaatcttagggcctcagcctccggacgcccctgccagcggtacagaagcgacaaggggctcatctgtaagtgaagccgagcgattgactgcctcctcgtgcagtatgtcctcacagtccatgcctgggctcccttggctggggcccgcgcccctgggctccgttgagaaggacaccggatcggctctaagctataaaccagtttcgccgaggcggccttggagtcccagcaaagaagctggcagcagacctcctcttgctcggaaacacagcctgactaagaacgactcaagtcctcagagatgctctcctgccagggagcctcaggcaagtgccccgtccccacctggtctgcatgtcgaccccggtcgtggcatgggagctctcccctgtggatccccaagactgcagctgagccctttgactctctgcccacttggcagggaacttgcgccccgggctcatgtcctttcaaagctcgagggaaccactgacccgggcctacccaggtactcacctactcgtagatggtcaccaggccaggctgagtctccccctcgctcggccccccctggaaagtgggcactcgctggaccaggcagcccctctgccggggagcacggcccgggcctcggtttagacccgagagtgctttttccccccgcccctcttccgcataagttgttgtctcgaagcccggaaacatgcgcaagcccctggaaagccgaatcaagaagcccatcgtgtagccccggacctgcccaccccttgtcctccagacccttcagcgctctacacgatttccatggccacatccttgcccgtacggaggagaatatattttcccatttacctcttcatagtcagcacctgaccagggcaccgtgtccactgattccgattggcggtatccagatggtgcaagccaggccgggagcccatcctactctgcttccagggcccacagctgcttgggttagtggattcagtggaggcgggtctgatctgaccggcgccagggaagcccaggaacgaggcagatggagccccaccgagtcgagttccgctagtgtatcccccgtggctaaggtctctaaatttaccctgagctctgaactggaagggggtgattatcccaaagaaagagagcgtactggcggcggccctggccggcctcccgattggacaccacatgggacaggcgccccggcagagcccacacctacacacagcccctgcacccctccagacacgttaccacgcccgccccagggccgaagagcggcccagtcgtggtcaccacgcctggaaagccccagggcgcccaccaaccccgaaccaagtgctacccctccactcgataggtcgagcagcgtcggatgcctggccgaagcctccgctagattccccgccaggacacggaatctctcaggtgagccacgcaccagacaagattctcccaaaccctcgggctcgggagagccacgggcccacccgcatcagcctgaagacagagttcccccgaatgcgtag

SEQ ID NO: 191028 - DNA, 7218 bp, synthetic construct
  misc_feature 1..7218: note = Description of Artificial Sequence: Synthetic coding sequence
  source 1..7218: mol_type = other DNA
atggaccccgagcagagcgtgaagggcaccaagaaggccgagggctcgcccaggaagcgacttaccaaaggagaagccatacagaccagtgtgtcctcaagcgtgccctaccccggatccggcactgctgcgactcaagaatcccccgctcaggaactccttgcgccacaacccttcccaggtccgtcgagtgtcctgcgggaaggttctcaggaaaaaactgggcagcagcagaagccgcctaaaagaccgccgatcgaagccagcgtgcatattagtcagctgcctcagcaccccctcactcccgcattcatgagccccggaaaacctgaacacttgctggaggggtctacctggcagttggtcgacccaatgcgacccggacccagcggaagttttgtggccccgggactgcatccacagtcccagctgctgccatcccacgcttcaattatcccgccagaagatctgcccggggtaccaaaggtatttgtacctcgtccatcacaggtttcactgaaacccacggaggaagcccacaagaaggaaagaaaaccacagaagcctgggaaatacatctgccagtactgctcacgaccgtgcgccaagccgagcgttctgcagaaacatatccgcagccataccggagagaggccttatccctgtggcccttgtggcttcagttttaaaactaaaagcaacctgtacaagcatcggaaatctcacgcgcacaggattaaagccggccttgcgagcgggatgggaggagaaatgtaccctcacggcctggagatggaacggattcccggggaagaattcgaggaacccacggagggggagagcacagacagcgaagaggaaacctctgccacatccgggcacccagccgagctctctcctagaccaaagcagcccctacttagctccggtttgtattcctccgggtcccacagttccagtcatgaacgctgctctttgtctcaatcctcaactgctcagtctctggaggaccctccgccctttgtagaaccatccagtgagcaccctctcagccataagccagaagacacgcacaccatcaagcaaaaactggcattaaggctcagcgagaggaaaaaggttatcgacgaacaggccttcctgagccccggaagcaaaggaagcaccgaaagcggatacttctctcggagcgagtcagctgagcagcaggtgagccccccaaatactaacgcgaaatcctatgccgagatcatttttggaaagtgtgggcgcattggccagaggacagctatgttaacagctacatccacccagccattactaccactctccaccgaagacaaaccgagtctcgttccactctccgtgcctcggacccaggttatagagcacatcacaaaactcatcaccatcaatgaagctgtggtggacacatccgagatcgactcggtgaaaccccgacgcagctctttaagtaggcgtagttccatggaatccccaaagtcttctttgtatcgtgagccattgtctagccactctgagaagaccaaaccggagcagagtctgcttagcctccagcatcctccctctaccgcaccaccggtgcctcttctgcgctctcacagtatgccaagcgccgcctgcaccatttccacccctcatcacccattccgcggaagttactccttcgacgaccacatcaccgattccgaggctctgtcacactcttcgcacgtgtttacttcccaccctaggatgttgaagcggcagcccgctatcgaactaccactgggcggagagtactccagtgaagagccgggaccgagctcgaaggatacagcttccaagccgagtgacgaggtagaacccaaggagtccgaactgaccaagaaaaccaaaaagggtctgaagaccaagggagtgatctacgagtgcaacatctgcggcgctcgttacaaaaaaagggacaactacgaagctcacaaaaaatattattgttctgagctgcagatcgctaaacctatcagtgcaggtactcacacctcaccagaagccgaaaagtcccagatcgagcacgagccgtggtcacaaatgatgcattataaactcgggactaccctggagctgactcccttaaggaaaagacggaaggagaagtctcttggagacgaagaggagccacctgcttttgaaagcaccaagtcccagtttgggtcccccgggcccagtgacgccgccagaaatctgccactggagagcaccaaatcccctgccgaaccttcaaagagcgtgccttcactggagggaccgactggcttccagcccaggacgcccaaaccaggttccggaagcgaatccggcaaagagcggcgaactactagcaaggagatttcagtcatacagcatacctcgtcatttgagaagtcggacagcctggaacagccttctgggctcgagggcgaggacaagcccctggcccagtttccatcccccccaccggctccacatggtagatccgctcattctctgcaacccaaattggttcgacagcctaatatccaggtgccagagatcctggtgaccgaggagcccgaccggcccgacacagagccagagccacctcctaaggagcctgagaagactgaggaatttcagtggccacagaggagccagacgttggcccagctgccagctgaaaaactgccaccgaaaaaaaagcgcctgaggctggctgaaatggctcagagcagtggggagagttccttcgaaagctccgtccccctaagcaggagcccttcacaggagtcgaatgtctccttatcagggagctccagaagtgctagctttgaacgcgatgaccacgggaaggccgaggctccatccccaagctccgatatgcggcctaaaccattaggcactcacatgctgactgtgccgagccaccacccccacgccagagagatgcgtcggagtgcatctgaacagtcccctaatgtttcccactctgcccacatgacagaaactcgcagcaaatcattcgactacggcagcctgtcattgacaggaccctctgctcccgcacctgtagcgccccccgctcgggtggcacccccagaaaggcggaaatgttttctcgttcgccaggcctccctgtctcggccgcctgaaagcgaattagaagtcgctccaaagggcagacaggaaagtgaagaaccgcaaccgtcaagtagcaaaccctcagccaagagcagcctgagccaaatttcctccgctgcaacctctcatggtggtcctcccgggggtaaaggaccgggccaggatcgaccccccttgggcccaacagtgccctacacggaggctctgcaggttttccaccacccagtggctcaaactccactgcatgagaaaccatatctacctcctccagtgtctcttttctcctttcagcaccttgtgcaacatgagcccggacagagccccgagttcttctccactcaagccatgtccagcttgctgtcatctccctacagcatgcctccactgcctccatctctgttccaggctccacctttgcctctgcagcccaccgtgctacacccgggccaattgcatctgccgcagcttatgccccaccccgctaatattcccttccgccagccccctagttttctcccgatgccatatcccacctctagtgcgctgagttcggggttctttctccctttacagtcccagtttgctctgcagctgcctggagatgttgagagccatctaccccaaattaaaactagcctggctcctctggctacggggtcagccggcctatccccctctacggagtattcttcggacatacgactgcctcccgttgccccccccgcttcgtcgtctgctcccacctccgccccccccttggcattgccagcatgccccgacacaatggtttccttagtggtgcctgtacgggtgcaaaccaacatgccttcctatggatctgccatgtacactaccctgagccaaattttggtcacgcagagccaggggtcctctgctactgttgctctccctaagtttgaagagcctccatcaaagggaacaactgtgtgcggcgccgatgtccatgaggtcggtcctggtccctcaggcttgtctgaggagcagtcccgggccttcccaactccctacctgagggttcctgtcaccctgcccgagcgaaaggggacctccctttcaagtgagtctatcttgtccctcgagggtagcagttccacggccggagggtccaaacgcgtgctgagccctgccggaagcctggagctgaccatggaaacacagcaacaaaagcgggtgaaggaggaagaagccagtaaagctgacgagaagctcgagctcgtgaaaccttgttcggtggttctgactagtaccgaggacggcaaaaggccagagaagagccacctgggcaatcaggggcaggggcggcgcgaattggagatgctgagttccttatcaagtgatccttctgacacaaaggagattccaccgcttccacacccggccctctcccatgggacagcacctggaagcgaagccctcaaggagtatccccagccaagcggcaagccccataggcgcggcttaactccactcagcgtcaaaaaggaagatagcaaggagcaacctgacctcccaagcttagctccaccgtcatctctgccgttaagcgagacatccagcagacctgctaagagccaggagggcacagacagcaagaaggtgctgcaattcccgagcctgcatacaacaacaaatgtctcctggtgctatctgaactacatcaagcccaaccatattcagcacgcagatcgccgcagctcggtgtacgctgggtggtgtataagcctctacaaccctaacctacccggtgtttctaccaaggccgcgctgagcctgctccgctctaaacagaaggtgagtaaagagacgtataccatggcaacagcaccccatcccgaggcagggcgattggtgccgtcttcctcaagaaaaccacgcatgactgaggtccatctgccctccttggtgtctccagaagggcagaaggatctggcacgtgtggaaaaagaggaagaaaggcgcggagaacccgaggaggacgcaccagcaagccaacgcggcgaaccagcgcgcatcaagatctttgagggaggctataaaagcaacgaagaatacgtctatgtgcggggaagagggcggggcaaatatgtctgcgaggaatgcggcattaggtgtaagaaaccgtccatgctcaagaaacacatcagaacccacacagacgtgcgcccctacgtctgtaagcattgtcattttgccttcaagacaaagggcaatctcacaaagcacatgaaaagcaaagcacactccaagaagtgccaggaaactggtgtattagaggaacttgaagccgaagagggaacctccgacgacttgtttcaggattccgagggccgggaaggatctgaggctgtggaagagcatcaatttagcgacctggaggactctgattctgatagcgatctggacgaggacgaagatgaagacgaggaggaatctcaagacgaattgtcccggccatctagtgaggcgccccctccaggaccaccccacgccttgagggccgattcatcccccattctgggccctcaacccccagacgcccccgcctctggcaccgaagccacacgaggcagcagcgtctccgaagccgaaagactcactgctagctcctgcagtatgagcagccaatcaatgccagggttgccttggctgggccccgctcctctgggctcagtcgagaaggatacaggcagcgcactgagctataagccagtcagtcccagacggccctggagcccctctaaagaggcgggctcaagacccccgctggctcgtaagcattccctgacaaagaatgatagctcgccacagaggtgctcacctgccagggagcctcaagcctcagctccatcccctccaggactccacgtcgatcctggtcgaggtatgggcgcccttccatgcgggtccccccgtcttcagcttagccccttgactctctgcccattgggccgggagctggcaccccgcgcacatgtgctctcaaaacttgagggcaccaccgacccaggtctgccgcggtactccccaacccgccgatggagtccaggccaggccgaatcaccacccaggtcagccccccctggcaaatgggcactagcgggtccaggcagcccttctgcgggggagcacggacctggcctggggctggatccacgtgtgctgttcccacctgcccccttaccgcacaaacttctcagcaggtcgcctgaaacctgcgctagtccctggaaggctgagtctcgttccccctcctgctctcccgggcctgcgcaccccctgtcctcacggccattctcagccttacacgattttcatgggcatatcttagcaagaactgaagagaatatcttttcccaccttcccctccacagtcagcaccttacccgcgccccgtgtccactcattcctattggcggcatccagatggtgcaggccagaccaggggcgcaccccacccttttgccgggccctaccgctgcctgggtaagtggcttttctggaggaggatccgatttaaccggggctagagaagctcaggaacgaggccgctggagcccgaccgagtcttccagcgctagcgtgtcacctgtggctaaggtctcaaaatttactctgtctagcgaactcgagggaggagattatcctaaggaacgcgagaggaccggtggaggaccaggccggcccccggactggacgccccacggcaccggcgccccagccgagcccactcccacccactccccttgcacaccccccgatacacttccccgtcctcctcaaggtaggcgtgccgcccaatcttggagtccacggctggagtctccaagggctcctacaaaccccgaacccagtgcgactccccctctggatcggtccagctccgtgggttgtcttgcagaggcatcggccagatttcctgccaggactcgcaatttgagcggggagcccaggacacgccaagatagcccgaaaccctccgggtccggcgaacctcgcgcccaccctcatcagccagaggatagggtccctcctaatgcctag

SEQ ID NO: 191029 - DNA, 9429 bp, synthetic construct
  misc_feature 1..9429: note = Description of Artificial Sequence: Synthetic coding sequence
  source 1..9429: mol_type = other DNA
atggccaccctggagaagctgatgaaggccttcgagagcctgaagtccttccagcagcaacagcagcagcagcagcagcaacagcaacagcagcagcagcaacaacagcagcagcctcccccacctcctcccccaccccctcctccccaattgccacagccaccacctcaggcccagccccttctgccccagcctcagccccccccacctcctccacccccaccgccaggtcctgctgttgccgaagagcctttacaccggcctaaaaaggagcttagcgctacaaaaaaggaccgcgtcaaccattgcctgacaatttgcgagaatatcgtagcacagagcgttcgtaacagccccgagtttcagaagctgctcggaatcgcgatggagctgttcctcctatgctctgatgacgctgaaagcgatgtaaggatggtcgcagacgagtgtctgaataaggtaattaaagccctcatggactctaatctccctcgcctgcagctggaattgtataaagaaatcaagaaaaatggtgcacctcggtcgctgagagccgccctctggcgctttgcagagcttgctcacttggttcgccctcagaaatgtagaccttatctggtgaaccttctgccttgtcttaccagaacttccaaacgaccagaagagagcgtacaggaaaccctggctgctgcagtgcccaagatcatggcttcattcggcaactttgccaacgataatgagatcaaagtgctactgaaagcctttatcgccaacctcaaaagctccagccccaccattagacgcactgcggcaggttccgctgtttcgatctgtcagcacagccggcggactcagtatttttactcttggttactgaatgttctgttgggccttctggtcccggtggaggacgaacattcaacattactaattcttggcgttctcttaaccctgcggtatctcgttcctctattgcaacagcaagtgaaagacacgtccttgaagggctcattcggcgtcacacgaaaggaaatggaggtgagcccttccgcagagcagctggtacaagtgtatgaactgactctgcaccatacgcagcaccaggatcataacgtggttacaggggcgctggaacttctacagcagctgttccgtactccaccccctgaattgctccagactttgaccgccgtaggagggatcggccagcttactgccgccaaagaggaaagcggaggcagatcgcgatccggctctattgtcgaattgatcgcaggggggggctcttcctgcagtcctgtgctgtctcgcaagcagaaaggtaaggtactcctcggtgaggaagaggctcttgaagatgatagcgagtctaggtcagacgtctccagtagcgcgcttacagcaagcgtgaaggacgaaatctctggtgaactggcagcttcatccggagtgagcaccccaggaagcgcagggcatgatataataactgagcagccacggtctcagcacacactgcaggctgactcagtcgacttagcttcctgtgatcttacatccagcgcaaccgatggcgacgaagaggacatcttaagtcattcatcaagtcaagtatcagccgtgcccagtgatccagccatggatttgaatgacgggacccaggcttccagtcccatatcagacagttctcagacaaccacggagggaccagatagcgccgttaccccatccgattcgagcgagatcgtgctggacggcactgataatcagtacttggggctgcagattggtcagccgcaggacgaggacgaggaagctacaggaatcctccccgacgaagcgagcgaggcctttcgaaactctagtatggcgcttcagcaggcccacctgctgaaaaacatgagtcactgccgtcaacccagtgactcctcagtggataaattcgtgctccgtgatgaagccaccgaaccaggggaccaggagaataagccctgtcggatcaagggcgacatcggacagtcaacagacgatgactcagcaccactcgtgcactgtgtgaggcttctgtcggcgtcatttctcttgacagggggcaagaatgtcctcgtgccagaccgcgacgtccgcgtctccgtgaaagctctcgccctgagctgcgtgggcgccgccgtggccctccatccagaatcttttttctcaaaactgtacaaagtgcccctggacaccaccgagtaccctgaagagcagtatgtaagcgatattctcaattacattgaccatggggaccctcaggtgaggggtgccacagcgatactctgtgggacactgatttgtagcatattgtcacggagccggtttcacgtgggcgactggatggggacgatacgaactctgacaggcaacaccttctctctagctgattgcatcccgcttcttcgaaagaccttaaaagatgagagcagcgtgacctgtaagctcgcatgtaccgccgtacgcaactgcgtaatgagcctctgctcgagtagctactccgaattgggactgcaattgatcatcgatgtgctgacattgcgcaattcaagctactggctggtcaggacggagctcctcgagactctggccgaaatcgacttcaggcttgtaagtttcctggaagcgaaggccgaaaatctgcatcggggagcacaccactataccggtctgttgaaactacaggaaagggtgctgaacaacgttgtgatccacttattaggagacgaggatccacgagtccgacatgtggccgccgcctccctgatccggctcgtgcccaagctgttctacaaatgcgatcagggacaggcagacccggtggttgccgtcgcccgagaccagtccagcgtgtacctaaagcttcttatgcacgaaacgcagccgcctagccacttcagcgtttccaccattaccaggatctacagaggctacaacctgttgccctctatcacggatgtgaccatggaaaataatctgagccgtgtcatcgccgccgtgtcacacgagctgattacctcaacgacacgagccctcacatttggatgctgcgaggccctgtgtctgcttagtacggctttcccggtgtgcatctggagtctgggctggcattgtggggttcctcccttaagcgcatcagatgagtccagaaagtcttgcactgtgggcatggcaacaatgatcttaacactgctctctagcgcctggttcccgcttgacctcagcgctcatcaggacgcactgatcctcgctggcaatttgctggccgcctccgctcctaaatctctgagaagctcttgggcatctgaagaagaggccaacccggccgcaacaaaacaggaggaagtatggcccgcgctgggggacagagccctggtgccaatggttgaacagctgttctcacacctgctcaaagttattaatatttgcgcccatgtgctggacgatgtcgccccaggaccagctatcaaagccgcactgccttccctgactaatcccccttctctgagccctatcaggaggaaagggaaagagaaagaacccggagaacaggccagtgtacccctgagccctaagaaagggagcgaggcaagcgccgccagtcggcagtctgatacttcagggcctgttaccacgtctaagtcaagctctctgggctctttttaccaccttccgtcctacctaaaactgcatgacgtgttgaaggccactcatgctaactataaggtgactttggacctgcagaattcaactgagaaattcggcggcttccttcggtccgctttggatgtcttgtctcaaattttggagctcgccaccctccaggacatcggcaaatgcgtcgaagagattttaggctacctcaagtcttgcttcagcagagagccaatgatggcaacagtatgtgtacagcaactcctcaagacattatttggtacgaatctggcctcgcagttcgatgggctgagctcgaatccctcaaaaagtcagggcagggcccagcggctgggcagcagctctgtacggccgggcctataccattactgttttatggcgccttacactcatttcactcaggcattggccgacgcatctctgaggaatatggtacaggccgaacaagaaaacgacaccagcggttggtttgacgtccttcagaaggtctcaacacaactcaaaactaacctgacctctgtaaccaaaaacagggcagataaaaatgctatccacaatcacattagattgtttgagccgctggtgataaaagctctcaaacagtacaccaccaccacctgtgttcagttacagaagcaggtgctcgatttgctggcacagctagtgcagctgcgagtgaactactgcttgctggactccgaccaggtgtttatcggatttgttctcaagcagttcgaatatattgaggtcggacagtttagagaaagcgaagctatcatccccaatatattcttctttctggtgctgcttagctatgagaggtatcactctaaacagatcatcggaattccaaaaatcatacagctctgtgatggcattatggcaagtggacgaaaggctgtgacgcacgccataccggcgttacaaccgatcgtgcacgatctctttgtcctgcgggggacaaataaggcagatgctggaaaagagctcgagacgcaaaaagaagttgtagtgagcatgctgctcaggctcattcaatatcaccaagtcctggagatgtttattctggtcctgcagcagtgccataaggaaaatgaggacaaatggaaaagactctctagacagattgccgatatcattttaccaatgcttgccaagcagcagatgcacatcgacagtcacgaagccctgggagtcctgaatacactcttcgaaattcttgcaccctcatccctgcgccccgtggacatgctgctgagatccatgttcgtaacacctaatacaatggcttccgtatcaaccgtccaactctggataagcgggattctggcgatcctccgcgtgctgatttcccaaagtaccgaggacatcgtcctgtcacggatccaagagctgtctttcagcccctatctaattagctgtaccgtcattaacaggctacgtgatggggacagtacttccactttagaagagcattctgaaggcaagcagatcaaaaatttacctgaggaaactttcagccgatttctgctacagctggtggggatactactcgaggatatagtgacaaagcagcttaaagttgagatgtcggagcaacaacacacgttttattgtcaggagctgggaacactgctaatgtgcctgatccatattttcaagtccggcatgtttcggcggatcacggccgccgccacccgcttgttccgaagtgacggttgcggcgggtcattctacaccctggactcactcaacctgagggctagatctatgatcacaacgcatccggcactggttctcctctggtgtcagattttactgttggtcaaccacaccgactatcgctggtgggccgaggttcagcagactcctaaacgccactcactcagcagtactaagcttctttccccacagatgtcaggcgaagaggaggatagtgatctggctgccaagctgggaatgtgcaatagggaaatcgtgagacgaggtgctcttatcctcttttgcgactatgtttgccagaatctgcatgatagcgaacatctcacatggttaatagtcaatcacatacaggacctgatatcgttaagtcacgagccaccagtgcaggacttcatatccgccgttcacagaaactctgcggcatctggcctttttatacaggctattcagagccgctgcgaaaacctcagtacgcccaccatgctgaagaagactcttcagtgtcttgagggcatacacctctcacagagtggcgctgtgctgacactgtacgttgacaggctgctctgcacaccgtttagagtgctggcccgtatggtcgatatactcgcatgcagaagagtggagatgctcctggccgccaacctgcaatcaagcatggcacaactgcccatggaagagctcaatcggatccaggagtatctccaaagctcaggactggcccagagacatcaacgcctgtatagccttctagacagatttcggctctcaaccatgcaggacagtctgtccccaagccctccggtcagtagccatcctctggacggcgatggacacgtgtccctcgaaacagtttccccagataaagattggtacgtccacctggtgaagtcacagtgctggaccagatcagatagtgcccttcttgagggagctgagctcgtgaaccggattccagccgaggacatgaatgctttcatgatgaacagcgagtttaacctgagtctcctcgctccgtgtctctccctgggcatgtcagagatcagtggcggccagaagtctgcactgtttgaagctgccagggaagtcaccttagcaagggttagcggtacggttcaacaactgccagccgttcaccatgtcttccagcccgagctgccagccgagccagcggcctactggtcaaagttaaatgatctgtttggcgatgctgccctgtatcagtctctgccaacattggctcgcgccctggctcagtatctcgtggttgtgagtaaactccccagccatctgcatctccctccagagaaagaaaaggacatcgtgaagttcgtagtggctaccctggaagctctgagttggcatcttatacatgagcagattccactgtcattggatttgcaggccggtctagactgttgctgcctagcgttacaattgcctggcctgtggtctgttgtgtcttccacagagtttgtcacccacgcttgtagtctgatctactgtgtccattttatccttgaggccgttgcagttcagccaggcgagcagctgctgagccccgagagacggacaaacactccaaaggccatcagcgaggaagaggaggaggtggatccaaatacgcagaacccaaaatatatcacggctgcatgcgaaatggtcgccgaaatggtggagagccttcaaagcgtgcttgctctaggccacaaacgaaactccggagtgccagcctttctgacccctctcctgaggaacatcataataagtttggcccgtctgccattagtgaatagttacacccgggtgccccctctggtgtggaagttaggatggtcccccaaacctggtggagattttgggaccgcttttccagagataccagtcgagtttctgcaggagaaagaggtgttcaaggaatttatatacaggatcaacacactgggttggacaagtagaacccagttcgaagagacctgggccactctgctgggggtgcttgtgacacagcctctagtgatggagcaggaagaaagtccccctgaagaggatacagagaggacccagattaatgtcctggcagtgcaggccatcacgagcctcgtgctttcagccatgacagttcccgtggccggaaatcccgccgtttcatgtctggagcaacagcccaggaacaagccactgaaagccctggatacacgatttggtaggaagctctccattatcaggggcatagtggaacaggagattcaggctatggtgtcaaaacgcgaaaacatcgccacccaccatctgtaccaggcctgggacccagtcccctccctttctcctgctactacaggggcactgatcagccatgaaaaacttttactgcaaataaatccagagcgtgaactcggttcaatgagctataaactaggtcaggtcagcatccacagcgtctggctcggaaactcaattacccccctgcgggaagaagagtgggacgaggaagaggaagaagaagctgacgcgcctgccccatctagtcccccaacttcccctgtcaacagcagaaaacatcgagccggggttgacatccatagctgcagtcagtttctgttagaactgtacagccggtggattcttccctcttcttccgctcgtagaacaccagcaatcctcatcagcgaggtagtgcggtcgctcttggtggttagtgatctgttcaccgaacgcaaccagtttgaactaatgtacgtcaccttgacagaactgcggcgggtccaccctagcgaagacgaaatcctcgctcagtacctggtgcccgccacatgtaaggccgccgccgtactggggatggataaagcagtagcggagcccgtatcgaggttgcttgagtcgaccctccgctcgagccacctgcccagtagggtgggtgcgctgcacggcgtattatatgtcttggagtgcgatttactcgatgacacagcaaaacagctcatccctgtcatcagcgactatctgctgtccaatctgaaggggatcgcacactgcgttaatattcacagtcagcaacatgtgttggtcatgtgcgccactgcattctacttaatcgagaactacccattggatgttggacccgaattctcagcttccattatccagatgtgcggagtaatgctttcaggttcagaagagagcaccccctccatcatctaccattgtgcattgcgaggactggaaagactcttgttaagtgagcagctctctcgtttggatgcggaaagcttggtgaagctgtcggtggatagggtcaatgttcactcaccacaccgagcgatggccgccctgggactgatgttgacgtgcatgtatacgggtaaggaaaaggtgtcacctggccggactagcgacccaaatcccgccgcaccagatagcgagagcgtcattgtggctatggagagggtaagtgtgctattcgacaggattaggaaaggcttcccatgcgaggctagggtggtcgcccgcatcttgcctcagttccttgacgattttttccccccacaagacattatgaataaggtgatcggtgagtttctgtctaaccaacaaccctacccgcagtttatggccaccgtcgtttataaagtgtttcagactctccacagtaccggacaatctagtatggtgcgggattgggtcatgttgagcctgagcaattttacccagcgggcaccagtggccatggctacttggtccctctcctgcttctttgtttcagctagcacctccccttgggtggctgccatcctccctcacgtgatatcacggatgggaaaactggagcaggttgacgtcaacctgttctgtttggtggctaccgacttttaccggcatcagatcgaggaggagctggaccgtcgggctttccagtcagtcctggaagtggtggccgctcccggatctccctatcaccgcctgctcacctgcctgcgaaacgtgcacaaagtcaccacttgctag

SEQ ID NO: 191030 - DNA, 3114 bp, synthetic construct
  misc_feature 1..3114: note = Description of Artificial Sequence: Synthetic coding sequence
  source 1..3114: mol_type = other DNA
atggaccggatggccagcagcatgaagcaggtgcccaaccccctgccaaaggtgcttagtagacggggggtgggcgctgggttggaagctgccgaacgagaatcttttgaaagaactcaaaccgtgtccattaataaggcaatcaatactcaggaagtcgcagttaaggaaaagcatgcaagaacttgcattctgggaacccatcatgagaagggagcacaaacgttctggtctgtagtgaatcggctccccctttctagtaacgctgtgttgtgctggaagttctgccatgtgtttcataagctcctgcgcgatggccaccccaacgttcttaaagattcactcagataccggaatgagctgagtgacatgtctagaatgtggggacacctaagtgaaggatacgggcagctttgtagtatttatttgaaactgctgcgaacgaagatggaataccatacgaaaaatcctcgtttccctggcaacctacagatgtccgaccgacagttggacgaagctggggagagcgacgtcaacaactttttccagctgaccgtggagatgttcgattaccttgaatgtgaactgaacctgtttcagaccgtctttaactcactggacatgagtcgctctgtctccgtaacagctgccggccagtgtagactagccccccttatacaagtgattcttgattgctcccacctatatgattataccgtgaaactgctctttaagctgcattcctgcttgcccgctgacaccctacaaggacaccgcgacaggttcatggagcaattcacgaaactgaaagatctgttctaccggtcaagcaacctgcagtattttaagcgcctgatccaaatcccacaactcccagagaacccacctaatttccttcgggcttcagccctcagcgaacacatttctccagtcgtggtcattcccgccgaagcgagctcccccgattcagaacccgtgctggaaaaagacgatctcatggatatggatgcctctcagcagaacctgtttgacaataagttcgacgatatcttcggcagcagtttttccagcgaccccttcaacttcaattctcagaacggcgtcaacaaagatgagaaagaccacctgatcgaacgcctgtatagggagatatctggcttaaaagcacagctggaaaatatgaaaactgaatcccagagggtggttctgcagctgaaaggacacgtctcagagctggaggcggatctcgctgagcaacaacacctgaggcagcaggccgctgacgactgtgaatttctgcgggctgagctcgacgagctgaggcggcagagagaggacacagaaaaagctcagcggtcattgtcagagatcgagagaaaagctcaggccaatgagcaaagatactcaaagctcaaggagaagtactctgaactcgttcaaaaccacgccgatttgcttagaaagaatgccgaggttacaaaacaggtctcaatggcgcgacaagcccaagttgatctagagagagagaagaaggaactcgaggactctctagaacgtatctccgaccagggccagagaaaaacgcaggagcagctggaggtcctggaaagcctcaaacaggagctcgccacaagccaaagagagttacaagttctccagggttcgcttgaaacatcggcacagtccgaggcaaactgggccgcagaattcgctgagttggaaaaggagagggacagccttgtcagcggagccgcacacagagaggaggagctgagtgccctgaggaaggagcttcaggatactcagctcaagttggcttcgactgaggaatctatgtgtcagctggctaaggaccaacgaaagatgctcctcgtgggatctcggaaggcggccgaacaggtcattcaggacgccctgaatcaactggaggagcctcctctgatttcctgcgcaggcagcgcagaccacttgttgagcactgtaacatccatttcatcgtgtatagagcagctcgagaaaagctggtctcaatatttagcctgccccgaggacatctcgggtctgctgcacagcataactcttttagcccatcttactagtgatgcaattgctcacggagctaccacatgcttgcgcgccccacccgaacctgcagattccctgacagaagcctgcaaacagtatggccgcgaaactttggcttacctggctagcctagaggaagagggatccctggaaaatgctgattctaccgcgatgagaaactgtctttccaagatcaaagccataggagaggagctgctgcccaggggcttggatattaagcaggaggagctcggcgatctggtagataaagagatggcggccacatcagccgctatagaaacggcaaccgcccgcatcgaggaaatgctgtccaagtcaagagcaggggacacaggcgttaaattagaagttaatgagagaattttggggtgttgcacctcgctgatgcaggccatccaggtattgatagtcgcttccaaggatctacaaagggaaattgttgagtcaggccgggggacagccagcccgaaggaattttacgctaaaaactcacgctggacagaaggcctgatttctgcttcaaaggctgttggctggggcgctaccgtgatggttgatgccgccgatttagtagtccaaggaagggggaagtttgaagagttaatggtgtgttcacatgagattgccgcgtccaccgcgcaattggtggcagcctctaaggtcaaggctgataaggatagtcctaacttggcacaactgcaacaggcgtccagaggtgttaaccaagccaccgccggagttgtcgcgtctaccatcagcggcaaaagtcagattgaggaaacggataatatggatttctctagtatgacccttacacagatcaagcgccaggaaatggattctcaggtgcgcgtactagagctggagaacgagctgcagaaagagagacagaagctaggcgagctgcgtaagaaacactacgagctagcaggcgtagcagaaggctgggaggaggggaccgaggccagtccccctaccttacaggaagttgtcaccgagaaggaatag

SEQ ID NO: 191031 - DNA, 2961 bp, synthetic construct
  misc_feature 1..2961: note = Description of Artificial Sequence: Synthetic coding sequence
  source 1..2961: mol_type = other DNA
atggaccggatggccagcagcatgaagcaggtgcccaaccccctgcctaaagtgctcagtcggcgaggcgtgggtgctggcctggaagctgctgagcgtgagagttttgagcgcactcagaccgtgagtattaacaaggctattaatactcaggaggtggccgtaaaggagaaacatgcccggacatgcattctcggcactcatcatgaaaagggcgcccagaccttctggagcgtcgtgaacagacttccgttgagctctaacgccgtcctgtgttggaagttttgtcacgtgtttcataagttattgagggatggccaccctaatgtccttaaggattcactccggtacagaaatgaactgagcgacatgtcacgcatgtgggggcatctctccgaaggctacggccagctctgctccatatacctcaagctgctcaggactaagatggagtaccacacaaagaatccgagattcccgggaaatctgcagatgagcgatcgccagcttgatgaagccggggaaagcgatgttaacaactttttccagttaaccgttgagatgtttgactatttagagtgcgaattaaatttgtttcagacggtgttcaacagccttgatatgagtaggagtgtcagcgtgactgcggcaggccagtgtcgcctcgcacccttgatccaggtgatcctagactgttcacatctgtacgactacacagtgaagctgctgttcaaactgcactcgtgcctccctgccgacaccctgcaggggcaccgggaccgatttatggaacagttcacgaagctgaaagacctcttttatcggtccagcaacctccaatactttaagcggctgattcagataccacagctcccagaaaaccctcctaatttcctgagggcatctgctttgagtgaacatattagtccggtggttgtgattccagcagaggcttcatctccggactcggagccggtgcttgagaaagacgacctgatggacatggatgctagccagcagaacctcttcgataacaagtttgatgacattttcggtagctctttctcttctgaccctttcaactttaattctcagaacggggttaataaggatgagaaagatcacctgatcgagcgactctatagggagatctctggcctcaaagcgcagctggagaacatgaaaacagaatcccaacgggttgtgttgcagcttaaagggcacgtgtcagagttagaggcagatttagccgaacagcagcatctgcgccagcaggccgcagatgactgtgagttccttcgcgccgaattggatgagctaaggcgccagagagaagacaccgaaaaagcccagcggagtctttctgaaattgaacgcaaagcacaggctaatgaacagcggtacagtaagctgaaggaaaagtattctgaactggtgcaaaaccatgcagatctcctcagaaagaatgcggaggtgactaaacaggttagcatggctcgccaggcccaggtggacctggagagggagaaaaaggaactggaggattcattagaaaggatcagcgatcagggtcagcgaaaaacacaggaacaactcgaagtactcgaaagcttgaagcaagagctggccacctcacagcgggaactccaggtactgcaggggtcactggagacatccgcccaatccgaggcgaactgggctgccgagtttgctgaacttgaaaaagaacgtgattccctcgtgagcggagccgctcatcgggaagaagagctgagcgccctccgcaaggagttacaggatacccaacttaaactcgctagcacagaggaatctatgtgtcagctcgctaaggaccaaagaaagatgctactggtcgggagccgcaaggctgccgagcaggtgatccaagatgcactcaatcagctagaggagccccctctcatctcatgcgcaggttcggccgatcacttactctcaacagtgacttccatcagtagctgcattgaacaattggaaaaatcctggagccagtaccttgcttgcccggaagatatatccggtctgctgcatagtatcactttgctcgcacatctgacatccgatgccatcgcgcacggcgcaacgacgtgtctgcgggcaccccctgaacccgccgacagtctcacagaggcatgtaagcagtatggtcgcgaaaccctcgcgtacctcgcttctctggaagaggagggttcgctcgaaaacgcggacagcaccgccatgagaaattgcctatctaagattaaggccatcggtgaagaactcctccccagaggcctggacataaagcaggaagaacttggcgacctcgttgacaaagagatggcagctacctcagccgccattgagactgctaccgcccgaatcgagggaaccgcatcaccaaaagagttttacgccaaaaatagccggtggaccgagggcctgatcagcgcctctaaggccgtgggatggggtgcaaccgtcatggttgatgccgctgacctggtagtgcagggtcgaggtaaattcgaagagttaatggtgtgctcacacgagattgccgcctcaacagctcagctggtggctgcatccaaagtgaaagctgataaggattcccccaacttagcgcagcttcagcaggcctctcggggggtgaatcaggcgacagcaggggtcgttgcctcaaccatctccggcaagtctcagatcgaggaaactgataatatggacttctcctcaatgactttgacacagataaaacgtcaggaaatggattcacaagtgcgcgtgctggaactggaaaatgagctgcagaaggagaggcagaagctgggagagctgagaaagaaacattacgaactagctggcgtggctgagggatgggaggaaggaacggaggcctctccacctaccctccaggaggtcgtgacagagaaggaatag

SEQ ID NO: 191032 - DNA, 3207 bp, synthetic construct
  misc_feature 1..3207: note = Description of Artificial Sequence: Synthetic coding sequence
  source 1..3207: mol_type = other DNA
atgaacagcatcaagaacgtgcccgcccgggtgctgagccggcggccaggtcactcactagaagcggaacgggaacagttcgacaagacccaagcgatctctatcagtaaagccatcaacacccaggaggccccagttaaagaaaaacacgctcgtaggatcatcctggggacccaccacgaaaagggggccttcacattctggtcgtacgcaataggccttcctcttccatcctccagtatcctcagctggaagttttgccatgtgctgcataaggtacttcgtgacggccatcctaatgttctgcacgattgccagaggtaccgctccaatatccgcgagatcggagacctctggggccatctgcatgacaggtacggacaactagtgaacgtgtacaccaagctgctgcttaccaagatatctttccatcttaaacatccacagttcccagccggcctggaggtgaccgacgaggtgctggagaaggctgccggaaccgacgtaaacaatattttccagctcacagttgagatgttcgactacatggattgtgaactaaagttgtccgaatcagtttttcgtcagctgaatactgccatcgccgtcagtcagatgtcctccggtcagtgtcggcttgctcccctgattcaggtgatccaggactgctcccacctctaccattacaccgtaaagctcctcttcaaattacactcctgcctgccggcggacacgttacagggacaccgcgatcggttccacgagcaattccattcactgcgtaatttctttaggagagcttccgatatgttgtattttaaacggctgatccagatcccacgccttcccgaaggtcctcctaactttctgagggcctctgccctagcggagcatataaaacctgtggtcgtaatccccgaagaggctcccgaagacgaggagcccgagaatctcatcgagattagcacagggccaccggccggtgaacctgtcgtggtggctgacctgttcgaccagacattcgggccccctaacggaagtgtgaaagatgatagagacttgcagatcgagtctctcaagcgcgaggtggagatgcttcggagcgagcttgagaaaataaagctggaagcgcagcgttatatcgctcaactgaagtcccaggtgaatgccctggagggagagttggaagaacagcgtaaacaaaaacaaaaggccctggtagataacgagcaactaagacacgagctcgcacagctgcgggcggcccagcttgaaggagagagaagccaaggactgagggaagaggctgagcggaaggcaagtgctaccgaagcccgctataacaaactcaaggagaaacactccgaacttgtgcatgtacatgcggaactgttacgcaaaaatgccgataccgcaaagcaactgaccgtgacgcagcagtcccaagaagaagtcgcgcgggtcaaggagcaattggccttccaggtcgagcaggttaaacgggaatccgaactgaaacttgaggagaaatccgatcagctggagaagctcaagcgcgagctcgaagctaaggcaggagagctggcccgcgcccaggaggctctttcacataccgaacagtcaaaaagcgagctctcgtcaagactcgataccttgagcgctgaaaaagacgcactctccggggccgtccgccagagggaggctgaccttctcgccgcccaatcactcgtaagagagactgaagcagcactgtccagagagcagcagcgaagcagtcaagagcagggcgagcttcagggccgcctggccgagcgggagtctcaagagcaaggactgcggcagagattgctcgatgaacagtttgcggtgctgcgcggagccgccgcagaagctgcaggcatcctgcaggacgcagtgtctaagctggacgacccgttgcatctgcggtgtaccagctcccctgactacctggtttctcgcgctcaggaagcactcgacgcggtgtccacgttggaagagggccacgcgcagtatctcacatcgctcgcagacgcctccgccctagtggctgctcttacccgcttctcccatctggcagctgataccattatcaacggcggcgccactagccacctggccccaactgacccggccgacaggcttatcgatacttgtcgcgaatgcggcgcgcgggctttggagctgatggggcagctgcaggaccaacaggctcttagacacatgcaagcttcactcgtgaggacccccctgcagggaatcctccagctgggtcaagagttgaagcccaagtccctggatgtccggcaggaggagctgggggcagtcgtcgataaagagatggcagccacgtctgcagccattgaagacgctgtccggcggattgaggatatgatgaatcaagcaagacatgcgagctcgggggttaagctcgaagtcaatgaacgaatactcaattcgtgtaccgacttgatgaaagcaatacgtttactcgtcacgacctcgacctcactgcagaaggagatcgtggagagtgggcggggagctgccacacaacaggaattctatgcgaagaattccagatggactgagggattgatttccgccagtaaggccgtgggctggggagccactcagctggtggaggccgccgacaaagtggtattacacacagggaaatacgaggagctcatcgtttgctctcatgaaatcgcggccagcacagcgcagctggtggctgcttcaaaggtcaaggccaataaacattccccacacctctctagattacaggaatgtagcaggaccgtcaatgagcgggcagctaatgttgttgcatcaaccaaaagtggccaggagcagatcgaagatagggatacaatggatttttcaggcctgtccctaatcaagttaaaaaaacaggagatggagactcaggtgagagtcttggaactggagaagaccctggaagctgagagaatgaggttgggcgagttgaggaagcagcattacgtgttggctggagccagcgggtccccgggggaggaagtagcaattaggccctccaccgctcccaggtctgtgacaaccaagaaaccccctttggctcagaaaccaagtgttgcaccacgacaggatcatcagctggataagaaagacggtatttatccggcacagcttgtgaactattag

SEQ ID NO: 191033 - DNA, 753 bp, synthetic construct
  misc_feature 1..753: note = Description of Artificial Sequence: Synthetic coding sequence
  source 1..753: mol_type = other DNA
atggcccacgtgggcaccagccgggtgggcagcgtgctgagcatgtccctctccattcaccttctcgtcccaaccatgaccaagggcgagacaggaaaaccagggcaccacgaggcacccaggaccctgcaggcctttccttggacttgggcgcgcgcttccccaggcgtgagcgtggacatgagcgcaggcctgccacagagcttattgtgctggccaggagcgcccttactaccgacccctccattaccgagtgccacctacgtgggccacagtctgggattgccacgggctggatcatcagtcgggccctggttctctgggaggtgggtcggaggggctttagtgcaatggccactgggagggggaggcccaggaagtgtggccgccggactgggtggtccccttgtgagatggctgctggggggaggggcactggtgaggtggccccttggcggaggtggccctggcagtgtcgccgctggctggggaggcccatggttcggcggcagatgggtcggtggacctccaggctccgtagcagccggttgggggggaccagtaagatggccactggggggcggcggccctggctcagtggctaccggatggggcggtccctggttcggggggcgctgggtgggcgggcctcctggcagcgtcgcggcgggttgtggtggcgccctggtgcagtggccattagggggggggtctttacatagtatcccaagctttccacgcgcttggcgctag

SEQ ID NO: 191034 - DNA, 2016 bp, synthetic construct
  misc_feature 1..2016: note = Description of Artificial Sequence: Synthetic coding sequence
  source 1..2016: mol_type = other DNA
atgcggcccaagcggctgggccggtgctgcgccggcagccggctgggaccgggagacccggccgcactgacatgcgcccccagcccatctgcatcacccgcgccagaaccatcggcccagccacaggcacggggcacgggccagagagttggatcccgcgctacttcaggatcccagttcttatcagaggcacgcaccggagctcgtcccgccagtgaagcaggcgccaaagccggcgcaaggcgcccatccgctttcagcgcgatccagggcgatgttaggtctatgccagataatagtgacgccccctggacgcgcttcgtgttccaggggccctttggcagcagagcgaccggtaggggaacaggtaaggcggccgggatctggaagacccccgcggcttacgtggggcggcgcccaggcgtcagcggtcccgaaagagccgctttcatcagggaactggaagaggcactctgcccaaaccttccacctccagtcaaaaagatcacgcaagaggacgtcaaggtgatgctctacctgttggaagaacttctcccgcccgtctgggaaagcgtgacctacgggatggtgctgcaacgggagagagatcttaatactgcagcccggatcgggcagagcctggtaaaacagaactcggtgttgatggaagagaacagcaaactggaggccctactgggatccgcgaaggaagagatcctctacctgaggcaccaagtcaacctcagggatgagctcttgcagctctactctgactccgatgaagaggatgaagatgaagaagaagaggaggaagagaaggaggcagaggaagagcaggaggaagaagaggccgaagaagacctgcaatgcgcccatccatgcgacgcccccaaactgataagccaggaagctctgctacaccagcaccactgccctcaactagaagcgcttcaggaaaaactgaggttgctggaagaggagaaccatcagctccgcgaagaagctagccagctggacaccttggaggacgaggagcagatgctgatactagagtgcgtggagcagttttccgaggcatcccagcagatggcggaactaagtgaagtcttggtgctgagattagagaattacgagcgtcaacagcaagaggtagctcggttgcaggctcaggtgttgaagcttcagcagaggtgtcggatgtatggtgccgaaaccgagaaactgcaaaagcagctggctagtgagaaggaaattcagatgcagttgcaggaggaatccgtatgggtcggatcacagctgcaggacttgcgcgaaaagtacatggactgtggaggcatgctcatagaaatgcaggaagaagtgaagacacttagacaacagcctccagtgtccaccgggtccgccacacactatccatattcggtaccactggaaacgcttccaggctttcaggagactctggcagaggagttgcgcacaagtcttcgtaggatgatctccgatcctgtgtactttatggagcggaactacgagatgccaagaggggacacctcatctctgcggtacgacttcagatattcagaggatcgggaacaagtgaggggatttgaggctgaagaaggcctgatgctcgccgctgacatcatgagaggagaggattttacacctgcagaagaattcgtccctcaggaggagttaggagctgccaaaaaggttccagctgaggagggcgtaatggaggaagccgaactagtctccgaggagacagagggatgggaagaagtggaattggaacttgacgaagctaccagaatgaatgtggttacctctgcactagaagcatctggcttgggccctagccatctggacatgaactacgtgctccagcagctggcgaactggcaggacgctcattaccgacgacagttaagatggaagatgctccaaaagggcgaatgtccacacggggctttgcccgcggcatctaggacctcatgcaggagctcttgccgctag

SEQ ID NO: 191035 - DNA, 1809 bp, synthetic construct
  misc_feature 1..1809: note = Description of Artificial Sequence: Synthetic coding sequence
  source 1..1809: mol_type = other DNA
atgcggcccaagcggctgggccggtgctgcgccggcagccggctgggtcctggagaccctgcagcactgacgtgcgctccttcgcctagtgcatcacccgctcccgagcccagcgcccaaccgcaggctaggggaactgggcagcgcgtgggatcccgcgcaacctccggaagccaattcctctctgaagctagaaccggagccagaccagcctcggaggcgggggctaaagccggggcaagaagaccgtccgcgttttcagctatccagggcgatgtgcgaagcatgccagacaattccgacgccccctggacgagattcgtattccagggcccatttggctcgcgggccactggtaggggtaccggaaaggctgcaggtatttggaaaacaccggccgcctatgtgggcagaagaccgggggtgagcggcccagagcgtgcagctttcataagagagctcgaggaagccctgtgtccgaacctgcctcctccggtcaaaaaaatcacacaagaagacgtcaaggtaatgctgtatctgctagaagaagtgtgcaccgcatttctcatccagctgctccctccagtgtgggagtctgtgacatacggaatggtgctgcagagggaaagagacctgaatactgcagcccgaattggacagtcgcttgtgaaacagaatagcgtgctcatggaggagaattcgaaacttgaggcgttgctgggctctgccaaggaggaaattctatatctgcggcatcaggtcaacctgcgagatgagttgctgcagttgtattcagacagcgatgaggaggacgaggacgaagaggaggaagaggaagaaaaagaggccgaggaggaacaagaagaagaggaggcagaggaggacctgcagtgcgcacacccctgtgacgccccaaagttgatcagtcaggaagcgctccttcatcagcatcactgcccacagctcgaagctttgcaggagaaactgcgcttgctcgaggaagagaaccaccagctgagagaagaggcttcacagctggatactctggaagacgaggaacagatgctcatcctggagtgcgtggaacagttctccgaggcttcacagcaaatggcggagcttagcgaggtgctggtgcttaggctggagaattacgagagacagcaacaggaagtggcgcggcttcaggcacaggttctcaaactgcagcagaggtgcaggatggagactttgcccggtttccaggaaactctggccgaggagctccggacatctctgagacgtatgatcagcgatcctgtgtatttcatggagaggaattacgaaatgccgagaggagacaccagctctctgcggtatgattttaggtatagcgaagatagggagcaggtccgtgggtttgaggcggaagagggcctgatgctggccgccgacattatgcgcggggaggacttcaccccagctgaggagttcgttccacaggaagagctgggagccgctaagaaggttcccgcagaagagggcgtaatggaagaggcagagttagtcagcgaggagacagagggatgggaagaagtggaattggaactggacgaagctaccagaatgaacgtcgtgacatccgcactggaagccagcggtctgggcccaagtcaccttgatatgaactatgtcctccagcaactggccaattggcaggacgctcactatagaaggcagcttcggtggaagatgcttcagaaaggggagtgcccacacggtgcacttccagcagccagcaggacatcatgcaggtctagttgccgctag

SEQ ID NO: 191036 - DNA, 1860 bp, synthetic construct
  misc_feature 1..1860: note = Description of Artificial Sequence: Synthetic coding sequence
  source 1..1860: mol_type = other DNA
atgcggcccaagcggctgggccggtgctgcgccggcagccggctgggcccgggtgatccagctgcattgacctgtgccccatcaccctccgcttccccagcgccagaacccagcgcacagccacaagctcgaggcaccggtcagagggtgggatccagagcgacctctggaagtcagttcctgagcgaagccaggactggtgcaaggccagcctccgaggccggagccaaggcgggtgcacgcagacctagtgccttttcagcaattcagggggacgttcgcagcatgccggacaacagtgacgccccttggacccggtttgttttccagggcccattcggttcacgggcaacaggcagagggacagggaaagccgcggggatctggaaaacacccgccgcatatgttggccgcagacccggggtctctggtcccgaacgggcggctttcatccgagaactagaggaggcgctatgtcccaatcttccaccccctgttaagaagattacacaagaggacgttaaggtgatgctctatttgttagaggagttactgccccccgtgtgggaatccgtaacttacggcatggtgctgcagagggagcgggacctgaacaccgccgctaggattggccagagtctggtgaaacagaattccgtcctgatggaggaaaatagcaaattagaagctctgctgggaagcgccaaggaagaaattttgtacctaagacatcaggtcaatctgcgggacgagctcttgcagctgtattccgactcagacgaagaggacgaagatgaagaggaagaggaggaagaaaaggaggccgaggaggaacaggaggaggaggaggcagaagaagatcttcaatgtgcccacccatgcgatgctcctaagctgatttcccaggaagctctattacaccagcaccactgcccccagctggaggcgcttcaagaaaagttgcggcttcttgaagaagagaaccaccagctacgcgaggaagcttctcagttagacacactcgaagacgaggaacaaatgctaatactcgaatgtgttgaacagttctccgaggcgagccaacagatggccgaactcagtgaagtcctggtgttgagactcgagaattatgagcggcagcagcaggaggtggctcggctccaggctcaagttctgaagctgcagcagaggtgccgcatgtatggcgcagagacagagaaactgcagaagcagctggcctccgagaaggagatccagatgcagctgcaagaagaggagacccttcccgggtttcaggagaccctcgccgaggaacttcgcacaagcctgaggagaatgatcagcgaccctgtgtatttcatggagcggaattacgaaatgcctcgtggagatacaagctccctcaggtatgattttcggtactccgaagaccgagaacaggtacgggggttcgaagctgaggaagggctgatgctggccgccgatatcatgcgcggagaagattttactcctgcagaggagttcgtgccacaggaggagctcggcgccgccaagaaggtgccggccgaagagggagtcatggaagaagctgagttggtgtccgaagagaccgaagggtgggaagaggttgagctcgaattggacgaagccaccaggatgaacgtcgttaccagcgcgttggaagcctccggcctcgggccaagccaccttgatatgaattatgtactccagcagctagccaactggcaggacgcacactatcgaagacaattacggtggaagatgctacagaagggagaatgcccgcatggcgccctccccgccgcgagtcggacatcttgccgctcctcatgtcgctag

SEQ ID NO: 191037 - DNA, 1785 bp, synthetic construct
  misc_feature 1..1785: note = Description of Artificial Sequence: Synthetic coding sequence
  source 1..1785: mol_type = other DNA
atgcggcccaagcggctgggccggtgctgcgccggcagccggctgggaccaggtgatccagccgctctgacatgcgccccatccccttccgcgtcacccgcacctgaaccgtcggctcagccacaagcaagggggaccggccagcgtgtgggctctcgagccacctccggctctcagttcctgagcgaggcccgaactggtgccagaccagcctctgaggcaggagcaaaagcgggcgcccgcaggccttccgctttttccgcaattcaaggcgacgtgcggagcatgccggacaattcagacgcgccttggacccgattcgtcttccagggcccattcggctcacgcgccactgggaggggcactgggaaagctgcaggaatttggaagacccctgcagcgtacgtcgggcgacggccgggagtgagcggtccggagagggccgccttcatacgggaattagaggaagcactctgtcctaatcttccccccccagtgaagaagatcacccaggaagacgtgaaggtaatgctgtatctcctcgaggagcttctgcctcctgtatgggaaagcgtcacatatgggatggtcctccagagagagcgggatctcaacaccgcagcccgcattgggcagagcctggtgaagcagaacagcgtgctaatggaggagaactccaaactggaggccctgcttggtagtgcaaaggaggaaatcctgtacctcagacaccaggtgaatctgcgcgacgaactgcttcaactctacagcgacagtgatgaagaggatgaggacgaagaggaggaggaggaagagaaggaagctgaagaggagcaagaggaggaggaggcggaggaggacctacagtgtgcccacccatgcgacgctcccaagcttatcagtcaggaggccttgctgcatcagcatcactgtccccagctggaagccttacaagaaaagctgcgcctcctggaggaagagaatcatcagctacgggaggaggcctcacaacttgatacactggaggatgaggagcaaatgcttatcctggagtgtgtggaacagtttagtgaagcctcgcagcagatggccgaactcagcgaggtgttggttctccgacttgaaaactacgagcgccaacagcaagaggtagcccgtctccaggcacaggtcctcaaactgcaacaaaggtgcaggatggaaacccttccaggcttccaagaaactctggccgaggaattaagaacttcattgagacggatgatctcagatcctgtctactttatggagaggaattatgagatgccacgcggtgacacgtcaagtctcagatatgactttagatattcggaggacagagaacaagtccgagggttcgaagcggaggaaggtctgatgctcgcagctgacattatgaggggcgaggactttacacctgctgaagagttcgtcccacaagaagagttgggcgccgctaagaaagtgcctgctgaagaaggtgtgatggaggaagccgaattggtgtccgaggagaccgagggatgggaggaggtcgagttggagttagatgaggccacgaggatgaatgtggtgacgtcagctttggaagcatctggcttaggaccgtcgcatctggatatgaattacgtgctccaacagctggctaactggcaggatgcccattacagaagacagttaagatggaaaatgttgcagaagggcgagtgtcctcacggggcgctgccagcggcctctcggacaagctgccggtctagctgtaggtag

SEQ ID NO: 191038 - DNA, 837 bp, synthetic construct
  misc_feature 1..837: note = Description of Artificial Sequence: Synthetic coding sequence
  source 1..837: mol_type = other DNA
atgaagttccgggccaagatcaccggcaagggctgcctggagctgttcattcacgtctccgggacagttgcaaggctggctaaggtctgtgtgctccgcgtcagacctgactccctgtgtttcgggcctgcgggttcaggagggcttcacgaggctaggctgtggtgcgaggtacgccagggtgcctttcagcagttccggatggagggtgtgtctgaggatctggatgaaattcatctggagcttacggcagagcacctcagtcgcgccgcccggtcggccgctggggcttccagtctcaagttgcagttgacgcataagcggcgccccagcctcaccgttgctgtggagttggttagtagcttggggcgggccaggtccgtagtccatgacctcccggtaagagtgctgcccaggagagtctggcgcgattgtctgccgccctctctccgcgcctcagacgcaagcatccgccttccaagatggcgtactcttcgcagcattgtcgagagaatggcgaacgtcggaagtcacgtcctcgtggaagctaacctatctgggagaatgactctctctattgagaccgaagtcgttagtattcagtcttattttaaaaacctcggtaatcccccccaaagcgcagtgggcgtgccagagaatcgcgatcttgagagcatggtccaagttagggtcgataaccggaagctgttgcagttcctggagggccagcagatccaccccacaactgcgctgtgcaatatttgggacaataccttactgcaactcgtccttgtgcaagaggatgtctctttacagtacttcatacctgcactgtag

SEQ ID NO: 191039 - DNA, 1065 bp, synthetic construct
  misc_feature 1..1065: note = Description of Artificial Sequence: Synthetic coding sequence
  source 1..1065: mol_type = other DNA
atgaagagcctgctgctgctggtgctgatcagcatctgctgggccgatcatctgtcagacaactacaccttagaccatgatcgcgcgatacatatacaggccgagaacggccctcacctcctagtcgaggccgagcaggccaaagtgttctcacaccgaggcggcaacgtgaccttgccctgtaaattctaccgtgatccgaccgcgttcggcagtgggatccacaagatccgcatcaaatggactaaactcacttccgactacctgaaagaggtagacgtgttcgtttccatgggctatcacaagaagacgtatgggggctaccaaggcagggtgtttctgaagggaggcagtgactctgacgcctcacttgtcatcacagacctcacactggaagattacggtagatataagtgcgaagtcatcgaggggctcgaagatgacactgtagtcgtagcactggaccttcaaggagtggtgttcccttatttcccgaggctgggccggtataacctcaacttccatgaagcccaacaggcctgcttagatcaagatgccgttatcgctagttttgaccagctgtatgacgcttggaggggaggactggactggtgtaacgcaggatggttatctgacggctccgttcagtatcccataacgaagcctagagagccttgcggaggacagaatacagtccccggggtgaggaactacggattctgggataaagataagtcacggtatgacgtcttttgcttcacttctaactttaatggaaggttttactatttaatccatcctaccaaactcacatatgatgaagccgttcaagcttgccttaacgatggtgcccagatagcaaaagtaggacagatttttgccgcttggaagatcctcggatacgatcggtgcgacgcaggctggcttgctgacgggagtgttaggtaccccattagccggccgagaagacgctgtagtcccaccgaagcagccgtaaggtttgttggcttccctgacaaaaagcataaactgtacggagtgtactgctttagggcgtacaattag

SEQ ID NO: 191040 - DNA, 549 bp, synthetic construct
  misc_feature 1..549: note = Description of Artificial Sequence: Synthetic coding sequence
  source 1..549: mol_type = other DNA
atgaagagcctgctgctgctggtgctgatcagcatctgctgggccgatcatctgtctgataactacacactggaccacgacagagcaatccacatccaggaaaacggcccacatctactcgtcgaggccgagcaggccaaggtttttagccatcgaggaggaaatgtgacccttccatgcaaattttaccgcgatcccacagcgttcgggtccggcatacataaaatcaggattaagtggacaaagttaacatcagactatctgaaagaggttgacgtctttgtaagcatgggttaccacaaaaagacctacggtgggtaccagggcagagttttcctgaaaggcggtagcgacagcgacgcgagcttggtgattaccgatttgactctggaggattatggtaggtacaagtgcgaagtgatcgaaggcctggaggatgacacagtggtcgttgctttggacctccagggggtagtttttccctactttccgcgcctgggcaggtacaacctcaatttccacgaagcccagcaggcgtgcctggattag

SEQ ID NO: 191041 - DNA, 477 bp, synthetic construct
  misc_feature 1..477: note = Description of Artificial Sequence: Synthetic coding sequence
  source 1..477: mol_type = other DNA
atgaagagcctgctgctgctggtgctgatcagcatctgctgggccgaccatctgtctgataactacacccttgatcatgatagagccattcacatccaagcagagaatggaccccatctgctggtggaggctgaacaagctaaagtcttcagccaccggggaggaaacgtgactctgccctgtaaattctaccgcgaccccaccgcgttcggtagtggcatccacaaaatacggatcaaatggacaaagttaacgtctgactacctgaaggaagtagacgtcttcgtttccatgggctaccacaagaagacttacggagggtaccagggcagggtgttcttaaagggggggtcggactctgacgctagcctggtgattaccgatctcaccctggaagattacggaagatataaatgcgaagtaattgaggggctcgaagacgataccgtggtggttgcactggacctgcaggggtag

SEQ ID NO: 191042 - DNA, 600 bp, synthetic construct
  misc_feature 1..600: note = Description of Artificial Sequence: Synthetic coding sequence
  source 1..600: mol_type = other DNA
atgaagagcctgctgctgctggtgctgatcagcatctgctgggccgaccatctgagcgacaattatactttggatcacgaccgggccatccatatacaagccgagaacggcccacacctcctagtggaggctgagcaggcaaaagtgttttcccatagaggcggtaatgtgacactgccttgcaaattttaccgagaccctaccgcattcggatctggcattcataagattaggatcaaatggacgaagctcacctctgattacttgaaggaagtggatgtgtttgtgtctatgggataccacaaaaagacttacggtggatatcaggggcgagtgtttcttaagggaggctctgactcagatgcgagcctggtgatcaccgatctgacgttagaagattacggacgctataaatgtgaggtcattgagggtctggaggacgacaccgttgtggtggcgctcgatctccagggggtggtcttcccatatttccctaggttgggtcggtacaatttgaatttccatgaagcccagcaggcctgtctggaccaggacgcggtgattgccagctttgatcagctgtacgatgcttggcgatag

SEQ ID NO: 191043 - DNA, 777 bp, synthetic construct
  misc_feature 1..777: note = Description of Artificial Sequence: Synthetic coding sequence
  source 1..777: mol_type = other DNA
atgaagagcctgctgctgctggtgctgatcagcatctgctgggccgaccacctgagtgataattatacactcgatcacgaccgggcaatccatattcaggccgaaaacggacctcatcttctggtcgaggctgaacaggcaaaagtgtttagccaccggggtggcaacgtgactctgccctgcaagttctaccgcgacccaactgctttcgggagtggaattcacaagattcgcattaaatggacaaagttgacatctgattacttgaaggaggttgatgttttcgtgtccatgggatatcacaagaagacctatggcggataccaaggccgtgtgttcctgaagggagggtccgattccgacgcatccctggtcattactgatttgaccctggaggactatggaagatataagtgtgaagtcatcgaagggctagaggacgacaccgtggtggtagctctggacttgcagggggtagtgtttccgtattttcctagactggggagatacaatctgaactttcacgaagctcagcaagcatgcctggatcaggacgcagttattgcttcatttgatcagttgtacgacgcttggagagggggattggattggtgtaacgccggttggctatcagacggcagcgtgcagtatcctatcaccaaaccacgagagccctgcggcggccaaaatacagtgcccggagtgcgaaactatggcttttgggacaaagacaagagcaggtatgatgttttctgtttcacttcgaacttcaactag

SEQ ID NO: 191044 - DNA, 462 bp, synthetic construct
  misc_feature 1..462: note = Description of Artificial Sequence: Synthetic coding sequence
  source 1..462: mol_type = other DNA
atgaagagcctgctgctgctggtgctgatcagcatctgctgggccgatcaccttagcgataactacactttagatcatgaccgggcgatccacattcaggccgagaatggaccccacctgctggtagaagctgaacaggctaaggtctttagccaccggggcgggaacgtgactctgccctgcaagttttatcgggacccgaccgcatttggctccgggatccataagatcagaattaagtggaccaaattgacctctgattacctcaaggaagtggatgtttttgttagtatgggctaccataagaaaacttatgggggctaccaaggccgtgtgtttctcaaagggggcagcgatagtgacgccagcctcgtcattacagatctgactctcgaggattatggcaggtataaatgtgaggtcatagaggggctggaagatgatactgtggtggtggcttag

SEQ ID NO: 191045 - DNA, 1683 bp, synthetic construct
  misc_feature 1..1683: note = Description of Artificial Sequence: Synthetic coding sequence
  source 1..1683: mol_type = other DNA
atgttcgcccggatgagcgacctgcacgtgctgctgctgatggccctggtcggcaagacagcttgcggattctcccttatgagcctgctggagtccctcgatcctgattggacacctgatcagtacgattactcatacgaagactataaccaggaggagaatacttcttctaccttaactcacgctgagaaccccgactggtattacactgaagatcaagccgacccgtgtcaaccgaacccatgcgagcatgggggcgattgtctcgtacacggcagcactttcacctgcagttgccttgcaccattctctggcaacaagtgccaaaaggtgcagaatacatgcaaagacaacccctgtggcagaggccagtgcctgatcacacagagccccccatactacaggtgcgtttgcaagcatccatatacaggtccatcttgttctcaggtggtccccgtctgtagacccaacccttgccaaaatggcgccacctgctcaagacataaaagacgcagtaaattcacctgcgcatgtccggatcaatttaaaggcaagttttgcgaaatcgggtcagatgactgttatgttggagatgggtattcctatcggggcaagatgaatcgaactgtgaatcagcatgcatgtctctattggaatagccacttactcctgcaggaaaactacaacatgtttatggaggatgctgagacccatgggataggagaacacaatttctgtcggaatcccgacgccgatgaaaagccttggtgctttattaaagtgactaacgataaggtcaagtgggagtattgcgatgtgagcgcatgtagtgctcaggatgtggcctatccagaagaatctccaactgaaccctctaccaagttaccaggatttgactcatgcggtaaaaccgagattgccgaacgcaaaatcaaacgaatatatggcggcttcaagtccactgccggaaagcacccctggcaggcctcacttcaatcttccctaccactgactatctccatgccacagggacatttctgcggcggagcccttatacatccctgttgggttctgactgccgcccactgcacagatatcaaaacacgccacttaaaggtggtccttggcgatcaggatctaaagaaggaggagtttcacgagcaaagtttcagagttgagaagattttcaagtattcgcactacaatgaaagggatgagattccacacaacgacattgcattgctaaagctcaagcctgtggacggccattgcgctctggaatctaaatatgtgaagacagtttgccttcctgacgggtcattccccagtggaagtgagtgccacatttccgggtggggagtgacagagactgggaaagggtcgcgccaactgctcgacgccaaggtgaaattgatagcaaatacactgtgcaactcgcgccagttgtacgatcatatgattgacgactccatgatctgtgccgggaacctgcagaaacccggtcaggatacctgtcaaggcgactcaggtgggcctttgacatgcgaaaaagatggcacttactatgtctacggtatcgtgagctggggactcgaatgcggaaaacgccctggagtatatacacaggtgaccaagttcctcaattggatcaaggccacaataaagtccgaatctggtttttag

SEQ ID NO: 191046 - DNA, 534 bp, synthetic construct
  misc_feature 1..534: note = Description of Artificial Sequence: Synthetic coding sequence
  source 1..534: mol_type = other DNA
atggaggagaacttcatctgcagccggaagaccatggccctgagcagtacatggatcctatcccccaagaagaccggaccgttgacttccatgataacagcaacccggatcataattcggaagagaactcctgtcgctcacctgcccaccttgcggattctaaccggcacaacactccgtacgaaattgattcacgcatcaccaacccctgtcaatacagtgggcaccgcatccagcatgggcgccccaagccatgctgctgcttggctgctctcactgggaatttctgtccgcaagtgcaagatccgggccaggactacacacgttgctggggctaacgtcagcttaccgcgggtgcttcctactacggctgtgagcgtgaataccctgactcaggttcctgccgctcctaaatggtttttatatgcaggtcaaactcccgcccggatggggctgccagctccaggcatctctggtgatccctcaagtcctgtgccagtcccaacatcatcccgaggcaacagcgtaaagtag

SEQ ID NO: 191047 - DNA, 843 bp, synthetic construct
  misc_feature 1..843: note = Description of Artificial Sequence: Synthetic coding sequence
  source 1..843: mol_type = other DNA
atgttcgcccggatgagcgacctgcacgtgctgctgctgatggccttggtggggaaaacagcatgcggattctctctgatgagcctcctggaaagcctcgaccccgattggactcctgaccagtatgattatagctacgaagattataaccaggaggagaacaccagctcgacactaacccatgcagagaatcccgattggtattacactgaagatcaggcggacccatgtcagcccaacccctgtgaacacggtggcgattgtctcgtgcacgggagcaccttcacatgtagctgtctggctcctttttctggtaataaatgccagaaagtccaaaacacatgcaaggacaacccttgcggtcgcggccagtgccttattacccagtctcccccatattatcgctgtgtttgcaagcatccgtacactggcccgagttgcagccaggtggtccccgtctgccggcctaacccctgccagaatggggctacttgttctcggcacaaacgaaggtcaaaattcacctgtgcctgtccagaccaattcaaaggcaagttttgtgaaatcggttctgacgattgttatgtcggcgatgggtatagctaccgcggaaaaatgaacagaaccgtaaatcagcacgcctgcctctactggaattcacatctgctgctccaagagaactataacatgtttatggaagacgccgaaacccatgggataggtgagcacaacttctgccggaatccagacgccgacgagaaaccgtggtgctttatcaaagtcaccaacgacaaggtcaagtgggaatactgcgatgtttcagcttgctcagcccaagcttag

SEQ ID NO: 191048 - DNA, 1605 bp, synthetic construct
  misc_feature 1..1605: note = Description of Artificial Sequence: Synthetic coding sequence
  source 1..1605: mol_type = other DNA
atgagcctgctggagagcctggaccccgactggacccccgaccagtatgattattcttatgaggactataaccaagaagagaacacgtcatctacccttacccatgccgagaacccagactggtattataccgaggaccaagcagatccctgccagcctaacccctgcgaacacggaggtgactgcctcgtgcatggaagcacctttacctgcagctgtctggctccgttctcaggcaacaagtgccagaaagtgcaaaacacatgcaaagacaacccctgcggaaggggccagtgtctaatcactcaaagccccccttactatcggtgcgtctgcaaacatccttacacaggcccaagctgttctcaggtggtgcctgtgtgtaggcccaatccctgtcagaatggggctacctgttcccgacacaagcggcgtagcaagtttacctgcgcatgcccagatcaattcaagggcaagttctgcgaaatcgggagcgacgattgttatgttggcgacggatattcttaccgaggcaaaatgaatcggacagtgaaccaacatgcctgtctgtactggaattcccatctgttgttacaggaaaactacaacatgttcatggaggacgccgagacccacgggattggtgagcataacttctgcagaaatccagacgccgatgaaaaaccctggtgctttataaaggtgactaacgataaagtaaaatgggagtactgtgacgtatccgcctgctcagctcaggatgtagcttatcctgaagagtcccccaccgagccctctactaaattgcctggctttgactcctgcggtaagactgagatcgcagagaggaagataaaacggatttacggaggtttcaagagcactgccggaaagcacccatggcaagccagccttcagtcatctctgcccctaacgatttccatgccacaggggcacttctgcggaggagcgcttatccacccgtgttgggtcctgactgcggcacattgtactgacattaagactagacatcttaaggtcgtgctcggggatcaggatctcaaaaaggaggagtttcatgagcaatcttttcgagtggagaaaatctttaagtactcccactataatgagagagacgagatcccacacaacgatatcgcccttctgaagctgaaacctgtagatggtcactgtgccctggagagtaagtatgtgaaaacagtctgtctcccagatggttccttcccctcaggcagcgagtgccatatcagcgggtggggggtaacagagacaggaaagggctcccggcagctactggatgccaaagtcaagctaattgctaacaccctgtgtaattcccgacagctttacgaccacatgatcgacgactccatgatctgcgccggcaacctgcagaagcctgggcaggatacctgtcagggggattctggcggccccctgacgtgtgaaaaagacggcacttactacgtgtacggaatcgtctcctggggtctagagtgtggaaagagacccggggtttacacacaggtaacgaagttccttaactggattaaggcaaccataaaatcggaaagcggattctag

SEQ ID NO: 191049 - DNA, 1656 bp, synthetic construct
  misc_feature 1..1656: note = Description of Artificial Sequence: Synthetic coding sequence
  source 1..1656: mol_type = other DNA
atgctgcccctgctgctgctgcccctgctgtggggcggcagcctgcaagagaaacccgtctacgaactccaggtccagaagagcgtgacagttcaggagggcttgtgtgtcttagtcccctgcagcttcagctatccgtggagatcctggtactcttcgccccccctgtatgtgtactggttcagagacggagaaattccatattacgctgaagtagtcgccaccaataatcctgatagaagagtcaaaccagagacccagggcagattcaggctgttgggcgatgtacagaagaagaactgctccttgagcataggggatgctcgtatggaagatacagggtcatattttttcagagttgagcggggcagggatgtcaagtactcctaccagcagaacaaactcaatctggaggtcacggccctcattgagaagccagatatccactttcttgaacctttagagtctgggaggcctacacgactcagttgttcactccccgggtcatgtgaggcgggtccccctcttactttttcatggacaggaaacgcactctcaccgctagaccctgaaacaacaagatcatctgagttaaccctgacaccacgcccagaggaccacggcactaatctcacgtgtcagatgaaaagacaaggtgctcaagttacaactgagagaacagtgcagttgaatgtgtcctacgccccccaaacaatcacaatcttcagaaatgggatcgcactggagatcctgcagaatacttcgtatctgcccgtgctggaaggccaggccctgagattgctctgcgacgcgccttcaaatccacctgcccatctgagctggttccagggatctcctgcgttaaatgccaccccaatcagtaatactggcattctggaacttcgaagagtccgctccgctgaggagggcgggttcacgtgtagagcgcagcaccccctcggattcttacaaatcttcctgaatctgtccgtttactctctgccacagctcctgggcccaagttgtagttgggaagcagaagggctgcactgcaggtgtagctttcgggcgcgcccggccccttccctttgctggaggttagaggaaaaaccattggaaggaaatagcagtcaggggagtttcaaagtgaattcaagcagcgccggaccatgggcaaactcttccctgatcctgcacggagggttgtcatctgacctcaaggtcagctgtaaagcgtggaacatttatggcagtcagtccggctccgtcctcctccttcagggcaggtccaacctcggaacaggcgttgtccccgcagctctcgggggagccggggtgatggctcttctgtgcatctgtttatgtctgattttcttcctgatagttaaggcccgccgcaagcaggccgctggacgtcccgagaagatggacgacgaagatcccatcatgggcacaatcacgagtggcagcagaaaaaaaccgtggcccgatagccctggagatcaggcatccccccctggcgacgccccccctctcgaggagcagaaggaactacactacgcctcactgtccttttcagagatgaagagtcgcgagccaaaggatcaggaagccccgagcactaccgagtatagtgaaataaaaaccagcaagtag

SEQ ID NO: 191050 - DNA, 558 bp, synthetic construct
  misc_feature 1..558: note = Description of Artificial Sequence: Synthetic coding sequence
  source 1..558: mol_type = other DNA
atgttccgggaggtgttcgccgacgaggaccccgccacctacgtgtgggatggaaactaccatcagccgtgggagcccgccgccgccggtgccgttggggccggcgcatatagagaggtcgaggcagaagacccgggtaggttggccgtggaagcactggtgcgtacgcggcgctgcgtgtgcgtggcccagaggtggggaggaaaacgggaagtgatgtatactgcctttaaagccctgggagactctgtggactacgtgcaattttgcagagtctgcgattccgataccaggctggaccccatggcactcttagagttggtccgggtgcttgatgaggaccccagagtaggggccgtggggggagatgtaagaattttgaaccccctcgactcatgggtttccttcctatcatctctacggtactgggtcgcattcaacgtcgaacgggcttgccagagctactttcattgcgtaagctgcatctccggtccccttggtacacccccagggccagcggccacccagcgccgtccacgacctagctgcggcggctag

SEQ ID NO: 191051 - DNA, 645 bp, synthetic construct
  misc_feature 1..645: note = Description of Artificial Sequence: Synthetic coding sequence
  source 1..645: mol_type = other DNA
atgttccgggaggtgttcgccgacgaggaccccgccacctacgtgtgggacgggaattatcatcaaccttgggaacctgccgccgctggggcagttggcgcaggggcataccgcgaagtggaagctgaggaccctggtcgtttggctgtcgaagcgcttgtgaggactcgccgttgtgtgtgcgttgcacagaggtgggggggtaagagagaggttatgtacaccgccttcaaagccctgggggacagtgttgactacgtccaggtgtgtgattctgacactagactggacccaatggctctgttagagctagtgcgggtactggacgaggacccccgtgtgggcgccgttggtggcgatgtgcggattctcaacccactggatagctgggtcagcttcctcagcagcctgcgctactgggtggctttcaatgtggagagggcctgtcagtcttactttcactgcgtgtcctgtatctccggacccctggagtcctgtccaggcccacgcgagcatgccatgatgccgtcctttctggctcctgtgcaggtgcacttacaggtgcctctcctgttgcgcgacgcactcgtgctgccggccgtggctgagcccgccgacaccctggtgcaggtggtgctcccatag

SEQ ID NO: 191052 - DNA, 1734 bp, synthetic construct
  misc_feature 1..1734: note = Description of Artificial Sequence: Synthetic coding sequence
  source 1..1734: mol_type = other DNA
atgcggcaggacgcccccaagcccacccccgccgcctgccggtgctcagggctagccaggagggtgttaacaatcgcctttgcccttctgatcttagggctcatgacatgggcctatgccgctggggtgccccttgcctcagatcggtacggattacttgcttttggactgtacggcgcgtttctgtcagcacacctggtggcccagtcactgtttgcctatttagagcaccggagggtcgctgccgcggccagggggcccctggatgcagctacagcaaggtctgttgccctgaccatttctgcataccaggaggaccctgcttatttgaggcagtgtcttgcatctgcccgagccctcctctaccctagggctaggctacgagtgttaatggtagttgacggaaaccgagccgaagatctctacatggtagacatgttcagagaggtctttgcagacgaagatcctgccacatatgtatgggatggaaactatcaccaaccttgggaacctgcagccgctggagcagttggagctggggcctaccgcgaggtggaagcagaagatcctggcaggctcgccgtggaggcgctggtgagaacgcggagatgcgtttgtgtggcccagagatggggcggtaagcgagaggtgatgtacacagcattcaaagctttgggggacagcgttgactacgtacaagtgtgcgatagtgacaccaggttggatcctatggcacttctcgagctggtgagagtgctggatgaggacccccgcgtaggtgcagtgggcggagacgtccgaatcctcaaccctctcgactcgtgggtgtcatttctaagcagccttagatactgggtggctttcaatgtggagcgggcttgccaatcctactttcattgcgtttcttgcattagcggccctctaggcttgtacaggaataacctactgcaacagttcctggaagcatggtacaatcagaagttcctagggacccactgtaccttcggagacgaccgccatttgacaaataggatgctgtcaatgggctacgccactaagtacacatctaggagccgctgttactctgaaactccatctagtttcctgaggtggctgtcccagcagaccagatggtccaaatcatatttccgggaatggctgtataacgccctatggtggcaccggcaccatgcctggatgacttatgaggccgtggtatctggtttgtttcctttcttcgtcgccgcaaccgtgctgcgcctgttttatgctgggcggccttgggctctgctttgggtactgttgtgtgtccagggggtggccctggccaaggctgcttttgctgcatggttgcggggctgtctaagaatggtacttctatccctgtacgccccactgtacatgtgcggcctcttgccagctaaattcctggctctagtgacgatgaaccagagcggatgggggacctccgggcgaagaaaattggctgcgaattacgtgccattactccccctagcattgtgggccttgctgctgctgggcggtctggtgaggtccgtcgcacatgaagcccgtgcagattggagcgggccatcccgcgcagccgaagcctatcaccttgccgccggggctggcgcctatgtcggatattgggttgcaatgttaacactatattgggtgggagtcaggagactgtgcagaagaagaacggggggttacagggtgcaagtttag

SEQ ID NO: 191053 - DNA, 1659 bp, synthetic construct
  misc_feature 1..1659: note = Description of Artificial Sequence: Synthetic coding sequence
  source 1..1659: mol_type = other DNA
atgcactgcgagcggttcctgtgcatcctgcggatcatcggcaccactctgttcggggttagcctgctgctgggcattacggccgcatatatcgtgggttaccaatttatacagactgacaattactacttttcatttggcctgtatggagccttcttggcaagccaccttattatccagagtctgttcgccttcctggagcacagaaaaatgaaaaaatcgctcgagacccccatcaaactgaacaaaactgtcgccctctgtattgctgcctatcaagaggacccagattatctcaggaagtgtctgcagtccgtgaaacgcctgacgtatccaggaatcaaagtagttatggttatcgacggcaatagtgaggacgacctctatatgatggatatttttagcgaagtgatgggcagagataaatctgccacttacatctggaagaataactttcacgagaaagggcccggtgaaacagacgagagccacaaagagtcatcccagcacgtcacccagttggtgctctccaataagagtatctgcatcatgcagaagtggggcgggaagagagaggtgatgtataccgcatttcgcgctttggggaggagtgtagattacgtacaggtgtgcgatagtgacacgatgctggaccctgcttcatctgtcgagatggtgaaggtcctcgaggaggaccctatggtcggaggcgtgggcggcgacgtgcagattctcaacaaatacgactcatggatcagctttctgtcctctgtccgctattggatggctttcaacatcgagagggcgtgtcagtcctacttcggatgtgtgcaatgcattagcgggcccctcgggatgtaccgaaattctctgctgcatgagtttgtggaagattggtataatcaggagttcatgggcaaccaatgcagttttggagacgatcgacatctgactaaccgggtgctgagcctcggatacgcgacaaaatacacggcgcgatccaagtgcttgaccgagaccccaatcgaatatcttcggtggttgaaccaacagacaaggtggtctaagagttactttcgggagtggttgtataatgccatgtggtttcataagcaccacctgtggatgacctatgaggctattatcacaggattctttcctttctttctgatcgcaacggtcattcagttgttctatcgagggaaaatttggaacatcctccttttcctcctgacagtacagctggtcggactgataaagagttctttcgcttcctgcctccggggcaatatcgtaatggtattcatgtcactttatagcgttctgtacatgtccagtcttttgccagccaagatgttcgctatcgccactataaataaggccggctgggggacctccgggcgtaagaccatagtagttaacttcattggactaattcccgtaagcgtctggttcacgatcttactgggtggagtaatcttcacaatctacaaagagtctaagaggcctttctccgagtcaaaacagacagtactgattgtaggcacactgctgtacgcctgttattgggtgatgttactcactttgtacgtggttctgatcaacaagtgcggtcggcgaaaaaagggtcagcaatacgatatggtgctcgacgtgtag

SEQ ID NO: 191054 - DNA, 951 bp, synthetic construct
  misc_feature 1..951: note = Description of Artificial Sequence: Synthetic coding sequence
  source 1..951: mol_type = other DNA
atgcactgcgagcggttcctgtgcatcctgcggatcatcggcaccacactctttggggtttctttgctgctgggaattacggccgcatatattgtgggttatcagttcattcaaaccgataattattacttcagcttcgggctgtatggcgctttcttagcctcccaccttatcatacaatctctgttcgcttttctcgaacatcgcaaaatgaaaaaatccctagaaacgcccatcaaactcaataaaaccgttgctctgtgtattgcggcttaccaggaggaccccgattacctgcgtaaatgcctgcagtccgtaaagagattgacctacccaggcatcaaggtagtgatggtcatcgatggcaactcagaagacgacctgtatatgatggatatattctcagaggtcatggggagagataagagcgctacgtacatctggaaaaacaactttcatgagaagggtcccggggaaacagacgagtctcataaggagtcgtcacagcatgtgacgcagctcgtgctgtcgaataaatccatctgcatcatgcagaagtggggcggcaaaagagaggtgatgtacacagctttccgggcgttgggcaggtccgttgactacgtgcaagtttgtgacagcgacacaatgttggatcccgcgtcctcagtggaaatggtgaaggtactcgaagaggacccgatggttggaggcgtcggaggagatgtacaaattctcaacaagtatgattcttggatctcattcctatcttccgtgagatactggatggcttttaatatcgaaagggcatgtcagtcatattttggctgcgtgcagtgcatttccggacccctaggaatgtataggaacagcttgctgcacgtactgaccttcgccgtcacgcacaatacactggtgcccctgggggctgtgcagtattgtgggattcggtag

SEQ ID NO: 191055 - DNA, 1389 bp, synthetic construct
  misc_feature 1..1389: note = Description of Artificial Sequence: Synthetic coding sequence
  source 1..1389: mol_type = other DNA
atggcccaggtgagcatcaacaacgactacagcgagtgggacctgtccaccgatgcgggcgagcgagcgaggctcctgcaatcaccatgcgttgatacagcgcctaagtctgaatgggaagcctctccaggaggactggacagagggacaacttccactctgggagcgatctttatcgtggtcaatgcctgtctcggagctggcctgctcaatttccctgcagccttttcaaccgccgggggagtggccgctgggatcgccctgcaaatggggatgctggtgtttatcattagcgggttggtaatcctggcatactgttcacaggctagcaatgaaaggacctaccaggaagtcgtgtgggcagtttgcggcaagctcactggcgtgttatgcgaggtagccattgcagtatacacctttggcacctgtatcgcctttctcattattattggagaccagcaggataagattatcgctgtgatggcgaaagagcccgaaggcgccagcggcccctggtacaccgacagaaaattcactatctctttgacagccttcctgttcatcttgccgctgagtattcctcgcgaaatcggattccagaaatacgcctcgtttctgagcgtcgtaggtacttggtacgttacggcgatagtaatcataaaatacatctggcccgacaaggagatgactccaggtaacatcctgacacggccagcctcgtggatggcagtgttcaatgcgatgccaactatttgcttcggtttccagtgccacgtctcaagcgtacccgtgtttaacagtatgcagcagcctgaggttaaaacgtggggcggagtggtgaccgccgcaatggttatcgctttggctgtctacatggggacaggtatttgtggtttcctgactttcggtgcggctgtggatcccgatgtgcttctgagctatccgtccgaagatatggctgtagcagtagcccgtgcctttatcatcttgagcgtgctcacatcctatccaattcttcacttttgcggtagagcagtagttgagggcctgtggcttagataccagggcgtgcctgttgaggaggacgtcggcagggaacgcagacgccgagtactgcaaactctggtgtggtttcttctgacactcttactagccctgttcatacctgatatcgggaaagtgataagcgtcatcggggggctggcggcatgttttatctttgtgttccctggtctctgcttgattcaggccaagctgtcggaaatggaagaagtcaaaccggcttcttggtgggtgctggtttcatatggcgtgttactcgtgacacttggtgcattcattttcgggcaaacaacagcaaatgcaatttttgtcgatctgcttgcctag

SEQ ID NO: 191056 - DNA, 1662 bp, synthetic construct
  misc_feature 1..1662: note = Description of Artificial Sequence: Synthetic coding sequence
  source 1..1662: mol_type = other DNA
atgcccgtgcagctgaccaccgccctgcgggtggtgggcaccagcctttttgccctggcagtcctgggagggatcttggccgcctacgtgactggctaccagttcatccacaccgagaaacactacctcagtttcgggctctatggcgcaatcctgggtctgcacttactcattcagagtctattcgctttcctggagcatcggcgcatgaggagggccggacaggctctgaaactgcctagcccccggcgggggtcagttgcactgtgcatcgcggcttatcaagaggacccagattacctgaggaaatgcctcagatctgcccagcgcatttcttttcctgacttaaaagtggtgatggtggttgacggcaacaggcaggaggacgcttatatgctggacatctttcacgaagtcctgggcggcacagagcaagccggcttttttgtgtggaggtcaaacttccatgaagctggagagggcgaaaccgaggccagcctgcaggagggtatggatcgagtcagggatgtagtgcgggcgtctacatttagctgcattatgcagaagtggggcggcaagagagaagtaatgtacaccgcattcaaggcacttggggatagcgtggactacatccaggtgtgcgacagtgataccgtcctggacccggcatgtaccattgagatgctgcgtgtgctggaagaggacccccaggtgggaggagttggtggagacgtgcaaattctgaacaagtacgacagctggatctctttcttgtctagcgtgagatattggatggcattcaatgtggaacgggcctgccaatcgtatttcgggtgtgtgcagtgcatcagtgggcccctaggcatgtatcggaattcactgctgcagcagttcctcgaagactggtaccaccagaaatttctgggctctaagtgcagctttggcgacgatcgtcacctaactaatcgcgttctttccctcgggtaccgcactaaatatactgctcgaagtaagtgtctgaccgaaacccctaccaagtatttgagatggctaaaccaacaaacacgttggagcaagtcttattttagagagtggttgtataactctctttggtttcacaagcatcacctctggatgacctatgagagtgtggtgacaggcttttttccgtttttcctgatcgccaccgtcatccagctgttttatcggggtcggatatggaatatactcctgttcttactaacagtgcaactggttggcattattaaagctacgtatgcatgtttcttgcggggcaatgcagaaatgatattcatgtccctctactccctcctgtatatgtcatcattgttgccagccaaaatcttcgcaattgcgaccattaacaaatcaggctggggtacatctgggcgaaaaacgatcgtggtcaatttcatcggacttatccccgtgagtatttgggttgccgtcctgctgggtggactggcctataccgcgtactgccaagacctgttctccgaaacagaattggcctttctggtgagcggagccatcttgtacgggtgttattgggttgcattgctcatgttgtatctggccattatcgctagacggtgcggaaaaaaacctgagcaatacagcctggcctttgcagaagtgtag

SEQ ID NO: 191057 - DNA, 1308 bp, synthetic construct
  misc_feature 1..1308: note = Description of Artificial Sequence: Synthetic coding sequence
  source 1..1308: mol_type = other DNA
atggccgcccacctgctgcccatctgcgccctgttcctgaccctgctggacatggcccaggggttccggggacccttactgcctaaccgaccttttacaaccgtatggaatgcaaacacccagtggtgcttagagagacacggggtcgacgtggatgtcagcgtgttcgacgtcgtggcaaatccaggccagacgtttcgaggaccagatatgactatattttacagcagccagctgggcacatacccgtactacacaccaacaggcgagcctgtctttggcggcctgccacaaaacgcatcactgattgcacatttagctagaactttccaggacatccttgccgctattccagcaccagatttctccggtctggccgtcatcgactgggaggcttggaggccccgctgggccttcaactgggataccaaggacatttacagacagagatcccgcgctttggtacaggcccaacaccctgactggcctgccccgcaggtagaggctgtggcgcaggaccaattccagggcgccgctagggcatggatggccggcaccctgcagctggggagagccctgaggccacgaggtctatggggcttctatgggttccccgactgttataattatgacttcctgtcccccaattacacgggtcagtgcccttccggcatcagggcacagaacgaccagctgggatggttgtggggacaaagtcgggctctgtatccaagcatctatatgcctgccgtgctggagggcacagggaagtcccaaatgtatgtgcaacatagagttgccgaggcgtttagggtcgctgtggctgccggggaccctaacctgcccgtgctcccttatgtgcaaatcttctatgataccactaatcactttctgccgctggatgagctcgaacattcattgggggaaagcgcagcccagggcgcggctggagtcgtgctttgggtttcctgggagaacacacgcaccaaagagtcatgtcaggccatcaaggagtatatggatacaaccttgggcccgtttattctgaacgtgacgagcggcgcactgctttgcagtcaggcgctctgtagtgggcatggacgctgtgtccggcggacttcccaccctaaggcccttttattgctgaaccctgcatcctttagcattcagctcacccccggagggggccccctgtctctgcgaggtgccttgagcctggaggatcaagcccagatggccgtggagttcaaatgtcgatgctatcccggttggcaagcgccatggtgtgagcggaaatctatgtggtag

SEQ ID NO: 191058 - DNA, 1308 bp, synthetic construct
  misc_feature 1..1308: note = Description of Artificial Sequence: Synthetic coding sequence
  source 1..1308: mol_type = other DNA
atggccgcccacctgctgcccatctgcgccctgttcctgaccctgctggacatggctcaaggcttccggggcccgctcctccccaatcgcccttttacaaccgtgtggaacgctaacacccagtggtgtcttgagagacacggtgttgacgtcgacgtgagtgttttcgatgtggtggccaaccccgggcagacgttccgaggtcccgacatgacaatcttctatagcagccagttggggacatacccgtactacacccctaccggggaaccagtatttggaggcctgcctcaaaatgctagcctcattgctcacttagcaaggaccttccaagatatactggccgccatccctgccccagattttagcggacttgccgtgattgattgggaggcttggcgccccagatgggcttttaactgggataccaaggatatttacagacagcgaagccgcgccctggtgcaggcgcagcacccggattggcccgccccacaggtagaagctgtggcacaggaccagtttcagggtgccgctcgcgcatggatggccggaactctgcagctcggacgagccctgcgtccccgcgggctttggggattctatggcttccctgactgttacaattatgactttctgagtcctaattacaccggccagtgtccctccggaatcagggcccagaacgaccagcttgggtggctttggggacagtctcgtgccctatatccatccatctatatgcctgctgtgctcgaaggaactgggaaatctcaaatgtacgtccagcatcgagtggcggaggctttcagggtcgccgttgccgctggggatcctaatctgcccgtactgccttacgttcagatattttatgataccacaaaccacttcttgccactggatgaactcgagcattctctgggagagtctgctgctcaaggcgctgccggcgtggtcttgtgggtcagttgggaaaatacacggacaaaagaatcctgtcaggcgataaaagagtacatggacacaacactaggaccatttattcttaatgtgacttcaggtgctctgttatgttcccaagcgctgtgtagcggtcatggcaggtgtgtacggagaacatcacatccgaaagcactcttactactgaaccctgcctcgttctctatccagctgactccaggaggaggcccactcagccttcggggggccctgagcctggaggaccaggcccaaatggccgtggagtttaagtgtcgctgctatcccggatggcaggcgccctggtgcgagaggaagagcatgtggtag

SEQ ID NO: 191059 - DNA, 1218 bp, synthetic construct
  misc_feature 1..1218: note = Description of Artificial Sequence: Synthetic coding sequence
  source 1..1218: mol_type = other DNA
atggccgcccacctgctgcccatctgcgccctgttcctgaccctgctagatatggcccagggcttccggggacctctgctgcctaataggccctttacgactgtttggaacgctaatacgcagtggtgcctagagcgccatggggtcgatgtggatgtgtccgtgttcgacgtggtagccaaccctggccagacgtttaggggtcccgatatgacgattttctatagctctcaactgggaacatatccttactacaccccaaccggagaacccgtttttggcggcttaccgcagaacgcatcgctaatcgcccatctggcacgcacgtttcaggatatcctggctgccatccccgccccagatttctccggcctagcggttattgattgggaagcctggagaccaaggtgggccttcaattgggacacaaaggacatctatcggcagagatcgcgcgctttagtgcaagcacagcaccccgactggccagcacctcaggtagaggctgttgcccaggaccaatttcagggagctgcacgtgcctggatggccggaaccctccaattgggcagggccctgcgccctcgcggattatggggattctatggctttcctgactgctacaattatgatttcctaagtcctaactatacaggtcaatgcccctccggaattcgggcccaaaatgatcagcttggctggctatggggccagagcagagctctgtatccgtcaatctacatgcccgccgtgctggagggaacaggaaagtctcagatgtacgtccagcatagggtcgccgaggccttccgggttgctgtggctgctggagaccctaatcttcccgttctaccttatgtccagatcttttatgacacaacaaaccacttcttgccactggagagctgtcaagcaattaaagagtatatggacactaccctcgggcctttcatattaaacgttacctccggagcactgctgtgctcccaggcattgtgctcgggacacggcagatgcgtaagacgaacatcccatcccaaggcccttctcctgctaaatccagccagctttagcatccagcttacgccaggtggaggcccacttagtctgagaggtgccctctcgctcgaggaccaggcccagatggctgtagaattcaagtgcaggtgctatcccggatggcaggccccttggtgtgagagaaaatccatgtggtag

SEQ ID NO: 191060 - DNA, 1308 bp, synthetic construct
  misc_feature 1..1308: note = Description of Artificial Sequence: Synthetic coding sequence
  source 1..1308: mol_type = other DNA
atggccgcccacctgctgcccatctgcgccctgttcctgaccctgctcgacatggcacagggatttagaggacccctgctgcccaatagaccctttactactgtctggaacgcaaatactcagtggtgcctggaaagacatggcgtggacgtcgacgtgagtgtgttcgacgtggtggcaaatccggggcagaccttcagggggccagacatgacaatcttttatagttctcagctggggacttacccttactacacgccaacaggagagcctgtctttggggggctcccgcaaaacgcctctctcattgctcatctggctcggacatttcaagatatcttagccgccattccagcaccagatttcagcgggctggcggtgattgattgggaagcctggcggcctcgctgggcttttaactgggacacaaaggatatctatcgacagcgctcccgtgcactcgttcaagctcagcacccggattggccagctccccaggttgaggctgtggctcaggatcaattccaaggggccgcccgggcgtggatggctggcactctgcaactgggccgagctctgagaccacggggcctctggggcttttacgggttccccgattgttacaactatgattttctttcgccaaactataccgggcaatgccctagtggtatcagagcccaaaacgaccagctagggtggctgtggggccagtcaagagccttataccccagtatctatatgcctgctgtgttagagggaaccggaaaatctcaaatgtatgtgcagcacagggttgccgaggctttccgagtggccgtggctgcaggggacccaaatctgcccgtcctcccctatgtacagattttttatgatacaaccaatcattttctgcccttggatgaacttgaacacagtctgggtgaaagtgctgcacagggcgccgccggggtggttctctgggtgtcttgggagaataccagaactaaggagtcatgccaggccataaaggagtacatggatacgacccttggtccgtttattctaaacgttacctctggtgctctactgtgtagtcaagccctttgcagtggtcacggccgctgtgtccgacgcaccagtcacccaaaggctttactgctccttaatcccgccagtttttcgattcaattaacccctggcggagggccattatctctaagaggggccttaagtctagaggatcaggcacaaatggctgtggaatttaaatgccgctgctaccccggctggcaggcgccctggtgcgaacggaagtccatgtggtag

SEQ ID NO: 191061 - DNA, 312 bp, synthetic construct
  misc_feature 1..312: note = Description of Artificial Sequence: Synthetic coding sequence
  source 1..312: mol_type = other DNA
atggccgcccacctgctgcccatctgcgccctgttcctgaccctgcttgacatggcacagggatttagaggacctctgcttcccaaccgcccttttacaaccgtgtggaacgccaacacccagtggtgcctcgagcggcatggggttgacgtggatgtcagtgtgttcgacgtggtcgccaaccctgggcaaacatttcgcggtcccgatatgactatcttctattcaagtcagctgggtacatacccctattatactcctactggggagccagtgtttggtggtttgcctcagaacgcctcactaatctag

SEQ ID NO: 191062 - DNA, 531 bp, synthetic construct
  misc_feature 1..531: note = Description of Artificial Sequence: Synthetic coding sequence
  source 1..531: mol_type = other DNA
atgtacgtgcagcaccgggtggccgaggccttccgggtggccgtggctgcaggggacccaaatctaccagtgctgccatatgtccaaatcttttatgatacaaccaaccacttcctgcctttggacgagctggagcatagcctaggcgaatcagcggcgcagggggccgccggcgtcgtcctgtgggtctcttgggagaatacaagaacaaaggagtcttgtcaagcgatcaaggaatacatggataccacattagggccctttatcctcaatgttacttcaggcgccctcctttgtagccaggctctatgctctgggcacgggagatgtgtaagacgcacttctcaccccaaagccctgctcctgctgaacccagcgtcattttccatccagttgacgccgggaggcggtccattgtctttgagaggcgccctcagcttagaagaccaggctcagatggcagtggagtttaaatgtaggtgttaccccggctggcaagccccttggtgtgagagaaagtctatgtggtag

SEQ ID NO: 191063 - DNA, 210 bp, synthetic construct
  misc_feature 1..210: note = Description of Artificial Sequence: Synthetic coding sequence
  source 1..210: mol_type = other DNA
atggccgcccacctgctgcccatctgcgccctgttcctgaccctgctggacatggcccaaggtttcagagggccattactgccaaataggccattcacgacggtgtggaatgcaaacactcagtggtgtctcgagagacatggggtggacgtggatgtgagtgtattcgatgtggtagctaaccctggacaaacattccggggaccatag

SEQ ID NO: 191064 - DNA, 762 bp, synthetic construct
  misc_feature 1..762: note = Description of Artificial Sequence: Synthetic coding sequence
  source 1..762: mol_type = other DNA
atggccggcaccctgcagctgggccgggccctgcggccccggggcctgtggggattttatgggttcccggactgctataattatgactttctcagtcccaactacaccgggcagtgcccctccggcatcagggctcagaacgaccagctggggtggttgtggggtcaatcccgcgctctgtacccatccatctatatgccagctgtgctggagggtaccggtaagagccagatgtacgtgcagcaccgagttgccgaagcattccgtgtagccgtggctgcaggggacccaaatctgcctgttcttccatatgtacaaattttctatgatactactaaccactttctccccttagacgagctggaacactctttgggggaaagcgctgcacagggagccgccggcgttgtgttgtgggtgagctgggagaatactaggaccaaggagtcatgtcaggccatcaaggaatacatggacaccaccctgggccccttcatcttaaatgtaacatctggagccctcctgtgctctcaagcgctgtgctccgggcatggaaggtgcgtccgtagaacttcccatcccaaggcattgctgctgctgaacccagcgagcttctccatccagcttaccccgggtgggggcccactcagtctgcgtggggcgctgtccctggaggaccaggcacagatggcagtcgaattcaagtgtcgatgctatccaggctggcaggccccgtggtgtgagaggaaatctatgtggtag

SEQ ID NO: 191065 - DNA, 1422 bp, synthetic construct
  misc_feature 1..1422: note = Description of Artificial Sequence: Synthetic coding sequence
  source 1..1422: mol_type = other DNA
atgcgggccggccccggccccaccgtgaccctggccctggtgctggcagtcagctgggccatggagcttaaaccaaccgccccccccatttttactggacgccccttcgtagtggcttgggatgtgcctacacaggactgtggtcctcgactgaaagtccccctggacctcaatgctttcgacgtccaagccagccccaacgaagggttcgtcaaccaaaatatcaccattttttaccgggaccgccttggcctctacccccgattcgactctgccggacgctcggtgcacggcggtgtcccccagaacgtgagtctatgggctcatcggaaaatgctgcagaagcgcgtcgaacattacatacgtacacaagagagcgccggcttggctgtgattgactgggaagactggcgcccagtctgggtgcgcaactggcaggacaaggatgtttatcgaaggctgtcccgtcaattggttgcctcacgtcaccctgactggccccctgacagaatcgtgaaacaggcccagtacgaattcgaattcgccgcccaacagttcatgcttgaaacgctgcgctatgttaaggccgtcaggccccgccatctgtggggtttctacctctttcccgactgctacaaccatgactatgtccagaactgggagtcctataccggtcgctgtcctgatgtcgaagtggcaaggaacgaccaactggcctggctgtgggctgagagcacagctttgtttcccagtgtctacctcgacgagacacttgcctcttcacggcacggcagaaatttcgtttctttcagagtgcaggaagctctgagggtcgcccgaacgcatcatgctaaccacgctctccctgtctatgtctttactcgaccaacctacagccgcagactgactggcctgtctgagatggaccttatttccactatcggcgagagcgctgcactgggggcagccggggtgatactctggggggacgccggttatactacgagtacagagacctgccagtacctcaaagattacctgaccagactgttagttccatacgtggtgaacgttagctgggcaacccagtactgtagtcgtgcgcagtgtcacgggcacgggcgatgcgtccggagaaacccatccgcgagtacatttcttcatctctccaccaacagtttcagactggtccctgggcatgccccgggcgaaccacaattgagacctgtcggcgaactgtcctgggccgacattgaccacctccaaacgcactttcggtgtcagtgttacttaggttggagcggggagcaatgccagtgggatcaccgacaagcagctggcggagccagtgaggcctgggcgggtagccatttaacttccttactagcactggccgcgctggccttcacatggaccctgtag

SEQ ID NO: 191066 - DNA, 1422 bp, synthetic construct
  misc_feature 1..1422: note = Description of Artificial Sequence: Synthetic coding sequence
  source 1..1422: mol_type = other DNA
atgcgggccggccccggccccaccgtgaccctggccctggtgctggctgtgagttgggccatggaactgaagccaaccgccccccctatttttaccggccgcccatttgtcgtggcttgggatgttccaacccaagactgcgggccaaggctgaaagtccccttggacctaaatgcctttgatgtccaggcttctcccaatgaggggtttgttaaccagaacattacaattttctatcgagacaggctcgggctttaccccagattcgatagcgccggcagaagcgtgcatgggggggtgccccaaaacgtatccctttgggcccatcgtaaaatgctccagaagagagtggaacactacattcggactcaggagtccgctggactcgctgtcatagactgggaagactggagacccgtctgggtgcggaactggcaggacaaggacgtgtacagaagactgtctcgtcaactggtggccagtcgtcacccagactggcctcctgatcgtatcgtgaaacaagcccagtatgaatttgaattcgcagcccagcagttcatgttggaaaccctcaggtacgtcaaagcagttaggccacgccacctgtggggtttctatctgttccctgactgctacaatcatgattatgtgcagaactgggaatcctacactgggaggtgccccgacgtggaagtggctcgcaatgatcagctcgcttggttgtgggctgaatccaccgctctcttcccctccgtttatttggacgagaccctagcctcctcgcgacatggtcgaaattttgtctcttttcgagttcaggaggctcttcgggtagccaggactcatcacgccaaccacgccctacccgtgtacgtgtttacacgacctacgtacagtagaagacttacgggacttagcgagatggacctcatcagtactatcggtgagtcagccgcattaggggccgctggggtaatcctatggggcgacgctggctataccacctccacggaaacctgtcagtacctaaaggactacttgactcgcctgttggtgccatacgtcgttaacgtgagttgggccacccagtattgttccagggcccagtgtcatggacatggaaggtgcgtccggcggaacccctctgcctctacgtttctgcatttaagcaccaacagcttccggctggtgcctggtcacgcacctggcgagccacaattaaggcccgtcggtgaactgtcctgggctgatatcgatcatctgcaaacacattttagatgccagtgctatctgggctggagcggtgagcagtgtcaatgggaccaccgtcaggcagcgggcggcgcttctgaagcttgggccggctctcacctgacaagcctgctcgctctagccgcactggcatttacttggacgttatag

SEQ ID NO: 191067 - DNA, 147 bp, synthetic construct
  misc_feature 1..147: note = Description of Artificial Sequence: Synthetic coding sequence
  source 1..147: mol_type = other DNA
atgcgggccggccccggccccaccgtgaccctggccctggtgctggcagtatcttgggccatggagctcaagccgacagctccacccatttttaccgggaggccatttgtggttgcctgggacgtccccacacaggactgtggctag

SEQ ID NO: 191068 - DNA, 354 bp, synthetic construct
  misc_feature 1..354: note = Description of Artificial Sequence: Synthetic coding sequence
  source 1..354: mol_type = other DNA
atgcgggccggccccggccccaccgtgaccctggccctggtgctggctgtctcatgggctatggaacttaagcccaccgcgccacccatatttacaggaaggccttttgtcgtggcctgggacgtacccacacaggattgcggaccgagactgaaagtgcctctggacctaaacgcattcgatgttcaggcgagtccaaatgagggctttgtcaatcagaacatcactatattctatagagacagactaggcctttacccacggttcgatagtgcagggcgatcagtccatgggggcgttcctcaaaacgtttcactttgggcccataggaaaatgctccagaagagggtgtag

SEQ ID NO: 191069 - DNA, 246 bp, synthetic construct
  misc_feature 1..246: note = Description of Artificial Sequence: Synthetic coding sequence
  source 1..246: mol_type = other DNA
atgcgggccggccccggccccaccgtgaccctggccctggtgctggccgtatcatgggccatggagctgaaacccacagcgcctcctatctttacagggagaccgtttgtggtggcctgggacgttcctacgcaggactgtggacctcggctgaaagttccgctggacctgaatgcctttgatgttcaagctagcccaaacgaaggatttgtaaaccaaaacatcacaatcttttatagagattag

SEQ ID NO: 191070 - DNA, 231 bp, synthetic construct
  misc_feature 1..231: note = Description of Artificial Sequence: Synthetic coding sequence
  source 1..231: mol_type = other DNA
atgcgggccggccccggccccaccgtgaccctggccctggtgctggcagtgtcttgggccatggagttgaagcccacagctccacccatatttacaggcagacccttcgtggtggcatgggatgtccccacccaggattgcggtcctcggctcaaagtccctctcgacctgaatgcctttgatgtgcaggcttctccaaatgagggatttgtgaatcagaacattacctag

SEQ ID NO: 191071 - DNA, 1422 bp, synthetic construct
  misc_feature 1..1422: note = Description of Artificial Sequence: Synthetic coding sequence
  source 1..1422: mol_type = other DNA
atgcgggccggccccggccccaccgtgaccctggccctggtgctggccgtcagctgggcgatggagctgaaacccaccgctccacccattttcactggaagacccttcgttgtggcctgggacgttcctacccaggattgcggccctcgtctcaaggtcccactggacctgaatgcctttgatgtccaggcgtctcctaacgaagggtttgttaaccagaacattaccatcttctaccgtgatcgtttaggtctctaccctcgattcgacagtgcaggaaggtccgttcacgggggagtcccccagaacgtgagcttgtgggcccatcgaaagatgctgcagaaacgtgtcgagcactacattagaactcaggaatctgccggccttgctgtgatcgattgggaagactggcgtcctgtgtgggttagaaactggcaggataaggacgtctatcggaggctctctcgacagctagtagcttccaggcatcccgattggcccccggaccgtatcgtgaagcaggcacaatacgagttcgagttcgctgctcagcagtttatgcttgaaacactgcgctatgtaaaggccgtgagacctagacacctgtggggattctatctcttcccagattgctataatcacgattatgtgcagaactgggaaagctacaccggtcgctgcccggatgtggaggtagcacgcaacgaccagctggcctggttgtgggccgagtcaacagctctctttccctctgtctacctggacgaaaccctagctagttcccggcatggcaggaactttgtgtcattcagggtgcaggaggcgctgagggttgcccgtactcaccacgcgaatcacgccctgcccgtctatgtgttcaccagacctacatactcacgacgtctgaccggattgagtgagatggacctgatatctaccatcggggagtcagccgctctcggggcagccggtgtcatactatggggggacgctggatacactacaagtaccgaaacttgtcaatacctcaaagactatctaacaagactcctagttccctacgttgtaaacgtttcttgggcgacccagtactgttcccgcgcacagtgtcacggacatggccgctgtgtccgcaggaatccatctgcctctacatttcttcacctgagtactaacagcttcagactcgtccccggccatgcccctggcgaaccccagctgaggcccgtgggagagttgagctgggcagatattgaccacctacagacgcactttagatgtcaatgttatctggggtggtcaggcgagcagtgtcaatgggaccaccgccaagcagccgggggagcctctgaggcctgggcagggagccatctcaccagtcttctggcacttgctgcgcttgcattcacgtggacactctag

SEQ ID NO: 191072 - DNA, 1422 bp, synthetic construct
  misc_feature 1..1422: note = Description of Artificial Sequence: Synthetic coding sequence
  source 1..1422: mol_type = other DNA
atgcgggccggccccggccccaccgtgaccctggccctggtgctggcggtgtcttgggctatggagctaaagcccactgccccccctatttttaccggtcgaccgttcgtggtcgcttgggacgtgcctacacaggactgcggaccaagactaaaggtgccactggacctgaatgccttcgacgtccaggcaagtcctaatgaaggattcgtgaaccagaacattacaattttctaccgcgatagactcgggttataccctcggttcgattctgccgggaggtccgtgcatggaggagtgcctcagaatgtgagcctctgggctcacaggaagatgctgcaaaagcgcgtcgagcattatattagaacacaggaatccgccgggcttgccgtaatagactgggaagattggcggcccgtctgggttcgcaactggcaggataaggacgtgtacagacggctatcgcgccagctggtggcctccagacatccagactggcctccagaccgcatcgtgaagcaagctcagtatgagtttgagttcgccgcccagcagtttatgctggagacactgcgctacgtgaaagcagttaggccccggcacctgtgggggttctatttgttcccagattgctacaatcatgactacgtccagaactgggagtcttacacgggtcggtgccctgatgtagaggttgcaagaaatgatcagctggcctggctatgggcggaaagcactgccctgttcccctctgtttatctggacgagaccctggcaagctcacggcacggccgaaacttcgtgagcttccgcgtccaggaggccctgcgagttgctagaactcaccacgcgaaccacgctctgcccgtgtatgtgttcactcgtcccacctacagccgacgcctgaccgggcttagtgagatggacctgatctccacgatcggtgaatcagcagcactgggggctgcgggggtaattctgtggggagacgcgggctacactacttccactgagacctgccagtatctgaaagattatctgactcgactcttggtcccctacgtcgtgaatgttagctgggccacccaatactgttcccgcgcacagtgtcatggccacggccggtgcgtccgacggaatccctctgcgtcaacttttctccacctttcaactaattccttccgcttagtccccggacatgcgcctggagagccccagctccgacctgtgggagagctctcgtgggcagacatcgatcatcttcagacccattttaggtgccaatgctatctcggttggagtggagaacaatgccagtgggaccataggcaagcagccggaggtgcgtctgaagcttgggccggttctcacctgacaagtctgttggccctggccgctctggccttcacttggactctatag

SEQ ID NO: 191073 - DNA, 366 bp, synthetic construct
  misc_feature 1..366: note = Description of Artificial Sequence: Synthetic coding sequence
  source 1..366: mol_type = other DNA
atgcgggccggccccggccccaccgtgaccctggccctggtgctggctgtgagctgggctatggagctaaagcctactgccccacctattttcactgggcgaccttttgtggtcgcttgggacgtcccgacccaggactgtgggccacgtctgaaggtacccctggacctgaacgcattcgatgttcaggcatctccaaatgagggcttcgtaaatcagaacatcaccatcttctacagggatcgattgggtctctaccctcgttttgacagcgccggccggagcgtccacggtggagtgccacaaaacgtgtccctttgggcccacagaaaaatgttacagaagcgcgtcgagcactatatctag

SEQ ID NO: 191074 - DNA, 1254 bp, synthetic construct
  misc_feature 1..1254: note = Description of Artificial Sequence: Synthetic coding sequence
  source 1..1254: mol_type = other DNA
atgaccacccagctgggccccgccctggtgctgggcgtggccctgtgcttggggtgcggtcagccactgcctcaagttcccgaacgcccattctctgtgctgtggaacgtccccagcgcccactgcgaagcacggtttggcgtgcacttaccccttaatgccctaggaatcatcgctaacagagggcagcacttccacggacaaaacatgaccatattctataaaaaccagttgggcctctacccatattttggcccgcggggaaccgcacacaacggtggaatccctcaggctttgccgctcgacagacatctggctctggccgcatatcagatccaccactccctgcggccaggatttgccggccccgccgtgttagattgggaagagtggtgtcctttatgggcggggaactgggggaggcgccgagcatatcaggcggcctcgtgggcttgggcacagcaggtttttccagatttggacccacaggagcagctgtataaggcttacacaggattcgagcaggcagctcgggcgctcatggaggacaccttgcgcgtcgcacaggcccttcggccccacggcctttggggtttctatcattaccctgcgtgtgggaatggatggcacagcatggcatccaattataccggtaggtgtcacgctgcgaccctcgccagaaacacccagctccattggttgtgggcggcctcctctgctctgtttcccagtatctaccttccaccccggctccctcctgcccaccaccaagcctttgtgaggcatcgcctagaagaagcgttccgcgtcgccttggtcgggcaccggcacccccttccagtgctagcgtacgtgcgtttgacgcatcgcagatccggccggtttttaagccaagatgatctagtccaatcaatcggagtaagtgctgcgctaggggctgccggcgtggtcctatggggggatctgtccctgtctagctcagaagaagagtgctggcacctccatgattaccttgttgacacactagggccatatgtgattaatgtgacccgcgctgccatggcatgcagtcatcagcggtgtcacggtcacggaaggtgtgcccggagggatccaggacagatggaggcctttttgcatctatggccagatggatccctgggggactggaagagtttctcttgtcattgttattgggggtgggcagggcctacatgccaggaaccccgaccgggaccaaaagaggctgtctag

SEQ ID NO: 191075 - DNA, 1164 bp, synthetic construct
  misc_feature 1..1164: note = Description of Artificial Sequence: Synthetic coding sequence
  source 1..1164: mol_type = other DNA
atgaccacccagctgggccccgccctggtgctgggcgtggccctgtgtctgggatgcggacagccattgcctcaggtccctgagcgcccctttagcgtgctgtggaacgtgccctctgcccactgcgaggctcgattcggagtccacctccctctcaatgctctgggcataatcgccaaccgtgggcagcatttccacggccagaacatgacaatattctacaaaaatcagctcggactatatccttatttcggcccacgaggaaccgcccataacggtggaattcctcaggcgttaccattggacagacatttggctttggccgcataccaaatccatcactcacttcgccctggcttcgccggaccagccgtcctggactgggaggaatggtgtcccctgtgggccgggaattgggggcggcgccgcgcttaccaggccgctagctgggcatgggcccaacaggtgttccctgacctggaccctcaggaacagctatacaaagcctataccggcttcgagcaggccgctcgggccctgatggaggatacattaagagtggctcaagctctgcgcccacatggcctatggggcttctaccactatcccgcatgcggcaacgggtggcattcaatggcatccaattacaccggaagatgccacgctgccactctggcaaggaatacccagctgcactggctgtgggcagccagcagtgccctgttcccttcaatttacctccctcccaggttaccccctgcacatcaccaggcatttgtaagacatagactggaagaggccttccgagtggccctggtgggacatcgccaccccttgcctgtcctggcctatgtgcgtcttacacacaggcgctcgggaaggttcttgtcccaagaggagtgttggcacctccacgactatttagtggacaccttgggtccttatgtcattaacgtgacacgcgccgctatggcgtgtagccaccaaaggtgtcacggacacggacgatgtgctcggcgggaccccgggcagatggaggctttccttcatctttggcccgacgggtctttgggcgactggaagtcgttctcctgtcactgttattggggctgggcgggtccaacttgtcaggaaccccgtccagggcccaaggaggcggtatag

SEQ ID NO: 191076 - DNA, 507 bp, synthetic construct
  misc_feature 1..507: note = Description of Artificial Sequence: Synthetic coding sequence
  source 1..507: mol_type = other DNA
atgctgccccccgcccaccaccaggccttcgtgcggcaccggctggaggaggcttttcgggtcgcactggtgggacacaggcacccacttccggtgctggcgtatgtcagactcactcacagaagaagcggtcgcttcctctcgcaggacgatctggtacaaagcatcggtgtttctgctgcgctgggagccgctggtgtggtgctgtggggcgacttgtcactcagtagttccgaggaagaatgttggcacctccacgactacctggtggacaccctgggaccatacgttataaacgtcaccagagcggccatggcctgtagtcaccagcggtgccatggacacggccgttgtgctcgcagagatcctggccagatggaagcctttttacatttgtggcccgacgggtcgttgggcgattggaaatcgttttcctgccactgttactggggttgggcgggccccacctgccaggaaccccggccgggacccaaggaggccgtgtag

SEQ ID NO: 191077 - DNA, 483 bp, synthetic construct
  misc_feature 1..483: note = Description of Artificial Sequence: Synthetic coding sequence
  source 1..483: mol_type = other DNA
atgaccacccagctgggccccgccctggtgctgggcgtggccctgtgccttggctgcggccagcccctgcctcaagtgccagaaagaccctttagcgtgctgtggaacgtgccatctgcgcattgtgaggcaagattcggtgtgcatctgccactcaacgccctgggaatcatcgcaaaccgaggacaacactttcacgggcagaatatgactatattctacaaaaaccagctcggcctgtatccttatttcggcccgcgcggcaccgcccacaatgggggcattccacaggcgctgcccctagatcgccacctggcacttgcagcttaccaaatacaccatagcctgagaccaggtttcgccggacctgctgtgttggactgggaagaatggtgcccgctttgggctggaaactgggggcgcagacgtgcataccaggcagcatcttgggcctgggcgcagcaggtctttcccgatttatag

SEQ ID NO: 191078 - DNA, 1164 bp, synthetic construct
  misc_feature 1..1164: note = Description of Artificial Sequence: Synthetic coding sequence
  source 1..1164: mol_type = other DNA
atgaccacccagctgggccccgccctggtgctgggcgtggccctgtgtttggggtgtggtcagcccctcccacaagtgcctgagcgtccattcagcgtactctggaatgtccctagcgctcactgcgaagcccggtttggggtgcatctgccgttgaatgcactcggcataatcgccaatagagggcaacactttcacgggcaaaatatgacgattttttataaaaatcagctgggactgtacccctactttggcccccgcggcactgctcacaatggcggcataccccaggcactgccactggaccgtcacttggcactagcagcctaccagatccatcacagtctgcgacctggtttcgctggcccagctgtgctggactgggaagaatggtgccctctatgggctggcaactgggggcgccgccgggcttatcaggccgctagctgggcttgggcgcagcaggtgttcccagacttagaccctcaggaacagctgtacaaagcctatactgggtttgagcaggctgcaagggcactcatggaagatacactgcgggtcgcgcaggcactgagaccacacgggctgtgggggttctatcattatccagcctgcggcaatggatggcatagtatggcctctaactatacgggccgatgccatgctgctacattggctcgcaatactcagcttcactggctgtgggcagcctcctcagccttgtttccaagcatctacctcccacctcggttacccccggcccaccatcaagcctttgtccggcatagactggaggaggcgttccgtgtcgctctggtgggacaccgccacccgctgcctgtgttggcttacgttcgcctgacacaccggcggtctggcagattcctctctcaggaggaatgctggcacttgcatgattatctcgtagacacactcgggccttatgttatcaatgtaacacgtgcagccatggcatgttcgcatcagcgctgtcacgggcatggcagatgcgcaagacgagatcctgggcaaatggaagcttttctgcacctgtggcccgacggcagcctgggcgactggaagagtttttcctgccattgctactgggggtgggccggtccaacatgccaggaacctaggcctgggcccaaggaggccgtctag

SEQ ID NO: 191079 - DNA, 417 bp, synthetic construct
  misc_feature 1..417: note = Description of Artificial Sequence: Synthetic coding sequence
  source 1..417: mol_type = other DNA
atgctgccccccgcccaccaccaggccttcgtgcggcaccggctggaagaggccttccgggtcgccctcgtagggcaccgacatccccttcctgtgctggcttatgtcagactcacccacagacggagcgggagattcctctcccaggaagaatgctggcatctgcacgactacttggttgataccctgggaccctatgtgattaacgtcaccagagccgcgatggcgtgcagccatcaaaggtgccacggacacggtcgctgtgcgcgtagagaccccgggcaaatggaggcctttcttcatttgtggcctgatggtagcttgggggactggaagtcatttagctgccattgctactggggctgggccggtcctacttgccaggagcctaggcccggcccaaaggaagccgtgtag

SEQ ID NO: 191080 - DNA, 1518 bp, synthetic construct
  misc_feature 1..1518: note = Description of Artificial Sequence: Synthetic coding sequence
  source 1..1518: mol_type = other DNA
atgagcagcgtgcagcagcagcccccccccccccggcgggtgaccaatgtgggctcccttctcctcacgccccaagagaacgaatctctgtttaccttcttagggaagaagtgcgttaccatgtcgtctgccgtggtccagctctatgccgcagatcgcaactgcatgtggtctaagaaatgcagtggagttgcatgtttggtgaaggataacccacagaggagttactttctgcgtatcttcgatatcaaagacggtaaactgctttgggagcaggaactgtataacaacttcgtgtataattccccgcgcggctacttccacaccttcgcgggcgacacatgtcaggtggcgctgaatttcgctaatgaagaggaggctaaaaaatttaggaaggcagttacagatcttctgggcaggagacagcgcaagtccgagaagcgacgagatcctccgaatgggcccaatctacctatggctacagtagacatcaaaaaccccgagattactaccaaccggttttacgggcctcaggtgaataacataagccatacaaaagagaaaaaaaagggcaaggcgaagaagaagcgcttaacgaaggctgatattggcaccccaagcaactttcaacatataggtcatgtcggctgggaccccaacaccggtttcgatttaaataatctcgatccggaactcaagaacctcttcgacatgtgtgggatctctgaggcccagctgaaggatagggaaacaagtaaagtgatttacgacttcatagaaaagaccgggggggtggaggcggtaaagaacgaactgcggaggcaggcgcctcccccccctccgccttctagaggtggaccaccaccgcctcctccccctccccacaacagcggccctcctccaccacccgccaggggcagaggagccccacctccacccccgagccgggcccccaccgccgcacccccgcctccccctccgtccagaccttcagtggcggtgcctccccctcctcccaatagaatgtacccaccacctccacccgcactaccctcttccgccccatctggacctcctccacctccacccagtgtgctcggcgtgggtccagtagctccgccaccacccccaccgccgcctccaccaccaggcccacctccaccccctgggctcccctcagacggggaccaccaggtgcccacaaccgccggaaacaaagcggcactcctcgaccagattcgtgaaggcgcacagctgaagaaggtcgagcagaatagtcgacctgtgagttgtagtgggagagatgcccttttagatcaaattagacaaggaatccaactgaagagcgtcgccgacggccaggaatcaaccccccctactcccgcaccgacatcgggtatcgtcggagcactcatggaggtcatgcagaagagaagtaaggcaatacatagtagcgacgaggacgaagatgaggacgatgaggaagactttgaggacgatgatgagtgggaagactag

SEQ ID NO: 191081 - DNA, 1446 bp, synthetic construct
  misc_feature 1..1446: note = Description of Artificial Sequence: Synthetic coding sequence
  source 1..1446: mol_type = other DNA
atgaaggtgctgagcgagggccagctgaagctgtgcgtggtgcagccagtgcatttgacttcctggcttctgatctttttcatcctcaaatctatcagctgcctgaagcccgcccgccttcctatttaccagaggaagccctttatcgccgcatggaatgcacctacagatcaatgcttgatcaaatataacctgcggctgaatctgaagatgttccctgtgattggttcccctctcgcaaaggctcgcggacagaacgttacaatcttctatgtcaatcgcctgggttattatccatggtacacatcccagggggtgccaatcaacggcggccttccccagaatatttctctccaagtgcacctagagaaagcagaccaagatatcaactactatatccctgcagaggacttctcaggacttgccgtgattgattgggagtattggagaccccagtgggctcggaattggaattctaaagacgtctatagacaaaaaagccgcaaattgatctccgacatgggcaagaacgtctctgccaccgatattgaatatctcgccaaggtgacttttgaggaatctgctaaggcttttatgaaagagactatcaagctggggatcaagtcccggcctaagggactgtgggggtactatctctatcctgattgtcataactacaatgtgtacgcacctaactactcggggagctgtcccgaggatgaggtgctgcgaaataatgaactctcctggctctggaattcatccgctgccctctacccctcaatcggtgtgtggaagagccttggagattccgagaacatcctgcgatttagcaaatttcgggttcacgaatctatgcggatctccacaatgacctcccacgattacgctttacccgtgttcgtctatacacgcctggggtatagggatgaaccgctgtttttcctatccaagcaagatctggtcagcaccataggagaatctgcagccttaggggcagctggaatcgtgatttggggtgacatgaacctgacagccagcaaggccaactgcacgaaagtgaaacagtttgtctccagcgaccttggcagctatatagccaacgtcacaagggctgctgaggtttgcagtttacatctgtgtcgaaataatggcaggtgtatccggaagatgtggaacgccccgagctacctccatctgaacccggcttcataccatattgaggcaagtgaggatggagaatttactgtgaagggcaaggcatcggacacagacctggcggtgatggcggatacatttagttgtcactgctaccaagggtatgagggagcagattgcagggaaatcaagactgcagatggctgctcaggtgttagcccctctcctggttctctaatgacattatgtttactgcttctggcatcctaccgcagcatccagctctag

SEQ ID NO: 191082 - DNA, 138 bp, synthetic construct
  misc_feature 1..138: note = Description of Artificial Sequence: Synthetic coding sequence
  source 1..138: mol_type = other DNA
atgaaggtgctgagcgagggccagctgaagctgtgcgtggtgcagcctgtgcatctcactagctggctgttgattttctttattttgaaatctatctcatgcctgaaacccgcacgcctcccaatctatcaacgctag

SEQ ID NO: 191083 - DNA, 192 bp, synthetic construct
  misc_feature 1..192: note = Description of Artificial Sequence: Synthetic coding sequence
  source 1..192: mol_type = other DNA
atgaaggtgctgagcgagggccagctgaagctgtgcgtggtgcagccagtacacttgacctcctggcttctcatcttctttatcctcaaatctatcagctgcctgaagcccgccagactccctatctaccaaagaaagccatttattgcagcctggaatgctccaactgaccagtgtctaatcaagtactag

SEQ ID NO: 191084 - DNA, 15366 bp, synthetic construct
  misc_feature 1..15366: note = Description of Artificial Sequence: Synthetic coding sequence
  source 1..15366: mol_type = other DNA
atgaccagccggcggctggaggagagcatgggcgccgtgcagatgggcctggtcaacatgtttaaagggttccagagtaaggtgttgccacctctttctccgaaggtagtgaccgaggaggaggtcaatagaatgctgacaccatctgagtttttaaaggaaatgagtcttaccacagaacagaggttagccaaaacacgcctgatgtgccgtccccagataatcgagctgctggacatgggcgaaaccacgcaccagaaatttagcgggatagacctggatcaggccctgtttcagccctttccctccgaaatcattttccagaactacaccccatgtgaggtctatgaagttcccctaattttgcggaataacgataagatccctagactggtgaaagttgttgaagagtcctcgccctacttcaaagtgatctcccccaaagacattggacataaagtcgcacccggagtaccaagcattttccgaattttatttacccccgaggaaaacaaagattacgcgcatacgcttacatgcgtgacagagcgggaaaagtttatagtcccgattaaggccagaggcgctcgagctatactggacttccctgacaagttgaacttcagcacctgcccggtcaagtactccacacagaaaatcctgctggtgagaaacataggtaataaaaacgcagtattccacatcaaaacctgtaggcccttttcgattgagccagccatagggacactcaatgtcggggaatccatgcaattggaggtagagttcgagccccagagcgttggtgaccacagtggaagactgatcgtgtgttatgacaccggagagaaagtgttcgtgtccctgtacggggcagccatcgacatgaatattcgcctggacaagaattccttgacaatagagaagacatatataagtttagctaatcagcggactatcacaatacacaataggagtaacataatagcccactttttgtggaaggtgttcgctacccagcaggaagaggatcgagaaaagtaccgtgcttgtgacgacttgattaaagaggagaaggacgaaactgacgagttctttgaggaatgtatcacagatccgctcttgcgggagcacctctctgtgttgagtcgtacttttgcaaatcagaggcggctcgtccagggagactccaaactattcttcaataatgtcttcacagtagaacctctggagggcgacgtgtggcctaatagcagcgccgagatcactgtttactttaaccccctggaagccaagctgtaccagcagaccatctattgtgatatcctgggcagggagatcaggcttcctttgagaattaagggcgagggcatgggccccaaaatccacttcaacttcgagctcctagatatcggaaaagtttttaccggttctgcccactgttacgaggccattttgtataataagggatcaatagacgccctatttaacatgacgcctcctacaagcgctcttggggcgtgtttcgtgtttagcccgaaggaaggtataatcgagccttctggagtacaggctatacagatctctttctcctctaccatattgggcaacttcgaagaagaattcctcgtgaacgtgaatggctcgccagagcccgtgaaacttacgattcgcggatgtgtcattgggccgacttttcacttcaacgttccagcactccatttcggggatgtgtcattcgggtttccgcataccctgatctgttctctcaacaacacctccctgatccctatgacatataagctgcgcattccaggcgacgggctaggacataagagcatctcatactgcgaacagcatgtggattataaacgcccgagttggacaaaagaagaaatatcttctatgaaaccaaaggagttcaccattagccccgactgtggaactataaggccacaaggttttgccgctatccgagtgaccctgtgcagtaacacagtgcagaaatatgagctcgcactggtcgtcgatgtcgagggtattggtgaggaagtgctggccttactgatcacagccagatgtgtagtgccagccctgcacctcgtcaataccgaagtggattttggccattgctttctgaagtatccatacgaaaagaccttgcagttggcgaatcaggatgatttgcccgggttttatgaggtccagccccaggtctgcgaggaagttccaaccgtgttgttcagctcccccaccccaagcggtgtgatttcacctagctcgactatccatatccccctagtgctggagacacaagtaactggagagcaccgcagcaccgtgtatatttccatatttgggtcccaggacccaccactggtgtgccatctaaaatctgccggcgagggtcctgtaatctacgtgcaccccaatcaagtggacttcggcaacatttatgtgctcaaagactcatctagaattctcaatctctgcaatcagtcgtttatcccagccttttttcaggcacatatggctcataaaaagagcctatggaccatcgaacccaacgaaggcatggttccaccagaaactgatgtacagctggccctgacggcaaatcttaacgacacgttaacatttaaagactgcgtgattctggacattgaaaacagctccacctaccgtattccagtgcaggcctccgggaccgggtccacaatcgtctccgacaaaccttttgctcccgagctaaacctcggcgcacattttagcctcgatacccactactaccactttaaactgattaacaagggtagacgaatccagcagttattctggatgaacgattccttcagaccacaggctaaactgagcaaaaaggggagagtcaagaaaggacatgcccacgtgcagccccagccatcaggaagccaggagccccgagacccacagtctcccgtgttccacttgcaccccgcttccatggaactgtaccctgggcaagctatcgacgtcatcctggaaggatatagtgcgaccccgagaattgtcaaggaaaagctggtttgccatgctatcatcggagctcagaagggaaaatcgctggtaatggcagtaaatattacgtgcgagtttgtcgcgccacttatacagctgagcacaaagcagctgatctacagactggagaagaaacccaatagcattctcaagccggattaccagccactcgcaatcaagaacataagcaccttacctgtgaacttgcttttatctacgtccgggccgtttttcatttgtgaaacagataaatcgctgcttccggctacacccgagccaatcaagctggagattgacgaggaaaagaatctgctgatcaaatttgaccctagctacaggaacgatcttaacaactgggtggccgaagagattcttgccatcaagtacgtggaacacccccagattgatagcttggaccttcgcggagaggtgcactacccaaatttgtccttcgaaaccaaagagttagatttcgggtgtattctgaacgatacagagcttattagatatgtgaccatcaccaattgctcacccctggtggtgaaatttcggtggttcttccttgtgaacgatgaggagaaccagattcgcttcgtgacacttcccaagaagccatatagtgccccggtttctcagatggagtccatccctgctactagcgaagcagccagcccgccggccatactggttactgttgagtcgccagagatggacctgaatgattttgtgaagacagtgctggttgacgaggacgctaggccagaagaaaaggagttgcggaagacgaaggccagcagcgtaatctcagatgagatcaagatatccagtacggaaatcgagaggatctatagctcgcagtcacaggtggaagatcaggagtcactgcagacatgcgagcagaatgagatgctcagtattggcattgaggaggtgttcgacatactaccgctgttcggcgttctgcagccccactcctcccaccaaatcagctttaccttctacggccacgcaaacataatcgcacaggcaaaggccctgtgcgaggtcgaagagggcccaacttacgaaattacactgaagggggaggcctcacttgtgaattactctttcgacacaaaagatattcactatggactgcagctttttgatcacgtgaccgagagggaaatcacattgaccaacatggggaaggtggggttcgaattcaaagttctgactgatcatcaatcgagtcccgacaacctgttacctggtgtacccctgattctgccagtctctggattcatttcttcccaccaggagcaagtgctgaaggtgtattatctgcctggtgtacctgaggtgttcaagaggtcctttcagatccagattgcacaccttgatccggagaatatcacgctctcaggggagggcatatttccgcaaatctgtttagacctcccgaggaacctgaccgccaacgagaagtatgaaatgtttcttaatcaggcacgaaagaatacagacaaggagtacaataaatgtgagatgcttgatcactttgacatcattacagaggaggttcccgaggatgaaccggcagaagtcagtgctcatctacagatggaagtcgagagactgatcgtacagtcctacgtgttagagcatcagaagactactaccccagaccccatggacgacccatgtttcagtcaccgctctcgtaggaagctggccaagatacagctgcctgaatatatcttagacttcggttacattatacttggcgaggtacgcacgcacattatcaagattatcaacacgtcccactttccagtgtcttttcacgccgataaaagagttctgcatgagaccgggttttctaccgagctggatcgggtgaaaaacctgcctcactgcgaaactgaaatctttgaagtgagattcgatcctcagggagcgaatttgccagttggctcaaaagaagtgatactccctattaaagttgtgggggggcctacagtgcatatatgtctccaggctaaagtgacaattccaactatgactttaagccgcggcaaagtggactttgccacaatacagtgtggccagtgcctggtggaaaccattcagctgtctaaccacctgcaggtgccttgtgaatggttcgtacagagtcaaaaacctgttgacaaactggagaagcatatgccgaagtatctgcgccaaaaactgcgagctgaactgaagccgaagactcggatatttgagatccagcctatttctggtgtcctggatcctggggagaagtccaatgtgcaagttaaatttatgcctaaggaggagaaattctactcccagacactggtttttcagatcgcccaatcagctcagaaactgaccctcttggccagaggccagggtctggagcccagactggagttcagcccctcggtacttgacctgggccctctgttgctgtgtgctcctggcgacgaggcagaggtgattgtgaaaaacccctgcaactttcccatagagttctatagcctagagtttgatcagcagtaccttatcgaagaaaagatcctcaggaagttaaaggggtacgattcatataacacacttttgctgcctccaaggaacccgggtgagaagctgccccctgagctctacgagtattttaaagagatcaagaaaagtaaggaagaacagatgagagccaagtacctcgaaaatctcgctcaagagaatgaagaggaggacataacatccagcgatcagggcacttccaattctacaaaacggacttcactgagtaggggtattagcgtcaccagtaatcttgaagaatggcatgctttactggttgagtctaagacatacctggaagaggaagaagacgaagaatcactcgagaagattattttccaaactgacaagctgcagtccatcgactctcactctatggaggaggtgggtgaagtggaaaacaacccagtatctaaagcaatcgctagacatctgggtatcgacatctcagcggagggaaggctcgccaaaaatcgaaagggaattgcaatcattatacatggaacaccactgagtggcaaatccgccaacgctgtttccgtggccaagtactataacgccgcttgtttgtccatcgattctatcgtgcttgaagctgtcgccaactcaaataatatacctgggattcgtgctcgtgagctttgtattcgagctgctatcgagcagagcgtgaaagaaggtgaggaggcagcccaggaggccgcagtcggacagaatgttatagggcaaggtagattgtctacagacacccttgggaagctggcaagtgagatgactctcgtggctcccgaaattaagcccgggaaaagtgtgcggggaagtgtggtgattaccaagtctaaggccgactcacacgggtccggatctcagaaacagcaccatagccaccagtctgagaccccacagatctcgtcctccccactgcctcccggccctatccaccgctggctgtcggtgtctccaagcgttggaggagagacaggcttaatgagctgtgtgctgcccgacgaactgctagtacagattctggctgagcgtattcagcttagcgattgctatcgaggagtcgtgttcgacggcctggatacattgttcgctcagaatgcagcagcagccctcttgtgcttactgaaagcaatcggttctcgagagcatatatacatacttaacatggctcaggactatgcggcgatgaaggctcaagagaaagcaaaaaaagagcaggaggagagaaagcacaagggagccctggagaaggaaaaggaaagactccagaatatggatgaagaggagtacgacgcgttgaccgaagaagagaaactgacctttgaccggggtatccagcaggcactgcgtgagagaaagaaacgggagcaagagcgcttggctaaagagatgcaagagaaaaagctgcagcaggagttggagcggcagaaagaagaagatgagctgaaacgaagggtcaaaaaagggaagcagggcccaattaaagaagagcctccgatgaagaagagccaggccgctaacaagcaggtgcccccattgacaaaagtcgacgtcaaaatggaaactatcgagcgaaagatttcggtgagggaacagacaatgtctgagaaagaagagttgaacaagaagaaaaggaatatgggggacgtttccatgcacgggctgcccctggtccaggatcaagaagacagtgagggtgacaattccaaggaccccgacaagcagctggctcccaaattcaaaacctacgaactgaccctcaaagacgtccagaacatcctgatgtattgggaccgaaaacagggggtacagctgccaccggctggcatggaggaagcaccgcatgaacccgatgatcagaggcaggtacccttaggcgggcggaggggccggaaagatcgagaaagagaaaggcttgaaaaggagagaacggagaaagagcgtctggaacgtgaaaaggctgaacgagaacggttagaaaagcttcgcgctctggaagaacgtagcgattgggaaggcgagggcgaagaagaccacgagggaaagaaagaaaaggacctgggagttcccttcctagacatccagactccagacttcgagggtcttagttggaagcaggcccttgagtccgataaactccctaagggggagcaaatacttgacatcctcggtctgggtgcatctgggcctccgatacccccccccgccttgttctccattgtaagctatcccgtgaagcgtcccccacttaccatgaccgacgatttggaacatttcgtattcgtgatcccaccctccgaggacatcagcctagacgagaaaaaggagatggagattgaatccgatttcctggccacgactaataccacaaaggcccaggaggagcagacgagtagttctaagggggggaaacaaaaaatgaaggagaagatcgaccaggtgttcgagattcagaaggacaagcggcacatggccctgaaccgaaaagtcttgtcaggcgagcctgccgggacaatatctcagctgtctgacacagacttggacaatttcaacggtcagcactctcaggaaaagttcactcgcctcaatcattttaggtggattgttccagcaaacggcgaggtgacactccaggtacattttagctctgacgaatttggtaacttcgaccagacgttcaactttgagatcctgggaacgtgctgtcagtatcagctctactgtcgcggcatctgtacctacccttatatatgccaggaccctaaggtagtcttccctcagcgaaaaatggacatgaagacgaatgaggtcatcttcaaaaagtacgtcatgagtacagagacatactatttcggtccgcttctctgcggaaagtctagagacaagtataagtcctccctgttccccggaaacatggagacattgactatcctgaatactagtctgatggtagtggaggcgtccttttacttccagaatgatgtcaaggccaacacttacttcttggagccgaacactatggtgttgaagccgaacgaaaaacaaatcctgaacgtgtgggcctacccgacttcagttggagtatttgaagattcaattgtctgttgcatcaatgacaaccccgagccagcaatattccagctttcctgtcaaggcataaggccggagctggagttggaacccaggcagctccacttcgaccgactactcctccaccgccaggaatcccgcgtggtactcctccgcaatgtgacattattacctgtggcttggcgcatcaccagtcttgagcacctcggggatgactttacggtgtccctcatgcagggtactatcccacccgaggccgaatacggactgcacctctactttcagcctacaaagcccgtcaatatcaaaaaggctatcaggctcgaagttctagatgctgagaacttgctcggggttgttcagatcgaaaatattatggtgtttgcagaagcgtacgatatagccctcgatatcacatttccaaagggggccgagggcggattagattttgggattgtgagggtgaccgaggaggcaaaacagcctctgcagcttaagaaccggggcaagtacgaaatagctttctctttttcggtggatagtgtgggtattagtacccccaatattaactccatgattagtgttcaacctaagaagggtagtctgacacccacagaaaagcccacaaacgtacaggtgttctttcatgccaagaaggaggtcaaaatagaacaccagcccgtattgagatgtcaaataattgagccaaatatcagcgagggaggcgaaataatagccagcataccaattaaattttccgcaaatgcggtctactctaaatataacattacaccctctagtgtcatcaacttcggcgcccttatttgtggcactcgtaagagcaccacgttcaccattgaaaaccagggggtgaccgatttcaagttcgctctttataagctgacaggcgaatctccaattcaccagaagaaagcagcctcccacgtgcgtcacgcgcgctcaagggagagcgaatcattctataagaccggcagctctcgggctgccaagtttagtgataccatccagaaggaggtaaccacgaccgggcaggcaaggttcgcgcacgggatgtttaccgtatatccaggctttggatcaataccttctgggggacaacaagtaatcaacgtggactgcgtcgccgacgccatgggaaagtgtgaggaatttatcgccattgatatctctggcagagaccccgctgtccatcccgcaggcattctctacacactcctggccgaggcatgccttcctgccttcgttactgaaaataacgccctgatctttgaggagcatcagatttgtacgagcgccaaccttcatcacatactgcagaccatagaaagcggaggcctgtttgtcgaagatgagaataagttcattttctgtaatgtcctggtggggaggcaggctaaagcccgcttcaagatctcaaacgtgggcaagatcacttgcgatgtaaatatcgtggtacgtcctatctcaaataagccttttgccagaattgtcgatatatttgaggtcgagccctccaagatgtgtatcgcatcccactcacacgctttcgctacagtgtcatttacgccccaaatcatgcagaattaccagtgcatcttcgaggcaacccttgatggactccctagcaccttagccaagagcagagggctcgtgttcgacatagccggagaaggaaacctgccaagggttaccgtcgtgagacccgtcttacataaccagtacggcaatcccctgttgctcttcaagaggctgctgcttggccacagtgaaaagctgccgctaattcttaaaaataacggtgtgttgccagctcaactgcacgtggacttacaagacgagctgggcgttttctcacttaaaggcagaccaaccaccgcctatatttatatcaccgaagagaataagccacatgtcaaggctaagaaggctcatacagcaagccttgtggtgagtcccggcgacactgccgagttcgacgtggtcttccactcacaaaaggttggacgcatgcgcggtatcatccacttgtcagtgatcaacaaccaatacgaggaaacttcaatccacatggtgggagaaggttatgaggatgacatcactttggataacatccatggcctcgtggcacctactagccaagaggatatttcaatttctgaattcaccgagatcatcgaagacaacgatatggaagacttagtagcagctgcccttgtggatcacattcagtttggcgattgccatatcggccactcatataacgcctcattcacagtcactaatcactctcaggtgaatttgattcggttcgagtggcccgtaagcgccacaattgcattcagtccacagatggggcacttgcacccaggctgtgctaaggatatcgttgtgaccatgaaaagcgacgtgcctataaatctgaaaaatatgcgcatacgatgcaaactgtcccggatcatgtttcagctgcctgccgaccaagtaccagactgggacgaccgaatgcatacagttaagtgggtagacgttcctcgcaatatgcccgggacatttaccacaaagagaaaggtgattgagacagacccagagccggctcattccgtactggaagagaattatcaagagctccagttgcagatcagcgcaaacgtcgatttcgcatcctaccactgtcaggcccgggatgtgcgctttaaggaaacactggtgtatcaaactagagtgttcgaattcgatgtgatcaactccggccgcgtgcagctggaattctcttgggtatcagaagatacttcaaaggccgtgtcatttgcaaagcctgatcaccagggaagtgcacaaaaagaccagttaagccaagggacaatgcacactgggtcgactcttgattccactatggaccactgggctgagggcagtcctcagcctttctcggtcgagccgtcctcaggcattgttcctgtgggaaaaatacagaagtttaaggtgaagttttcccccctcgacatcggagatttcgagagtaatctattctgccagatccccaacctgcccccgggcgagcagggacctgtgctcgtggcaaagggtaggtcgaccctgccgatctgccactttgatctcaaagatagcgactatatatcagggcaccaaaggaatcctgaactgcgcgggtccagcggcggagctctagatccaaacaccagagtcattgagttcaccacagtgggtatcggcggtaagaaccttcgaacctttacgatcctcaacccaacaaatagcacctacagcttttgttggatctccgaggagatcgagtccctccaaaacccagctgcctttacttgcctgacagaaaagggcttcatccatcctgagaaaaaagccgaaatcgtgtttcagtttactcctttccatctgggcatcacagagtctagctggacttttctgattccagagcataatatcaccgttccttttcttcttgtgggcaagacaactgagcctctcatcagcttgaacaaaagccaccttaacttttcgagcttactcatcggccgagaagcgcgggaaaccgtccagataatcaacaaggaggagcagggatttgatttttccttccaggacaatagcagatactctgagggcttttctaacagcctcctcgtttgtcctatggaggggtggatccctcccctatcaagattccccatcgacattttttttactccaaaacaggaaggcgatgtaaattttaatcttatatgtaatgttgagaagaaagtccatcctgttacacttaatgtgaaagcagaggggtacaccatgaatgttgagattaagtgcaaggaccgcacaggaagcataaccttattgactcccaatcaaacgaacatcataaatttttacgaggtggagttaaatgaatgtgtccaatgtgaattcaattttattaataccggcaagttcacgttttccttccaagctcaactgtgcggatccaagaccctgctccagtatttagaatttagccccattgactccaccgtggacgtaggccagagcgtgcatgccaccctgagtttccagcctttaaagaaatgtgttctgaccgatctggaactcatcattaaaatctcccatggcccgaccttcatgtgcaatatttccggctgcgctgtctcacctgcgatacacttctccttcacgtcctataacttcggaacttgtttcatctatcaggctggaatgcctccttataagcagacactggtcatcactaacaaggaggaaaccccaatgtccattgattgcctctacaccaataccacacacctggaagtcaacagccgcgtggatgtggtgaaaccaggtaacaccctggagatccctatcaccttttaccctcgggagagcattaattatcaggaactgatccctttcgagatcaatggccttagccaacagacagtggaaatcaagggaaaggggacaaagatgaaaatcctcgttctagatcctgctaatcggattgttaagttgggtgccgtgctccccggccaggttgtgaagcgcacagtgagcatcatgaataattccttagcccagctgacctttaaccagagcatactgtttaccatccctgaacttcaggaacctaaggtcttgactttagccccattccataatattaccctaaaaccgaaagaggtctgtaagctcgaagttatctttgcccctaaaaagcgcgtgccaccctttagtgaggaagtctttatggaatgtatggggctgctgaggccacttttcctcctcagtgggtgttgccaggcccttgaaatttcactggaccaagagcacatcccattcgggccagtcgtataccaaacgcaggccacgcgacggatactcatgatgaatactggagacgtgggagcccgcttcaagtgggacatcaagaaatttgagccacatttctcaatttcgccagaggagggctacatcacttccggcatggaagtgagtttcgaagtcacatatcatccaaccgaagtggggaaggagtcactgtgtaagaacatcctatgttacatccaggggggctcccccctgagccttacattatccggcgtttgtgttggaccaccggccgtcaaagaagttgtgaactttacctgccaggtgcggagcaagcacactcagaccatactcctgagcaatcggacaaatcagacctggaacctacatcctatctttgagggggagcactgggaaggtccagagtttatcaccctggaggctcaccagcagaacaaaccttacgaaatcacctacaggccgagaactatgaatctggagaaccggaaacaccagggcaccttatttttcccacttcccgacgggaccggctggctgtacgcactacacgggacttctgagcttcccaaagccgtggccaatatatatagggaggtgccctgcaagaccccttacactgagctccttccgatcaccaattggttaaacaagcctcagaggttcagagtgattgtggagatacttaaacccgaaaagccagacctgagcattacgatgaagggactcgactatattgacgtactgagtggcagcaagaaagattacaaactgaatttcttcagccataaagaagggacctatgcggccaaagtcatctttcggaatgaggtaacaaacgagtttctgtactacaacgtgagctttagggtgatccctagtgggattataaagaccattgagatggttactcctgtccggcaagtggcttcagcctccatcaaactggaaaaccctctgccatactccgtcacctttagtacagagtgtcggatgcccgacatcgccctgccatcacagttcgttgtccctgcgaattctgagggaacatttagctttgagttccagcctctcaaggccggagagacatttggccggttaacattgcataatactgatctgggctactaccagtacgagctgtacttgaaggccacgcccgccctgccagagaagcctgtgcatttccagacagtattaggctccagtcagattatcttagtaaaattcatcaattatactcgccagcgcacggagtattactgccgtacggactgcacagattttcacgctgaaaaactgatcaacgctgctcccggcggccaggggggcaccgaggccagcgtggaggtcctgttcgaaccttctcatcttggggagactaaaggaatcttgatcctcagctcactggccggcggggaatatattattccactcttcggaatggctttgccccctaagcctcaaggaccattttctattagggccggatattcaatcatcattcctttcaagaatgttttttaccacatggtcaccttttctatcatcgttgacaaccctgcctttactatccgggccggcgagtcggtcaggccgaaaaagatcaataatatcaccgtctccttcgaagggaacccttccggctcaaagacacccataactactaagctgaccgtctcctgtccgcctggcgaaggatcagaaaccggggttaaatgggtgtattacttaaaaggaattacactgtag

SEQ ID NO: 191085 - DNA, 2853 bp, synthetic construct
  misc_feature 1..2853: note = Description of Artificial Sequence: Synthetic coding sequence
  source 1..2853: mol_type = other DNA
atggagagcgccggcggcttcaagctgggcatggagcccctgagcggagggggtgtgtgtgagaagaagaagctactcaaaatgactagcagaagactcgaggaaagcatgggagccgtgcagatgggcctggtcaatatgttcaagggcttccagagtaaggttctcccccccttgtctccaaaggtggtgaccgaggaggaggtgaaccgtatgctgaccccaagcgagtttctcaaagaaatgtcactgactaccgagcagcgcctggcgaaaacacgcctgatgtgtcgtcctcagataatcgagctgctggatatgggtgaaacaacacaccagaaattctccggaattgacctcgatcaagcactgtttcaaccattccctagcgagatcatattccagaactacaccccttgtgaagtctacgaggtgcctctcatcctgcgtaacaacgacaaaatcccgcgtctcgtgaaggttgtggaggagagttctccgtacttcaaagtgattagtcctaaagatatcggccacaaagtggctcccggggtgcccagcatctttagaattctatttacccccgaggagaataaggactacgcccatactcttacctgcgtgaccgagcgcgagaaatttatcgtcccaattaaggctaggggcgcgagggccattctggacttccccgacaagttgaacttttcaacctgccccgtgaaatattcgacacagaagatcttacttgttaggaacataggcaacaaaaatgctgtttttcacattaagacctgtcggcctttttcaatcgagcctgccatcggcaccctgaacgtgggagagagcatgcagctggaggtggaatttgagccccagtccgtgggggaccactcgggtcgtctgatcgtttgctatgacaccggggaaaaagtgttcgtgtccctgtacggcgcagccattgacatgaatatcagactagacaaaaactccctgaccatagaaaaaacctacatcagcctcgcaaatcagcgtaccatcacaattcacaacagaagtaacattattgctcacttcctctggaaggtctttgctacccagcaggaagaggatcgggagaagtacagagcctgcgacgacctcatcaaggaggaaaaggatgagacggatgaattttttgaggaatgcatcactgatccgctgttgagggaacatctatctgttctgtctcggacctttgctaatcaacggaggttagtccagggggattctaaactgtttttcaacaatgtttttactgtggagcctctcgagggtgacgtctggccaaattcttcagcagaaatcaccgtgtatttcaaccctctggaggcaaagctgtatcagcagactatttattgtgatatcctcggacgcgagattcgcctgccattgcggattaaaggagagggcatgggccccaagatccacttcaactttgagctactcgatatcggaaaggtttttactggcagcgctcactgttacgaggccattctatacaataaaggctctatagatgccttatttaacatgacacctccaactagcgcccttggggcatgctttgtgttctcccctaaagagggaatcatcgagcccagcggcgtgcaggccatacagatatctttttcttcaacgatcctcggcaactttgaggaggaattcctggtcaatgtgaacgggtcacccgaaccagttaagctcacaatccgaggctgcgtgatcggtcccacctttcatttcaacgtgcccgccttacacttcggcgatgtgtctttcggatttccgcatacgctgatttgctcacttaataacacatcgttgattccaatgacttacaaactacggatcccaggagacggactgggccacaagagtatctcctattgtgaacagcatgttgactacaagcgcccatcctggaccaaagaggagataagtagtatgaagcccaaggagttcacaatctccccggactgtggaaccatcaggccacagggctttgccgccatccgggtgaccttatgtagtaataccgtccagaagtatgaactagcactggtggtggacgtagaggggataggagaagaggtgctggctctgttaatcacagccaggtgtgttgtgcctgcgctgcacctggtcaataccgaggtggactttggccattgctttttaaagtacccatacgagaaaaccctccaattagctaaccaggacgacctaccgggtttctatgaagtgcaaccacaggtctgcgaggaggtgcctacagtgctctttagttctcccactccgtcaggcgtgatctcgccaagtagtacaattcacataccgctcgtgttggagacacaggttacaggcgaacaccgctccaccgtgtacatcagcatttttggttcccaagatccacctctggtatgccaccttaaatcggctggcgaggggcccgtgatttacgtgcatccgaaccaggtggacttcggcaacatctacgtattgaaagacagtagccgcatcttaaacctgtgtaatcagtcatttatcccagcttttttccaggcccacatggctcataaaaaatcactgtggactattgagccaaatgaaggcatggtgccccccgaaaccgacgtgcaacttgcccttacggcaaacctcaatgacaccctcacattcaaggactgtgtcattctggacatcgagaattcctctacataccgtattcccgtacaagcttctggcaccggcagtacaatcgtgtccgacaagcctttcgctcccgaactcaacctgggggcccattttcgctag

SEQ ID NO: 191086 - DNA, 2823 bp, synthetic construct
  misc_feature 1..2823: note = Description of Artificial Sequence: Synthetic coding sequence
  source 1..2823: mol_type = other DNA
atggagagcgccggcggcttcaagctgggcgagaagaagaagctgcttaagatgacaagtagaagactcgaggagagcatgggagccgttcagatgggcttggtgaatatgttcaagggattccaaagtaaagttttgcccccactgagtcccaaggtcgtcactgaggaggaggtcaatagaatgctgacaccatcagaatttctcaaggaaatgtcgctcacaacagaacaacgccttgcaaaaaccaggctgatgtgccggcctcagatcatcgaactcttggacatgggagagacaacccaccagaagttttcaggtatagatctggatcaggcgctgtttcagccatttccatctgaaatcatcttccagaattataccccatgtgaagtttatgaagtgcccttgattctgcggaacaacgataaaatccccaggctggtgaaggtcgtcgaagaatcaagcccctattttaaggtgataagccccaaggacattgggcacaaggtcgcgcccggggtgccgtccatattccgaatactgtttacacccgaggagaataaggactacgcccacacgctcacatgcgtgacggagagggaaaagtttattgtacccataaaggcccgcggcgcacgggcaatactggatttccctgacaagctgaatttcagtacttgtcctgtgaagtatagtacacaaaaaattcttctggtcaggaacatcgggaataaaaatgcggtgtttcacatcaagacatgtcggcctttttcgatagagcctgctatagggaccttaaacgtaggggagtctatgcaactggaggtagagtttgaacctcagtccgtcggagatcattcaggcaggttgatcgtgtgttatgacaccggggaaaaggtcttcgtttcactgtacggagcggccattgacatgaatatccggctggataaaaactcgctgacaattgaaaagacatatatcagcttggccaatcagcgcactatcacaatacataaccggtctaacattatcgcccattttctctggaaggtgtttgccacgcagcaggaagaagacagagaaaaatatcgggcctgcgacgaccttatcaaggaggagaaagacgaaaccgatgaattttttgaagagtgcataacagatccgctcctgcgcgagcacctgtctgtgctgtctcgtacctttgctaatcaacgcaggctggtgcaaggggactctaagctgtttttcaacaatgtgttcaccgtcgagcccctcgagggcgacgtgtggcctaattcttcagctgagattaccgtgtactttaatccgcttgaagcaaagctctaccagcagactatctactgtgacatcttaggcagggaaattcgtctccctttgaggatcaagggagaaggcatgggccctaagatccactttaactttgagctactcgacattggcaaagtgtttactggatccgcacactgttacgaggccattctgtacaacaagggatcaatagacgccttattcaatatgaccccgcccactagtgccctaggcgcttgcttcgttttttctccaaaagagggaatcattgagccaagcggagttcaggcaatccagatctcattctctagtacgatcctgggtaattttgaagaagaattcctggtcaacgtgaacgggtccccggaacccgtgaagctgaccatcaggggatgcgtgatcggaccgacctttcacttcaacgtacctgccttacacttcggcgacgtctcatttggttttccccacactcttatctgttcattgaataacacatcccttatccccatgacatataagctgagaattcccggcgatggccttggccataaatccatttcgtattgcgagcaacacgtggattataagcgcccttcttggactaaagaggagatcagttccatgaaaccaaaggagtttacaataagcccagactgcggtaccataagaccgcagggttttgccgctatccgtgtcaccttgtgtagcaataccgtacagaaatatgaattggctctggtagtagacgttgagggcattggcgaggaagttcttgccctgttgatcacagctagatgtgtagttcctgccctacatctcgtgaataccgaggtggatttcggtcactgcttcttgaaatacccttatgagaagacactgcagctggctaaccaagacgatctacccggcttttatgaggtccagccccaggtctgtgaggaagttccaacggttctttttagcagccctaccccatcgggggtgatctccccctcaagcaccattcatatcccactcgtcctggaaacacaggttacaggagaacatcgctccacagtatacatcagtatttttggctctcaggaccctcccttggtgtgccacctaaagtcggctggggaaggcccagtgatatatgtgcacccaaaccaagtggatttcgggaatatctatgttctgaaggatagttctcgcattcttaacttatgtaatcagagtttcatacccgcattctttcaggctcatatggcccacaagaaaagtttgtggaccatcgagcctaatgaaggcatggtgcctcctgagacagacgtgcagctcgctctcaccgctaatctcaacgatactctaacatttaaagactgcgttattcttgacatcgaaaattcatcaacatacagaataccagtgcaggcctctggaactggttctacgatcgtgtctgacaagccctttgctccagagcttaatttaggagcacacttccggtag

SEQ ID NO: 191087 - DNA, 15363 bp, synthetic construct
  misc_feature 1..15363: note = Description of Artificial Sequence: Synthetic coding sequence
  source 1..15363: mol_type = other DNA
atgaccagccggcggctggaggagagcatgggcgccgtgcagatgggtctggtaaatatgttcaagggctttcagtcaaaagtactccccccgctgagccctaaggttgtgaccgaggaggaggtgaatagaatgttgactcctagcgaatttctgaaagagatgagcctgaccaccgagcagcgcctcgcaaaaacaaggctcatgtgtcgaccccagattatcgagctgctggacatgggagaaaccacccatcaaaaattctccggaatagatttggaccaagccctgttccagcccttcccttccgagattatctttcagaactacactccatgcgaagtgtatgaggtacccctcattctgcggaataacgacaaaataccccggttggtcaaggtggtggaggaaagcagcccgtacttcaaagttatttcccccaaggatatcgggcacaaagttgccccaggagtcccatcaatctttcgcatcttatttactcccgaggaaaacaaggattatgctcacacactgacctgtgtgaccgagagagagaagtttattgtgccgataaaagctaggggggccagggcaatcttagacttcccagataaactcaatttcagtacgtgtcctgtgaaatattcaacccaaaagatactactcgtgcgcaacattggaaataagaacgccgtgttccatatcaagacatgccgtcctttcagcatcgaacccgctattggcacattgaacgtcggtgaatccatgcagctggaggtcgaattcgaacctcagtcggtgggcgatcatagcggtcgtttgatcgtctgttacgataccggggagaaagtctttgtatcactctatggtgcagccattgatatgaatatcagattggataaaaacagcctgacaattgaaaagacctacatctcgttggccaaccaacgcactatcactatccacaaccgctccaacatcatagcacacttcctgtggaaggtattcgccacccagcaagaagaagatagagagaaataccgggcctgtgacgatcttataaaagaggaaaaggacgaaactgatgagttcttcgaggagtgtattacagacccattactgcgggagcacctgagcgtgttaagccgcacatttgctaatcagagaagactggtccaaggtgacagtaaacttttcttcaacaatgtcttcacagtggaacctctcgagggagatgtgtggcctaactcttctgccgaaatcacagtttattttaatcctctggaggcaaaactttatcagcagaccatatactgtgacatcttgggaagagaaatcagactgccactgagaattaaaggagaaggcatgggccctaagattcacttcaattttgaactgttggacatcggcaaggtgttcacagggtccgcgcattgttatgaagcaatcctgtataacaaggggtctattgacgcgctcttcaatatgacccctcctacatcggctctgggcgcctgctttgtgttttccccaaaggagggaatcattgaaccttccggagtacaggccattcagatttctttcagtagcactatactcgggaacttcgaggaagagttcctggttaatgtaaacgggtcgcccgagccagtgaagctcacgattagaggatgcgtcataggccctacgtttcactttaacgtgcccgccctgcactttggagatgtcagctttggattcccccataccctgatctgtagcctcaataacacttcactcatcccaatgacatacaaactaaggatccccggcgacgggctaggccacaagtccatctcatactgtgaacagcatgtggactacaagaggccatcttggacaaaggaggaaatcagctctatgaagccaaaggagtttacaattagcccagactgcgggactatcaggcctcagggctttgccgctataagggttaccctgtgttccaatactgtccaaaaatatgagctggccctggtggttgatgttgaaggtattggagaagaagttctggcgctcttaatcactgcgcgctgtgttgtccctgctctgcacctggtgaacacagaggtggacttcggccattgtttcctcaagtatccatatgagaagaccctgcagcttgccaatcaggatgacctcccgggcttttacgaagtgcagcctcaggtctgtgaggaagtgcctacggtgctgttctcctcaccaactcccagcggagtgatctccccctctagcactattcacatacccttggtgctggagacacaggtcactggcgaacatcgttctactgtttatatcagtatattcggatctcaggacccccctctggtctgtcatcttaagtccgcaggagaagggccagtcatctatgtgcacccgaatcaggtagatttcggtaatatctacgtgctgaaagattccagtcgaattctgaatctgtgtaatcagtcttttattcctgcattcttccaggctcatatggctcataaaaaaagcctctggaccatagagccaaatgagggtatggtgccgcccgagaccgatgtacagctggccttgacagccaacttaaacgatacactgacgttcaaggattgtgtgatcttagatattgagaattcatctacttacaggatcccggttcaggcctcgggaacaggatccacgattgtgagtgataagccattcgcacccgagctgaatctgggcgcccatttttctctggacacacattactaccatttcaagcttatcaacaagggccggaggattcagcaactgttttggatgaacgactcttttcgcccacaggcaaaattgagtaagaagggacgggtgaagaaaggtcatgctcatgtgcagccccagccctcaggaagtcaggagccacgagacccacagtctccagtcttccacctccatcccgcctctatggaactgtacccagggcaggccatcgatgtcatcctggagggatacagcgcgacccctcgtattgtgaaggagaagcttgtgtgccacgctatcatcggtgctcagaaggggaagtctctcgttatggctgtgaacatcacctgtgagtttgtggccccgttaatacagttgtcaactaagcagctgatatatcgcctggagaaaaagcctaatagtatccttaaacctgactaccaaccgttggccattaaaaatatcagtacacttccagtcaatttattgctgtcaacttcaggccccttttttatttgcgaaaccgacaaaagcttgttacccgccacacccgagcctatcaaactggagattgatgaagaaaaaaacctcttgatcaagtttgacccctcgtatagaaacgacttgaataactgggtagccgaggagattctggctatcaaatacgtggagcacccccagatcgactctctcgacctccgaggcgaggtacactacccaaacctcagcttcgagaccaaggaattggactttggatgcatcctgaatgatacggaactgattagatacgtcaccatcactaactgctcaccacttgtggtgaagttccggtggttctttttggtgaatgatgaggagaatcaaatccgattcgtgaccttgcccaagaagccgtacagcgcccccgtgagtcagatggagtccatccctgccactagtgaggctgcttctcctcctgctattctagttactgttgaaagcccggaaatggacctcaatgacttcgtcaagaccgtcttggtggatgaggacgcaagacccgaagaaaaggaactcaggaagacaaaggcctcaagtgtgatttcagacgtgcgatgtccattccacggagaagagcggatctacagtagtcagtctcaggtcgaggatcaggagagcctgcagacctgtgaacaaaatgagatgttgtccataggcatagaagaagtctttgatattttgccactgttcggcgtgcttcaaccgcattcaagtcaccagatcagcttcactttttatggacacgccaacattatcgcccaggccaaagccctgtgtgaagtggaagaaggaccaacttatgaaatcacgctgaaaggcgaagcctccctggtcaattactcctttgatactaaggacattcactatggactccaactgtttgatcacgtgacggagcgagaaataacccttaccaatatggggaaagtcggctttgaattcaaagtgcttacagatcatcagtccagtcctgataacctactgcccggcgtgcctctcatcctgcccgtgagtggctttattagttctcaccaggaacaagtgctgaaggtgtactacctccccggggttcccgaggttttcaagcgttcatttcagatacagatcgcacatctcgatccagaaaacatcacattaagcggcgagggcattttccctcagatctgcctggacctgccccgtaatttgacagctaatgagaagtatgagatgttcctgaatcaggccagaaagaataccgataaggagtataacaagtgtgagatgctggatcattttgacatcattacggaagaggtgccagaggacgaacccgcagaggtttccgcccacctccagatggaagtggagagactgatcgtgcaatcttatgtgctagaacaccaaaaaactacgacccccgaccctatggacgatccatgtttctcacaccgatccagacggaaacttgcgaagattcaactcccagagtacattcttgacttcgggtacattatcctgggcgaggtcaggacccacattatcaagatcatcaatacgtcccactttccagtgagctttcatgccgataagcgggtgctgcacgaaaccggcttctcgacagagcttgatcgcgtcaaaaatctaccccactgcgaaaccgaaatcttcgaagttcgcttcgacccccagggcgccaatttgcctgtaggatccaaggaggttatcctgcctatcaaagtcgtcggagggcccacagtgcacatctgtctgcaggccaaggtgacaatcccaaccatgacattaagcagagggaaagttgatttcgccactattcaatgtggacaatgtctcgtagaaactattcagctgagcaatcatcttcaggtcccctgcgaatggtttgtgcagtctcagaaacccgtggacaaactcgagaaacatatgcccaagtaccttcggcagaaactcagagctgaacttaaacctaagacgcgaattttcgaaattcagcccatctcaggggtcctggacccgggcgaaaaatcaaacgttcaggtcaaattcatgccaaaggaagagaaattctattctcagacactggtgttccagattgcccagtcagcgcagaagctcacccttctggctagagggcaaggcctcgagccccggcttgagttctctccttcagtgctagatcttggtccattattgctgtgtgccccaggcgacgaagccgaagtcattgtgaaaaacccttgtaattttccaatagaattttactccttagagttcgaccagcaatacttaatcgaggagaagatccttcggaagctcaaaggttatgacagttacaacaccctgttactgcctcccagaaatcctggggagaagctgcccccagagctgtacgaatacttcaaggagattaaaaagagcaaagaggaacagatgcgagccaagtacctggaaaacctcgcccaggaaaatgaagaggaagatataacttcttctgatcagggcacatccaattcaacaaaacggacctctctgtctcgtgggatctcagtcacctcgaatctagaagagtggcacgccctgctcgtcgagagcaagacctatctggaagaagaggaggacgaggagtcacttgaaaagattattttccaaaccgataaattgcagtctatagacagtcactccatggaggaagttggcgaggtggaaaacaatcctgtcagcaaagcaatcgcacgtcatcttggcattgacattagtgcagaggggcggctggccaaaaaccgcaagggaattgctatcattattcatgggactccactttctggaaagagtgccaatgcagtgagcgtggctaagtattataatgcagcttgtctgtccattgactcaatcgtgctcgaagccgtcgccaacagcaataatattcccggaatccgggcccgagaactttgtattagagcggctattgagcagagcgtcaaggagggggaggaagccgcgcaggaggcagcagtcggtcaaaacgtgatcggacagggtcggctctctacggacacgctcgggaagctggcttctgaaatgaccttagtggcgcccgagatcaagcccggaaaatctgttaggggatctgtggttattacaaagagcaaggccgatagccatggaagtggttcgcagaagcagcatcattctcaccaatctgagactcctcaaatttcctcctctccgctccctcccggcccaattcaccgttggctgagcgtgagccctagcgtcggcggagagacaggtttaatgtcttgtgtcctgcctgacgaactgttggtccagatccttgccgaacggatccagctgtccgactgctacagaggagtggtgtttgacgggttagatacattgttcgcacaaaacgcagcagccgctctcctctgccttttgaaggctattggctctagggagcacatttacatcttaaatatggcacaagactatgctgccatgaaggcccaggagaaggctaagaaggaacaggaggagcgtaagcacaagggcgcgttagaaaaagaaaaagagagacttcagaacatggatgaggaagagtatgacgctctgacggaagaggagaaattaacgtttgatcgcgggatccagcaggccctgcgtgaacgaaaaaagcgggagcaggagaggctagctaaagagatgcaagagaaaaagctgcagcaggaactcgagcgtcagaaggaagaggatgagctgaagagaagagtcaagaaaggaaagcaggggccaatcaaagaagagccccccatgaaaaaatctcaggctgccaataagcaagtgccacctttgacaaaggtggacgtgaaaatggagaccattgagcgtaagatcagcgtgagagagcagactatgtctgagaaggaagaattaaacaagaagaagcggaatatgggcgatgtgtccatgcatgggctgcccctggttcaggaccaggaggacagcgaaggtgacaactcaaaggaccctgataagcagctggccccaaagttcaagacctacgagcttactcttaaggatgtgcagaacatcttaatgtactgggatcggaaacagggagtgcaactcccacctgctggcatggaggaagccccacatgaacccgacgaccagagacaagtgcctctcggtgggcggagagggaggaaggaccgcgagagggagcggctggaaaaagaacgaaccgagaaagaacggctcgagagggagaaagctgagcgtgagaggctggagaagcttcgtgccctcgaggaaaggtcagactgggagggggagggtgaagaggatcacgagggaaagaaagaaaaggacctgggagtgccattcctagacattcagacccccgacttcgagggcctgtcctggaaacaggccctggaaagtgacaagttaccaaaaggggaacagattcttgacatcctaggactgggagctagcggcccccctattccccctccggcattgttctccatcgtgtcttatcctgtgaaaaggcccccgctgaccatgacagatgatctagaacactttgtcttcgtgatacccccaagtgaagatatctccctggacgagaagaaggagatggaaatcgaaagcgattttcttgccaccacaaatactaccaaagcccaggaagaacagacgagctcctctaaagggggcaaacaaaaaatgaaggagaagatcgatcaagtgttcgagattcagaaggacaagcgccacatggctctgaacaggaaagtactcagcggtgaacctgcaggcaccatctctcagttgtctgatacagacctagataattttaatgggcagcatagccaggagaaatttacccggctgaaccactttagatggattgtgcctgctaacggtgaagtcacgctgcaggtccatttcagcagcgatgagtttggtaattttgatcagacattcaactttgagatcttaggaacatgctgtcagtatcaactgtactgcaggggcatttgcacatacccatacatttgccaggatcccaaagtggtctttccccagagaaagatggatatgaaaacgaatgaggtaatttttaagaagtatgtgatgagcactgagacttattattttggaccgctactatgcgggaagtcccgcgataaatacaagtcttctctgtttcctggcaacatggagactttgacaattctgaacacatctttgatggtcgtcgaggcgtcattctacttccaaaacgacgtcaaggcaaatacatattttttggaacccaacacaatggtgttaaaaccaaatgagaagcagattcttaatgtgtgggcctatccaacatctgtaggcgtatttgaagattctattgtgtgctgcattaacgataaccctgaacctgccatttttcagcttagttgtcaaggcattcgtcccgagctcgagttggagcctcgtcagctgcactttgatcggctgctacttcaccgacaggagtctagagttgtgctccttcgcaatgtcacacttcttcccgtggcttggaggattacgtcactggagcatctgggcgatgattttacagtttcacttatgcagggaaccatccccccggaagccgaatacggtctacatttatactttcagccaactaaacctgttaacatcaaaaaagctattcgccttgaggtcctggacgctgagaacctgctcggagtggtccaaatcgaaaacataatggtgttcgcagaagcttacgacattgcccttgacatcacttttcctaagggcgccgaaggggggcttgatttcggcatcgtgagggtgacagaagaggcaaaacagcccctccaattgaagaatcgcggtaaatacgagattgctttctcattcagcgtggattccgttggcattagcactcccaatattaattctatgatttcagtgcaacctaagaagggcagcctcacccccactgaaaagccaacaaacgttcaggtcttcttccacgctaaaaaggaggttaaaattgagcaccagccagtgcttcgctgccagattattgaacctaatatatcagaaggaggcgagatcattgccagcattccgataaaatttagtgccaacgctgtctactcaaaatataacataacgccaagctcagtgataaacttcggagccctcatatgtgggaccagaaagtcaacaacttttacaatcgaaaaccagggggtcacagatttcaagtttgccctttacaagctgaccggcgagagcccaattcaccagaagaaggcagcatcgcacgtgcgccatgctaggtcccgcgaatccgagagcttctacaagacaggcagctctcgcgccgcaaagttctctgataccatccagaaagaagtcaccacaaccgggcaggcccggtttgcacatggcatgtttaccgtttatccagggttcgggagcatcccttccggcggccagcaggtgattaatgtggattgtgtggccgatgcaatgggaaagtgcgaggagtttattgctatcgatatttccggacgcgatcccgccgtccatccagccggcattctgtacactctgctcgccgaggcttgtctgcccgcttttgtgaccgagaacaatgccctaatttttgaggagcaccagatctgcaccagtgctaacttacatcacattttgcagaccattgagagcgggggcctgtttgtcgaggacgaaaataaattcattttttgcaatgtgttggtgggccgacaggctaaagctaggttcaaaatcagcaatgtgggcaagatcacctgtgatgtgaacatagttgtgaggcccatatctaacaagccctttgccagaattgtggatatctttgaggtggagccctccaaaatgtgcatcgccagccacagccacgctttcgccactgtttcatttaccccacaaataatgcagaactatcaatgtattttcgaagcaactctggatgggctcccttcaactcttgccaaatcccgaggccttgtcttcgacatcgcgggtgaaggaaacttgccgcgggtcaccgtagtgagacccgtcctgcataatcagtatggaaacccactgctactttttaagcgtctgctgctcggtcactcggagaagctgcctctgattcttaagaacaatggagtactgccagctcagcttcatgttgacctgcaggatgagcttggggtattttccctgaaaggacgcccgaccactgcatatatttacataacagaggaaaacaagccacatgtgaaagccaagaaggcccataccgcatccctggtggtgtcaccaggagacacagccgagttcgacgttgttttccactcacagaaggtgggcagaatgcgggggattattcatttatcagtgattaacaaccaatacgaggagacgagtattcatatggtcggagagggctatgaggacgatatcaccctggacaacatccacggactggtggcacctaccagccaggaagacatttctatctcagagttcaccgaaattatcgaggacaatgacatggaggaccttgtcgccgcagcgctggttgatcacatccagttcggagactgtcatattggccacagctataatgccagctttacggtcaccaaccatagtcaggttaacctcatccgcttcgaatggccagtctccgctaccatcgcttttagtccccagatgggccacttgcaccccggctgtgccaaggatattgtcgttacaatgaaatcagatgtgccgattaatctgaaaaatatgagaatccgttgcaagctgtctaggattatgttccaactgccagccgatcaggtcccagactgggacgacaggatgcacaccgtgaagtgggtcgacgttcccaggaacatgcctggtacatttaccaccaaacggaaagtcatcgagactgatcctgaaccggcacactcagtgctggaagaaaactaccaggaactccagctgcagatttctgctaatgtagactttgcatcctatcactgccaagcacgggacgtccgatttaaggagacactagtttatcagaccagggtgttcgagtttgacgtcatcaacagcggaagggtccagctggaattttcctgggtttccgaagatacatccaaagccgtgagtttcgctaagcccgaccatcaagggtcagctcagaaagaccagctgtctcagggtaccatgcacaccggaagtaccttagatagcaccatggatcattgggctgagggatcaccacagccattctcagtagaaccatcgtctggtatagtacccgtaggcaagattcagaagtttaaggtgaagttttccccactcgacatcggggattttgagagcaacctgttttgtcagatccctaacctgccccccggggagcagggcccggtgttggtcgctaagggccgttccacgctgcccatctgccactttgatcttaaggattctgattacatcagtgggcatcagcgaaaccccgaattaagaggatcctctggcggtgcgctggaccctaacaccagggttatcgaatttacaacggtcggcattggcggcaaaaaccttagaacgttcactattctcaatcccacgaattccacatattcgttttgttggatctctgaagagattgagagcctgcaaaaccctgcagcttttacctgccttaccgagaagggttttatacatcccgagaaaaaagcggaaatcgtcttccagttcaccccgttccacctggggataaccgagagctcttggacatttttgattcccgaacacaacattaccgtcccattcctgcttgtgggcaaaacaacagaacccctcatctctttgaacaaaagccatcttaatttttctagtctcctgatcggcagggaagccagagaaaccgtccagataatcaacaaggaggaacagggttttgatttcagttttcaagataattcacgctactccgagggtttcagtaattcgctattggtgtgtccaatggaagggtggatcccccccttgtcacgctttccaattgatattttctttaccccaaaacaggagggtgacgtcaacttcaatctaatttgcaacgtggaaaaaaaggtgcatcctgtgacactgaacgtgaaagcagaggggtataccatgaacgtcgagataaagtgtaaggataggaccgggtcaataacattgttgacaccaaatcagaccaacatcattaatttctatgaagtggaacttaacgaatgcgtacagtgcgagttcaatttcatcaacactggaaaattcactttctccttccaggcacagctttgcggctccaaaaccctgttgcagtacctggaattcagcccgatcgatagcacagtcgatgtaggacagagtgtgcacgctactctgagtttccagccgctgaagaagtgcgtgctcacagacctagagttgattatcaagatcagtcacgggccgactttcatgtgcaacattagcgggtgcgcagtttcacccgcaatccacttttccttcacctcctataactttggaacttgctttatttatcaggccggaatgccaccttacaagcagaccttagtgattactaacaaggaggagaccccaatgtccatcgattgcctgtataccaacaccacccatttggaggttaactcccgggtggatgtcgtgaagcccggaaatactctggaaatccctatcacattctaccctcgggaatccattaattatcaggagcttattcctttcgagattaatggcctttcccaacagaccgtggaaatcaaaggcaaaggaacgaaaatgaaaatcctagtgctggatcctgctaacagaatagtaaagctgggggccgttcttcccgggcaggttgtcaagcgcacagtctccatcatgaacaactctctggctcagctaacctttaaccagtccattttgtttaccataccagagttgcaagagccaaaggttctcaccctggctccttttcacaatatcaccctaaagccaaaggaagtttgtaaattggaggttatttttgcccctaagaaacgcgtgccaccattcagcgaggaagtgttcatggagtgcatgggtctgctcaggcctttgtttcttctaagtgggtgctgtcaggccctagagatttctctggaccaggagcacattcctttcggaccggtggtgtatcaaactcaagcaactaggcgcatacttatgatgaacactggcgatgtgggagccaggtttaaatgggacatcaagaagtttgagccccacttttcaatatcccccgaggagggctatattacttccggaatggaggtctcctttgaggtgacctaccatcccacagaagtaggcaaggaatcactgtgcaagaacatcctttgctacatccagggcggtagccctctcagcctgaccctctcaggcgtttgtgtggggcctccggccgtaaaggaggttgtgaacttcacctgtcaggttcgctcaaaacacacccaaacgatcttactgtcgaatcgcaccaaccagacctggaatcttcaccccattttcgagggtgagcactgggagggaccagagttcatcacccttgaggcacatcaacagaacaaaccatatgaaattacctaccggcctcgtacgatgaacctggagaatcgaaaacaccaaggaactctcttttttccccttccagacggtaccgggtggctgtatgctctccatggaacatctgaattaccaaaggccgtggcgaatatctatagagaggtcccctgtaagactccctatacagaattgttaccaatcaccaattggttaaacaagccacaacgtttccgagtaatcgtagagatacttaaacctgaaaagccagatctctcaataaccatgaaagggttggattatatcgatgtcttgtcagggagtaagaaggactacaaattgaattttttttcacacaaagaaggtacttatgctgctaaggtgatttttcgtaacgaggtcactaacgagtttctgtactacaacgtgtcatttcgtgtgatacccagcggtatcattaaaaccatagaaatggtgacccccgtgcgacaggtcgcatccgccagcattaagctggagaatcccttgccatattcggtgactttttccaccgaatgcagaatgcccgatatcgccctcccttctcagtttgtagttcccgctaacagcgagggcacctttagcttcgagttccaaccgctgaaagctggcgaaaccttcggacgtctgactttgcataacactgacctgggctattaccagtacgaactgtatctgaaggccacgcccgcattgcccgaaaaaccagttcactttcaaacagtcctggggagctcacagattatccttgtgaagttcattaattatacaaggcagcgtaccgaatactactgccgaacagattgcaccgatttccacgcagagaaactgataaacgccgctcccgggggccagggaggcacggaggcgtctgtggaagtgctgttcgaaccttcgcacctgggcgagaccaagggcatcctaatcttgtctagcctggccggaggggagtacattatccccctgtttggtatggcgctaccacccaaaccacagggacccttctctattcgagccggctactctatcatcattccttttaaaaacgtcttctatcacatggtgacattcagcatcatagtggataacccagccttcacaatcagagctggtgagagcgtccggcccaagaaaattaataatatcaccgtgtcttttgagggtaacccaagtggatctaaaacacctatcaccaccaagttgactgtttcctgtccccctggtgagggaagcgaaacgggagtgaaatgggtgtattatcttaagggaataaccctttag

SEQ ID NO: 191088 - DNA, 3054 bp, synthetic construct
  misc_feature 1..3054: note = Description of Artificial Sequence: Synthetic coding sequence
  source 1..3054: mol_type = other DNA
atgaccagccggcggctggaggagagcatgggcgccgtgcagatgggcttagttaatatgtttaaaggttttcagtcaaaggtgcttccccccctgtcacccaaggtggtgaccgaggaagaggtgaaccggatgttgacaccatctgaatttctgaaagagatgagtctcaccaccgagcagcggctggcgaagactcggttaatgtgccggccccaaataatcgagctgcttgacatgggggagacaacccaccaaaagttctctggaatagacctggatcaggcattatttcaaccttttccctctgagatcatttttcagaattataccccctgtgaggtgtacgaagtccctctaatcctcagaaataatgacaagattccaaggctcgtgaaggtagtggaggagagtagtccctatttcaaggtcataagtccaaaagatattggccacaaagtggcacctggagtaccctctatttttcggatattatttactcccgaggaaaacaaggattacgcccacacacttacatgtgttactgaacgggaaaaattcatcgtgccaatcaaggcccgaggtgccagagcaatcctggacttcccggacaagctgaacttctccacatgcccagtgaaatactcaacccagaagatcctgctggtcagaaacataggcaacaagaatgctgtgttccacataaagacatgcaggccattctcaattgaacccgccatcggcaccttaaacgttggcgaatccatgcagttggaagtggagttcgaaccacagtctgtcggagaccactcaggcagactgatcgtctgttacgataccggcgaaaaggtgttcgtatccctctatggggccgccatcgacatgaatatcagactggataaaaacagtctaacaatagagaaaacatacattagtctcgccaatcagcgcacaatcaccatccacaatcggagcaacatcattgctcactttctatggaaggtgttcgccactcagcaggaagaagatcgggaaaagtatcgggcctgcgatgatctgatcaaagaggaaaaagacgaaactgatgaattcttcgaagagtgtataactgaccctctgcttcgggaacacctttctgtactgtcaagaacattcgcgaaccagcgacggcttgtgcagggcgacagcaagctcttctttaacaacgtgtttacagtagaaccccttgagggggatgtctggccaaactccagtgccgagatcacagtctactttaatcctttagaggctaagctctaccaacagactatatattgcgatatactcggaagagaaattaggctaccgcttaggattaaaggagagggaatggggcctaaaatccatttcaacttcgaacttctagatatcggtaaagttttcactgggagcgctcactgctacgaagcaattctctataacaaaggcagtattgatgctctgttcaatatgacccctcccacctcagctctgggcgcttgttttgtgtttagccctaaggaaggtattatcgagcccagcggggtccaagccatacagattagctttagtagtaccatcctcggcaattttgaggaggagtttctggtgaacgtgaacgggagtcctgagcccgtcaagctcactatacgcggctgtgtgattggaccaacattccacttcaacgtacctgccctgcactttggcgacgtctccttcggttttccccatactctgatctgctcactgaacaacacatccctgattccaatgacttataagttgaggatccctggcgatggactgggccataagtccatcagctactgcgagcagcatgtcgactacaaaagaccttcttggaccaaggaggagatctcttcaatgaagccaaaagagttcactatttctcccgactgcgggaccatacgccctcaagggttcgctgccatacgtgtgactctgtgttcgaacacagtccagaagtacgaacttgcattggtggttgacgtcgagggcatcggcgaggaggtccttgcactcctgatcaccgcgcgatgcgtcgtgccagcactacacctggtgaacactgaagtcgactttgggcactgcttcctgaaatacccttacgagaaaacccttcagttggccaaccaggatgacctgcccggattctatgaagtgcaacctcaggtgtgcgaggaagtccccaccgtgctcttctcctctccaacaccctctggcgtcatctctccaagcagtaccattcatatcccactagtactggagacgcaagttacaggcgaacacaggagcaccgtgtatatcagcatttttgggtctcaggaccctcccctcgtgtgccacctgaagagcgctggcgagggacctgttatctatgtgcatcccaaccaggtcgatttcggaaacatatatgtgctgaaggacagctcccggatcttgaacttatgcaatcagagctttatccctgcattcttccaggcccatatggcgcataagaagagtctgtggacaatcgaacccaatgaggggatggtacctccggaaaccgacgtgcaactcgcactcacggctaaccttaacgacacacttactttcaaagactgtgttatacttgacatagagaatagctcaacgtatcggatccccgttcaagccagtggaactggcagcacaatcgtttcagacaaaccattcgccccagagctgaatttaggagctcacttttccttggacacccactactaccatttcaagttaatcaacaagggtcgccgaattcagcagttgttttggatgaacgactcttttaggcctcaggcaaaattatctaaaaaagggcgcgtgaagaaggggcacgctcacgtccagcctcagcccagtgggagtcaggaaccacgggatccccaatcaccagtgtttcatctccaccccgcctccatggagttatacccaggccaagcaattgacgtcatcctcgagggctatagtgcaaccccccgggtacgcggctag

SEQ ID NO: 191089 - DNA, 2223 bp, synthetic construct
  misc_feature 1..2223: note = Description of Artificial Sequence: Synthetic coding sequence
  source 1..2223: mol_type = other DNA
atgaccagccggcggctggaggagagcatgggcgccgtgcagatgggccttgtgaacatgttcaaaggctttcaaagtaaggtgctgccgccgctcagccccaaggttgtgacagaagaggaagtgaacaggatgctcactccctctgaatttctcaaagagatgagccttacaacagagcagagactcgccaaaacacgattgatgtgtcggccacaaattatagagcttcttgatatgggcgagactacccatcagaaattcagtggtatcgaccttgaccaggccctgttccagcccttcccttctgagatcatcttccagaattatacaccctgcgaggtgtatgaggtccccctcatcttacgcaataatgacaaaatccctcgattggtgaaggtggtggaggagtcttccccgtattttaaggtgatttctcccaaggacatcggtcataaggtggcaccaggcgtcccatctatttttcgaatcctatttacacccgaggaaaataaagattacgcccatacactgacatgcgtgaccgaacgggaaaagtttatagtgccaattaaagccagaggtgccagagctatcctcgattttcccgataaacttaacttcagcacttgccccgtaaagtattctacacagaagatattgctggtgcggaacattggtaacaagaatgctgtcttccacataaaaacctgtcgccctttcagcatcgagcccgccattggaacacttaacgttggagaaagcatgcagttggaagtcgaattcgagccacagagcgtgggggaccacagcggccgacttatcgtatgttacgatactggagagaaggtttttgtaagcttgtacggggctgccatcgacatgaacattcgattggataaaaattcattgaccatcgagaagacatatatttctctcgcaaatcagcgtacaatcaccattcataatcgcagcaatataatcgcccactttctctggaaagtgtttgcgacacagcaggaggaggatcgggaaaaatatagagcctgtgacgacctaatcaaagaggagaaagatgagaccgacgagttctttgaagaatgcatcacagaccctctgttgagggaacacctatcggtcctctcaagaaccttcgcaaatcagcgcagactggtgcagggagattcaaaattgttctttaacaatgtatttaccgtggagccactggaaggtgacgtgtggccaaacagctccgccgaaattaccgtctattttaacccacttgaggcaaagctctatcaacaaaccatatattgcgacatcctgggccgcgagattcggcttccactgagaattaaaggcgaggggatgggtcctaagatacactttaatttcgaactgctggacattggaaaggtgtttacaggcagtgcccactgctacgaagcaatactttacaacaaaggatccatagatgcactgtttaacatgacccccccgaccagcgcactgggggcatgttttgtgttcagtcccaaagaaggcatcattgagccatcaggggtgcaggccatccagatatctttctcctccacaatcctgggaaacttcgaagaggagtttctggtaaatgtgaatggctctcccgagcctgtcaagttgacaatccggggatgtgttatcggaccaacgtttcactttaacgtcccggcactgcacttcggggacgtctctttcgccacacaggagctgagggatccacaggtgctcattccgtttcagcgttttccgcacactctaatctgtagtctgaataacacgtccctcatccctatgacttataagttgcgtatcccgggagatggactgggacacaagagtatttcctactgtgagcagcatgttgattataaacgcccgtcatggactaaggaagaaattagcagtatgaaacccaaagagttcactatcagccccgattgtggcaccataaggccacagggtttcgccgcgattagagtgaccctctgctcaaatacagttcagaaatacgagttagcacttgttgtggacgtcgaaggaattggcgaagaggtcctcgccctgcttattactgcgtctgcccccgagctgtgcaaccgaaaggttatgctgtctgtacttcaatggaagatccatcgcgccaagcgaagcctacccagggataccgtggccgtgacctag

SEQ ID NO: 191090 - DNA, 3645 bp, synthetic construct
  misc_feature 1..3645: note = Description of Artificial Sequence: Synthetic coding sequence
  source 1..3645: mol_type = other DNA
atgaccagccggcggctggaggagagcatgggcgccgtgcagatgggattggtcaacatgttcaagggattccagtcaaaggtgttgcccccactctccccaaaggtagtgactgaagaagaggttaaccgcatgctgacaccttctgagttcctcaaagaaatgtcactgactacagagcagcgcttggctaaaactagattaatgtgcagaccacaaataatcgagctcctggacatgggcgagacaacccatcaaaagttcagcggaatcgaccttgatcaggccctgttccaaccatttcccagtgagatcattttccaaaattatacaccctgcgaagtatatgaagtgccactgattctacgcaataatgacaagatcccccggctagtaaaggtggtcgaagagagttcaccttacttcaaagtaatttctcctaaagatattggccacaaagtcgctccaggcgtgccctcaatttttagaatcctctttacccccgaggagaacaaggactacgctcacacactcacgtgcgtgaccgagcgcgagaagttcatcgttccaatcaaggctcgcggggctcgggccatattggactttcccgacaaattaaatttctccacttgtcctgtcaaatacagtacccagaagatcctgctggtccggaacattggtaacaaaaacgccgtgtttcacattaagacatgtcgaccattctcaatcgagccagccatcggaactttgaacgtcggtgagagcatgcagctcgaagtggagtttgaaccccagtcagtaggggatcattccggccggttaatagtctgttatgacactggagagaaggtctttgtgtcgttatacggagcggctatcgacatgaatatcaggttagataagaacagtctcactatcgaaaaaacgtacatcagtctggctaatcaaaggactattaccattcacaatcgcagcaacattatagcacactttctgtggaaagtgttcgcaacccagcaagaagaggaccgcgagaaataccgtgcctgtgacgatctgattaaggaggaaaaggacgagacggacgaatttttcgaggagtgcataactgacccacttctcagagagcacctgagtgtgctttcgcgtaccttcgccaatcagcggaggctggtccagggtgattcaaagcttttctttaataatgtgtttaccgtggaacccctggaaggggatgtctggcctaacagctccgctgagatcaccgtgtatttcaatcctctggaggctaagttatatcagcagacaatttattgcgacatcttaggaagggaaattagattgcccctcagaatcaaaggggagggaatgggaccaaagattcattttaattttgaacttttggatatcggaaaggtgttcactggctccgcacattgctatgaggccatactgtacaataagggctctattgatgccttattcaacatgacaccgcccaccagtgctttaggtgcctgtttcgttttctcgccaaaggagggtataattgaaccttctggagttcaggctatacagatctctttttcttccacaatccttggaaacttcgaggaggagttcctggtaaatgtaaacggcagcccggagccagttaagctaaccattcggggctgtgttatcgggccaacgtttcatttcaatgtgcccgccctacacttcggggatgtgtctttcggctttccacacaccctgatttgcagcctcaataataccagtcttatccccatgacatataaactgcgcatccctggcgacggcctgggccacaagtcaatctcctactgtgagcagcacgtagattataaaaggccttcgtggactaaggaggagatatcttccatgaaacctaaagaatttaccatttctccggattgcggaacgattagaccccagggttttgcagccattagagtgacactgtgctccaatacagtccagaagtacgaactggctctggtggtggacgtcgagggtattggcgaggaagtgctggcactacttataaccgcacggtgtgtagtgcccgccctccacctcgtaaacacagaggttgacttcgggcactgttttctgaaatatccatatgagaagacattgcagttagcaaatcaggatgaccttcctggcttttacgaagtccagccacaggtgtgcgaggaggtacctacagttctattttcaagtcccaccccgagcggcgtgatcagcccatcctcgaccatccacattccccttgtgctggaaacccaagtgactggtgagcatagatcgacggtgtacattagcattttcggaagccaggaccctcctctggtgtgccacctcaaaagtgccggggaaggtccagtcatatatgtgcatcctaatcaagtggactttggcaacatctatgtcctgaaagactcttcgagaattttgaatctttgcaatcagtcattcataccggcttttttccaagctcatatggcacataaaaagtcattgtggacaattgagcccaatgaggggatggtgcctcccgagaccgacgtccaactagccttgacagccaatctgaatgacaccctgacattcaaggactgcgttatcctggacatcgaaaacagcagtacatacaggatccctgtgcaagcaagcggcactggcagtacaattgtttccgacaaaccatttgcaccagaactgaacttgggcgcacacttctcactcgacacgcactactatcacttcaagctgatcaataagggtagacgaatccagcagcttttctggatgaatgattcctttcgtccccaagccaaactcagcaagaagggcagggtcaaaaagggccacgcacacgtgcagcctcagcctagcgggtcccaggagccccgcgaccctcagagccctgtgtttcacctgcacccggcaagcatggagctttatccaggacaggcgatcgacgtcattcttgagggctactcagcgacccccagaaaaccgaattctatcctgaagcctgactaccagcctcttgcaattaagaatatttccacactgcccgttaacctgctcctgagcacttcaggtccgttttttatatgtgaaaccgataagagcctccttcccgcaaccccagaaccgataaagctggaaatcgatgaggaaaaaaacctcctgatcaaatttgatcccagctacaggaacgatctgaataactgggttgctgaagagatcttggcgataaagtacgtcgagcaccctcaaatagatagtctggatcttagaggcgaagtgcactacccaaacctttcattcgaaacaaaggaattggattttggctgcatcctgaatgataccgagcttatccgctacgttaccattacaaactgctcaccccttgtcgttaagttcagatggttcttcctggtgaacgatgaagagaaccaaatacgctttgtcacacttcctaagaagccatactccgccccagtatctcagatggaatccataccagctacttccgaggccgcctctcctccagcgatcctggtaaccgtggagtcaccagaaatggacctaaacgatttcgtgaagtag

SEQ ID NO: 191091 - DNA, 3054 bp, synthetic construct
  misc_feature 1..3054: note = Description of Artificial Sequence: Synthetic coding sequence
  source 1..3054: mol_type = other DNA
atgaccagccggcggctggaggagagcatgggcgccgtgcagatggggctagtaaacatgtttaaggggttccagagtaaagtattaccacccctatccccgaaagtggttacagaagaagaagtcaacaggatgctgacaccatccgaatttttgaaggaaatgagccttaccacagaacagcgactcgctaagacaaggctcatgtgtcggccacagatcatcgagctcctggacatgggggaaacaacacaccagaagttttccggtatagacttagatcaagcgttgttccaacccttcccctctgaaatcatctttcagaattacactccctgtgaggtgtatgaagttcctctaatcttgagaaacaatgacaagattccacgattagtaaaggtggtggaagaaagctcaccctatttcaaggttatttcgcctaaggacatcggtcataaggtggccccaggcgtgccttccattttcagaatcctttttacaccggaggagaacaaagactatgcccatacactcacatgcgtgacagaacgggagaagtttatagttcccatcaaggctcggggggcccgcgccatcctcgatttccctgacaaactgaatttctcaacatgtcccgtgaagtacagcacccagaaaattctcttggtgaggaatatcggtaacaagaatgcagtttttcatatcaaaacctgtcgacctttcagtatcgaacctgcaataggaactcttaacgtcggggagtcgatgcagcttgaggtggaattcgagccgcaatcggtcggtgaccattctggcagacttatagtgtgctacgacaccggggaaaaagttttcgtgtctttgtatggggcggcaatcgatatgaatatcagattggataagaattcgcttacaatcgagaaaacttatataagtcttgccaaccaacgaaccatcacaattcataaccgaagcaatattatcgcccactttctttggaaggtcttcgccacgcagcaggaagaggatcgcgaaaagtaccgtgcttgcgatgatctcattaaagaggaaaaagacgagaccgatgagttcttcgaagagtgcatcacggaccctctgctaagggaacatctgtccgtgcttagtcgaacgttcgctaaccagcgcaggctggtgcaaggggattctaaactctttttcaacaatgttttcactgtagagccacttgaaggggacgtgtggccaaacagcagcgctgagataacggtgtatttcaacccgttggaagctaaactctatcagcaaaccatctattgtgacattctcggccgcgaaatcaggcttccactgcgcatcaaaggagaggggatggggcctaaaatccacttcaacttcgaactcctggacatcggaaaagtattcacaggctcggcacactgctacgaagcgatcttgtacaataaagggtccattgacgccctctttaacatgactcctcccactagtgctctcggagcctgtttcgtgttctctcccaaggaggggattattgaacccagtggggtacaagcaatccaaatttcctttagttcgactatactggggaacttcgaagaagagtttctggtgaacgtcaacggaagcccagaacctgtgaaactgactatcagaggctgtgtcattggacccacctttcatttcaatgtgcctgctttgcactttggcgacgtcagctttggatttccccacacactcatttgttcgctgaacaatacctctctcatcccaatgacttataagctccggatccccggagatggactaggtcacaagtccatttcttattgtgagcaacacgttgattacaaaaggccctcttggaccaaagaggagattagtagtatgaaacccaaggagttcacaatcagcccagactgcggaactattcgaccccagggatttgctgctattagagtgaccctctgcagcaacactgtgcagaaatacgagctcgctctcgtggtggacgttgaaggcataggagaagaggttctggcactgcttatcaccgcgcgttgcgtggtgccggccctgcatctggtcaatactgaagtcgatttcgggcactgcttcttgaagtatccttacgagaagaccttacagttagccaaccaagatgatctccccggattttatgaggttcagccgcaagtttgcgaggaggtgccaacggtgctgttctcgagccctactccaagcggcgtcattagtccaagcagtaccatccatattcctctcgtcttggaaacacaggtgaccggcgagcataggtcaactgtgtatatctccatcttcggatcccaggaccccccactagtgtgtcatctaaagtcagctggcgaaggccctgtgatctacgtgcaccctaatcaggtcgacttcggaaacatctacgtcctcaaagattctagccggatcctgaacctgtgcaatcaaagcttcatcccggctttcttccaggctcacatggcccataagaaatctctctggacaatcgaacccaacgagggtatggtccctcctgagacagacgtgcagctggcattgacagctaacctcaatgacacactcacctttaaggactgcgtcattctggacatcgagaactcctctacctatagaatccctgttcaggcatctggcaccggcagcaccatcgtgagtgacaagcccttcgctccagaactgaatctgggcgcacacttctcactggacacccactattaccatttcaagctaataaataagggcaggaggattcagcaacttttctggatgaacgattcgttccggccacaggctaaactgtccaagaaggggagggtgaagaaaggccatgcacatgtgcagcctcaaccctcaggatcgcaggagccccgggatcctcagtctccggtattccacctgcatcctgcctcgatggagctttatcctggccaagcgatcgacgtcattctagagggctattccgctaccccaagagttaggggatag

SEQ ID NO: 191092 - DNA, 822 bp, synthetic construct
  misc_feature 1..822: note = Description of Artificial Sequence: Synthetic coding sequence
  source 1..822: mol_type = other DNA
atggccacctgggacgagaaggccgtgacccggcgggccaaggtggctcccgccgaaagaatgtccaagttcctgagacactttacggttgttggtgatgactaccacgcttggaacatcaattataaaaagtgggagaatgaggaagaagaagaggaggaggagcaaccacccccgacccccgtctcgggggaggagggaagagcagcagccccggacgtcgcccccgcacccggcccagcgccccgggcccctttggatttcaggggcatgttaaggaagctgttctcctctcaccgatttcaggttatcatcatttgtctcgtggtactggatgccctcctagtactggccgaactgatcctggacctgaagataatccaacccgataagaacaactatgccgctatggtgtttcattacatgtccataacaattctggtgtttttcatgatggaaatcatcttcaaactatttgtatttcgtctcgaatttttccatcataagtttgagattttggacgcagtagtggtagtagtcagctttatcctggatattgttctgttgtttcaagagcaccagttcgaggctcttggtctgctgattctcctgagactttggagggtggccagaatcatcaatggaatcataatttccgtgaagacgcgatctgagcgacaattgctgcggttgaaacaaatgaatgtgcaattagctgccaagatccaacatcttgaattttcatgcagtgagaaggagcaagagatcgaacgcttaaataaattgctgaggcaacacggtctgctcggggaggtgaactag

SEQ ID NO: 191093 - DNA, 822 bp, synthetic construct
  misc_feature 1..822: note = Description of Artificial Sequence: Synthetic coding sequence
  source 1..822: mol_type = other DNA
atggccacctgggacgagaaggccgtgacccggcgggccaaggtggctcctgccgagcgaatgtctaaatttcttcgacactttaccgtggtgggtgatgattaccacgcctggaatatcaactacaagaagtgggagaacgaggaagaagaggaagaggaagagcagcccccacccaccccagtctcaggtgaggaggggcgggctgcagcccctgacgtggctcccgcccctggtcctgctcctagggcaccgctggattttcgaggcatgctgagaaaactgttctcatctcaccgctttcaagtgatcataatttgtctcgttgttcttgatgcccttcttgtgctcgcagagctgatcctggacctaaagataatccagcccgacaagaacaattacgctgcgatggtgttccactacatgtctatcacaattctggtgttttttatgatggagataattttcaaactctttgttttccgcctcgagttcttccatcacaagttcgagattctagacgccgtggttgtggtggtgagcttcatcctagacatcgtcctgctcttccaggaacaccagtttgaggcattaggcctgctgatcctgttgaggctgtggcgcgtggctaggattataaatggtatcataatttccgttaaaactaggtccgagcgtcagttgctcagactcaagcagatgaacgtgcagctcgcagccaagattcagcatttggaattctcatgctctgagaaggagcaggaaatagaaaggctgaataagctactgagacaacacggactgctcggggaagtgaactag

SEQ ID NO: 191094 - DNA, 237 bp, synthetic construct
  misc_feature 1..237: note = Description of Artificial Sequence: Synthetic coding sequence
  source 1..237: mol_type = other DNA
atggccacctgggacgagaaggccgtgacccggcgggccaaggtggcaccagcggagaggatgtccaagttcctgaggcatttcaccgtggtgggcgacgactaccacgcctggaatatcaactacaagaaatgggaaaatgaggaggaggaggaagaagaggagcagccccctccaactcccgttagcggagaggaaggcagagctgctgcccctgatgtggctccagcaccctag

SEQ ID NO: 191095 - DNA, 900 bp, synthetic construct
  misc_feature 1..900: note = Description of Artificial Sequence: Synthetic coding sequence
  source 1..900: mol_type = other DNA
atggaggagctgctgcccgacggccagatctgggccaacatggacccagaagaacgcatgctggccgcggctactgcgttcacgcacatttgtgccgggcaaggtgagggtgacgttaggcgcgaggcacaatcgatccaatacgacccttactctaaggcttcggtcgcccccgggaagcggccagctctgcccgttcaactgcagtatcctcacgtcgaatctaatgtcccctctgaaacggtgagtgaagcctcccagcgcctaaggaagcctgtcatgaagcggaaggtgctaaggcgtaaacctgatggagaggtgttggtgacggatgaatcgattatctccgagtccgagagtggaactgagaacgatcaggatctgtgggacctgcgtcagcgcctgatgaatgtacagtttcaggaggacaaggagtcatccttcgatgtgtcccagaagtttaaccttccacacgagtatcaggggatctcgcaggatcagctgatctgctcactgcagcgcgaaggtatgggcagccccgcatatgaacaggatctaattgtcgccagtcgacctaagtcttttatcctccccaaattggaccagcttagccgaaatcggggtaaaactgatagggtcgctcgctacttcgagtacaagagagattgggattccatacgcctgccgggtgaggaccataggaaagagttgaggtggggcgtaagggagcagatgctatgtcgtgccgagcctcaatccaaaccacagcacatctatgtcccaaataactatctggtccccaccgaaaagaaacggtctgccctccggtggggagtgaggtgtgatctagctaatggggtgattccacgcaaactgccttttccactgagtccctcttag

SEQ ID NO: 191096 - DNA, 900 bp, synthetic construct
  misc_feature 1..900: note = Description of Artificial Sequence: Synthetic coding sequence
  source 1..900: mol_type = other DNA
atggaggagctgctgcccgacggccagatctgggccaacatggaccccgaagaaagaatgctggcagctgccacagcatttacacacatctgtgccggccagggcgaaggcgacgtgagacgggaggcccagtcaattcaatacgacccttactccaaggcctccgtcgcccctggaaagaggcccgcgttgcccgtacagctgcagtacccgcatgtggagagcaatgtaccttctgaaacagtgtccgaggcttctcagcggttgcggaagcccgttatgaaaagaaaagtgttgagaagaaagcccgatggagaggttttagtgacggatgagagtatcatatccgagagtgagtccggcactgagaatgaccaggacttatgggatctgagacagcgcttgatgaacgtgcagtttcaggaagacaaagaaagctctttcgacgtcagtcagaagttcaatctgcctcacgaataccagggaatttcacaggatcagttgatctgttccctgcagcgcgaagggatgggtagcccagcctacgagcaggaccttatcgtcgccagccgccccaagtcattcattctccctaagctcgaccagctgtcgcggaacagggggaaaaccgacagggttgcgaggtacttcgagtacaaacgtgactgggactctataagactgcctggtgaagaccacagaaaagagcttaggtggggcgtaagggagcagatgttatgccgagccgaaccccaaagcaagcctcagcacatctacgttcctaacaactacctggttcccacggaaaaaaaaagatctgcactgagatggggagtccgctgtgatctggccaacggggttatcccacggaagcttccatttccactctcaccatcatag

SEQ ID NO: 191097 - DNA, 900 bp, synthetic construct
  misc_feature 1..900: note = Description of Artificial Sequence: Synthetic coding sequence
  source 1..900: mol_type = other DNA
atggaggagctgctgcccgacggccagatctgggccaacatggacccggaagagcggatgctggccgcggctaccgctttcacccatatctgcgccggtcagggggagggagatgtacggagagaggctcagagcattcagtacgatccgtactcaaaagcgagtgtcgcccctggtaagcgccctgctctgccagttcagctccagtacccacatgtggagtcaaatgtgccctccgaaacggtaagcgaggcatcacagagattacggaaaccggtgatgaaacggaaagtcctcaggcggaagccagacggtgaagtcctggtgaccgacgagtcaatcatctcagaatccgaatcagggaccgaaaatgatcaggacttgtgggacttacgccagcggctgatgaacgtccagtttcaggaggacaaggagtcctcttttgacgtttcacagaaatttaatcttccacacgagtaccagggcatatcccaagaccaactcatttgctctctgcagagagaagggatggggtccccagcctatgagcaggatctgattgtggcaagccgccctaagtctttcatcctgcctaagctagatcagttgagtagaaatagaggaaaaacagaccgagtagcgcggtacttcgaatacaaacgagactgggattcaatcaggttacccggagaagaccaccggaaagagctgcgctggggcgtgcgggagcagatgctgtgtcgggcagaaccccagtctaaacctcagcacatctacgtgcccaacaattacttggtacccacagagaagaaaaggtccgctttgcgctggggagtgaggtgcgatttggccaacggggtgatccccaggaaactaccgttcccgctgtcaccaagctag

SEQ ID NO: 191098 - DNA, 1113 bp, synthetic construct
  misc_feature 1..1113: note = Description of Artificial Sequence: Synthetic coding sequence
  source 1..1113: mol_type = other DNA
atgctgccccggctgatctgcatcaacgactacgagcagcacgccaagtcagtgttaccaaaaagtatctacgattactacagatctggggctaatgacgaggaaactctggcagataacatcgcggctttcagcagatggaaattgtacccaagaatgctgcggaacgtggcagaaactgatttgtctacctcagtcctgggtcagcgagtgtctatgccaatatgtgtcggagcaaccgccatgcagcgtatggcccatgtcgacggggagctcgccacagtgcgggcatgccagtcactgggaactggaatgatgctcagttcatgggccacctcatcaattgaagaagtcgccgaagcaggccccgaagccctcagatggctgcagttgtacatttataaggaccgtgaggtgacgaagaagctggttcgacaagcagagaagatgggttataaggctattttcgtcaccgtggacacaccttatctggggaatcggctggacgacgtgcggaaccgttttaagttaccaccccagttgcggatgaagaattttgagacgtccactctaagcttttcccctgaggagaatttcggcgatgattccggcttagccgcctacgttgcgaaggctattgacccttcaatctcctgggaggacatcaagtggctgcggcgactgacgtctctacctatcgtcgctaaggggattctcagaggtgacgatgcccgtgaggctgtgaagcatgggcttaacggcattctggtgagtaatcacggggcgagacagctcgatggtgtaccagcgaccattgatgttctgccagagatagtggaggctgttgagggcaaagtggaggtgtttttggatggtggcgtgagaaaggggaccgacgttctgaaagcgctggccttgggcgccaaagcagtgtttgtgggccggcctatagtatggggactggcctttcagggagagaaaggggtccaggacgtgttggaaattctcaaagaggagtttcgattagccatggccttatccggttgccagaacgtgaaagtgattgataagaccctcgttaggaagaatccactcgccgtgtcaaaaatatag

SEQ ID NO: 191099 - DNA, 1056 bp, synthetic construct
  misc_feature 1..1056: note = Description of Artificial Sequence: Synthetic coding sequence
  source 1..1056: mol_type = other DNA
atgagcctggtgtgcctgaccgacttccaggcccacgcccgggagcaattgagtaaatctacgcgtgatttcatcgagggaggcgccgacgactcaatcaccagggacgataacatcgccgcttttaagcggattcggctgagaccaaggtacctgcgagatgtctccgaagtagacacacgaacaactatccaaggcgaagagataagcgcccccatctgtattgcccccactgggtttcactgcctcgtgtggccggatggagagatgtcaactgcccgggcagctcaggctgctgggatttgttatattacctctacattcgcatcttgctccttggaggacattgtgatcgcagcacccgagggcctgcgttggtttcaactgtacgtgcacccagatttacagttaaacaagcagcttatccaacgggttgagagcctggggttcaaggcactggttatcactcttgacacccctgtgtgcggcaatcgcagacatgatatccgaaatcaactgagaagaaatttgaccctgactgacctccaatcccctaagaaggggaacgccattccgtacttccagatgacacctatctcaacttctctctgttggaacgacctgtcgtggttccaatctataactagactcccaatcattctgaagggcattctcactaaggaggacgcggagttagccgtgaagcacaacgtgcagggcataatagtaagcaatcatggcggcaggcagctggacgaggtgttggctagtatagacgccctgacagaggtggtggctgccgttaagggcaaaatagaagtgtacctagatgggggtgtccgtaccggcaacgacgtgttgaaggcactggctttgggagcaaagtgcattttcttgggtaggccaatcttatggggactcgcatgtaagggcgagcatggggtgaaggaagtgttgaacattctgacaaatgagttccacacgagtatggccctcaccggctgcagatcggtcgctgagatcaatagaaacctggttcaattctcccggctgtag

SEQ ID NO: 191100 - DNA, 1095 bp, synthetic construct
  misc_feature 1..1095: note = Description of Artificial Sequence: Synthetic coding sequence
  source 1..1095: mol_type = other DNA
atggaggacaagatgtggagcgagtgcgagggccccgagatgagcctggtatgtttgacggactttcaggctcacgcaagggaacagctgtccaaatcaactcgggacttcattgagggtggggcagatgactcaatcacaagagacgacaacatcgcagccttcaagcggattagactgagacccaggtacctacgggacgtatctgaggtggacactcggactactatccaaggggaggaaatatcagcacctatctgcattgccccaacgggctttcattgtctcgtatggccggacggggagatgtctaccgctagggcagcccaagccgctggaatttgttatataacttctacttttgcaagctgttcattagaggacatcgtgatagccgctcctgagggcttgaggtggtttcaactgtacgtacatccagacctgcagttgaacaagcagctgattcagagagttgaatcccttggattcaaggcactggtaatcactctggatacgccggtgtgcgggaataggcggcatgatataaggaaccagctgaggagaaacctgacactgacagaccttcaaagtcccaagaagggaaacgccatcccctacttccagatgaccccaatatcaacatccctctgctggaatgacctaagctggttccagagcattactaggctcccaatcattttgaaaggcatactcacaaaagaggacgccgaacttgctgtgaaacataacgttcaagggatcatcgtatcaaaccacggcggccgccagctggacgaagttctggctagcatcgacgccttgacggaggtcgtagcagctgtaaaggggaagattgaagtgtatctggatggcggcgtccgaactgggaacgacgtcttaaaagcactggcactgggagcaaaatgtatttttctgggaagacccatcttatggggccttgcatgcaagggcgagcacggggtcaaggaggtcctgaatatactgaccaatgaatttcacacgtctatggcccttaccgggtgtcgctcagtcgccgagataaaccgaaacttggtgcagttttcgaggctttag

SEQ ID NO: 191101 - DNA, 561 bp, synthetic construct
  misc_feature 1..561: note = Description of Artificial Sequence: Synthetic coding sequence
  source 1..561: mol_type = other DNA
atgagcctggtgtgcctgaccgacttccaggcccacgcccgggagcagctctcaaagtccactcgcgatttcatcgaaggtggtgccgatgatagtatcacccgggacgacaacatcgccgccttcaagagaatacgattacggcctcggtacttacgcgatgtgagcgaggtagacacacggacgacaatacaaggtgaagagattagcgcgccaatatgcatcgccccaactgggttccattgcctggtgtggccagacggtgaaatgtctactgcccgggctcctgagggcctgcgatggtttcaactttatgtgcacccagatctccaactgaacaagcaacttattcagcgcgtggagagcctggggttcaaagctctcgtcatcacattggatactcctgtgtgtgggaaccggcgccatgacatacggaatcagcttcgccgaaacttaactctgaccgacctccagagccctaaaaaaggcaacgccatcccgtatttccagatgaccccgatcagtaccagcttgtgttggaacgacctgtcatggttttag

SEQ ID NO: 191102 - DNA, 2292 bp, synthetic construct
  misc_feature 1..2292: note = Description of Artificial Sequence: Synthetic coding sequence
  source 1..2292: mol_type = other DNA
atggtggcctgccgggccatcggcatcctgagccggttcagcgcctttaggattctacgcagcagaggctacatctgtaggaatttcactggctccagtgcccttttgacccgcacccacataaactatggagttaaaggggatgttgccgtggtacgaataaactcacccaactccaaggtgaatacgctctctaaggagctgcacagtgagttctctgaggtgatgaacgaaatatgggctagtgaccagataaggagtgcagttctgatatccagtaaaccaggatgctttatcgccggcgccgatataaacatgctggcagcttgcaaaacccttcaagaagtgactcagctgtcccaggaagcccagcgcattgttgagaagcttgagaaatctacgaagcccatcgttgctgctataaacggttcctgtctgggcggcgggctcgaggttgccattagctgccagtacagaatcgccacaaaggacagaaaaactgttttgggaacaccagaggttcttctgggcgctctgcctggtgctggaggcacacagaggctccccaaaatggttggcgtgcctgccgccctcgatatgatgctgaccgggagaagtatcagggcagatagggccaagaagatggggttagtcgaccagctcgtggagcccctgggcccagggctaaaaccccccgaggaacgtactatagaatacctcgaggaagtggccattactttcgcgaaaggattggccgataagaagattagtccaaaaagggataagggactggtggagaaactgaccgcttacgccatgaccatcccattcgtcagacagcaagtctacaagaaggtggaggaaaaggtcaggaagcagacaaaaggcctctatcctgccccactcaaaattattgacgtggtcaagacgggcatcgagcaggggtcggacgcagggtatttgtgcgagtcacagaaattcggagaattggtgatgactaaagagagcaaggcactcatgggattgtatcatggtcaagtgttgtgcaagaagaataagtttggagccccacagaaggacgtcaaacacctggcgattctgggagcagggctaatgggcgccggcattgcccaggtgtcggtggataagggtctcaagacgatacttaaggatgccacactgacggcactcgacaggggccagcagcaagtgttcaagggtcttaacgacaaagtgaaaaagaaggccctgacctcttttgagagggatagcatcttttcaaacttgacaggtcaactggattaccagggctttgaaaaagctgacatggtgatagaagccgtttttgaggacctgtccctcaaacaccgcgtgctcaaggaggtggaggccgtcatccccgatcactgcatatttgccagcaacacttctgctttgcctatctcagagattgcagcagtttccaaacgaccagaaaaggttattggcatgcattacttcagtcctgtagataagatgcagttgctggagatcattaccactgagaagaccagtaaggatacctctgcctcagcagttgcagtcggactgaaacaggggaaggttatcatcgtggttaaagacggccccggcttctacactacgcgttgtttagcacctatgatgagcgaagtcattcgaatcctacaagagggcgttgaccccaagaagctggactcattgactacttctttcggatttcccgttggggccgccaccttggtagatgaggtgggcgtcgatgttgctaaacacgttgcagaagatctggggaaggtcttcggggagcggtttggaggagggaatccagaactgcttacccagatggttagtaaaggcttcctcgggcgaaaatctggcaagggcttctatatctaccaagaaggggtcaagagaaaggatttgaattctgacatggactccattcttgcatccctgaagcttccacctaaatcagaagttagctcagacgaggatattcagtttcgtctggtaaccaggttcgtaaatgaagcggtcatgtgcctccaagagggaattcttgcgacacccgctgaaggcgatatcggcgcagtgttcggcttgggttttccgccctgcttgggaggaccatttcggttcgttgacttatacggtgcccagaagattgttgatcggctgaaaaaatacgaggctgcatatggcaagcaattcacgccatgccaacttctcgcagatcatgctaactcaccaaataaaaagttttatcagtag

SEQ ID NO: 191103 - DNA, 783 bp, synthetic construct
  misc_feature 1..783: note = Description of Artificial Sequence: Synthetic coding sequence
  source 1..783: mol_type = other DNA
atggagagcaagggcatgtggcagctgttcgagctgaccctgcccatacagtccatgctcgccgcctgcaagacgcttcaggaagtgacacaacttagtcaagaggcacaacggattgtggaaaaacttgagaagagcaccaagcctatcgtggccgctataaatggctcatgcctgggggggggcctcgaagttgccatttcttgtcagtatcgtatagccaccaaggaccggaaaactgtgctgggcacccccgaagtgctgctgggggctcttccaggggcagggggcactcagcgcctccctaagatggtaggggtgcccgccgccctcgatatgatgctcactggaaggtccatcagagctgaccgggctaaaaaaatgggtctggtcgatcagttggtggaaccacttggcccggggctgaagcctcccgaagagagaacaattgagtatctggaagaggttgctataacattcgcgaagggcctggctgataagaaaataagtccaaagagggacaaagggctcgttgagaagctgacggcttacgccatgacaatccctttcgtccgtcagcaggtgtataaaaaagtagaggaaaaggttcgtaagcagaccaaagggctatacccagcccctctgaagataatcgacgtcgtgaagacaggcatcgagcaagggtctgacgccggctatctctgcgagagccaggttaatctattcccatttaacgttctgctgtccgtcaagggtaagttgaagatccagagtagcgtttag

SEQ ID NO: 191104 - DNA, 1425 bp, synthetic construct
  misc_feature 1..1425: note = Description of Artificial Sequence: Synthetic coding sequence
  source 1..1425: mol_type = other DNA
atgaccatcctgacctaccccttcaagaacctgcccaccgccagcaaatgggcactgagattttctatcaggcccctgtcttgctcttcacagctgagagctgcccccgctgttcagacgaagacaaaaaagacactagctaagccaaatattaggaatgtggtcgtcgtggacggagtacgcacaccgttcctgctcagcggaacctcctataaggacctgatgccccatgacctagcccgtgctgccctgacaggactgctccatcgaacctccgttcctaaagaggtcgtggattatatcatttttggcacagtaatccaggaagttaagacgtcaaacgtagcccgtgaggctgcactgggcgccgggttttccgataaaacacctgcccacacagtcactatggcatgcatctctgctaatcaggcaatgactactggcgtcggactcatcgctagtggacagtgtgatgtcatcgttgcaggtggcgtggaactgatgtcggatgtgccgatccgtcacagccggaagatgagaaagctcatgctggaccttaacaaggccaaatccatgggacaacgtctctctctgatctctaaattccgattcaattttctggctcccgagttgcctgctgtcagcgagtttagtaccagcgagactatgggtcattctgctgataggttagcagcagcatttgccgtgagtaggttagaacaggatgagtatgcactgcggtcccactccctggccaagaaggcccaggacgagggccttctgtcagacgttgttccatttaaggtgccggggaaagacaccgtgacaaaggacaatggaatccgccccagtagtctggagcagatggcaaagcttaaacccgcgtttataaaaccatacggcactgtaacagccgccaacagctcctttctgactgacggagcgtccgctatgctgattatggcggaggaaaaggctctggcaatgggctataagcctaaagcctatcttcgggattttatgtatgtgagccaggatcctaaagatcagctgctgttggggccaacatatgcgactccgaaagttctggagaaggccggcctcaccatgaacgacatcgacgccttcgaattccatgaagcatttagtggtcaaatcctggctaacttcaaagcaatggattctgactggttcgcagagaattacatgggaaggaagaccaaagtcggcctgcccccgctcgaaaaatttaacaactggggtggctctctatctctgggccacccatttggtgcaaccggttgtagactggtcatggctgctgccaaccgcttaagaaaagaaggcgggcagtatggcctcgtggcagcttgtgcagccggagggcagggacatgccatgatcgtagaggcctatcccaagtag

SEQ ID NO: 191105 - DNA, 258 bp, synthetic construct
  misc_feature 1..258: note = Description of Artificial Sequence: Synthetic coding sequence
  source 1..258: mol_type = other DNA
atgaccatcctgacctaccccttcaagaacctgcccaccgccagcaagtgggcgcttaggttttcaataagacctttaagctgtagctcccagctgcgcgccgcaccagccgtccaaaccaagaccaagaagaccctcgcaaagccaaatattcgcaatgtcgttgtggtcgacggtgttcgcacccctttcttgctatctgggacctcttacaaggatctgatgccgcacgacctagctcgcgccgctctcacgtag

SEQ ID NO: 191106 - DNA, 531 bp, synthetic construct
  misc_feature 1..531: note = Description of Artificial Sequence: Synthetic coding sequence
  source 1..531: mol_type = other DNA
atgaccatcctgacctaccccttcaagaacctgcccaccgccagcaaatgggcgctgagattttccatccggccactgtcctgctcttctcagctccgcgctgcaccagcagtgcagactaaaactaagaagaccctcgccaagcctaatatccgaaacgtggtggtggtcgatggcgtgcgcaccccgtttctgttgtctggaactagctataaagatcttatgcctcacgatctggcgcgtgcagcactgaccgggttacttcatagaacatccgttcctaaagaggtcgttgattacattatcttcggaaccgtgatccaggaggtaaagacgtcaaacgtcgcaagggaagcagccctgggcgcaggctttagcgataaaactcccgcccacactgttacaatggcctgcatctcagccaatcaggcaatgacaaccggggtgggcttgatcgcctctgggcagtgcgatgtcattgtggccggaggtgtggaattgatgtctgatgtccccatccgccactcttag

SEQ ID NO: 191107 - DNA, 453 bp, synthetic construct
  misc_feature 1..453: note = Description of Artificial Sequence: Synthetic coding sequence
  source 1..453: mol_type = other DNA
atgaccatcctgacctaccccttcaagaacctgcccaccgccagcaagtgggccctacggttctccatacgacccctgagttgcagtagccaactcagggcggctcccgccgtacagaccaagacgaaaaagacccttgctaagcccaacattaggaacgtggtggtagtcgacggcgtaaggacccctttcctcctgtcaggcacatcatacaaggatctaatgcctcacgatctagctagggccgccctcacaggattgctccaccgcacaagcgtacccaaggaagtggtggactacattattttcggaaccgtgatccaggaggtgaagacgtccaatgtcgccagggaggcggcactgggcgctgggtttagcgacaaaacacctgcccacactgtgacaatggcatgtatatccgccaaccaggccatgacaactggtgtggggtag

SEQ ID NO: 191108 - DNA, 1380 bp, synthetic construct
  misc_feature 1..1380: note = Description of Artificial Sequence: Synthetic coding sequence
  source 1..1380: mol_type = other DNA
atgaccatcctgacctaccccttcaagaacctgcccaccgccagcaaatgggccctgcggttctccatcaggcctctaagctgcagctcccagttgcgagccgctcctgccgttcaaacaaaaaccaagaaaacccttgccaaacccaacattaggaacgttgtcgttgttgacggggtgcgaactccgttcctcttgagtggaacctccggattattacacaggaccagcgtccctaaagaggttgtggactatatcatttttggaacggtgattcaagaagtcaaaactagcaatgttgccagagaagccgccctcggagccggattttctgacaagacccccgcccatacagtgacgatggcctgtatctctgcgaaccaggctatgacaactggggttggcctgatcgcttccggacagtgtgatgtaatagttgcaggaggggttgaactgatgtctgacgtaccaatccggcatagcaggaagatgcgtaagctgatgctggatctgaacaaagccaagtcaatgggacagagattgtccctcatttccaaatttcgattcaattttctcgcaccagaattacctgccgtgtctgaattctcgacatccgagactatgggccatagcgccgaccgacttgccgcggccttcgctgtgtctcgcctggaacaggacgaatatgctctgaggagccacagtcttgctaaaaaagcccaggatgagggtctcctgtctgatgtcgtgccgttcaaagtgcctgggaaagacactgttaccaaagacaatgggataagacccagcagcttggagcaaatggccaaattgaagcccgcttttatcaaaccatacggcaccgtaactgctgcaaatagcagcttcctgaccgacggtgcttcagctatgctgatcatggccgaagagaaagcattggcaatggggtacaagcccaaagcttacctacgggacttcatgtacgtgagccaggatccgaaggatcagctgctgctgggcccaacgtacgcaacccccaaagtgctggagaaagccggcctcacaatgaacgatattgacgcattcgaattccacgaggcattctctgggcagattctggcaaatttcaaggcgatggacagtgactggtttgcagaaaactacatgggccgcaagaccaaagttgggttacctccactggaaaaattcaacaattggggtggatccttgtcgctgggccacccgttcggcgctacggggtgcaggctggtcatggccgcggctaataggcttcgcaaggaaggcgggcaatatggcctggtggcggcatgcgcggccggtgggcaagggcatgccatgattgtggaagcgtaccctaagtag

SEQ ID NO: 191109 - DNA, 1359 bp, synthetic construct
  misc_feature 1..1359: note = Description of Artificial Sequence: Synthetic coding sequence
  source 1..1359: mol_type = other DNA
atgaccctggtgagcggctggctgctgtacggctggatcatcgccgtgcagactaaaacaaaaaaaaccctcgccaagcccaacatcaggaatgtggtggttgtggacggagttcgcactccctttctgttgtcaggcacgtcctacaaggaccttatgccgcacgacctggcaagggctgctcttactgggcttcttcatcggacatccgtgccgaaggaagttgtcgattacatcattttcgggacagtcatccaggaagtcaaaacttccaacgttgctcgggaagccgccctcggcgccggcttctctgataaaacccctgctcataccgtaaccatggcttgcattagtgccaaccaggccatgaccacaggtgtgggactgatagccagtggacagtgcgacgtgatagtcgcaggcggcgtcgagctcatgtctgacgtgccaattcgccattccagaaagatgaggaagcttatgctcgatctgaacaaagccaagtcaatgggccaaagattgtcccttatcagtaagttcaggtttaattttctggcaccagaattgcccgcggtgtccgagttctctacaagcgagaccatggggcatagtgccgaccggctcgccgccgccttcgccgtgtcacggctagagcaagacgagtatgcactccggagccattccctggccaagaaagctcaagacgaaggattactttccgacgtcgtccccttcaaggtgccgggcaaagatacagtgaccaaagacaatggcatacgacccagcagcctggagcaaatggcaaaacttaagcccgccttcataaagccttacggaacagtgacggctgcaaatagctcatttctgaccgacggcgcatcagctatgttgattatggccgaggagaaagccctggctatgggctacaagccgaaggcctacctgcgagattttatgtatgtctcccaggatcccaaggaccagcttctgctgggccccacttatgccactcccaaggttttggaaaaagcaggcctgacaatgaatgatatcgacgccttcgaatttcacgaagccttttcaggtcagatcctggcgaactttaaagccatggattcagattggttcgccgagaattacatgggccgcaaaacaaaagtgggcttgccacctctcgagaagttcaataattggggggggagcctgtcgcttggccaccctttcggtgctaccgggtgccgattagtcatggcagcggctaataggctgcgcaaagaaggcgggcagtacggccttgtggctgcatgcgctgccggaggccagggtcacgcgatgattgttgaggcctatcccaagtag

SEQ ID NO: 191110 - DNA, 783 bp, synthetic construct
  misc_feature 1..783: note = Description of Artificial Sequence: Synthetic coding sequence
  source 1..783: mol_type = other DNA
atgaaggtggaggtgctgcccgccctgaccgacaactacatgtacctcgttattgacgatgaaacaaaggaggctgcaatcgtcgatcccgtgcagccccagaaggtagtcgatgccgcccgcaaacacggcgtgaagctgacaaccgtccttaccacccaccatcactgggatcacgctggtggaaatgaaaagctggtcaagctcgaatcaggtctgaaggtctatgggggcgacgatcggattggcgcattgacacacaagatcacccacctgagtacactccaggtcggatccctaaacgtgaaatgtctcgctacaccctgccatacctccggacacatttgctattttgtatcaaagccgggtggctctgagcccccagccgtctttactggagatacattgtttgtggcgggctgcggaaaattttacgaaggtaccgctgacgagatgtgtaaagctctcctggaagtgctgggccgcctcccccccgatacaagggtgtattgtggacacgaatataccatcaataatctcaagtttgcgagacatgtggagccaggcaatgccgcgataagggagaagctggcatgggctaaggagaagtattccatcggcgagccaaccgttccttctacactggcagaggagttcacctataacccattcatgcgggtgcgcgagaagactgtgcagcagcacgcaggggaaaccgaccccgtgaccactatgagggcggtgaggcgggaaaaagatcaatttaagatgcctcgggactag

SEQ ID NO: 191111 - DNA, 927 bp, synthetic construct
  misc_feature 1..927: note = Description of Artificial Sequence: Synthetic coding sequence
  source 1..927: mol_type = other DNA
atggtggtgggccggggcctgctgggccggcggagcctggccgccctcggagcagcatgtgctcgccgaggtctgggcccagcattactgggcgttttttgccacacagatctgcgcaagaatctgactgtagatgagggaaccatgaaagtggaagtgctgcctgctctgacagataattatatgtacctggtgattgacgacgagactaaggaggccgctatcgtggatcctgtgcagcctcagaaagtcgtcgacgctgccaggaagcacggggtgaagttgactaccgttcttacaacccaccaccactgggaccacgccgggggcaacgagaaactggtaaaattagagtctggtctcaaagtttacgggggcgacgatagaatcggggccctcactcacaagatcacccacttgtctacactgcaggttggcagcttgaatgttaagtgtttggcaaccccatgtcacacaagcggtcacatctgctacttcgtcagtaaacccggtggttcggagccacccgctgtgttcactggggacactctttttgtggccgggtgcggaaagttctacgaaggaacagccgatgaaatgtgtaaagccctgctggaagtcctggggcgactcccacccgatacgagagtctactgcggacacgagtacacgatcaataatttgaaatttgccagacatgttgaaccgggtaatgctgcaatacgcgaaaagctggcctgggcaaaagaaaaatacagcattggggagcctactgtcccgtcgacgctggccgaagagttcacttataatcctttcatgagagtgcgcgagaaaactgtgcagcaacatgccggggagacagatccagtgaccaccatgcgtgccgtgaggagggagaaggaccagtttaagatgccgcgggattag

SEQ ID NO: 191112 - DNA, 711 bp, synthetic construct
  misc_feature 1..711: note = Description of Artificial Sequence: Synthetic coding sequence
  source 1..711: mol_type = other DNA
atggtggtgggccggggcctgctgggccggcggagcctggccgccctaggcgccgcctgcgctcgtcgcggccttggcccagcactccttggggttttctgtcataccgatttacgcaagaacctcaccgtggatgaaggaaccatgaaggttgaggtcctgcccgccttgactgacaactatatgtacctggtgatagacgacgaaaccaaggaagcagccattgtcgatccagtgcaaccccaaaaggtggtggacgctgctaggaaacacggagtcaaattgaccacagtgcttactactcatcatcattgggatcatgctggagggaacgagaagctggtgaaactggaatctgggctgaaagtgtatgggggagacgataggatcggggccctaacccataagattactcacctttctacactccaggtcaccccgtgcctgtggttggccgcaggcagttccatgaagggactaaggatgaggtgcgtgaagctctgctggcgctcctgggccggaagcccccggacccaggagtccactgtcgcgaccagcaccccttctaccacatcctcactccatgccacgtggtcgcctgctatgccaccatctggccggtcgtggccgggacctcgtagatccaccgcatccggatctccccagtgtcatccaccatggcagcgatcccttcctacaacccccagctag

SEQ ID NO: 191113 - DNA, 1128 bp, synthetic construct
  misc_feature 1..1128: note = Description of Artificial Sequence: Synthetic coding sequence
  source 1..1128: mol_type = other DNA
atggccatgaccggctggagctgcctggtgaccggcgccggcggctttttaggccaaagaataataaggttgttggtgaaagagaaggagctcaaggaaatacgggtgctggacaaggcgttcggccccgaacttagagaggaattctctaaacttcagaataaaacaaaactgactgtgcttgagggtgacatattagacgagccattcctgaaaagggcctgtcaggatgtctcggtgatcatccatactgcgtgtatcatcgatgtgttcggcgtgactcacagagagtctatcatgaacgtgaacgttaaaggcacacagctgctgctagaggcctgtgtgcaggccagtgtccctgtttttatatatacttcatctatagaggtcgcaggccccaatagttataaagaaatcatccagaatggccacgaggaggaaccactggaaaatacatggcccgctccatacccccactccaaaaagctggctgagaaagccgtcctggcagcaaacgggtggaacctgaagaacgggggaacactttacacctgtgccctgcgacctatgtatatttacggtgaaggcagtagattcctgtctgcctccatcaatgaggcgctgaacaacaacgggattctgagttctgtgggcaaattctctaccgttaacccggtctacgtggggaacgtggcttgggcacacattttagctttgcgggccctgcaagatcccaagaaagcacctagcatcagggggcaattctactatatctcagatgataccccacatcagagctatgataatctgaattacacgttatctaaggagttcggactcaggctcgattcaaggtggagctttcctcttagccttatgtattggatcgggtttctccttgagattgtaagcttcctcctccgccccatctatacttatcgccccccttttaataggcacatcgtcactctgagtaactccgtgttcaccttctcctataagaaggcgcagcgagatctggcgtataaacctctgtacagctgggaagaagccaaacagaagaccgtcgaatgggtcgggagcctggtcgataggcacaaggagaccctgaaatccaagacccaatag

SEQ ID NO: 191114 - DNA, 1122 bp, synthetic construct
  misc_feature 1..1122: note = Description of Artificial Sequence: Synthetic coding sequence
  source 1..1122: mol_type = other DNA
atgaccggctggagctgcctggtgaccggcgccggcggcttcctggggcaacggatcatccgcctgctggtgaaagagaaagagctgaaggaaatacgcgtgctggataaggccttcggccccgaactgcgcgaggaattttccaagctgcagaacaaaaccaagctcactgtgttggagggggatattctggacgagccatttttgaaacgagcatgccaggatgtgagtgtaatcatccacacagcttgtatcattgatgtcttcggcgtgacccatcgggagtctattatgaatgtgaacgttaaaggcacacagctgctactggaagcctgtgtgcaggccagcgtgccagtgtttatctatacgtcctctatcgaagtcgcagggcccaactcctacaaggaaataattcagaatggccacgaggaagagccgctggagaatacgtggcctgccccctacccccattccaagaaactggccgagaaagccgtgctcgcggctaatggctggaatctgaaaaatggcggtaccctgtacacctgcgcgctccgaccaatgtacatttacggagaggggtccaggttcttatctgcaagcatcaatgaggcactcaacaataacggaatcctgtcgagcgttggcaaatttagcactgttaaccccgtttacgtgggtaacgtggcttgggcccacatcttggctttgcgcgctcttcaggaccctaagaaagcccctagtatccgaggccagttctattacatatcagatgataccccgcaccagtcatacgacaatcttaactacacactttccaaagagttcggcctgaggctggattcaaggtggagcttcccacttagtctgatgtactggattggttttctgttggagatcgtgtcgtttctcttgaggccaatatatacttatagaccaccattcaatcggcatattgtgaccctgtcgaactctgtttttacgttttcatacaagaaagcacaacgggatctcgcctacaagccactgtactcttgggaggaagcaaagcaaaagaccgtcgagtgggtgggctccctggtcgatagacataaggaaacactgaagagcaaaacacaatag

SEQ ID NO: 191115 - DNA, 1122 bp, synthetic construct
  misc_feature 1..1122: note = Description of Artificial Sequence: Synthetic coding sequence
  source 1..1122: mol_type = other DNA
atgaccggctggagctgcctggtgaccggcgccggcggcttcctgggtcagcggatcattcgcctcttagtgaaggaaaaggagcttaaagagattcgagtgctagataaggctttcggcccggagctcagagaggaattctctaagctgcagaacaaaaccaaactgacggtcctggaaggagatattctggacgagccatttctcaaacgcgcttgccaggatgtgtccgtgatcatccacactgcctgcattatcgatgtgtttggagtgacgcacagagagtcgataatgaacgtaaatgtcaaagggactcagctcttgcttgaagcatgtgtgcaggcatctgtgcccgtatttatatatacctcttctatcgaggtcgctggcccaaacagttacaaagagatcattcaaaacggtcatgaggaggagccattagagaacacatggcccgctccctacccacatagtaagaaattggccgagaaggcggtacttgctgctaacggatggaacctgaagaacggtgggaccctctacacatgtgctctcagacccatgtacatttacggagaggggagtaggttcttaagtgcctcaattaacgaggccctgaacaataatggaatccttagtagcgttggcaaattcagtacagttaatcctgtctatgtggggaatgtggcatgggcacatattctggccctgcgtgcacttcaggacccaaaaaaagcgccttcaatacgaggacagttctactacattagcgatgatacacctcatcagagctacgacaatttgaattatacactaagcaaggagtttggcctgcggctagattccagatggagttttccgctctctctcatgtactggataggcttcttattagaaatcgttagctttcttcttagacctatatacacgtacagacccccttttaatcggcatatcgtaactctgtccaacagcgtattcaccttttcctacaaaaaagcgcagagggacctagcctataagcccctgtatagctgggaggaagccaagcagaagactgtcgagtgggtaggatctttggtggaccggcataaagaaactctgaagagtaaaactcagtag

SEQ ID NO: 191116 - DNA, 249 bp, synthetic construct
  misc_feature 1..249: note = Description of Artificial Sequence: Synthetic coding sequence
  source 1..249: mol_type = other DNA
atgaccggctggagctgcctggtgaccggcgccggcggcttcctgggccagaggataatccgccttctagtgaaggagaaggaactaaaggaaatcagggtcctggacaaagcctttggccccgagttacgggaagagttctccaagctccagaataagacaaaattgactgtactagagggtgatattctggatgaaccattccttaaacgcgcctgccaggatgttagcgtaattatacatacctag

SEQ ID NO: 191117 - DNA, 1119 bp, synthetic construct
  misc_feature 1..1119: note = Description of Artificial Sequence: Synthetic coding sequence
  source 1..1119: mol_type = other DNA
atgggctggagctgcctggtgaccggcgccggcggcctgctgggccagaggatcgtgaggctattggtggaagaaaaggaactgaaggaaattagagctctggataaagctttccgacctgaactcagggaagagttctccaagctccagaatcgtaccaagttgacagttttagagggagacattttagacgagccctttctgaaacgggcttgtcaggatgtgtcggttgttatccacactgcatgcatcatcgacgttttcggtgtaacgcacagagaatctatcatgaacgtgaacgtgaaaggtactcagttactcctggaggcatgcgtccaggcgagcgtaccagtgttcatatatacatcatctatcgaggtagcagggccaaactcttacaaagaaatcatacagaatggacatgaagaggagcctttagagaatacatggcctacaccctacccttactccaagaagttggccgaaaaggctgtgctcgcggccaacggctggaatcttaagaatggggacacactgtatacctgcgccctgcgccccacatacatttacggtgagggcggccctttcctctccgcctcaatcaacgaagccttaaacaataacggtatactgtcgtccgttggcaaattcagcaccgtgaatcctgtttatgtggggaacgtggcctgggcccatatcctggctctgagggctctgcgtgaccctaaaaaggctccgagtgtccgcggtcagttctactacattagcgatgatactccgcaccaaagctacgataacctcaattatatcttgagtaaggaattcggactgaggttggattcacggtggtccctgcccttaactctgatgtactggatcgggttcttgttggaggtagtctcctttctgctatcacctatttattcctatcaaccaccgtttaatcgtcatactgtgacactctcaaatagcgtcttcaccttttcatataaaaaggcacaaagggatctcgcctataaacctctttacagctgggaagaagctaaacaaaagacagtcgaatgggtggggtcactcgtggaccggcacaaggaaactctgaagtcaaagacccagtag

SEQ ID NO: 191118 - DNA, 588 bp, synthetic construct
  misc_feature 1..588: note = Description of Artificial Sequence: Synthetic coding sequence
  source 1..588: mol_type = other DNA
atgggctggagctgcctggtgaccggcgccggcggcctgctgggccagagaatagttcgcttgctggtcgaggagaaagagctgaaggagattcgcgcacttgataaggcattcaggccagagcttagagaagagttctctaaactgcaaaaccggacgaagctcacagtccttgagggtgatattctggacgagcccttcctcaagagggcctgccaggacgtcagcgttgtcattcatacagcatgtattatcgacgttttcggggtgacccatcgggagagcatcatgaacgtcaacgtgaaggggacgcagctcctgctggaggcctgtgtgcaagcgagtgtccctgtgtttatctacacttcgagcatagaggttgcaggccccaacagttataaggagatcattcagaatgggcatgaagaggagcctctagagaacacatggcccacaccctacccatatagcaagaagctggccgaaaaagccgtcctggccgccaacgggtggaatttgaaaaatggggatactctatacacttgtgccctcaggcctacatatatatacggcgaagggggcccgtag

SEQ ID NO: 191119 - DNA, 1119 bp, synthetic construct
  misc_feature 1..1119: note = Description of Artificial Sequence: Synthetic coding sequence
  source 1..1119: mol_type = other DNA
atgggctggagctgcctggtgaccggcgccggcggcctgctgggccagcgcatcgttcgtctgctcgtggaagagaaggagttaaaagagatccgtgccctagataaggcttttcgccccgagctgagggaagagttcagtaaactgcagaaccgaaccaaactgactgtccttgaaggtgacatcttggatgagccttttcttaagagagcttgtcaggatgttagcgtagtgatacataccgcatgcatcatagatgtttttggcgtgactcatcgggaaagtataatgaacgtgaatgtgaaagggactcagcttctgctggaggcctgcgtgcaggcttcagtgcccgtttttatttatacgagctcgatcgaggtggcaggcccaaacagttataaggaaatcattcagaacggccatgaggaggagccactggagaacacatggccaacaccctatccatattccaaaaaactagctgagaaggctgttctcgcagctaacggctggaatcttaagaacggcgatactctatacacctgtgcgttgcgcccaacgtatatttacggcgagggcggccccttcctgtcagcctcaataaacgaggcacttaacaataatggcattctgtcctcagtagggaagttttccacggtcaaccccgtgtatgttggcaacgtagcctgggcacatattctggccctgcgcgccctgcgggatcctaagaaagccccctccgtcaggggacagttttactacataagtgatgataccccacaccagtcatacgacaatcttaattatatcctttccaaagagtttggcctcaggctggattctcggtggagtctgccattaaccctgatgtactggattgggtttctgttggaagtcgtctcattcttactcagtccgatctatagctaccagccgcccttcaacaggcatacagtgaccttgtcaaatagcgtgttcacattttcatataaaaaggcacagagggacctggcatacaagccactgtactcctgggaggaggccaagcagaaaaccgtcgaatgggtgggctcccttgtcgaccgtcacaaggagaccctgaaaagtaagacacaatag

SEQ ID NO: 191120 - DNA, 591 bp, synthetic construct
  misc_feature 1..591: note = Description of Artificial Sequence: Synthetic coding sequence
  source 1..591: mol_type = other DNA
atggccgacagcgcccaggcccagaagctggtgtacctggtgaccggtggctgtgggtttcttggcgagcatgttgtgcgaatgctgctgcagagagaaccacgactgggagaattgcgggtgttcgaccaacatctcggtccttggcttgaagaactaaagaccggtcctgtccgagttactgccatccagggcgatgtgacccaagctcatgaggtggcagctgccgtagccggcgcgcatgttgtcatccacacagccggactggtcgacgtgtttggacgggcctcccccaaaacaattcacgaagtgaatgtccaaggaacccgcaatgtgatcgaggcatgcgtccagactggcacacgcttcctagtctacacctctagtatggaggtcgtgggacccaatacgaagggccatcctttttaccgaggaaatgaagatacaccgtacgaggcagttcaccggcatccatacccatgcagtaaggcattggccgaatggctggtcctggaagctaatggacggaaggccatgctgcctgggtgcacatgttggcaaccagggagctggtcaagcggtcaaccctag

SEQ ID NO: 191121 - DNA, 1110 bp, synthetic construct
  misc_feature 1..1110: note = Description of Artificial Sequence: Synthetic coding sequence
  source 1..1110: mol_type = other DNA
atggccgacagcgcccaggcccagaagctggtgtacctggtgaccggcgggtgtggtttccttggggagcacgtggtacggatgctcctgcagagagagccgcggctgggcgagctcagggtttttgaccagcatctgggcccatggctcgaggaactgaaaacaggtcctgtgcgtgttacggctatccaaggagacgtgacgcaagctcatgaagtcgccgctgcggtagccggggctcatgtggttatacatacggctggcttggtggatgtatttggccgagcctccccgaagacaatccacgaagtcaatgtacaggggacaaggaacgttatcgaggcttgcgtccagactgggacccggtttctggtgtataccagttcaatggaggttgtgggaccaaataccaaaggccacccgttctatagaggtaatgaggacacaccctatgaggcagtgcaccgccacccttatccctgcagcaaagccctggcagagtggctggtgttggaggccaatggcaggaaggtccgaggaggcctacctctggtcacctgtgccttacgacctacagggatatacggtgaggggcatcagattatgcgcgatttctatcgtcaagggctccgcctaggcggctggctattccgcgccataccagctagcgtcgaacacgggcgcgtttacgtcgggaatgtggcttggatgcacgtgctcgccgcccgggagctggagcagcgcgcaaccctgatgggagggcaggtgtatttctgttacgatggctctccataccggagctacgaggactttaatatggagtttttaggaccttgtggattaagactggtgggggcgcgcccattgctaccttactggctgcttgtgttcctggctgcgctgaacgcactgctccagtggctcctccgacccctggtgctctacgccccgctgctgaacccctacactttagcagttgcaaacacaacctttaccgtctccaccgacaaggctcagaggcattttggctatgagcctctgtttagctgggaggactcacggacaagaacgattctgtgggtgcaggcggccaccggatcagcacagtag

SEQ ID NO: 191122 - DNA, 591 bp, synthetic construct
  misc_feature 1..591: note = Description of Artificial Sequence: Synthetic coding sequence
  source 1..591: mol_type = other DNA
atggccgacagcgcccaggcccagaagctggtgtacctggtgaccggcggatgcggattcctgggggagcacgtagtacggatgctcctccagagggagcctaggctgggggagttacgggtgtttgatcaacacctggggccttggctcgaggaactaaagaccggacctgttcgggtaacagccatacaaggcgacgtcacgcaggcgcacgaggtggccgccgcagtcgctggcgcacacgtggtgattcatacagcaggcctcgtggatgtgtttggtcgcgcttctcctaaaaccatccatgaggtaaacgttcagggtacacggaatgttatagaagcctgcgtacagacgggaaccaggtttcttgtgtacacctcatcaatggaggtcgttgggccgaacaccaagggtcacccgttttatcgtggcaatgaagacaccccatacgaagctgttcacaggcatccctacccatgctccaaggccctagccgaatggctcgtcctggaggccaacggcagaaaggcaatgctgcctgggtgtacctgttggcagcctggctcctggtcttccggccagccttag

SEQ ID NO: 191123 - DNA, 1086 bp, synthetic construct
  misc_feature 1..1086: note = Description of Artificial Sequence: Synthetic coding sequence
  source 1..1086: mol_type = other DNA
atgagcggcaacggcaacgccgccgccaccgccgaggagaacagccccaaaatgagggtcatcagggtgggaactagaaagagccaactcgctaggattcagactgacagtgttgtggccactctaaaggcctcttatcccggactccagttcgagatcattgctatgagtacaacaggggacaaaattttagacactgccctctccaagatcggcgagaaaagcctttttaccaaggaactggaacacgctcttgagaagaatgaggtggatttggtggtgcacagtttaaaagatctacccaccgtgcttcccccaggattcaccattggggcgatctgcaaaagggagaacccccacgatgcagtggtttttcacccaaagttcgtgggcaaaaccttggagacactaccggagaagtctgtggtcgggacgtccagtttgcggcgggccgcacaactccagagaaagtttccccatttagagtttaggtcaatccgcgggaacctaaacactaggttgcgaaagctggatgagcagcaggagttctccgctataatactcgctacagctgggcttcagcgaatgggttggcataatcgggtgggccaaattctccacccagaggagtgtatgtacgccgtcggccaaggcgccttgggcgtcgaggtgagagccaaagaccaagacatccttgatcttgtaggcgtgctgcacgacccggagactctgttgcggtgcatagccgagcgggcttttctcaggcatttggagggcgggtgtagcgtcccggtcgcggtgcacactgctatgaaagacgggcaactatatttgaccgggggcgtctggtctctggacgggtccgattctatccaagagacaatgcaggcgacaatacatgttcctgcacagcacgaagacggaccagaggatgatccgcaactggtgggcatcaccgctaggaacattccacgtgggcctcagctcgctgcgcaaaacctggggatttcgctcgccaaccttctgctgtctaaaggtgctaaaaatatactagatgtggcccgccagctaaatgacgcacattag

SEQ ID NO: 191124 - DNA, 1035 bp, synthetic construct
  misc_feature 1..1035: note = Description of Artificial Sequence: Synthetic coding sequence
  source 1..1035: mol_type = other DNA
atgcgggtgatccgggtgggcacccggaagagccagctggcccggattcaaacggatagcgtggttgcaactttgaaggccagttaccccggcttgcagttcgagattattgccatgagcacaaccggcgacaagattctggatactgccctgtccaagattggagaaaaaagcctcttcacgaaggagctcgagcacgctctggagaagaatgaggtggatcttgttgtgcactctttgaaggatctacctacggtgctgccccccggttttacgattggagccatctgtaagcgagagaatcctcacgacgctgtggtctttcatccaaaattcgtggggaagacattagagaccttacctgaaaagagcgtggtgggaacttctagtctgcgccgcgccgctcagctgcaacgaaagtttccccacctggaatttagatctattagggggaacctgaataccagactgcgtaagttagacgagcagcaggaattttcagcaataattctcgctaccgcggggctgcagagaatgggatggcacaatagggtcggccaaatcctgcaccccgaggagtgcatgtacgctgttggccagggagccctaggtgtggaggttcgggccaaagatcaggatattcttgatctggtcggggtgctgcatgatccagagaccctgctgcgttgcatcgctgagcgagcgttcctacggcacctggaaggaggctgctctgtcccagtggctgtccacaccgccatgaaggacggacaactatacctgactgggggcgtgtggtctctcgatggcagtgattctattcaagagactatgcaagccacgatccatgtaccagcccaacatgaagacggtcccgaggacgatcctcagctcgtgggtataacggcccgcaatataccacggggaccccaacttgcggcccagaaccttgggatatctttggcaaatcttttgttaagtaaaggtgcaaagaacattctggacgtggctagacaactgaatgatgcacactag

SEQ ID NO: 191125 - DNA, 1035 bp, synthetic construct
  misc_feature 1..1035: note = Description of Artificial Sequence: Synthetic coding sequence
  source 1..1035: mol_type = other DNA
atgcgggtgatccgggtgggcacccggaagagccagctggcccggatccaaacagattcagtagtggctacactgaaggctagctatcccgggcttcaattcgaaataattgctatgagcacaactggagacaagatccttgacactgcactgtccaagatcggcgagaaatccttattcaccaaagaactggaacatgctttggaaaaaaatgaagttgacctggtggtgcacagcctcaaggacttgcccacagtgttgccccccgggtttactatcggcgctatctgtaagagagagaatcctcatgacgcggtcgtgttccaccctaagttcgtcggcaaaacactggagacgctccctgagaagtctgtggttgggacatcaagtttgagacgggcggctcagctccaacgaaagttcccgcatttggagttcaggtcaatacggggcaatctgaacacccgactccgcaaactggacgagcaacaggaattcagtgctatcattttggccactgcaggcctccagcgaatgggatggcacaaccgcgtcggacaaatcctccaccccgaggagtgcatgtacgccgtggggcagggggccctaggcgtagaggtccgggcgaaggaccaggacatcctggacctcgtcggagtcctgcacgatccggagacactgctaaggtgcattgctgagcgggcatttttgagacacctggaggggggctgttctgttcctgtcgccgttcacacggccatgaaggacggccagttataccttacaggcggcgtctggtcgctcgatgggtccgattcaattcaggagacgatgcaggctactatacacgtgccggcgcaacacgaagacggtcccgaagacgaccctcagctggtgggcatcactgccaggaacattcctcggggaccccagctagcagcacaaaacctgggcatctccctggctaatctgctgctgtccaaaggcgcaaaaaacatcctcgacgtagcccgtcagctgaatgatgcccattag

SEQ ID NO: 191126 - DNA, 564 bp, synthetic construct
  misc_feature 1..564: note = Description of Artificial Sequence: Synthetic coding sequence
  source 1..564: mol_type = other DNA
atgcgggtgatccgggtgggcacccggaagagccagctggcccggattcagaccgattcggtcgtcgcaaccctgaaagctagctatccaggccttcaattcgagataatcgctatgagtaccacaggggacaaaattctcgatactgctctgtctaaaattggcgagaagagcctcttcacaaaggagctagagcacgcgctggagaagaacgaagtcgatctcgtggtgcactccctgaaagacctcccaactgtactgccgcctgggtttacgatcggggccatttgtaagcgagagaatccccatgatgccgttgtgtttcaccctaagttcgttgggaagaccttggagaccctgccagagaaaagcgtggtggggacttcctctttacggcgcgctgctcagctccagcggaaattcccccacctggagtttcgctcaataaggggcaacctgaatactcgcttgaggaaactggacgagcagcaggagttctcagcaattatcctggccactgccggactccagcgcatggggtggcacaatagggtaggacagtag

SEQ ID NO: 191127 - DNA, 1035 bp, synthetic construct
  misc_feature 1..1035: note = Description of Artificial Sequence: Synthetic coding sequence
  source 1..1035: mol_type = other DNA
atgcgggtgatccgggtgggcacccggaagagccagctggcccggatccaaaccgatagtgtagtcgccacgctgaaagcttcttatcctgggctgcagttcgagataattgcgatgagcactactggggataaaatcctagataccgctttgtcaaagatcggagagaaaagcttgttcaccaaagagcttgagcatgctctggagaagaatgaggtcgatcttgtcgtgcattctctgaaggacctgcccactgttctcccccctggattcacaattggggccatatgtaagagagagaaccctcacgacgccgtggttttccatccaaagtttgtggggaagacccttgagacactgcccgaaaagagtgtggtcggaaccagctcactgcgccgcgcggcccagctgcagagaaagttcccccacttagagttccgctctataaggggcaacctaaacacacgtttgaggaagcttgatgaacaacaggaatttagcgccattatacttgctacagcggggttgcaacgaatgggctggcacaaccgggtagggcagatcctgcaccctgaagaatgtatgtacgcagttggtcagggtgcattaggggtcgaggtaagagctaaggatcaggatattttggatctggtaggcgttctgcacgacccagaaacactgttaagatgcattgctgagagggcattcttgcgacatttggaaggagggtgttccgtgccagtggccgtgcacaccgctatgaaagatgggcagttatacttgacaggtggtgtctggtctctcgatggcagcgacagtattcaggagacaatgcaggccacaattcatgtccccgcacagcacgaagacgggccggaggatgatccccaattggtcgggattaccgcgaggaatatcccccgaggaccccagttggcggcccaaaatctcgggatctcactagccaacctacttttaagtaaaggagccaaaaatatccttgatgtggcacgtcagctaaatgacgcccactag

SEQ ID NO: 191128 - DNA, 564 bp, synthetic construct
  misc_feature 1..564: note = Description of Artificial Sequence: Synthetic coding sequence
  source 1..564: mol_type = other DNA
atgcgggtgatccgggtgggcacccggaagagccagctggcccggatccaaacagattctgtagtggctacgctcaaggcaagctaccctggactccaattcgagataattgctatgagtacaaccggagacaagatcctggatactgcactcagcaagattggagagaagtcactcttcacgaaagagctcgagcacgccctggagaaaaacgaagtcgacctggtcgttcattcactgaaagatctgccgacagtactgccccctggctttaccatcggcgccatctgtaaacgtgagaacccacatgatgccgtagtgttccacccaaagttcgtggggaagaccctggaaacactgcccgagaagagtgttgtcggcacctcttcactgaggcgtgccgcccagctgcaacgcaaatttcctcacctggaattcagatccattagaggcaatctgaataccagattacgtaaactcgatgagcagcaggaatttagtgctattatactcgcaaccgcgggactgcaacgaatgggctggcataatcgtgttggtcaatag

SEQ ID NO: 191129 - DNA, 915 bp, synthetic construct
  misc_feature 1..915: note = Description of Artificial Sequence: Synthetic coding sequence
  source 1..915: mol_type = other DNA
atgcgggtgatccgggtgggcacccggaagagccagctggcccggatccagaccgatagcgtcgttgccacccttaaagcctcctatcctggtttacagttcgaaattatcgccatgtccaccacaggtgacaaaattctagacactgccttgagtaagataggtgagaagagccttttcactaaggaactggagcacgcgctagaaaagaatgaagtagacctggtagtgcactccctaaaggatttgccaaccgtcttaccacccgggtttaccattggcgccatttgcaaacgggagaatccccacgatgccgtggtttttcacccaaagttcgtcggcaagaccctcgaaactctgcccgagaagtccgtggttggaacatcctctcttcggcgggctgcccagctccagcgcaagtttccccatctggagtttcggtctattcgaggcaacctaaacaccagactgcgcaagctggatgagcagcaggagttcagcgccatcatccttgcaacagccgggttgcagagaatgggctggcacaacagagtagggcagatacttcatcctgaagaatgtatgtacgcagttggtcaagaaggtggctgttccgtcccagtggcggtgcacacagctatgaaagatggacagctctacttaactggcggagtgtggtctctcgacggatcagatagcattcaggagacaatgcaggccacaattcacgtgccagctcagcacgaagatgggcctgaggacgacccacagctcgtcgggataaccgcccggaacataccacgcggtccccagttagctgcccagaatctcggtatcagtctggccaatctccttctcagcaagggagctaagaatatcctcgacgtggcacgccagctaaacgatgctcactag

SEQ ID NO: 191130 - DNA, 966 bp, synthetic construct
  misc_feature 1..966: note = Description of Artificial Sequence: Synthetic coding sequence
  source 1..966: mol_type = other DNA
atgagcggcaacggcaacgccgccgccaccgccgaggagaacagccctaagatgagggtgatccgcgtcggcaccaggaagagtcaattggcccggatccagactgactctgttgtagccacattgaaggcttcatacccagggctgcaatttgaaatcattgcgatgtccacgaccggggataagattttggataccgcgctgagcaagatcggggaaaagagcctcttcacaaaagagctcgagcacgccttagagaagaatgaggtggatctggtcgtgcattcgctgaaggatcttcccaccgttctgcctccaggatttactataggggccatctgcaaacgtgagaacccacatgacgcggtggtcttccaccccaagttcgtcgggaagaccctggagacactccctgaaaagagtgtcgtgggaacaagttcactccggcgcgcagcccagctgcaacgaaagtttccacatttggagttcaggagtatccgcgggaacctgaatacacgtctgaggaaactggatgaacaacaggagttcagtgccattatcctggcgacggccggattacagagaatgggatggcataaccgagtaggacaaattctgcatcctgaagagtgcatgtacgcggtggggcaggagggcgggtgttctgtgcctgtggccgtacatactgccatgaaggacggtcagctgtacctgaccgggggagtgtggtctctggatggctccgatagcatccaagaaaccatgcaggccacgatccatgtgccagcacagcatgaagatggccctgaggatgacccgcagctggtagggatcactgcgcggaacatccctcggggaccgcagctggctgcccagaatctgggcatttccctcgccaacctgttgctatcgaaaggcgcgaaaaatatactggacgtggcacggcaattgaacgacgctcattag

SEQ ID NO: 191131 - DNA, 879 bp, synthetic construct
  misc_feature 1..879: note = Description of Artificial Sequence: Synthetic coding sequence
  source 1..879: mol_type = other DNA
atggccttcatgaagaagtacctgctgcccatcctgggcctgttcatggcatattattactactcagccaacgaggagttccgacccgagatgcttcaaggaaaaaaggtgattgtgaccggtgcttccaaggggattggcagggagatggcttatcacctggctaagatgggagcccatgtggttgtgacagccaggtccaaggagactctccagaaggtggtgtcacactgccttgagttgggagccgcctctgcccattacatcgctgggaccatggaggacatgacatttgcggagcagtttgtcgctcaggcagggaagctgatgggagggctcgacatgctgatactaaatcatatcaccaacacatccctcaatctgttccacgacgacatccaccacgtgaggaagtcaatggaggtcaacttcctctcctacgtggtgctcacggtcgccgccttgcctatgctgaagcaaagtaatggctccattgtggttgtcagtagtctggctggaaaggttgcgtatcctatggtggctgcatattccgccagtaagtttgcacttgatggcttcttctcttccatccggaaggaatatagcgtttccagggttaacgtctccattacgctgtgcgtgttgggcctcatcgacaccgagacagccatgaaggctgtgagcggaatcgtgcatatgcaggcagctcctaaagaggaatgcgctctggaaataatcaagggcggcgcactccggcaggaagaagtctactacgactccagcttatggactacccttctgattcgaaacccttgcaggaagatactggaatttctgtactccacaagctataacatggatcgttttatcaataaatag

SEQ ID NO: 191132 - DNA, 879 bp, synthetic construct
  misc_feature 1..879: note = Description of Artificial Sequence: Synthetic coding sequence
  source 1..879: mol_type = other DNA
atggccttcatgaagaagtacctgctgcccatcctgggcctgttcatggcttactattactattccgccaatgaggaattcaggccagagatgctgcagggtaaaaaggtgattgtcacaggggcgtctaaaggcatagggcgtgagatggcctaccacttggccaagatgggggctcatgtggtcgtgaccgcgaggagtaaagaaacactccagaaggtcgtgtcccactgtttggaactgggtgcggcgtctgcccactacatagccgggaccatggaagacatgaccttcgccgagcaattcgtggctcaagctggtaaacttatgggagggctcgacatgctgatcctgaatcacatcacaaacacatcactaaacctgttccacgacgatattcaccacgtcagaaaatccatggaggtcaatttcttatcttacgtggtcttgacagtagcagcgcttcctatgctcaaacaatctaatggctccatagtggtggttagcagcctggcgggcaaagtagcctatcccatggtggctgcctacagcgccagtaaattcgccctggacgggttcttcagttccataaggaaggagtattccgtttctagagtaaatgtgtctattacactgtgcgtcctgggcctcatcgataccgagaccgctatgaaagccgtgagtggcattgttcatatgcaggccgccccaaaagaagaatgcgccctggagattatcaaggggggagccttgagacaggaagaagtttactacgacagctcgttatggacaactctgctgatcaggaatccatgtcggaagattctggaatttttatactccacgtcatataacatggataggtttatcaacaagtag

SEQ ID NO: 191133 - DNA, 879 bp, synthetic construct
  misc_feature 1..879: note = Description of Artificial Sequence: Synthetic coding sequence
  source 1..879: mol_type = other DNA
atggccttcatgaagaagtacctgctgcccatcctgggcctgttcatggcttattactattactccgctaacgaagaatttcggcctgagatgttacaaggaaagaaagtgatcgtaactggggcctcaaaaggtattggccgggaaatggcctaccatctggccaaaatgggcgcgcacgtcgtagttaccgcccgctctaaggagacgctgcagaaggtggtttcgcactgcctggaacttggggccgccagtgctcactacatagcggggactatggaagacatgacatttgccgagcagttcgtggcccaggccggcaaactcatggggggactcgacatgcttatcctgaatcatatcactaacacctcccttaatctcttccatgacgacattcaccacgtccggaagtcgatggaagtcaatttcctttcgtacgtggtccttacagtggctgccctgcctatgcttaaacaatctaacgggtcaatcgttgtggttagctccctcgcaggcaaggtggcatacccaatggtagctgcgtattccgcctccaagtttgcattggacggtttcttcagttccattcgcaaagagtactctgtatcacgagtgaatgtgtcaatcacactgtgtgttctcggcctaattgatacagagaccgccatgaaggcggtctccggtattgttcacatgcaggcagctcccaaggaggagtgcgctctggagattattaaaggtggagccctccgtcaggaagaagtgtattatgattctagtctctggactaccttgctgattaggaatccgtgtcgcaagattcttgagttcctgtactcaacatcctacaacatggacaggttcattaacaaatag

SEQ ID NO: 191134 - DNA, 1218 bp, synthetic construct
  misc_feature 1..1218: note = Description of Artificial Sequence: Synthetic coding sequence
  source 1..1218: mol_type = other DNA
atggagcggtggccctggcccagcggcggcgcctggctgctggtggccgcaagggctctgctgcagctgctcaggtccgatcttaggctcggcaggccactcctggctgcactggctctgctggctgcgctcgattggctctgccagcgcctgctgccccctcctgccgcgctcgcagtgctggccgccgcaggatggatcgccctgtcaaggctggcccgtccacagagactgccagttgcgacccgagctgtccttatcacagggtgcgactctggtttcggtaaagagaccgccaaaaagcttgattccatgggctttactgttctcgccaccgtcctggaactcaattctcctggcgcaatcgagctccgtacatgttgcagcccccgacttcgcctcctccagatggatctcactaaacccggagacatttctagagtgctggaattcactaaagcccacacaacctctacaggcctttgggggctggtcaacaatgcgggccataatgaggttgtagccgatgcggagctgtctccagtcgcgacctttagatcatgcatggaagtcaatttttttggggcgctcgaactgacgaaaggccttctccctcttttacgctcttcacgggggcgaattgtgaccgtgggctctccagccggagacatgccctacccctgtctgggcgcatatgggacttctaaagctgccgtagcgctgttaatggacaccttttcttgtgagctactcccctggggagttaaagtgagcattatccagcctggatgctttaagactgagagcgtccgtaacgttggtcaatgggagaaacggaaacagctgctgttggcaaatttgccacaggagcttcttcaagcttacggcaaggactacatcgagcacctccatgggcagtttctacacagcctacgacttgctatgtctgaccttactccagtcgtggacgctataacagacgccttgctggcagccagacccagaagacgttattatccaggccaggggcttggacttatgtatttcatccactattaccttcctgaaggtctgcgacggcggtttttacaagcttttttcatttctcactgcttgccccgggctctccagccagggcagcccggcactacaccgccccaggatgctgctcaggatccaaacctgagtccaggaccttctccggccgtggccagatag

SEQ ID NO: 191135 - DNA, 2232 bp, synthetic construct
  misc_feature 1..2232: note = Description of Artificial Sequence: Synthetic coding sequence
  source 1..2232: mol_type = other DNA
atggaggccgtggccgtggccgccgccgtgggcgtgctgctgctggccggagctggtggcgcggccggcgacgaagcccgggaagccgcagcagtgagggcgctcgttgccagattactcggacctggtcccgcagctgacttcagcgttagtgtggaaagggcactggccgcaaagcccgggctggacacttacagtctaggaggtggcggcgcagcccgcgttagggtgaggggaagtaccggcgtcgctgcagccgctggccttcacaggtacctgagagatttctgtgggtgccacgtagcgtggtctggttcacaactgcgcctgccgcggcccctgcctgctgtccccggagaacttacagaggcaactcctaatcgctatcgctattaccaaaacgtttgcactcaatcatatagctttgtgtggtgggattgggcgcgatgggagcgagagatcgactggatggcactgaatggaattaacctcgcgctggcttggtcaggccaggaggctatttggcaaagggtgtacctggcgttaggcctgacacaggccgaaattaacgagttcttcactggaccagctttcctcgcttggggccggatggggaatctacacacttgggacgggccactacccccaagctggcacatcaagcagctttaccttcagcaccgcgtactcgaccagatgcgatcctttggaatgacccccgttcttcctgccttcgccggtcatgttcctgaagctgtgacgagggtgttcccccaggttaatgtgactaagatgggctcgtgggggcatttcaattgcagctatagctgtagcttcctcctggcgcctgaggacccgatctttcctatcattggctcactttttctaagagaactgatcaaggaattcggaacagaccacatctatggcgccgacacattcaacgaaatgcagccaccatcctctgaaccatcctatctggctgcggctacaacagccgtttatgaagccatgacagctgtcgacaccgaggccgtctggctattacaggggtggctgttccagcatcagccgcagttttgggggccggcccagataagagcggtattgggtgctgtccctcgaggcagactgttggtgcttgatttgtttgctgagtcacagccagtgtacacaagaaccgccagctttcaaggccagccattcatctggtgcatgctccataatttcggcggcaaccacgggctgtttggagcccttgaagctgtcaacggcgggcccgaagctgcacgcttgttccccaacagcactatggttggtactggcatggccccggaaggcatatcacagaatgaagtggtttatagtttgatggccgagctggggtggcgcaaggaccccgtgcccgatctcgcagcttgggtgacatcatttgcagcccggcggtatggggtgtctcatccagatgccggagcggcgtggcgcctgctcttgagatctgtctacaattgcagcggagaggcttgccggggccataatagaagcccacttgtaaggagaccgagtctacagatgaacacgtccatttggtataaccgctccgacgttttcgaggcttggaggctcctgctgacatcagctccatctctagctacttcaccggcattcagatatgacctgctcgatctgactcggcaggctgtccaagagctcgtatcgttgtactatgaagaggctcgcagtgcgtaccttagtaaagaactggccagccttctgagggcaggtggcgtgcttgcttatgagttactgcctgcactggatgaggtgctcgccagcgactctaggtttttactgggctcatggctcgagcaagcccgtgccgctgctgtgtccgaggccgaggcagacttttatgaacagaacagccgctaccagctgacactgtggggcccagaaggcaatattttggattacgccaataaacagttggctggtctggttgccaattactacacccctagatggaggttatttttggaggccctggttgattccgtggcacagggcatcccgttccagcagcaccaattcgataaaaatgttttccagctagaacaagcgttcgtgttaagtaagcagagatacccaagccagccacggggcgacactgtggacctagccaagaaaattttcctcaaatactaccctaggtgggtggccggatcatggtag

SEQ ID NO: 191136 - DNA, 450 bp, synthetic construct
  misc_feature 1..450: note = Description of Artificial Sequence: Synthetic coding sequence
  source 1..450: mol_type = other DNA
atggcccggaccgtggtgctgatcaccggctgcagcagcggcatcggcctgcacttagctgtcaggctggcatccgacccaagtcagagttttaaggtttatgccactctccgggacttgaagacacagggtcgtctgtgggaggcagccagggccttagcttgtccccctgggtcactcgagaccttgcagcttgacgtgcgcgattccaagtctgtggcggccgcacgcgaacgagtaactgaggggagagttgacgtgttagtgtgtaacgctggactcgggctgcttggcccgcttgaggctttgggtgaagatgcagtggcctctgtactggacgtgaacgttgttggcactgtgcggatgctgcaggccttcctgcccgacatgaagcgaagaggatctggacgggtcctggttaccgggagcgtcggcggactgatggcctag

SEQ ID NO: 191137 - DNA, 987 bp, synthetic construct
  misc_feature 1..987: note = Description of Artificial Sequence: Synthetic coding sequence
  source 1..987: mol_type = other DNA
atggcccggaccgtggtgctgatcaccggctgcagcagcggcatcggactccatctcgccgtgaggctagccagtgacccctcccaatcatttaaggtctatgccacactgcgggacctgaaaactcaaggcaggctgtgggaggccgctagggctttggcgtgcccccctggctcactggagactcttcagctagatgttagggactcaaaatccgtggccgctgcccgggagcgcgttaccgaagggcgggtggacgtgttagtctgtaatgcaggtctcgggctgttggggcctttggaagcactgggggaagacgctgtcgccagtgtgctcgatgtcaatgtggtgggtacggtgcgaatgctgcaggccttcctgcctgacatgaagcggagaggatccgggagagtcctggtgacaggctctgttggggggttgatgggtctgcccttcaacgacgtgtactgtgctagcaagtttgccctggagggcctctgtgagtcgcttgccgtcctgcttctaccctttggggttcatctcagcctgatcgagtgtgggcctgtgcacacagcctttatggagaaggtgttgggcagtcccgaggaagtcctcgatcgcactgatatccacactttccaccggttctatcagtacttggcccactctaagcaggtgttcagggaggccgcacagaatccggaggaggttgctgaagtattcttaaccgcactcagagccccgaagcccacactgcggtacttcacgaccgagcggttcctgcccctcctacggatgaggctggatgacccaagtggctccaattatgtgactgccatgcacagggaagtgttcggagatgttcctgctaaggccgaggccggagcagaagccggtggcggagctggacccggcgctgaggacgaggcgggaaggggcgccgtgggagatccagagctgggggatcccccagcagctccccaatag

SEQ ID NO: 191138 - DNA, 447 bp, synthetic construct
  misc_feature 1..447: note = Description of Artificial Sequence: Synthetic coding sequence
  source 1..447: mol_type = other DNA
atggcctgcaccgtggtgctgatcaccggctgcagcagcggcatcgggttgcatctcgctattcacttggcactggacccatcccaaagctttaaagtgtatgctacactgcgagatctgaagactcagggcaggctctgggaggccgcacgcgcccttgcttgccctcaagggtcattagaaagactgcagttagatgtgcgcaacagctcaagtcttgccgccgccagagaacgggtcactgaaggccgggtagacgtcctcgtgtgcgatactggtttaggcttgttaggccctctgggggaagacgccgttgcctcagttctggatgttaatgttgtaggaactgtgagagtattgcaggatttcctcccagacatgaaaagaccgggaagcgggagggttttggtgacaggctctatgggcggtctgatgggtgagtggtag

SEQ ID NO: 191139 - DNA, 786 bp, synthetic construct
  misc_feature 1..786: note = Description of Artificial Sequence: Synthetic coding sequence
  source 1..786: mol_type = other DNA
atggccgccgcctgccggagcgtgaagggcctggtggccgtgatcactggcggggcctctgggctcggcctggccaccgctgagcgacttgtgggccaaggagcctcagcagtactgctggacctgccgaatagtgggggggaagcccaggcaaaaaagctcggaaacaactgtgtgtttgctcccgctgatgtgacttccgaaaaagacgtacagacggccctggcactcgccaaaggcaaatttggccgggttgacgtcgccgtgaactgcgccggcattgctgtggcttccaaaacctacaaccttaagaaaggacaaacacacaccttagaggatttccagagggtactagatgtgaacctgatgggcacgttcaacgtcatacgactcgttgcgggagaaatgggacagaacgagccagaccagggcggtcagaggggcgtgatcatcaatactgcctccgtggccgctttcgaaggccaggtcgggcaggccgcatattctgcctcgaaagggggcattgtcggaatgacactgccaatcgctcgggatcttgccccgatcggaatccgcgtcatgacaattgctcccggattgtttggcacaccattactcacatccctacctgaaaaggtgtgtaatttcctcgcctcacaagtcccttttccgagccgccttggagatcccgcagagtatgcccacctggtgcaggctatcattgagaatccctttctgaatggagaggtaatccgcctggacggagccattcggatgcagccctag

SEQ ID NO: 191140 - DNA, 510 bp, synthetic construct
  misc_feature 1..510: note = Description of Artificial Sequence: Synthetic coding sequence
  source 1..510: mol_type = other DNA
atggccgccgcctgccggagcgtgaagggcctggtggccgtgatcacaggcggtgccagtggacttgggcttgccacagccgagaggcttgttgggcagggcgcttccgctgttctcttagatctccccaactctggtggggaagcacaggccaaaaagctaggcaataattgtgtcttcgcccctgccgacgtaacaagtgaaaaagacgtgcagaccgcgctggcactcgccaaaggcaagttcgggagggtagatgtcgccgtcaactgcgctgggatagcggtggcgtccaagacatataatcttaaaaagggtcagactcacactttagaagactttcagcgcgttctggatgtaaacctgatggggacctttaatgtaattcgacttgtggctggggaaatggggcagaacgagccagaccagggcggacagcgaggcgtgattatcaataccgccagcgtcgccgcttttgagggccaagtatgccttgcaccgcattgctag

SEQ ID NO: 191141 - DNA, 759 bp, synthetic construct
  misc_feature 1..759: note = Description of Artificial Sequence: Synthetic coding sequence
  source 1..759: mol_type = other DNA
atggccgccgcctgccggagcgtgaagggcctggtggccgtgatcacgggaggtgcttccgggctcgggttggccaccgcggaacggctggtaggccaaggagcttcagcagtgctcctggacttgccaaatagcggcggcgaggcccaagccaagaagctggggaataattgtgtcttcgcccccgcggatgtgacctctgaaaaagacgtgcagacggcgcttgcactggcaaagggtaagtttggtcgcgtggatgtggctgtcaactgcgccgggattgcagtcgcaagcaagacatataacctcaagaaggggcaaacgcacacactggaggatttccaaagagtgcttgacgtgaatctgatgggaactttcaacgtcattcgcttggtcgcaggagagatgggccagaacgaacccgaccaaggcgggcaacggggagttattataaacactgcgagtgtcgccgcctttgagggacaggttgggcaggccgcttactctgccagtaagggtggcatcgtgggaatgacgttgcccattgcaagagacctcgctcctatcggattattcggcacccctctgctgacctctctgcctgagaaggtctgtaatttcctcgcttcacaggtgccattccctagtcggttgggcgaccctgcagagtacgcccatctggtgcaggccattatcgaaaacccctttctcaacggggaagtcatccgactcgatggtgctattagaatgcagccctag

SEQ ID NO: 191142 - DNA, 903 bp, synthetic construct
  misc_feature 1..903: note = Description of Artificial Sequence: Synthetic coding sequence
  source 1..903: mol_type = other DNA
atgaagttcctgctggacatcctgctgctgctgcccctgctgatcgtttgtagtctggagagtttcgttaaattgttcattccaaagcgccgaaaatcagtcactggcgagatagtcttaatcacaggtgccggacatggaatcgggagactcaccgcctatgagtttgcgaaattgaagtcaaaacttgtgctgtgggatattaacaagcacggactcgaggagactgctgccaaatgtaaggggcttggggcgaaagtgcacacatttgttgttgactgctcgaaccgggaagacatctattcgtcggcaaaaaaggtgaaggctgagatcggcgatgttagcatcctggttaataacgccggggtggtgtatacatctgatcttttcgccacccaggaccctcagatcgagaagacatttgaggtgaacgttctggctcacttctggaccacgaaggcatttcttcccgccatgacaaaaaacaaccatgggcacattgtgactgtcgccagcgctgcaggacacgtcagcgtgccttttctcctggcctattgtagctcgaagttcgcggcagtcggattccacaagaccctgactgacgaattggctgcgctccagattacaggggttaaaacaacctgtctgtgtcccaattttgtgaatactgggttcatcaagaacccttccacatcactgggacccaccttagagcctgaggaggttgtcaacaggcttatgcacgggatattaaccgagcagaaaatgattttcataccgtcgtcgattgcattcctcactacgctcgaacggatcctccccgagcgctttctcgccgtcctgaagcaaaagattagtgtgaagtttgatgcagtgataggttacaaaatgaaggcccagtag

SEQ ID NO: 191143 - DNA, 795 bp, synthetic construct
  misc_feature 1..795: note = Description of Artificial Sequence: Synthetic coding sequence
  source 1..795: mol_type = other DNA
atgaacatcatcctggagatcctgctgctgctgatcaccatcatctactcctatctcgaatccttggttaagttcttcattcctcagcgccgcaagtccgttgctggcgaaattgttctcatcaccggtgctgggcatggcatcggtcgccagaccacctatgagtttgcaaaaaggcagagtatcctagttctctgggacattaataaagttaagaaagaggtcggggacgtcaccatcgtggtgaacaatgcaggaactgtgtaccctgctgacctcctgtccactaaggacgaagagatcactaagacttttgaggtcaacatcctcgggcacttttggatcactaaggccttgcttccctccatgatggagagaaaccacggccacatcgtcacagtggcgagtgtgtgtgggcacgagggtatcccatatctgatcccctactgttctagtaagttcgccgctgtgggatttcatcgcggtctaacaagtgagctccaagccctggggaaaacaggtattaaaactagctgcttgtgccctgtctttgtgaatactggctttacgaagaacccgagcacccgcctctggcccgtgctcgaaacagacgaagtggtgcgtagcctaatcgacggcatcctgacaaataaaaaaatgattttcgtcccttcttatatcaatatttttttaaggttgcaaaaattcttgcccgaaagggcatccgccattttaaacaggatgcagaatatccagtttgaagcagtagtgggccataagattaagatgaaatag

SEQ ID NO: 191144 - DNA, 903 bp, synthetic construct
  misc_feature 1..903: note = Description of Artificial Sequence: Synthetic coding sequence
  source 1..903: mol_type = other DNA
atgaacatcatcctggagatcctgctgctgctgatcaccatcatctactcataccttgagagtttggtgaaatttttcatcccgcagagacgtaagagtgttgccggagaaatagtgctcattactggagcgggtcacggcatcgggaggcagaccacctatgaatttgcaaaaagacaatctatcctagtgctttgggatatcaataagaggggggtggaagagaccgcagccgaatgcaggaaactgggggtgacagcccatgcatatgttgttgactgctcaaacagggaggagatttaccgcagcctgaaccaggtgaaaaaagaggtgggggatgtaacgatcgtggttaataacgccggtacagtgtacccggccgacttgctgtccaccaaggatgaggagattaccaagacgtttgaagtcaatatcttgggtcatttttggatcacaaaggccctgttgccatcaatgatggaaaggaaccacggccacattgtaaccgttgctagcgtgtgcggtcacgaagggatcccttatctgattccttattgttctagtaaatttgccgctgtcgggtttcaccgaggcctcacttcagagctgcaggcacttggcaaaaccggcataaagacttcttgtctctgcccagtattcgtcaatacagggttcaccaaaaacccttcgacgcggttgtggcctgtcctggagaccgatgaggttgtgagatctctcatcgacgggattctgaccaacaaaaagatgatatttgtaccttcttatattaacatattcctgcgcctacaaaagttcttgccagagagagccagcgcaattctgaacaggatgcagaatattcaattcgaggctgttgtgggccacaagataaagatgaagtag

SEQ ID NO: 191145 - DNA, 813 bp, synthetic construct
  misc_feature 1..813: note = Description of Artificial Sequence: Synthetic coding sequence
  source 1..813: mol_type = other DNA
atggccaccggcacccggtacgccggcaaggtggtggtggtgaccggcggaggtcgtggaattggagctggcatcgtacgggcgtttgtaaatagcggagcaagagtggtaatctgtgataaggatgagagcggaggacgggctctcgaacaggagcttcctggcgcggtctttatactgtgcgatgtgactcaagaggatgatgttaaaaccctggtgagcgagactatccgtcgcttcggccgcctggactgtgtggtcaacaatgcgggacaccacccgcccccgcagaggccggaagagacttctgcgcagggctttagacaactgctggagcttaacctgctcggcacttacacactcacaaagttagccctcccctatttgaggaaatcacagggaaacgttatcaacatctcgtcgctggttggagctatcgggcaagcacaggcagttccatacgtcgcaaccaaaggcgccgtcaccgcgatgactaaagcattagccctcgatgaatcaccatatggagtgagggtgaactgtatctctcccggcaatatatggacacctctgtgggaagagctggccgcgctcatgcctgatcctcgggccaccatcagggaaggtatgctcgctcagcccctaggccgcatgggccagccggccgaagttggtgccgccgccgtgtttcttgcctcagaggcaaatttttgtactgggatcgagctgttggtgaccggaggtgccgagctgggctacggctgcaaagccagcagatctacgcctgttgatgcacccgacattccctcctag

SEQ ID NO: 191146 - DNA, 1164 bp, synthetic construct
  misc_feature 1..1164: note = Description of Artificial Sequence: Synthetic coding sequence
  source 1..1164: mol_type = other DNA
atgagcaccttcttcagcgacaccgcctggatctgcctggccgtgccaaccgtactatgcggcacagtcttttgcaagtacaagaaaagtagcggccagctgtggtcttggatggtgtgtttggctggactttgcgccgtctgcttgctcatactcagtcccttctgggggttgatactgttttcagtctcttgttttctgatgtacacgtatctgagtggccaggagttgttaccagtcgatcagaaggccgttctggtgacaggcggcgattgtggcctggggcacgccctgtgcaagtatctagacgaactgggttttactgtattcgcaggtgtgctgaatgagaatggacccggagccgaagagctcagaaggacttgctcacctagactctctgtgctgcagatggacattaccaaacctgtgcagatcaaggatgcctatagcaaagtagccgccatgttacaagaccgaggactctgggcagtgattaacaacgccggggtcctcggcttcccaacggacggggaactcctgctgatgactgattataagcagtgcatggctgtgaatttttttgggaccgtggaggttacaaagactttcctgcccttgctcaggaagagtaagggccggcttgttaatgtgagttccatgggcggtggcgcgcccatggagcgcctggcctcatacggtagcagtaaggcagcggttacaatgtttagctctgtcatgcgactcgagctctctaaatggggaatcaaagtagctagtatacagcccggcggctttctgactaatattgctggaacaagtgataagtgggaaaaactggaaaaagacattctggaccatctccccgccgaggtgcaggaggattacgggcaagactacattttggctcaaagaaattttctgctccttatcaattctctggcttcaaaagacttcagccccgtgttgcgagacattcaacacgcgattctagctaagtcaccttttgcttattatacccccggaaagggtgcctacctatggatatgtcttgcccattacttgccaatcgggatttacgactactttgcaaagcgacactttggtcaggacaagcctatgccaagggcactacgtatgccaaattataaaaagaaagccacatag

SEQ ID NO: 191147 - DNA, 783 bp, synthetic construct
  misc_feature 1..783: note = Description of Artificial Sequence: Synthetic coding sequence
  source 1..783: mol_type = other DNA
atgggcgacgtgctggagcagttcttcatcctgaccggcctgctggtgtgcctcgcctgcctggctaagtgtgtgagattctcccgctgcgtgcttttaaactactggaaggttctgcctaagtcatttctgagaagtatgggacagtgggccgtgataactggggctggtgatgggatcgggaaagcctatagctttgaacttgctaagcggggtctgaatgtggtgctgattagccgcacactggagaagcttgaggccattgccaccgagatagagcggactacaggtcgtagcgttaagatcattcaagctgatttcactaaggatgacatttacgagcacatcaaagagaaattggcaggcctggagatcggtattttggtgaacaatgttggcatgttgccaaatctgctgccatcacactttctgaatgcccctgatgaaatccagagcctcatccattgtaatatcacaagtgtggtcaagatgactcagctaatactaaagcacatggaatccaggcaaaaaggactgattctcaacatctcttctgggatagcccttttcccttggcctctctactctatgtattctgcctcaaaggccttcgtatgtgctttttcaaaggcacttcaagaggagtataaagctaaggaagtgatcatccaagcaggatttttgtctctgattcctgcctgggccttctacagtggggcctttcagaggctactcttgacgcattacgtggcttacctgaagctaaacactaaggtgcgctag

SEQ ID NO: 191148 - DNA, 933 bp, synthetic construct
  misc_feature 1..933: note = Description of Artificial Sequence: Synthetic coding sequence
  source 1..933: mol_type = other DNA
atgggcgacgtgctggagcagttcttcatcctgaccggcctgctggtatgcctcgcatgccttgctaaatgtgtgagattcagcagatgtgtcctgctgaactactggaaagtgctgcctaagagcttcctgcgatctatgggccagtgggctgtgattactggggcgggtgacggaatcggaaaggcgtatagcttcgaactcgccaagagaggactcaatgtggtgctaattagcaggacactcgaaaagttggaagcaattgctaccgagattgaaagaactaccggcagaagcgtgaagattatccaggctgatttcaccaaagacgatatctacgaacacatcaaagagaagttagctggactggagataggcatcctggtgaataacgtgggcatgctgccaaatctactgccgtcccactttctgaatgcccccgacgagatccagtctctgattcactgcaacataacgtccgtggtgaaaatgactcagctgatcctgaagcatatggaaagtcggcagaagggcctgatactgaacatctcatccggcatcgccctttttccatggccactttactccatgtattcagcctcgaaggcctttgtgtgtgcgttttcgaaggctttacaggaagaatacaaagccaaagaagttattattcaagtgctgactccttatgccgtgtctaccgctatgacaaagtacctcaatacgaatgtgatcacgaaaaccgcggatgaatttgtgaaagaatctttgaactacgttactatcgggggggaaacatgcggctgcctggctcatgaaattctggcaggattcttgtcactcatccccgcctgggcgttctattcgggtgctttccagcgcctgttactgacccactacgtcgcttatctaaagcttaacacaaaggtgaggtag

SEQ ID NO: 191149 - DNA, 2211 bp, synthetic construct
  misc_feature 1..2211: note = Description of Artificial Sequence: Synthetic coding sequence
  source 1..2211: mol_type = other DNA
atgggcagccccctgcggttcgacggccgggtggtgctggtgaccggcgcaggcgctgggctgggtagagcttacgcgctggcgttcgccgaacgtggggctctcgtggtcgtcaacgacctgggtggcgattttaagggggtcggaaaggggtcacttgcagctgataaagtcgtagaagaaatccggaggaggggcggaaaagccgtcgccaactatgactccgtcgaggaaggcgagaaggtcgtgaagactgccctggatgcattcggcaggatcgatgtggtggtgaacaacgccggcattctgagggatcgcagctttgcacgcatctcggatgaagattgggacatcatccaccgggtgcacctgcgaggatcttttcaggttaccagggccgcttgggagcacatgaaaaaacagaaatatggccggatcattatgacgagttctgcaagcggtatttacggcaactttggtcaggcaaattactccgctgccaagcttgggctgttaggcctggccaactctctggcaatcgagggcaggaaatcaaatattcactgtaatactattgcccccaatgccggatcacgcatgacacagacggtgatgcccgaagacctggtggaggcactgaagccagaatatgtcgcacccctcgtactctggctgtgtcacgagtcctgtgaggaaaatggtgggctgttcgaggtgggcgcaggctggataggtaagctgcgctgggaaaggacccttggcgcaatcgtcagacagaagaatcaccctatgacacctgaggcggtaaaggctaactggaagaaaatttgtgactttgaaaatgcctcaaagccccagagcattcaggagagtaccggcagcataatcgaagtactctccaagattgattctgaggggggcgtctcagcaaatcacacctctcgggcaaccagcacggcaaccagcggctttgccggagctatagggcagaaactcccacccttcagctatgcatatacagagctggaagctatcatgtacgccttgggtgtgggcgcatcaatcaaagacccgaaggaccttaaatttatctacgaaggaagcagcgatttctcttgtctacctaccttcggtgtgataataggccaaaaatctatgatgggcggaggcctggctgaaataccaggactctctatcaatttcgctaaagtgctccacggggagcaataccttgagctctacaagcctctccctcgcgccgggaagcttaagtgcgaagccgtggtggctgatgtactcgacaagggcagtggcgtggtgataattatggatgtctactcatactcagaaaaagagcttatctgccacaaccagttctcactctttctggtaggctcggggggctttggtggcaaaagaacaagcgataaggtgaaggtcgccgtggccattcccaaccgcccccccgatgctgtactgacagatacgaccagcttaaatcaagcggctctgtatcgcctgtctggcgactggaatccactgcacatagatccaaatttcgcttcactcgcggggtttgataaaccgatactgcacggcttgtgtaccttcgggttctctgcgagaagagtgctgcaacagttcgcagataacgatgtctcccggttcaaagccattaaggccaggttcgctaagcccgtatatcccggtcagacgctccaaacagagatgtggaaggagggcaaccgaatacatttccagaccaaagtgcaagaaaccggagacatcgtgatctccaacgcctacgtggaccttgcgcccactagcggaacatctgctaagactccatctgaaggcggaaaattgcagagcacttttgtgttcgaagaaattggcaggcgactgaaggatattggccccgaggtggttaaaaaagttaacgcagtgtttgagtggcacattactaagggaggaaatattggtgccaagtggacaatcgaccttaagagtggtagtggaaaggtgtaccaggggccagccaagggagcagcagacactaccattatcctgtcagacgaggactttatggaggttgtgctggggaaactagacccgcagaaggccttttttagtggacgactgaaagcccgggggaacatcatgttgtcacagaaattacagatgatcctgaaggattatgcgaaactgtag

SEQ ID NO: 191150 - DNA, 2286 bp, synthetic construct
  misc_feature 1..2286: note = Description of Artificial Sequence: Synthetic coding sequence
  source 1..2286: mol_type = other DNA
atggtgatcctggaggccccccacctgctgcggcggaaggagcccgaaactcctggtttaagctcccgtatcggtccatcactctgccctggcttttgtcgcaagcgatccgtgtcctgttgtttccagaatctgtgcaacaaccctatggagaaaattatatcccaatgtaggtttttcgtttcaatgaatgatctcggtggcgattttaaaggcgtcggaaaaggctccctggccgctgataaggtagtagaggaaatacggagacgcggtggtaaagctgttgccaattacgatagtgtggaggagggtgagaaagtggttaaaactgcccttgatgcctttgggcgcattgatgtggttgttaacaatgctggaatcctgcgggatagatcatttgctagaatttccgatgaggactgggatatcattcatcgagtccatctaaggggcagtttccaggtgaccagggccgcctgggagcacatgaagaaacagaagtatggccgaataattatgaccagtagcgctagcggaatctacggaaactttgggcaagcaaactactctgcagctaagctaggtctacttgggctggccaattccctggccatcgagggtaggaagagcaacattcattgtaacacgatcgcccctaacgccgggtctaggatgacccagacagtcatgccagaggatctggtggaggccctcaagcccgagtacgtagctcctctggtgctctggctctgtcacgagagttgcgaagaaaacggcgggttattcgaggtgggcgcagggtggataggcaaacttcgctgggaacgtaccttaggtgccatcgtgcggcagaagaaccaccctatgacacccgaggctgttaaagccaactggaagaagatctgcgacttcgaaaacgcaagcaagccccaatccatccaggaatctacaggcagcattatcgaggtactgtcaaagatagacagcgagggcggagtctcagctaaccacacctcccgggctacatccaccgcaaccagtgggtttgctggcgccataggtcagaaattaccccctttctcttacgcttacacagagttagaagccatcatgtacgctctgggcgttggcgccagcatcaaagacccaaaggatctcaagtttatctacgaagggtcaagcgacttctcatgcttacctacctttggcgtgatcatcggacagaaatctatgatgggaggcggactagccgaaatcccagggctcagcatcaatttcgccaaagtcttgcacggtgagcaatacctggagttgtacaagcccctgcccagagctgggaagctcaagtgtgaggcagtggttgccgacgtgcttgacaagggtagcggcgtcgttataataatggacgtgtattcctatagcgagaaagagctgatatgtcacaaccaatttagcctcttccttgtgggaagcggtggctttggaggaaaaagaactagtgataaagtgaaggtggctgtggccatccctaacaggcccccagacgccgtcctgacggatacgacttcgctcaaccaggcagccctataccgtttgagtggggattggaacccgctgcatatcgaccctaacttcgcctctctggccgggttcgacaagccaattctgcatgggctgtgcacctttggattctcggcccggagagtgctccaacaattcgccgacaacgacgtttcacgattcaaagccattaaggcacgttttgcgaagcccgtgtatccggggcagaccctgcagactgaaatgtggaaggaaggcaatcgaatccacttccagacgaaggtgcaggagacaggtgatatcgtgatctccaatgcatacgttgatttagcacctaccagtggcacaagtgctaagaccccgagcgagggaggcaaactccagtcaacattcgtgttcgaagagatcggtcggaggttgaaagatattggccctgaagtggtgaaaaaggtcaatgccgtatttgagtggcacatcacgaagggcggcaatataggagccaaatggacgattgatctgaagagtgggagcggaaaggtctatcagggcccggctaagggggctgccgacactacaattatcctgtccgacgaggactttatggaagttgtactgggaaagctggacccgcagaaagcctttttttctggacgactcaaggctagggggaatatcatgctgtcgcagaagcttcagatgattctgaaggactacgccaaattgtag

SEQ ID NO: 191151 - DNA, 2139 bp, synthetic construct
  misc_feature 1..2139: note = Description of Artificial Sequence: Synthetic coding sequence
  source 1..2139: mol_type = other DNA
atggagaagatcatcagccagtgccggttcttcgtgagcatgaacgacctggggggagattttaagggagttggcaaaggtagtctcgccgcggataaagtagtagaagagattcggcgcagaggtgggaaagccgtggccaactacgactcggttgaggaaggtgagaaagtggttaagactgcgctggacgctttcggcaggatcgatgtggtggttaataacgctggtatattgcgcgatagatccttcgcccgtatcagcgacgaagattgggacataattcacagggtgcacctgagggggagcttccaggttaccagggcagcctgggaacacatgaaaaagcagaagtatggacggattatcatgacatccagcgcatctggcatttatggcaactttggacaggcaaattacagcgccgctaaactggggctgctgggtttggccaattctctcgccatcgaaggccggaaatccaatatacattgcaacaccatcgctccaaacgccggatctaggatgactcagactgttatgcctgaagacctcgtggaggcactgaagccagaatacgtggctcctctggtattatggctctgccatgaatcgtgcgaagaaaatgggggtctgttcgaggttggcgccggttggatcggcaagctaagatgggagagaaccctgggcgccatagtgcgccagaagaatcacccaatgacccccgaagccgttaaggcgaattggaaaaaaatttgtgacttcgagaacgcatctaaaccacagtctatccaggaatcaaccgggtcaattattgaagtgttgtccaaaattgattccgagggaggcgtctccgccaatcatacttcacgggcaacgtcaactgctacaagcggctttgctggggcgattggacagaagctgcctcctttctcttatgcctataccgagctcgaagcgatcatgtatgccctcggagtgggagcgagcatcaaagatcccaaggacctgaaatttatttatgaaggaagctctgacttctcatgcctccccacattcggcgttatcatcggccagaaatcaatgatgggtggcggccttgccgaaatccccggcctctcaatcaacttcgcaaaggtgctgcatggcgagcaataccttgaattatataaaccccttcccagagcaggaaagctgaaatgtgaagccgtggtggcagacgtgctggacaaaggctctggcgttgtgatcataatggatgtgtactcctacagcgagaaggaattgatctgtcataaccagtttagcttgttcctagttggttctgggggcttcggcggcaagagaacctccgacaaagtgaaagtcgccgtggcaatccccaatcgcccacctgatgcagtgttaaccgacactacatcgctgaaccaggccgctttgtatagactgtccggcgactggaatcctctgcacattgatcccaactttgcgtctttggctggcttcgacaagcccatcctccacgggctgtgcaccttcgggttctctgccaggagagtgttacagcagttcgccgataatgacgtgtcgaggttcaaagccataaaggcccggttcgcaaagcctgtatatcctggtcagaccctacagacagagatgtggaaggagggcaatcggatccattttcagactaaagttcaggagaccggcgacatcgttataagcaatgcctacgttgatctggcaccaaccagcggaacctccgccaagacaccatctgagggtggaaaactccagtctacttttgtgtttgaggagataggcagacgcctgaaagatatcggcccagaggtagtgaaaaaggtgaacgccgtctttgaatggcacatcaccaaagggggaaacatcggagctaagtggactatcgatctgaagagtggcagcgggaaggtatatcaagggcctgccaagggtgccgcagataccactatcatcctctctgacgaagatttcatggaggtggtactcggcaagctggacccccagaaggcctttttcagcgggcgtctcaaggcacgaggtaacattatgctcagccagaagttgcagatgattctgaaggactacgccaagctgtag

SEQ ID NO: 191152 - DNA, 1800 bp, synthetic construct
  misc_feature 1..1800: note = Description of Artificial Sequence: Synthetic coding sequence
  source 1..1800: mol_type = other DNA
atgaagaagcagaagtacggccggatcatcatgaccagcagcgccagcggaatctacggcaattttggccaggcaaattacagcgccgcgaaactcggtttattggggctggctaattctttagctatagaaggcagaaaaagcaatatccactgcaatactatcgcccccaacgccgggagccggatgactcagacagttatgccagaagacctggtggaggccttaaagcctgaatacgtcgcgccgcttgttctctggctctgtcacgagtcatgtgaggaaaacggaggtctctttgaggtcggagctggatggatcggaaaacttaggtgggaacgaacacttggagccatcgtacgccagaaaaaccatcctatgactccagaagccgtgaaggccaattggaaaaagatctgcgacttcgagaacgctagtaaaccacagtctatccaagagagcaccggttccatcatcgaagttctgagtaagatcgactctgagggtggagtttccgctaatcacacctcaagagctacttctactgcaacgagcggctttgccggagctattggtcagaaactgcctcccttttcatatgcttacaccgagttggaggccataatgtatgcactgggagtgggggcaagtattaaagatcctaaggaccttaaatttatttacgagggttcctcagactttagctgcttgcctacatttggggtgattattggacaaaaaagcatgatgggaggggggctggctgaaattccggggctgagcatcaatttcgctaaggtgttacatggagagcagtatctcgagctgtacaaaccgctcccaagggcaggtaaactgaagtgtgaggccgtggtggcagacgtgctcgacaaggggtctggcgttgttatcattatggacgtgtactcttacagcgagaaagagctgatctgccataaccaattttccctgttccttgtggggagtgggggctttggtggtaagcgcacttcagacaaggttaaggtcgctgtagccattcccaacaggcctcctgacgcagtgctcactgatacgaccagcctcaatcaggctgcactctatcggttgtctggtgattggaaccctctccacattgacccaaactttgcttcactcgccgggttcgacaagcccattctgcacggactgtgtacattcggcttctctgcccgaagggtgcttcagcagttcgccgataatgacgtctcccgttttaaggctataaaggcccggttcgcaaagccagtgtacccagggcaaacactccagactgaaatgtggaaagaggggaacagaattcacttccagactaaggtacaagagacaggcgacattgtcatcagcaacgcatacgtggatctggcacctacatccgggacaagcgcaaagacaccatctgagggcgggaagctccagtctaccttcgtcttcgaggagatcggacgacgtctgaaagacatcggccctgaggtggtcaagaaggtcaatgcggtgttcgagtggcacatcaccaagggcgggaatatcggagcaaagtggaccatcgacttgaagtcagggtccgggaaagtctaccaggggcctgctaagggtgccgctgacaccactattatcctgtcagatgaagattttatggaagtcgtgctgggtaaacttgatccccaaaaggcctttttctcaggaaggctgaaagctaggggtaacataatgctctcacaaaagctgcagatgatcctgaaagattatgcaaagctgtag

SEQ ID NO: 191153 - DNA, 2157 bp, synthetic construct
  misc_feature 1..2157: note = Description of Artificial Sequence: Synthetic coding sequence
  source 1..2157: mol_type = other DNA
atgggcagccccctgcggttcgacggccgggtggtgctggtgaccggtgcaggcgccgtgaacgacctgggaggtgattttaagggggttggcaaaggttccctggccgccgataaggtggtcgaagaaatcagaaggcggggcggaaaagctgttgcaaattatgacagtgtagaggaaggggagaaggttgtgaaaaccgctctcgatgctttcggcaggattgacgtggttgtcaataatgccggtattctacgcgatagatcttttgccaggattagtgacgaagattgggatatcattcatcgcgtacaccttcgcgggtcattccaggtgacccgggccgcgtgggaacacatgaaaaaacagaagtatggaagaataattatgacctcctcagccagtggcatctacgggaattttgggcaagcaaattactccgccgccaaacttggcttactgggtctagccaatagcctagccatcgaaggtaggaagtctaatatacactgcaataccatcgccccaaatgccggatccaggatgacacagactgtaatgcctgaagatctggtcgaagccctgaagcctgaatacgttgcaccactggtgttatggctgtgccacgagagttgcgaagagaacggtggtcttttcgaggtgggcgctggctggattggcaagttgaggtgggagagaactcttggcgctattgttcgacagaaaaatcaccctatgactcccgaggccgtcaaggcaaattggaagaaaatctgtgatttcgagaatgcaagcaagccacaaagcattcaggaatctaccggcagtatcattgaggttctatctaagatcgattcagaaggaggggtgtccgcaaatcatacttcacgtgccaccagcactgctactagcgggtttgcaggagctatcggccagaaattgccgccttttagctatgcgtataccgaacttgaggccatcatgtacgccctcggagtcggagcttctattaaggatccaaaggatcttaagttcatatacgaaggtagctccgacttctcttgtctccccacctttggcgtcatcatcggacagaaaagtatgatgggtggcggattagctgagatccccggactctccattaatttcgccaaggtcttgcacggagaacagtacctggaactgtataagcccttaccccgggcaggcaaacttaaatgcgaggccgtcgtggccgacgtgctggacaaagggtccggagtggtgattattatggacgtgtactcctatagtgagaaggaactaatatgtcataatcagttctccctctttctagtgggcagtggtggattcggcggcaaaagaacatctgataaagtgaaagtagctgtggctattcctaacagacctcctgatgccgtcctgacagatacaacctccctgaatcaggccgcgctgtaccgcctatccggggattggaatcctcttcacatcgatccgaattttgcatcactcgcgggctttgacaagcccattttgcacggactgtgcacctttgggttcagcgcccgcagggtgctccagcagtttgcagacaacgatgtcagccgcttcaaggccattaaggcccgctttgcaaagcccgtgtatccaggtcagaccctccagaccgagatgtggaaggagggcaaccgcattcacttccagacgaaggtgcaggaaacaggagatattgtcatttctaatgcttacgtcgatctggcccccactagtgggacgtcagccaaaactccctcggaggggggaaagttgcagtccacctttgtgttcgaggagattggccggcgactgaaagatatcgggcctgaggttgtgaaaaaggtcaacgccgtatttgagtggcatattacaaaggggggcaacattggggctaaatggaccatcgatcttaaatcagggtctggcaaggtgtatcaggggccggcaaagggcgctgccgatacaacgatcattttatccgacgaagatttcatggaagtggtgttgggcaaactggatccacagaaggcattcttcagcgggcgcctcaaggcaagaggcaatatcatgctcagtcagaagctccagatgatacttaaagactatgccaaactgtag

SEQ ID NO: 191154 - DNA, 1026 bp, synthetic construct
  misc_feature 1..1026: note = Description of Artificial Sequence: Synthetic coding sequence
  source 1..1026: mol_type = other DNA
atgcggaaggtggtgctgatcaccggcgccagcagcggcatcggcctagcactgtgtaagcggcttttggccgaagatgatgagctccacctctgtttggcttgccgtaatatgtcaaaggcggaggcggtgtgcgccgccctactcgcttcacatccaaccgctgaagtgaccattgtgcaggtggacgtatccaacctgcaatccgtttttcgcgcaagtaaagagctgaagcagaggttccaaagactggactgtatctacctcaatgccggaattatgccaaacccgcagctgaatatcaaagctctgttctttgggctcttttcccgtaaagtgattcacatgttctccactgccgagggccttctaacccaaggcgataaaatcacagctgatggcctgcaggaggtttttgaaactaacgttttcgggcactttatacttatcagggaactggagccgctgctgtgccacagcgataatccgagccagttgatttggacatcctctcgatctgctaggaagtctaactttagtctggaggactttcaacattccaaaggaaaggaaccgtacagcagtagcaagtacgcaacagacctgctgagcgtcgctctgaatagaaattttaatcagcaggggctgtacagtaatgtggcttgtccgggaaccgccctgacaaatctgacttacgggattcttccacccttcatttggacactccttatgccggccatcttattgctgaggttcttcgcaaacgcatttaccctaacaccatacaatgggactgaagctctggtatggctctttcatcagaagcctgagagtctgaatcccttaattaagtatctgtctgctaccaccgggtttggccgaaactatattatgacacagaagatggacttggacgaagataccgcggagaagttttatcagaagctgttggagctcgagaaacatatccgggtaacaatccagaaaactgacaatcaagccaggctgtcaggcagttgcctgtag

SEQ ID NO: 191155 - DNA, 336 bp, synthetic construct
  misc_feature 1..336: note = Description of Artificial Sequence: Synthetic coding sequence
  source 1..336: mol_type = other DNA
atgcggaaggtggtgctgatcaccggcgccagcagcggcatcggccttgctttgtgcaaaaggctgctggctgaagacgatgaactgcacctttgcttagcctgccggaacatgtccaaagcagaggccgtctgtgctgcactcttagcatctcaccccacagccgaggtaaccatagtacaggtggacgtgagcaacctgcagtctgtgtttagggccagtaaggagttaaagcagaggttccagaggctggactgtatctatttgaatgccggcatcatgccgaatcctcagttaaacattaaggccctcttcttcggattgttttctagttag

SEQ ID NO: 191156 - DNA, 255 bp, synthetic construct
  misc_feature 1..255: note = Description of Artificial Sequence: Synthetic coding sequence
  source 1..255: mol_type = other DNA
atgcggaaggtggtgctgatcaccggcgccagcagcggcatcggccttgctttatgtaaaaggttattagccgaggatgatgaacttcacctttgcctcgcctgtcggaacatgtccaaggcagaagcagtttgcgcagccctgctggcttcccatcccacagccgaggtgaccattgttcaggtggatgtgtctaacctgcagtccgtgtttcgtgcatcgaaggaattgaagcagcgttacattagctgctag

SEQ ID NO: 191157 - DNA, 921 bp, synthetic construct
  misc_feature 1..921: note = Description of Artificial Sequence: Synthetic coding sequence
  source 1..921: mol_type = other DNA
atgcggaaggtggtgctgatcaccggcgccagcagcggcatcggcctagctctgtgtaagaggctcctcgccgaggatgacgagcttcatctatgcttggcctgcagaaacatgagcaaggccgaagccgtgtgcgcagcacttctggcaagtcacccgacagctgaggttaccatcgtgcaggtcgatgtctctaacctccagtctgtgttcagggcatctaaggaacttaaacagagatttcagagactggactgtatctacctgaatgccggaataatgcctaacccccagcttaacataaaagctcttttttttggacttttcagcaggaaagtaattcacatgttcagcaccgccgagggcctgctgacgcagggagataagatcacagctgatggtctgcaagaagtattcgaaaccaacgtatttgggcattttatcctgattcgggagctcgaaccactgctgtgccattccgacaatccatctcagttgatctggactagctcacgatctgcgcgaaagagtaatttctccttagaggacttccagcactctaaggggaaggaaccttatagcagctctaaatatgcgacagacctactgtcggtagcccttaacaggaatttcaatcagcaactgagatttttcgccaacgctttcactctgacgccttataatgggacggaggcactggtgtggctcttccaccagaagcccgaaagcctgaaccccctaattaagtacctgtcagccacaacaggattcggtcgcaattatataatgacgcagaaaatggacctcgatgaggatactgccgaaaagttttaccaaaagctacttgagctcgagaaacacatccgtgtgacgattcagaaaactgataaccaggcccgtctgagcgggagctgcctgtag

SEQ ID NO: 191158 - DNA, 360 bp, synthetic construct
  misc_feature 1..360: note = Description of Artificial Sequence: Synthetic coding sequence
  source 1..360: mol_type = other DNA
gtggtgatccgggagctggagcccctgctgtgccacagcgacaacccttcccagctgatctggactagcagccggagtgcccgcaagtcaaacttctctctggaggacttccagcactcaaagggaaaggaaccatacagctcatctaagtacgccacagacctgcttagtgtcgcacttaacagaaacttcaaccagcagcttagattttttgcgaatgcttttaccctgacaccatataacggcacagaagctctggtgtggctgttccaccagaagcccgaatctctcaatcccctcatcaaatacctgagtgcaacaactggctttgggcgtaactacatcatgacccagaagtag

SEQ ID NO: 191159 - DNA, 966 bp, synthetic construct
  misc_feature 1..966: note = Description of Artificial Sequence: Synthetic coding sequence
  source 1..966: mol_type = other DNA
atggagcggaagaaccagaccgccatcaccgagttcatcatcctggggttctctaacctgaatgagtggcagtttctcctattcaccatcttctttcttacttatttctgtaccttaggaggcaatatccttataattctcacgaccgttacagaccctcatctgcatacccctatgtactacttcctggggaacctagcctttattgacatttgctacacgacctcaaatgtcccccaaatgatggtccacctgctttcgaagaaaaaaagcatctcttatgtcggatgtgtggtccaactgttcgcttttgttttctttgtggggagtgagtgcttgctcctggctgcaatggcgtatgatcgctacatcgctatttgcaatccactgagatatagcgtgattctgtccaaggttctgtgtaaccaactggccgcttcctgctgggccgcaggcttcctgaatagtgtagttcataccgtactgacattctgcctgccattctgcggcaacaaccagatcaattactttttttgcgatatccctccccttctaatactgtcctgtggcaacactagtgtgaacgagcttgccttgctcagtaccggagtcttcataggatggacaccattcctgtgcatcgtgctatcatatatctgcattatttctacaatcttgagaattcagtcatctgaagggagacgtaaggcgttttccacctgtgcctcccacttggcaattgtgtttcttttctatggtagcgcaatttttacctatgttcgccctatctcgacctacagtctcaaaaaggacagactagtaagcgtcctatacagtgtcgtcacaccgatgctcaaccccattatttacactctcagaaataaagatattaaggaagccgtcaagaccatcggctcaaagtggcaacccccaattagcagtttggacagtaagctgacctattag

SEQ ID NO: 191160 - DNA, 786 bp, synthetic construct
  misc_feature 1..786: note = Description of Artificial Sequence: Synthetic coding sequence
  source 1..786: mol_type = other DNA
atggccagccagctgcagaaccggctgcggagcgccctggccctggtgaccggtgctggttctggcattggaagagcagtgtctgtacgcttggccggtgaaggggccacagtggccgcctgtgatctcgatagggcagcagcccaggagacagtccggctcctcgggggaccaggcagcaaggagggccctccacgcggcaaccacgccgcgttccaggcggatgtgtcagaggccagggcggcccgatgcctgctagagcaggtgcaggcgtgcttttccagacccccatctgtggtagtttcctgcgcagggattacacaagatgaattcctgctccacatgtctgaggatgattgggataaagtgatcgccgtaaacctgaagggaacatttctggtgactcaggccgctgctcaggccttagtcagcaacggctgccgcggctcaatcattaacataagctccatcgtcggaaaggtaggcaatgtgggacagacgaattacgcagcgtctaaagctggcgttattgggctgactcagaccgcagcacgagaactcggccgccacggcatcagatgcaattccgtgctccctggattcattgctactccaatgactcagaaggtcccacagaaagtggtggataagatcaccgagatgattcccatgggacatctgggtgaccccgaggatgtagctgatgtggtggcgtttcttgctagcgaggactcaggttacataactggcacttcagtcgaggttaccgggggtctattcatgtag

SEQ ID NO: 191161 - DNA, 786 bp, synthetic construct
  misc_feature 1..786: note = Description of Artificial Sequence: Synthetic coding sequence
  source 1..786: mol_type = other DNA
atggccagccagctgcagaaccggctgcggagcgccctggccctggtcacgggtgctggcagcggaattggccgagctgtatcagtgcgcttagccggagagggggctactgttgcagcatgtgacctcgacagagcagccgcccaagaaaccgtgaggcttctcggaggaccgggctccaaggagggcccaccgaggggtaaccacgcagcctttcaggccgatgtgtcagaagcacgtgcggctcgctgcctgctggagcaggtgcaggcgtgtttttcccgcccaccctctgtagtggtgtcctgcgcgggcatcacacaagacgaatttctcctgcacatgagtgaagacgattgggataaggtgatagcagtgaaccttaagggtacattcctggttactcaagccgctgctcaagccctcgtcagcaatggctgcagagggtcgataatcaatatttcctccatcgtgggcaaggtcggaaacgtggggcagacaaattatgcagcctctaaggcaggagtgatagggcttacacaaactgccgccagagaattgggcaggcacggcattcgatgcaactccgtgctccccggattcatagccactcctatgacgcagaaagttcctcagaaggtggtcgataagattacagagatgatccccatgggccaccttggagacccagaggacgtggccgatgtcgtggccttcttggctagtgaagattcaggctacattacagggacctcagtggaggtgacaggagggctctttatgtag

SEQ ID NO: 191162 - DNA, 786 bp, synthetic construct
  misc_feature 1..786: note = Description of Artificial Sequence: Synthetic coding sequence
  source 1..786: mol_type = other DNA
atggccagccagctgcagaaccggctgcggagcgccctggccctggtgacaggcgctggttctgggatcggtcgggccgtttctgtgaggctcgccggcgagggcgccactgttgcagcctgcgacctggacagggccgcagcacaagaaacagtcaggctccttggcggacccggctcaaaagagggccctccacgcggcaatcacgccgcctttcaggccgacgtgtccgaagcgcgagccgccagatgtcttcttgagcaggtacaggcgtgtttctcaaggccgcccagtgtggttgtgtcctgtgctggaatcacacaggacgaatttctactgcatatgagcgaggatgattgggacaaagttatcgccgtgaacttgaagggcacctttctcgtgacccaagcagcagcccaggcactggtttctaatgggtgtcgtggctccattataaatatttctagtatagtgggtaaggtgggcaatgttggtcaaacaaactacgcggcatctaaggccggagtgatagggttaacccaaaccgctgctcgcgaactcggcaggcacggtatcagatgtaatagtgtgttgcccggcttcatagccacccccatgactcaaaaagtgcctcagaaagtggtggacaagataacagaaatgatcccaatgggccacttgggtgatcccgaagacgtagccgatgttgtggcgttcctggcatcagaagactctggatatataactggcacttccgttgaggtcaccggaggcctctttatgtag

SEQ ID NO: 191163 - DNA, 786 bp, synthetic construct
  misc_feature 1..786: note = Description of Artificial Sequence: Synthetic coding sequence
  source 1..786: mol_type = other DNA
atggccagccagctgcagaaccggctgcggagcgccctggccctggtcacaggtgccgggtccggaatcggacgagcagtgtctgtccgtctggcgggtgagggtgccaccgtagccgcttgcgatctggaccgcgccgcggcacaggagactgtgagattgttaggtggtccaggaagtaaggaagggccgcctagggggaaccacgccgcattccaagccgacgtctcagaggccagagctgctcggtgtctacttgagcaggttcaagcttgtttctcacgccccccctccgtggtggtgtcatgcgccggcattacccaggacgagttcctcctgcacatgtctgaagacgactgggacaaagtcatcgcagtgaacttgaagggcacattcctggtcacccaggccgctgctcaagcactggtatcaaacgggtgtcgtgggagcatcataaatatctcttcaatcgttggaaaagtaggtaatgtgggccaaaccaactatgctgccagcaaggcgggagtaattgggctgacacagaccgcagctcgcgaactcgggcgacacggtatacgatgcaacagcgttctgcccggctttattgccacccctatgacccagaaggtgcctcagaaggtagtggataagattaccgagatgattccaatgggccacctgggcgacccagaggatgttgctgacgtggtagcgttcctcgcaagtgaggactctggatatatcacaggtacgagcgtcgaggttacagggggcctgtttatgtag

SEQ ID NO: 191164 - DNA, 786 bp, synthetic construct
  misc_feature 1..786: note = Description of Artificial Sequence: Synthetic coding sequence
  source 1..786: mol_type = other DNA
atggccagccagctgcagaaccggctgcggagcgccctggccctggtcaccggtgcgggtagcgggataggtcgcgcggtgagcgttcggctagctggagagggtgctaccgtggctgcctgcgaccttgatagagccgcggcgcaggagaccgtgagactgctcgggggccccggtagcaaagagggtccgccacgtggcaaccatgccgcctttcaggccgatgtgagcgaggcaagggctgcccgctgcctgctggagcaagtacaggcttgcttcagccgccctccttccgtcgtggttagttgtgcaggtattacgcaggacgaatttctgctgcacatgtccgaagacgactgggacaaggtgattgctgttaacctgaaaggaactttcctcgtcactcaggccgctgcacaggctcttgtatctaacggatgccgcgggtccatcatcaacatttcctccattgtcgggaaagtggggaatgtgggtcagaccaactatgctgccagtaaagccggcgtgatcggcctcactcagaccgctgcacgggaattgggccgccatgggatccgctgtaattcagtcttacccgggtttattgccacacctatgacccaaaaggtgcctcagaaggtcgtggataaaatcaccgaaatgatcccaatgggccacctcggagacccggaagacgtcgccgatgttgtggcatttttggcaagcgaggattcaggttacatcactggcacgtccgtcgaagtgactggaggccttttcatgtag

SEQ ID NO: 191165 - DNA, 1848 bp, synthetic construct
  misc_feature 1..1848: note = Description of Artificial Sequence: Synthetic coding sequence
  source 1..1848: mol_type = other DNA
atggtgagcggccccctggccctgcggtggtgcgcctgggccggcagaggcgacatgggtcccgatatggaacttccatcccattcaaagcagctgctgctgcagctgaatcagcaaaggactaagggctttttgtgcgatgtgatcataatggtggaaaactcgatttttcgcgcccacaagaatgtgttggctgcgtcctcaatctattttaagtccttggtcctgcacgacaatctgattaacctggataccgacatggtctcgtctacagtgttccagcaaatcttagacttcatctatacaggcaaactgctgccgagtgatcaacctgctgaaccaaatttctccacactactgacggcggccagctacttgcagttgccagagcttgctgccctctgccggcggaagctgaagagagccgggaagcctttcggctccggccgggcaggcagcacaggcatgggcagaccccctaggagccagcgcctgtcaactgcaagcgtgatccaggcacgctaccagggcctggtggacggcaggaaaggagctcacgccccgcaagaattgcctcaagcaaaggggtctgacgacgaactttttctgggcggtagcaaccaagattccgtccagggcctgggccgggccgtgtgtcctgccggcggagaggcaggcttgggggggtgtagctcttccacaaacgggtcgagcggagggtgcgaacaggaactcggcctagatctgtctaagaaatccccccctctgccaccagctactcctgggcctcaccttacccccgatgatgctgctcagctctcagacagtcagcacggatcccccccagccgcttccgcacctcctgtggccaacagtgccagctactcagagttggggggaacccctgatgagccaatggacctcgagggggctgaggataaccacttatcgctgcttgaggcgccgggcggtcaaccccgaaaaagtctgaggcactccacaagaaagaaagagtggggaaagaaggagccagttgctgggagtccattcgaaagaagggaggctggcccaaaaggtccctgccccggcgaggagggcgaaggcgtcggagatagggtgccaaacgggattttggcctccggcgccggcccctctggaccgtacggggaacctccctatccctgcaaggaggaggaggagaatggaaaagacgcgtctgaagacagcgcacaatccggctcagagggaggttcaggacatgcatcagctcactatatgtacagacaggaggggtacgaaaccgttagttacggcgataacctgtatgtatgcattccatgcgcgaaaggttttccgtcctccgaacagcttaacgcacacgtcgagacacatacggaggaagagttatttatcaaggaggaaggagcctatgaaaccggatcaggaggagccgaggaagaagctgaagacttgtcagcgccctccgctgcctacaccgcagaacccaggcctttcaagtgttctgtttgcgagaaaacatacaaagaccccgcgacactgcgccagcacgaaaagacccactggctgacccggccgttcccctgcaatatttgtgggaagatgttcacccagaggggtactatgacccggcatatgcgctcccacctgggactgaaacctttcgcctgcgatgagtgtgggatgcggtttacccggcagtacaggctgaccgagcacatgagagtccatagtggagagaagccatatgaatgccagctttgtggcgggaaatttacgcagcagagaaacctcatttcccatttgagaatgcacacatccccaagttag

SEQ ID NO: 191166 - DNA, 1848 bp, synthetic construct
  misc_feature 1..1848: note = Description of Artificial Sequence: Synthetic coding sequence
  source 1..1848: mol_type = other DNA
atggtgagcggccccctggccctgcggtggtgcgcctgggccggcagaggtgacatgggtcccgacatggagttgccgtctcacagtaagcagctgctgctgcaattaaaccagcaaaggaccaaaggcttcttgtgtgatgtcatcatcatggtcgaaaatagcattttccgagcccataaaaatgtgctggcagcctcatctatctactttaaaagtctcgttctgcacgataatctgatcaacctcgacaccgatatggtcagcagcaccgtgtttcagcagatactggattttatttacacagggaagctactgcctagcgatcagcctgctgaaccaaacttttctaccctgctcaccgccgctagttacctacagctccctgagctggctgccctgtgccgccggaagctaaaaagggcaggtaagccctttggctctggcagagccggaagtaccggcatgggtagacctccgcgcagtcagcggctgagtaccgcctctgtaattcaagccagataccagggcctggtggacggccgcaaaggggcacacgctccgcaagagctgccgcaggctaagggctctgatgacgaacttttccttggagggagtaaccaagattccgtccagggactgggaagagccgtctgtcccgccgggggggaggccggcctgggcggctgttccagtagcaccaacggttccagcggtgggtgtgaacaagagttgggcctggacctgtctaagaagtctccgccactgcctcccgctacccctggaccgcacctgacgcccgatgacgccgcccagctctcagactcgcaacacggtagcccccctgctgcttccgccccacccgtggctaattccgcatcttatagcgaactgggtgggacaccagacgagccgatggatttagaaggagctgaggataaccacctgagcttgcttgaggcacctggaggtcaaccgaggaaatcactgcggcactccacacggaaaaaggaatggggcaaaaaagagcccgtcgcaggaagccctttcgagcggcgtgaggcaggcccaaaaggaccatgtcccggagaagagggcgaaggcgttggagatcgtgtaccaaacggaattctcgcatccggtgcagggcctagtgggccctatggggagcctccttacccatgcaaagaggaagaggagaacgggaaggacgctagcgaggacagcgcccaatccggcagcgagggtgggtcaggtcatgcatctgcacattacatgtatcggcaggaagggtatgagacagtgtcatacggagacaacctgtacgtgtgcatcccctgcgcgaaaggcttcccttcctctgaacagctgaacgcacacgtggagacccacaccgaggaagaactgttcattaaggaggaaggagcctacgaaacgggatccggcggagcagaggaggaggctgaagatctcagtgcgccatccgcagcttacactgccgaaccccggcctttcaaatgtagcgtctgcgagaaaacgtacaaagaccctgccaccctaaggcagcacgagaagacccactggctcaccaggccatttccctgcaatatatgtggcaagatgtttacgcaacgcggtactatgacacgtcatatgagatctcaccttggactcaagcccttcgcttgcgacgaatgtggaatgcgctttacaaggcagtataggctcaccgaacacatgcgcgttcactctggagaaaagccttatgagtgccagctgtgtgggggcaaatttacacagcagcggaatctgatcagccacctgcgcatgcatacgtccccatcatag

SEQ ID NO: 191167 - DNA, 1848 bp, synthetic construct
  misc_feature 1..1848: note = Description of Artificial Sequence: Synthetic coding sequence
  source 1..1848: mol_type = other DNA
atggtgagcggccccctggccctgcggtggtgcgcctgggccggcagaggtgatatgggccccgacatggagttacctagccactcgaaacagctgctgctgcagctaaaccaacaaaggactaagggattcctatgcgacgttattattatggttgagaatagtattttccgagcgcataaaaacgtccttgctgcaagcagcatctactttaagagcctggtactccatgataatcttatcaacctcgacacggatatggtgtcatcaacagttttccagcagattctagacttcatctacacaggcaagttgctaccttccgatcaaccagcagaaccaaacttttccacccttctgaccgcagcgagttaccttcagctccccgagctcgcggcattgtgccgtagaaaactgaaacgcgccggcaaacccttcggcagcgggcgcgcagggtctaccggcatgggacgacccccccgatctcaacgcctgtcaactgctagtgttattcaggcgaggtatcagggactcgtagacggtcggaagggagctcatgccccacaagagttgccacaagcaaagggtagcgacgacgaactctttctcggcggctcaaatcaggactctgttcagggacttggcagagccgtttgtcccgcaggaggtgaggccggcctcgggggctgctccagctccacgaatggctcctctggtggctgcgaacaggaactggggttggatctgagcaagaagtcaccacctttacccccagctaccccaggtccacatctgactccagatgatgcagctcagctctccgactctcaacatggaagcccccctgccgcaagcgccccacccgtggctaattcagcttcctactctgaacttggaggcacaccagacgaaccaatggatctcgaaggggccgaagataatcacctcagcttgcttgaggccccagggggacagcctcggaaatcactaaggcacagcacccgcaagaaagagtggggaaagaaagagccggtggctggcagtccgtttgagcgaagggaggccggccccaagggcccttgtccgggagaagaaggcgagggggttggagatcgggtgccaaacggcattctggcatccggcgcaggcccatctggcccatacggcgagcctccttatccttgtaaggaggaggaggaaaacggtaaagatgcctctgaggacagtgcgcaaagtgggagcgaaggtggctccggccacgcctcagcacattatatgtaccggcaggagggctacgaaacagtgtcttacggggacaacctgtacgtatgcatcccctgtgcaaagggttttccctccagtgaacagctgaatgcccacgtcgagacccacacagaggaggagctttttatcaaggaagagggggcttacgaaacaggatcagggggggctgaagaagaagccgaagatctgagcgccccctccgccgcctataccgctgaacctcgtccttttaagtgttcagtgtgcgagaagacgtacaaagaccccgccacacttcgtcagcacgaaaaaactcactggcttaccagaccttttccttgtaacatttgtgggaaaatgttcacccaaagaggaacaatgacaagacatatgagatctcaccttggcttgaagccttttgcctgtgacgagtgtggtatgagattcacccgacaatataggttaacagagcacatgcgagtgcatagcggagagaagccttatgaatgtcagctctgtggcgggaagttcacccagcaacggaacctcatctcacacctccgaatgcacacctcaccatcctag

SEQ ID NO: 191168 - DNA, 2670 bp, synthetic construct
  misc_feature 1..2670: note = Description of Artificial Sequence: Synthetic coding sequence
  source 1..2670: mol_type = other DNA
atggacgcccggggcggcggcggccggcccggcgagagccccggcgctacacctgctcccgggccaccacctcctccccccccagcaccaccccagcagcaaccacctccgcctcccccgccggcacccccccctggacctggccctgcgcctccccagcaccctcccagggccgaagctttgccccccgaggcggctgatgagggaggtcccaggggcagactcagaagccgggactcatcttgtggtagaccaggtacccctggcgccgcctccacagcaaaagggtcccccaacggagaatgcggaagaggagagcctcagtgctcaccagcagggccggagggccccgcccggggccctaaggtctcgttttcttgcaggggcgccgcctctgggcccgcaccaggtcccggccccgccgaagaagctgggtcggaggaggcaggacccgcgggtgagccacgtggcagccaggcatcatttatgcaacgacagtttggcgctctcctgcagccaggcgtcaacaagtttagccttagaatgttcggttcccagaaggcagtggaaagagaacaagaacgcgtgaagagcgccggggcctggattatccacccttactctgatttcaggttctactgggactttacaatgctgctctttatggtggggaacctcatcattatccctgtgggtataacattcttcaaggatgagacaaccgccccttggatagtgtttaatgtagtgagtgatacgttttttttgatggatttagttctgaattttaggacgggaattgttatagaggacaacaccgaaattatactcgatcctgaaaaaatcaaaaagaaatacctccgtacctggtttgtcgtggatttcgtttcatcaattcctgtggactatatattcctgattgtggaaaaaggcatcgattcagaggtgtacaagacagctcgcgccctccgcattgtccgcttcactaaaattctgagcctgctccgactgctgcggctttcccgtttgataagatacatccatcaatgggaggagatctttcacatgacttatgacctcgcatctgccgtgatgcgtatatgcaacctgatcagcatgatgctcctcttgtgccactgggacggctgcctccagtttttggtaccaatgctgcaagacttcccacggaattgctgggtctccattaatggaatggtcaatcacagctggtcagagttgtactcttttgcgctgttcaaggcaatgtcccacatgctctgtattggctatggcagacaggcccctgaaagtatgacggatatttggcttactatgctatctatgattgtgggagcaacctgctatgccatgttcattggacacgcaactgctctcatacagagtctggactcaagcagacgacagtatcaggagaagtacaagcaggtggagcaatacatgtctttccacaagctcccagctgacttcaggcagaagattcacgactattacgagcacagatatcaaggtaagatgttcgacgaggactcaattctaggcgagctgaatggacctctccgagaggaaattgtgaactttaactgccgtaagctggttgcctccatgcccctcttcgctaacgccgaccccaatttcgtgacggccatgctgactaagctaaaatttgaggtattccaaccaggagactatattattagggaaggcacaatcggtaagaagatgtactttattcagcatggggttgtgtcggttcttaccaagggcaacaaagaaatgaagcttagcgacgggtcttactttggggaaatctgcctgctgactcgtgggagaagaaccgcctcagtgagggcggatacatattgtcgcctctatagcctttctgtggacaattttaacgaagtgttggaagagtatccaatgatgcggagggccttcgaaacggtggcaattgaccggctagatcgaatcggcaagaagaactcaatcttgcttcacaaagttcagcacgatctgaacagtggggtgttcaacaatcaggagaatgctatcattcaagaaatcgtgaaatacgacagagagatggttcaacaggctgagctgggacaaagagtcggactatttccgcctcctccaccgccacctcaggtgacttccgctatcgcaactcttcagcaagcagccgctatgtctttttgtccccaggttgccaggccactcgtgggccctctggcgcttggaagcccaaggcttgtgaggagaccgccccccgggcctgcgccagccgcagcatcccccgggcccccacccccagcctccccccccggcgcaccagccagtccgagagcccccagaactagcccttacggcggcttgcctgccgccccactggccggacccgctctgcccgcacggaggcttagccgagctagtcgccccctgagtgcgagccagcctagtctgccccatggggccccggggccagctgcatcaactcggccagctagttcctcaactccccgcctcggtccaacaccagcggcacgggccgccgcgcccagtccagaccgtcgtgatagcgcaagccctggagccgcaggaggccttgatccccaagatagcgcgcgttctaggctcagctctaacctgtag

SEQ ID NO: 191169 - DNA, 2325 bp, synthetic construct
  misc_feature 1..2325: note = Description of Artificial Sequence: Synthetic coding sequence
  source 1..2325: mol_type = other DNA
atggaggccgagcagcggcccgccgccggcgccagcgagggcgccactccgggactcgaggccgtaccaccagtcgccccaccccccgccacagcagcatccggccctattcccaagtcgggtccagagccgaagcggcgccatttaggtactttgctccagcccacagttaacaagttcagtctcagggtgttcgggtcacacaaagctgtggaaattgagcaggaaagggtgaagtcagccggagcgtggatcatccacccttactccgacttccggttctactgggacctgatcatgctattgcttatggtaggcaatttaatagtcctcccagtgggtatcactttctttaaagaagaaaacagcccgccatggatagtattcaacgtactcagtgataccttttttctgcttgacttagtcctgaactttaggaccggcattgtggtagaggagggggccgaaatcctgctggccccccgcgccatccggacacggtatcttagaacctggttcctagtcgacctgatttcatctatccccgtagattacatttttttggtcgtggagctagaacctcgtctcgacgcagaggtctataaaaccgcacgagcgttgcgaatcgtccggttcaccaaaatactttctctgctcagactactgcgcctgtcccgtctgatccggtatattcaccagtgggaggagatctttcatatgacatatgatcttgcctcagccgtggttcgcattttcaatctcattggtatgatgctacttttgtgccattgggacgggtgcctccagttcctagtgccaatgctgcaggattttcctcccgattgttgggtgtcaatcaatcacatggttaatcattcctggggccgccaatatagtcacgcccttttcaaggcgatgtcccacatgctgtgcatcggctatgggcaacaggcacccgtaggcatgccagacgtgtggctgacaatgctcagcatgattgtcggcgcgacatgttatgccatgttcattggtcatgcgactgctctgatccagagtcttgactcaagtcgtcgtcaataccaggagaaatacaagcaggtggagcagtacatgagttttcacaaactaccggccgataccaggcagcgcattcacgaatattacgaacaccgatatcagggaaagatgtttgacgaggagtctatcctcggggagcttagtgaacccctgcgggaagaaatcatcaactttacatgtcgcggactcgtggctcatatgccccttttcgctcacgctgatcctagttttgtcacagccgttttaaccaagctgcgatttgaagttttccaacccggggacctcgtggtacgagaggggtcagtgggccggaaaatgtactttatccagcatgggctgctgagtgttctggcacggggcgcgagggacactcgccttacagatggctcttattttggagaaatttgcttactgacaagggggcggcggaccgcttcggtccgggccgatacttactgtaggctttacagcttgtctgtcgaccactttaacgccgtccttgaggaatttccgatgatgcgccgcgcgttcgagaccgttgctatggaccgacttctcagaattggaaaaaaaaactcaattcttcagcgtaagagatccgagcccagcccgggttcatctggcggcatcatggaacaacacctggtgcagcatgatcgtgacatggctaggggggtcagagggcgagccccctctacaggtgcgcagctgagtggcaaacccgtgctatgggagcccctcgttcatgccccacttcaagcagccgccgttacctcaaatgttgccatcgctctcacccaccaaaggggccctctgcccctgtcacccgactcaccagctaccttactcgcccgatcagcctggaggtccgctgggtcccctgccagccctctggtgcctgtccgagccggaccgtgggccagtaccagccgattgccagctccaccggctagaactctgcacgcatcactctcaagagccggcaggagtcaagtgtccctgctgggtccccccccaggtgggggcggccggaggctcggaccacggggcaggcctttgtctgctagtcagccatcactgccacaaagagcaacaggcgacggctcccctgggcgtaaaggctccggttcagagcggctgccaccatccgggctgctggccaaaccacctcgcacagcccaacccccccgcccgccggttcctgagccagcaactccaagaggcctacagctgtcagctaatatgtag

SEQ ID NO: 191170 - DNA, 3612 bp, synthetic construct
  misc_feature 1..3612: note = Description of Artificial Sequence: Synthetic coding sequence
  source 1..3612: mol_type = other DNA
atggacaagctgccccccagcatgcggaagcggctgtacagcctgcctcagcaggttggggccaaggcctggatcatggatgaggaagaggatgctgaggaggagggcgctgggggcaggcaggacccatctaggcgtagcattcggctccgccctctccccagcccgtcaccaagcgcggccgccggcggcaccgagtcccggtcatcagccctgggtgccgcagatagtgaggggcccgcccggggggctgggaaatcctctacaaatggggactgtagacgcttccgcggcagcctggccagtctggggtccaggggcggtggcagcggcgggacaggcagcgggagttctcacggtcaccttcacgactccgccgaagagagacgcctcattgcagagggcgacgcgagcccaggtgaggatagaactcccccaggactggctgccgaaccagagcggcctggcgctagcgcacaacccgcagcttcacctccccccccgcagcagccaccccagcccgcttcagcatcctgcgagcagccttccgtggacactgccattaaggtcgaaggaggcgccgctgcaggagatcagatattgccggaggctgaagtgcgtttgggccaggcaggctttatgcagaggcagtttggggctatgttgcaacccggcgtcaacaagtttagcctacggatgttcggcagtcaaaaagccgtggaaagagaacaagagagagttaagagtgccggtttctggatcattcacccctattccgactttcgcttctactgggacctcaccatgctgctgttgatggtgggtaatttaattatcatcccagtcggaataactttcttcaaagacgagaataccaccccttggattgtgtttaatgtagtgtcagataccttttttcttatcgatctggtcctgaatttcagaacgggtatcgtggttgaggacaacacagagataatcctcgatcctcagcgcattaagatgaaatacctgaagagctggttcatggtcgactttatcagctctatcccagtagactacatttttctgatcgtggaaacacgaattgacagcgaagtctacaagacagcgagggctctcagaatcgtccggttcactaaaatcctgtctctcctccgcttacttcgactgtcgagactcatacgctacatccaccagtgggaggagatattccacatgacatatgatctggcctcagcagtggtgcggatagttaatctcataggtatgatgctcctgttgtgtcattgggacggttgcctgcagtttttagttcctatgctccaggactttcctgatgattgctgggtcagtatcaataatatggtcaacaactcatggggaaagcagtactcgtatgccctatttaaggccatgagtcacatgctgtgcataggctacggcaggcaggcccccgtgggcatgtcagatgtctggctgaccatgctctctatgatcgtaggagcaacttgctatgccatgtttatcggtcacgctactgcgctgattcagtctttggatagctctcgccggcagtatcaggaaaagtataaacaggtggagcagtacatgagcttccataaactgccgcccgatactcgccagcgcatccatgattactatgagcacagataccagggcaaaatgtttgatgaggagtcaatcctgggggagctcagcgagcctttaagggaagaaattataaattttaactgtaggaaactagtggctagtatgcccctgtttgcgaatgcggacccaaatttcgttacctctatgctgacaaagctgcgattcgaagtcttccaacccggcgattacattatccgtgagggaaccattggcaaaaaaatgtatttcattcagcacggcgtggtctccgttctgacgaagggcaacaaagagactaaacttgccgacggctcttacttcggcgaaatctgcctgcttacacgaggacgccgcacggccagcgttagggcagacacatactgtagactctacagcctctctgtggacaattttaacgaggttttagaggagtaccctatgatgcgcagggcatttgagaccgtggcactggacaggttagatcggataggcaagaagaattcgattcttctacacaaagtgcaacacgatctgaactccggggtgttcaactatcaggagaatgaaattattcagcagatcgtgcagcatgatagagaaatggcccattgcgctcacagggtgcaggcagcagctagcgccaccccgacacccaccccagtgatatggacgcccctcattcaggctccactgcaggcagcagccgccaccacttctgttgctatcgccctaactcaccacccaaggctgcctgccgcaatattcagaccacccccaggctccgggctcggaaacctaggcgccggccaaactcctcgacatctcaaacgtctgcagtctctcattccgtccgctctaggcagcgcatcccctgctagcagcccaagtcaggtagacacgccatctagctccagctttcatatacagcagctggctggattttccgctcccgcggggctatctccgctgttaccatccagtagttcttcacctcctccgggcgcttgcggctcaccttctgcccccacccccagtgctggtgtcgcggccacaactatcgccggcttcggacacttccacaaagccttaggtggctcactgtctagcagcgattccccgttgttaactcctctgcagccaggggctcggtctccccaagccgcccaaccctctcccgctccaccaggcgcacggggaggactcggcctgcccgagcattttctgcctcccccgccctcaagccggagtccctcatcgagcccgggacagttgggtcagccaccaggcgaactgtccctcggcctggccacagggccactgtccacacccgagacaccacctaggcagcccgagccaccctctttggtggcaggcgcctcagggggagcatctcctgtaggctttacaccacgaggaggcttaagcccaccaggtcactcccccgggccgcctagaacatttccatcagcccctccacgagctagcgggagccacggaagcctgctccttccacctgcgtcttcacccccacccccccaggtcccacagaggagagggacaccccccttaacccctgggcgcctgacccaagacctcaagctcatttcagcgtctcagcccgcgctgccccaggatggagcccagactctgaggagggcgtctccgcactcttctggggaaagtatggccgcgttcccactttttccccgggccggcggcggcagcggcggatctgggtctagtggaggactcggtccgcccggacgaccttatggagctatcccaggacagcacgtcacactgccaagaaagacatcttcgggaagtctgcctccccccttatcactgttcggcgccagagcgacctcctccggaggcccgcctctgacggccggcccccagagggaacctggagcacgccccgagcccgtcagatctaagctgcctagtaatctgtag

SEQ ID NO: 191171 - DNA, 396 bp, synthetic construct
  misc_feature 1..396: note = Description of Artificial Sequence: Synthetic coding sequence
  source 1..396: mol_type = other DNA
atgaacctgcccagcaccaaggtgagctgggccgccgtgaccctgttgttactgctgctgctgctccctccagccctgctctcttcaggcgcggccgcacaacctctcccagattgctgtcggcaaaagacatgtagttgtcgtctttacgaactgcttcacggcgctggcaaccatgctgcagggatcctcacactcgggaagcggcggtcagggccaccaggcctccagggtaggctgcagcgtttattgcaggcaagcggaaatcatgccgcgggcatcttaactatgggtcgcagagcaggagccgagcccgccccaaggccgtgtttaggcagacggtgtagtgctcccgccgcggcgagcgtggcccctggtgggcagtcagggatctag

SEQ ID NO: 191172 - DNA, 1050 bp, synthetic construct
  misc_feature 1..1050: note = Description of Artificial Sequence: Synthetic coding sequence
  source 1..1050: mol_type = other DNA
atggccgccaccgccgccgaggccgtggccagcggcagcggcgagcctagggaagaggccggagcccttggcccagcatgggacgagtcccagctccgttcttatagctttcccacccgcccaatcccccgtctgtcccagagtgatccacgggccgaagagcttatagagaacgaagagcctgtggtgttgactgataccaatctggtgtatccagctttgaagtgggatctcgaatatctgcaagagaacattggtaatggagactttagcgtgtattccgccagtacacataagtttctctattacgatgaaaagaagatggctaactttcagaactttaagccccgtagcaaccgtgaagagatgaagttccacgagtttgtggaaaagctgcaggatatccagcagcgcggcggtgaggaacggctttatctgcagcagacactcaacgacaccgtcggaagaaagattgtcatggattttctgggtttcaactggaattggatcaataagcagcagggcaaacgcggatggggccagctcacatccaacctgttgcttatcggcatggaggggaacgtaactcccgctcattatgatgagcagcaaaatttcttcgctcagatcaagggctacaaacgctgtatcctgttccctccagaccaatttgaatgcctgtacccatacccagtgcatcatccgtgtgatcgacagtcgcaggtcgatttcgataatccggactatgagcggttcccgaatttccagaatgtggtcggctacgaaaccgtggtggggcctggcgatgtgctctacataccaatgtattggtggcaccacattgagagcctgctgaatggaggcatcaccattaccgtgaacttctggtacaagggtgcgccaacccccaagagaatcgagtacccactgaaggcccatcagaaggtcgcgatcatgcggaacattgaaaagatgttaggggaggcgctggggaatccccaggaagttggacccttattgaacaccatgataaaaggcagatacaattag

SEQ ID NO: 191173 - DNA, 1149 bp, synthetic construct
  misc_feature 1..1149: note = Description of Artificial Sequence: Synthetic coding sequence
  source 1..1149: mol_type = other DNA
atggtgagcgtgggctgcgtggtgttcctgttcttcttcttcggcgttcgcaatcgccgatcctttcggtttcgctggggacccagcctcgccgcagaaatggccgccacggcagccgaggcagtagctagcgggtccggggaaccgcgcgaggaggccggagcccttggccccgcttgggatgaatcacagctccggtcatactccttcccaacaaggcctatccctaggctgagtcaatcagatcccagggccgaggagctgattgagaacgaggagcctgtggtgctcaccgatactaacttggtgtaccctgctttgaagtgggacctggaatatctgcaagagaatatcggcaacggagacttctctgtttatagcgcctccactcacaaatttctgtattatgatgaaaaaaaaatggccaacttccagaattttaagccaaggtctaacagagaggagatgaagtttcatgagttcgtggaaaaacttcaagatattcagcagcgaggaggagaggaacggctgtacctccagcaaacactaaacgatactgtaggaaggaagatcgtaatggactttctgggcttcaactggaattggatcaataagcaacagggaaagcgaggttggggacagctcactagcaacttgctcctcatcggcatggagggcaatgtaacaccagcacactacgatgagcagcagaacttcttcgcccagattaagggatacaagcgttgcatcctgtttcccccggatcaatttgaatgcctgtatccttacccagtacaccatccttgtgaccgccagagtcaggtggacttcgataacccagattacgaacgcttcccgaatttccagaatgtagtgggctatgaaaccgttgtggggcccggagacgtactgtatatcccgatgtactggtggcaccatatagaatctttactgaatggcgggatcaccatcaccgtcaacttctggtacaagggggccccaacacctaagagaattgagtaccccctaaaggctcatcaaaaggtggcaatcatgcggaatatagaaaagatgctaggggaagcacttggcaaccctcaggaagtgggccctcttctgaacacgatgattaaaggtcgttacaattag

SEQ ID NO: 191174 - DNA, 579 bp, synthetic construct
  misc_feature 1..579: note = Description of Artificial Sequence: Synthetic coding sequence
  source 1..579: mol_type = other DNA
atggccaacttccagaacttcaagccccggagcaaccgggaggagatgaaatttcacgagttcgtggagaaacttcaggacatccaacagagaggtggagaagagaggctgtatctgcagcagacacttaatgatacagttggccggaagatcgttatggatttcctcggatttaactggaattggattaataaacagcaggggaagcgaggctggggacagctgacgtccaacttactgctgatagggatggagggcaatgtcactcctgctcattatgatgagcaacagaacttcttcgcacagatcaaaggatataagcggtgcatccttttccctcctgatcagttcgaatgcctctacccataccctgtgcaccatccttgtgacaggcagtcccaggtggacttcgataaccccgattacgagcggttcccgaatttccagaatgtcgtcggctacgaaacagtggtgggacccggagacgttttatatatccccatgtattggtggcaccacattgaatcccttctgaatggaggtatcacaatcactgttaatttttggtacaaaggttag

SEQ ID NO: 191175 - DNA, 1803 bp, synthetic construct
  misc_feature 1..1803: note = Description of Artificial Sequence: Synthetic coding sequence
  source 1..1803: mol_type = other DNA
atgcggcccgccgccggcgccgcccggcggccccggtgctgcacctcttggttgacacgctgcccatcacccgctgcctctgcccctacttggacccgcccactgtcctgcgcgtctcctagcgcaacatgcgcctgtacagccagtgctccacagctagaacttatcggtcattctatattcgatttcatccacccatgtgaccaggaggaactgcaggacgcccttaccccccagcagacactgagcaggaggaaggtcgaggctcccacagaacgatgcttttcactgaggatgaagtcgactttgacctctagaggccgaactctcaacctcaaggccgccacttggaaagtattaaattgttccggacatatgcgggcgtataaacctcctgcccagactagcccggcaggatctcctgacagcgaaccaccactgcaatgcctggtgctgatttgtgaggcaatcccgcatcctggctcattagaacctcctcttgggcgcggcgcctttctaagtcggcacagcttagacatgaaatttacttactgcgatgatagaatagcagaggtggctggctacagtcccgacgacttgatcggttgttccgcatacgagtacattcacgccctcgatagcgacgccgtgagtaaatcgattcatactcttctgagcaaggggcaagccgtgacgggacagtatcggttcctggctcggagcggtggctacctttggacgcagacccaggccactgtggtgagcggaggccggggaccccagtcagagagcatcgtgtgtgtccacttccttatcagccaagttgaagagacgggggtcgtgctgagcctggagcagacagaacagcactcacgtagaccaattcagaggggtgctccgtcccagaaggacacgcctaacccaggagattcgctggatactcccggcccaaggatcctagctttcctccacccacccagcttgagtgaagccgccctggctgcagacccacggagattctgctctcccgacctacggaggctgctcgggccaatacttgacggggccagtgtagccgccaccccttccacccccttagcgacgcggcacccgcagtccccgctgtccgccgatctgccagacgaactgccggtcggaacagaaaatgtacataggctcttcacttcggggaaggacacagaggccgtcgaaacagacctcgatattgctcaggacgcagatgcgttggacctcgagatgctggcgccatacatctctatggacgatgactttcagctaaacgcctcagagcagctccctcgcgcctatcacagacccctgggcgccgtgcctcggcctcgcgccagatcctttcatggtctgagcccgccggcgctagaacctagcctgttgcctcgatgggggagtgatcccagacttagttgctcctcccctagtcggggcgacccaagcgcgtcttcacctatggccggggctcggaaacggactctggcccagtcgagtgaagatgaggacgaaggagtcgaactgctgggggtgcggccccctaaacgttcaccatctcccgagcatgagaacttccttctctttcctcttagcttgagcttcctgttaaccggagggcccgcccctggcagtctacaggatccatcaacacccctgctgaatctgaatgagccactaggacttggcccttccctgctctctccttactccgatgaagatacaactcagcctggcggccccttccagcctagagccggttcagctcaagctgactag

SEQ ID NO: 191176 - DNA, 1353 bp, synthetic construct
  misc_feature 1..1353: note = Description of Artificial Sequence: Synthetic coding sequence
  source 1..1353: mol_type = other DNA
atgcggcccgccgccggcgccgcccggcggccccggtgctgcaccagctggctgacaagatgtccttcacccgcagcctctgcccccacatggacccgcccattatcctgcgcttctccctctgcgacttgcgcgtgtaccgcgtcggcaccccagttagagctgattggacattccatattcgatttcatccatccttgtgaccaagaggaactgcaagatgctttaaccccgcagcagactttaagcaggcgcaaagtggaagcaccgacagaaagatgcttctccctccgaatgaaaagcacactgacgagccgagggagaactctaaatctgaaagctgctacatggaaagtgctaaattgcagcggccacatgagagcatacaaacccccagcccagacaagtcctgccggatcgcccgacagcgaacccccacttcagtgcttagtcctgatatgtgaggctatccctcatccgggatccttggagccacctttgggtcgaggcgctttcctctcaaggcatagccttgacatgaagtttacttattgcgacgacagaattgccgaggtggccggatacagccccgacgatctgattggttgttccgcatacgagtacatccacgccctcgattcagatgcagtctccaagagtattcatacactgttgtccaagggccaagccgtgaccgggcagtacaggtttttggctcggtctgggggatacctttggactcagacccaggccaccgtggtctcagggggccgcggacctcaatctgagagcattgtgtgtgtgcattttctcataagtcaggtcgaggagacaggagtggttttgagtctcgaacagacagagcagcacagccggcgtcccattcagcggggggcaccatcccagaaagatacccccaacccgggtgacagtctagacacccctggaccacggatcctcgcattcttacaccctccttccctttccgaagccgccctggccgctgaccctcgccgcttctgctctccagatctgcgacgactcctggggcccatcttggatggtgcatcggtggctgcaacgccatcaacccctctagccactaggcatccccagtcacccttgtccgccgacttgcctgatgaacttcccgtcggcactgagaacgttcatagactattcacgagcggcaaagataccgaagctgttgagacagatctggatattgcccaagatcccagtaccccattgctgaacctgaatgagcccctcggctttcacttcgttacccaatccggagtgcagtggcacaagcactcgagcccccagccccggccccctggattgaaatag

SEQ ID NO: 191177 - DNA, 1899 bp, synthetic construct
  misc_feature 1..1899: note = Description of Artificial Sequence: Synthetic coding sequence
  source 1..1899: mol_type = other DNA
atggccctgggcctgcagcgggcccggagcaccaccgagctgcggaaagagaagagcagggatgcagcccggtccagaagatctcaagaaactgaagtcctatatcaactggctcataccctaccattcgcccggggagtctctgctcacttagacaaggctagtattatgcgactcacaatatcataccttcgcatgcacagactttgtgctgccggggaatggaatcaggttggagccgggggggaaccactcgatgcatgctatctgaaggcgctcgagggattcgtgatggttcttacggcagagggcgacatggcatacctcagcgaaaatgtgagcaaacaccttgggctgtcacagcttgaactcatcggacatagcatatttgacttcattcatccctgcgatcaagaggagctccaggatgcattaactccccagcagaccttgtcccgccggaaggttgaggcacctactgagaggtgcttttcactgcgcatgaagagtacactcacaagcaggggacggacactgaatctgaaggccgcaacgtggaaggtcctgaactgcagcgggcatatgcgggcttacaagcctccagcccaaacctcccctgcagggtcccctgatagcgagcccccacttcagtgcctggtcctcatatgcgaggccatcccccatcctggcagtttagaacctcccctggggcgcggagcattcctatcaaggcactcattggatatgaaatttacttactgtgacgatcgcatcgctgaagttgcagggtattctcccgacgatctgattgggtgctccgcatacgagtatatccatgctcttgatagtgacgcggtcagcaagtctatccatactcttctttccaagggccaggcggtcactggccaatatcgctttctcgctagaagcggcggatatctttggacacaaacgcaggcgacagtggtgagcggcggaagaggtccccaaagcgagtccattgtgtgtgtgcactttttgatatcccaggtcgaggagactggcgtggtcctttcacttgagcagacagagcagcactcccgacgcccaatccagcgcggggcaccttcccagaaagacacccccaacccaggcgatagcctggacactcccggcccgaggatcctcgcatttctgcatcccccatccctctccgaagctgccctggctgctgaccctcggaggttttgctcgcccgatcttcgtagattgctcgggcccattctggacggagcctccgtagcggccaccccgagcacacctttggctactcggcatcctcagagccccctgtctgcagacctccctgatgagctccctgtagggactgagaacgtgcatcggttgtttacctccggaaaggatacagaagccgtggagacggatctggatatcgcccaggatgctgatgctctggacctggaaatgctagcaccctatatctctatggatgacgacttccagctaaatgcttctgagcagctgccgcgtgcttaccaccggcctcttggcgcagtgcccagacctagggctcggagcttccacgggctttctccccctgccctggagccctccttgcttcctcggtggggctccgacccccgcctaagctgctccagccccagtagaggggaccctagtgcttcctcccctatggcgggagcccgaaaaagaaccttggcgcagagtagcgaagacgaggacgagggtgtagagcttctgggagtgagaccaccaaagcgcagcccaagccccgaacatgaaaactttctcttattccctctcagcctcgtgtgttggggaatcaacgggattttatggccctcactcccaagctggctaaagcccactgtattgtag

SEQ ID NO: 191178 - DNA, 1731 bp, synthetic construct
  misc_feature 1..1731: note = Description of Artificial Sequence: Synthetic coding sequence
  source 1..1731: mol_type = other DNA
atgcggctgaccatcagctacctgcggatgcaccggctgtgcgccgcaggagaatggaatcaggtgggggcaggaggggagccactagacgcatgttatctgaaggctctggagggctttgtcatggtactgacggccgaaggtgatatggcttatctgtcagaaaacgtctccaaacatttgggcctgagtcagctggaactcatcgggcacagtatcttcgatttcatccatccctgtgatcaggaggagttgcaggacgcattgacgccccagcaaaccctgagccgccgaaaggtggaagcacccaccgagcgctgctttagcctcaggatgaagagcacactcacgagtagaggacgaaccctgaacctcaaagctgccacctggaaagtcttgaactgcagtggtcacatgcgcgcatataagccacccgctcagacttctcccgctggtagtcctgactccgagccccctcttcagtgcctggtactgatttgtgaagcaattccccaccctggtagcctggagccacccctggggcggggggcttttttgtcacgtcactctttggacatgaaattcacgtattgtgatgatagaattgccgaagtggctggctacagccccgacgatctcatcggatgcagcgcctacgaatatatacacgctttagacagtgatgcagtgtccaagtccatacacacactgctgtctaaaggccaagctgtaactggtcagtaccgcttcctcgcccggtcagggggatacctctggacacagacgcaggcgacagtcgtctcagggggaagaggcccccagtctgagtcaatagtttgtgtgcattttttgatctcgcaggttgaagaaacgggcgttgtgctgtccttggagcaaacagaacagcactcccgacgccccatccagagaggagctccctcacagaaggacacccctaaccccggagactctttggacacacctggaccaagaatcttggctttcctgcatcccccttcactctccgaagctgcactagccgccgatcccaggcggttctgtagtcccgacctccgccgcttactgggtccaattctggacggcgccagtgtggccgcgacaccttctacacccttggcaacccgacacccacagagccccctgagcgccgacttacccgacgaacttccggtggggactgagaatgtccatagactgtttacatctggaaaagatacagaagccgtggagacggacctcgacatagcacaggacgccgatgcccttgatctggaaatgctcgcgccttacatctccatggatgacgacttccagttgaacgcatccgagcagttgcctcgtgcctaccaccggcctctcggtgctgtgcctagaccccgggccaggtcttttcacggtctctctccccccgcgctggaaccaagcctgctgccacgatgggggagtgacccccgtctgagctgttcctctccatcccgaggagacccttccgcctcctcccctatggcaggagcccgcaaacgaactctggcccaatcttcagaagacgaggacgagggggttgagctgctgggagtgaggccaccaaagagatcaccgagccccgagcatgagaacttcctgcttttccctctgtctctcgtgtgctggggtattaacgggattttatggccttcgcttcccagctggctcaagcctactgtcctttag

SEQ ID NO: 191179 - DNA, 2004 bp, synthetic construct
  misc_feature 1..2004: note = Description of Artificial Sequence: Synthetic coding sequence
  source 1..2004: mol_type = other DNA
atggactggcaggaccaccggagcaccaccgagctgcggaaggagaagtctagggacgcggccaggtccaggcgatcacaagaaacggaagtgctgtaccagttggcacatacactgcccttcgcccgaggtgtcagcgcccatcttgacaaggcatcaattatgcgcctgacgatttcatatctgagaatgcacagactctgtgcagctggcgagtggaatcaagtgggggcaggtggagagcccctcgacgcgtgctacctaaaagctctcgagggattcgttatggtgttaactgccgagggcgacatggcctatttaagcgagaacgttagtaagcatttaggcctctcacaattagagctgattggccatagtattttcgatttcattcatccctgtgaccaagaggaattgcaggatgcactgaccccacagcagacactgtcacgccggaaggtggaggccccaactgaaagatgtttcagcttgcgcatgaagtcaaccctcacctcaaggggaagaaccctgaacctgaaagccgctacgtggaaggtgttgaactgtagcggccatatgagggcgtataaaccaccggcccaaacaagcccagcaggctctcccgatagtgagccacccctgcagtgtcttgtgctgatttgtgaagccatcccgcaccctggctcgctcgagcctccactaggaaggggcgcctttctgagccgccactcactcgatatgaaattcacatactgcgatgacaggatcgcagaagtggcagggtacagccctgatgacctcatcgggtgtagcgcctacgaatatattcatgctctcgacagcgacgccgtctccaagtctatccatactctgctttccaagggccaggccgtgacagggcagtacaggtttctagctcgctcagggggctacctgtggacccagactcaggctacggtggtctccggcggccggggaccccaaagtgaatcaattgtatgcgtgcacttcttgatctcccaagttgaggaaaccggcgtggtgctatcactggaacagactgagcagcacagcaggagacctatccagaggggcgccccatcccaaaaggatacccccaacccgggagattcactcgatacccccggtcctcgcatcctggcgttccttcacccaccatccctgagcgaagcagctctggctgcagatccccggaggttttgttcacccgatctgcggcgccttttgggtccaatattagatggtgcatccgtggccgctacaccttcgaccccattggccacgaggcaccctcagagccctttgagtgcagatttgccggacgagttgccagtcggaaccgagaatgtccacaggctgtttacctctggaaaagacacggaagctgttgagaccgatctcgatatagcgcaggatgccgatgcacttgatctggagatgttagcaccctacatctctatggacgacgattttcaattaaatgcaagcgagcagctgcctagagcttaccatcgaccgctgggggccgtacccagacccagagcgaggtccttccatggacttagcccccccgccctcgagccctctcttctcccccgttggggatcagatccacggctgtcatgctccagcccctcccgcggtgacccctcagctagctcacctatggccggggcgcggaaaagaaccctcgcacagagctctgaagatgaggatgaaggagtggagctcctgggtgttcgcccacccaagcgtagtccatcaccagagcatgagaatttccttctgtttcctctgagtctcagctttcttctgactggggggcccgctccaggttctctccaggacccatctactccacttttgaaccttaacgaaccactcgggctgggaccgagccttctgtccccatatagcgacgaggacactacccagccggggggtccgttccagcctcgagcgggttccgcacaggccgactag

SEQ ID NO: 191180 - DNA, 1842 bp, synthetic construct
  misc_feature 1..1842: note = Description of Artificial Sequence: Synthetic coding sequence
  source 1..1842: mol_type = other DNA
atgcggctgaccatcagctacctgcggatgcaccggctgtgcgccgcaggcgagtggaaccaggttggagcaggaggcgaacctcttgacgcgtgctacctgaaagcattggaggggttcgtgatggttcttactgcagagggggacatggcgtacctttcagaaaacgtctctaagcacttaggccttagccaactggaactcattggccacagcattttcgactttatacacccttgcgatcaggaagaattgcaggacgccctcacaccacagcaaaccttgtccaggcgaaaagtggaggctcccaccgaaaggtgttttagcctgcgcatgaagtctaccctcacgtcccgggggaggactctgaatttgaaggctgcaacatggaaggttctaaattgttcaggccacatgagggcttacaagccgcccgctcaaacctccccagccggcagccccgacagcgagccccccctgcagtgtttagtgcttatttgcgaggccattcctcacccggggtctttagagcccccactgggccgaggagcatttctttctcgtcactccctcgacatgaaatttacatactgtgacgatcggatcgccgaggtggccggttactctccagatgatctaatcggctgctccgcttatgaatatattcatgcactcgacagtgatgcagtatctaagagcatccataccctcctttccaaggggcaggcagtcacgggacagtaccggttcctagctagatcgggtgggtacctgtggactcagacacaagcgaccgttgtgtctggcggcagagggcctcagtccgagtccatagtgtgcgtgcacttcctcatttcccaggtagaagagacaggagttgttctgtccctggagcaaactgaacagcattccaggaggccaatccagagaggagctccttctcaaaaggacacgcccaacccaggtgattcgctggacacccctggcccacgcattctggcatttctccacccgcccagcttaagtgaagccgccctcgcggccgatccacgaaggttttgtagccctgatttgcgcagattactgggccccatactggatggcgcctctgttgccgcaacaccatcaacgcctctggccacaaggcacccccagagtccgcttagcgccgacctgcccgatgagcttcctgttggaaccgagaatgtgcataggctttttacttccggaaaagacaccgaggcagtggaaacggatctagacatagcccaagacgccgacgccctggatttagaaatgctagcgccctacatttccatggacgacgattttcagctcaacgcatccgagcagttgccacgagcgtaccacagacccctgggtgcagtcccacggcctagagcccgctcatttcacggactgagcccaccagccctcgagccaagtctgctccccaggtgggggtccgaccccagactctcatgcagctcaccttcacggggtgatccgtccgcctcttcacccatggctggcgcccggaagagaactctggctcaaagcagcgaagatgaggacgagggagtggaactgctaggtgtccgtccaccaaaacgatcacctagccccgaacacgagaatttccttctgtttcccctctctctctcatttctgttgaccggtggccctgcacctgggagcctgcaggacccatctactcccctgctcaatctgaacgaaccactcggtctagggccttcccttctcagtccttattcagatgaggacacgacacagcccggtggtccttttcaacctagagcggggtccgcacaggcagactag

SEQ ID NO: 191181 - DNA, 2010 bp, synthetic construct
  misc_feature 1..2010: note = Description of Artificial Sequence: Synthetic coding sequence
  source 1..2010: mol_type = other DNA
atggccctgggcctgcagcgggcccggagcaccaccgagctgcggaaggaaaagagtagagatgccgcacggtcacgcaggagccaagaaactgaggtcttgtatcaactggctcataccttaccattcgcgaggggggtttccgcccatttggacaaggcctcaataatgcggttaactatcagttatcttcggatgcaccggttgtgcgccgccggagagtggaatcaggtcggtgcaggcggagagcccctggatgcttgctacttaaaagcacttgaagggtttgtgatggtgctcaccgcagagggtgacatggcttatctctctgaaaatgtgtcaaagcatttgggcctcagccagctagagttgatcggacattcgatctttgattttattcatccgtgtgatcaggaagagcttcaggacgccctgactccacaacagacactgagcaggcgcaaggttgaagctcccactgagagatgtttcagcttgcggatgaagtccacattgacaagtcggggacgcacccttaacttgaaagccgccacttggaaagtcctgaattgctccggccacatgcgagcctacaagccccccgcacagacctcacctgcaggctcccctgattccgagccacccctgcagtgtctggtgctgatatgcgaggccattccgcatccgggatcccttgagccaccgctggggaggggtgctttcctctcccggcactctctggacatgaagtttacttactgtgacgacagaatcgcagaagtcgcgggttatagcccagatgacctgattggatgctccgcgtatgagtatatacatgctctagattctgacgccgtgtccaagagcattcacacacttctgtctaaaggccaggccgttactggccagtatcgatttctggcgcgcagtggcggatatctctggacacagacacaagctactgtggtgtcggggggccgcggtccacagagcgaatcaattgtgtgcgttcatttcctgataagccaagtggaagagaccggggtcgtcctaagcctcgagcagacagaacagcattcccgacggcctattcagcgcggcgcgccctcacagaaggatacccctaatcccggagactcactggataccccagggcctagaatcctggccttcttgcaccctcctagcctgtccgaggcagctctcgcagctgatcctcgtcgcttctgctcacctgatttgagacgactgctaggccctatcttggacggggcaagtgtggccgccacccctagcacccctctggccacccggcacccgcagtccccactaagtgcagatctgccggatgaacttcctgttgggacggagaacgttcaccgcttgttcacctccggcaaagacacagaagctgtagaaacagacctcgatattgcccaagatgccgacgctttagacttggagatgctggctccatatatctccatggacgatgacttccagttgaatgcctctgaacaactgcctcgcgcataccatcgacccttgggtgccgtgccccgaccccgagcccgatcctttcacgggctgagcccccctgctctcgagccttccctactcccccggtggggctccgatccccggcttagctgctcaagcccaagtcggggtgatcctagtgcttcctcaccaatggccggcgccaggaagcgtacgttggcccagtcaagcgaagacgaggatgagggcgtcgagctgttgggggtacggccaccaaaaagaagccctagtcctgagcatgaaaacttcctccttttccccctgagtttgagctttctgttaacagggggtcccgctcctggctccctgcaggacccaagcacccctcttctcaatctgaatgagccactggggctgggaccatcgctgttgagcccgtactcagacgaggacactactcagcccggtgggccgtttcaacctcgagctggctccgctcaggctgactag

SEQ ID NO: 191182 - DNA, 1092 bp, synthetic construct
  misc_feature 1..1092: note = Description of Artificial Sequence: Synthetic coding sequence
  source 1..1092: mol_type = other DNA
atggccctgggcctgcagcgggcccggagcaccaccgagctgcggaaagagaaatctagagatgccgctagatccagacgcagtcaggagacggaggtgctgtatcagctcgcccacacactcccatttgcccgcggggtctccgcccatttggacaaagcctcgataatgcgactgaccatttcatatctccgcatgcaccggctgtgcgctgccggggagtggaaccaggtgggagctgggggagaacccttagacgcatgttacctcaaggccctagagggctttgtcatggtgttaacggctgaaggagatatggcctacctgtcagaaaatgtaagcaagcatctgggactgtcccagctcgagctcatcggacatagtatctttgacttcatccatccatgtgatcaggaagagcttcaggatgctctcactcctcagcaaacgctgtcacgcagaaaggtggaggctcctacggagagatgtttttccttaaggatgaaatcaacactaacgtcccggggccggaccctgaacctcaaggccgccacctggaaagtgcttaattgtagtggacacatgcgcgcatataagccaccagctcagacttcccctgctggaagtcccgactccgagccacccttgcaatgcctggtgctcatctgcgaggcaattccgcaccctggtagcctggagcccccacttggtcgcggagcctttctctctcgacattcactggacatgaaatttacatactgtgacgaccgtatcgctgaggtcgcaggctatagtcctgacgatcttattgggtgttccgcctatgagtatatccatgccctggactcggatgcagtgagcaaaagcatacacacctgtatgtatcccatctcccccggcgctaagccagctgcaacatggccccccgcggatactcgtactccacaactgcccatcccgcaggatgcactacctccccacctgaacacatcttccctgctgcccaaaccccaggggactgtctcttttttggcgccctcttacccagtccctcgatacttcagcccccaccttccgccttggtggccgtag

SEQ ID NO: 191183 - DNA, 1839 bp, synthetic construct
  misc_feature 1..1839: note = Description of Artificial Sequence: Synthetic coding sequence
  source 1..1839: mol_type = other DNA
atgctgcccatgcccagcggccggccccggagctgcgcccggaagtctccagggatgaggccagcagccggagcggcgcgtcggcctaggtgttgcacaagctggctcaccagatgtccctcaccagccgccagcgcccctacatggacccgtcctctgtcttgtgctagcccatccgccacctgcgcttgtactgcaagcgcgccacaactggaactcattggacacagcatctttgattttattcatccttgtgaccaggaggagctacaggacgctcttacaccccagcaaacattgagccgcaggaaagtggaggcaccaacagagagatgctttagcctgcgcatgaagtccactttgactagccgcggtcgtaccctaaacctgaaagcagcaacctggaaggtgctgaattgtagcggtcacatgcgagcttacaagcctcccgcccagacaagtcctgctggcagccccgactctgaaccccccctgcagtgcctggtgctgatctgtgaggcaataccccacccgggttcgctcgagccacctctgggcagaggcgccttcctgagccggcacagcctcgacatgaagtttacctactgcgacgacaggatcgccgaagtggcagggtactcccctgatgatctgattggatgctcagcctatgagtacattcatgcgttagatagcgatgcggtgagcaagagtatccacactttgctctctaagggacaggccgttacagggcagtaccggttcctggcaaggagcggtgggtacctgtggacacagacccaagcgacagtggtgagtgggggcaggggcccacaaagcgaatcaatcgtctgcgtgcacttccttataagccaggtggaagaaactggagtggtcctgagcctcgaacagaccgaacaacactctcggcgccccattcaacggggggcaccctcacaaaaggatacccctaatccaggcgattctctcgacacacctgggccgcgcatcctagcatttctgcatcctcccagcctatccgaggcggctctggccgccgaccccaggagattctgctcaccggacctgcgccggctgctgggcccgatcctggacggcgcgagcgtggccgccacaccatctacacctctggctacccgccatccacaaagtcccctgtctgccgatctgcctgatgagcttcctgtcgggaccgaaaacgttcacagactcttcacttcagggaaagacacagaggcggtcgagaccgacctcgatattgcccaggatgctgacgcactcgacctggagatgttggctccctacatctcaatggacgacgactttcagttaaatgcatctgaacagctaccgcgagcctatcaccgtcccctcggcgcggtgcctagacctcgggccagatcctttcatggcttgtcccctccggccctggaaccctcgctgttacctcggtgggggagcgatcctcgcttgtcatgctcttctcccagcagaggagatcccagcgcttcctccccaatggcaggcgcccgtaaaagaactctcgctcaatcatcagaagacgaagacgagggggtggagttactgggagtgcggcctccgaagcggtcaccttcccccgaacatgaaaatttccttctctttccgctgtccttgtcattcctgctcaccgggggaccggctccaggttccctccaagacccaagcacgcccttactgaacctgaatgaacccttaggttttcactttgtgactcaatcgggcgtgcagtggcacaaacatagttctcctcagcccaggccaccaggtctcaagtag

SEQ ID NO: 191184 - DNA, 600 bp, synthetic construct
  misc_feature 1..600: note = Description of Artificial Sequence: Synthetic coding sequence
  source 1..600: mol_type = other DNA
atgcggcccgccgccggcgccgcccggcggccccggtgctgcaccagctggcttacccggtgtccttcccctgccgcttccgcacccacgtggacacggcccctgagttgtgcaagtccttctgcaacgtgcgcctgtactgcctcagcaccacagctggaactcattggacattcaatttttgattttatccacccatgcgaccaagaggagctgcaggatgccttgacgccacaacagactctgagtcgaaggaaggtggaggccccaaccgaaaggtgttttagcctccggatgaagtccaccttaaccagtcgcggcaggaccctaaatttgaaagctgctacgtggaaggtcctgaactgttccggtcatatgagggcctacaaaccccctgcacagacctctccagcaggctctcccgattctgaacctcccctgcagtgcctagtgctgatctgcgaagccattccccacccgggcagccttgagcctcctttgggccggggtgcctttctcagtcgccattctctggatatgaagtttacttactgcgacgatcgtatcgctgaggtggctggctacagtccaatgacctag

SEQ ID NO: 191185 - DNA, 714 bp, synthetic construct
  misc_feature 1..714: note = Description of Artificial Sequence: Synthetic coding sequence
  source 1..714: mol_type = other DNA
atgcggcccgccgccggcgccgcccggcggccccggtgctgcacctcatggctgacccgctgcccatcccctgccgccagcgcaccgacctggacacgccctctttcttgcgcctctccttctgcaacttgtgcctgtaccgcctcagctccgcaagaggagctgcaagatgccctgactccacaacaaacgctaagccggaggaaggtggaggctccaacagagcgctgtttcagcctccggatgaagtcgacattgacgagccgcggtcgcactctgaacctaaaggctgcaacctggaaggtgctcaactgctctgggcacatgcgggcatataagcccccggcccagacatcccctgcggggagccctgactccgaacccccactgcaatgcttagtgctcatctgtgaagctatacctcatccagggtctcttgaaaggttcgtgcctgtctcatccgctgcaacgagcctgtgtttgccctctctgagcccttccaaagtggccggatattcccctgacgatctcataggttgcagtgcctacgagtatatccatgccctggattccgacgccccccaggacgctctgccaccgcaccttaacacatctagtctcctgcctaagccacaaggtacggtctcctttttagccccctcatatccagtcccccgatatttttcaccgcatctgccaccctggtggccctag

SEQ ID NO: 191186 - DNA, 1092 bp, synthetic construct
  misc_feature 1..1092: note = Description of Artificial Sequence: Synthetic coding sequence
  source 1..1092: mol_type = other DNA
atggccctgggcctgcagcgggcccggagcaccaccgagctgcggaaagaaaagagccgggacgccgcaagatcccgacgatcacaggagacagaggtgctatatcaattggcccatactctacctttcgcccgaggagtgagtgcacatcttgataaggccagtataatgcgcctcacaatcagctatctgagaatgcatagactatgcgccgccggggaatggaaccaggtgggggcaggcggcgagccattagacgcctgctacctaaaagctcttgaaggattcgttatggttctgacagctgaaggcgacatggcatatctgtccgagaatgttagcaagcatctcgggctgtcacaactagagttaattggccactctatttttgattttatccatccgtgcgatcaggaggaactacaggacgcgctgacgccccaacagaccttaagccggaggaaggtggaagctccgacagagagatgcttctctctgaggatgaaatctacgctgactagtcgggggaggaccctgaatctgaaggccgccacttggaaggttctgaattgtagcggccatatgcgggcatataagcctcctgcccagacgagtcctgccggcagtcccgatagtgagcccccgttgcagtgtttagtgcttatttgtgaagcgatcccccaccccggttctctggaaccaccattggggagaggggcattcctcagtaggcattcattagacatgaaattcacttactgtgacgataggattgctgaagtagcggggtacagtcctgacgacctcatcggttgttcagcctacgagtatatccacgcactggactcagatgccgtctccaaatctatccacacctgcatgtatcccatcagcccaggcgccaaaccagccgccacgtggccacccgcagatactcgtacccctcagttacccatcccacaagacgcgctgccaccacatcttaatacctcctccttgctgcccaagccgcagggtaccgtgtctttcttggcgccctcttatccagtacctcgttatttctccccacatctgcccccctggtggccatag

SEQ ID NO: 191187 - DNA, 2976 bp, synthetic construct
  misc_feature 1..2976: note = Description of Artificial Sequence: Synthetic coding sequence
  source 1..2976: mol_type = other DNA
atggccgacaaggtgcggcggcagcggccccggcggcgggtgtgctgggcgttggtcgccgtgttacttgcggacctgctggcccttagcgacacactggctgtcatgtcagtggacctgggttccgaaagtatgaaggtcgcgattgtactcaataaggaatcgagacggaaaacacccgtcattgtgactctgaaggaaaatgagaggttctttggagactctgccgcctccatggccatcaagaaccccaaagcaactctgcggtatttccagcacttattaggaaagcaagcggataacccccatgttgcgctttatcaggcacggtttcctgagcacgagcttactttcgacccccagagacagactgttcacttccagatctctagccagctccaattcagtccggaagaagtgctcgggatggtgttgaattattcgcggagtttggctgaggattttgccgagcagcctattaaagacgccgtcatcacggttccagtgttttttaatcaggctgagaggcgtgccgtgctccaggccgcaagaatggccgggctgaaggtgctgcagcttataaacgacaatactgccaccgcattatcgtatggcgtctttagacggaaggatattaataccactgctcagaacattatgttctacgacatgggctctggaagcactgtctgcactatcgtaacctaccagatggtgaaaaccaaagaagcaggaatgcagccccagctccagattcgcggcgttggtttcgatcgtactctgggggggctcgaaatggaactgagactaagagagagactggctggcctgttcaatgagcagcggaaaggtcagcgcgccaaagatgtaagagagaatccccgggcaatggccaaactgctgcgagaggctaatagactgaaaaccgtactgtccgccaatgctgatcatatggcccaaattgagggtcttatggacgatgtcgatttcaaggccaaagtcaccagagtcgaatttgaagagctctgcgccgacctgttcgaaagagtgcccgggcccgtacagcaagctcttcagagcgccgaaatgtccctggatgaaatcgaacaggtgatactggtgggaggagcgacacgggtaccccgagtccaggaggtgctgcttaaggccgtgggcaaggaagagctcggtaagaatatcaacgccgacgaggcagctgctatgggagcagtttaccaggcggccgccctctcgaaagcctttaaagttaagcccttcgttgtacgggacgccgtggtgtatcccattttagtggaattcactcgcgaagtagaggaggaaccaggaattcactctcttaaacacaataaaagggttctctttagccgcatgggaccatacccacagcggaaggtcattacttttaataggtattctcacgacttcaattttcacattaactatggggatctgggcttcctgggcccggaagatttgcgagtattcggatcacagaatctgacaacagttaagctgaagggtgtgggtgactctttcaagaagtatcctgattacgagtctaaaggaattaaggcacattttaatctggacgagtcgggagttctgtccctggacagggttgagagcgtatttgaaacactcgtcgaggattctgctgaggaagaatccacactaaccaagctgggcaatacaatatccagcttgttcggcggagggactacccccgacgccaaagagaacggcaccgatacagtgcaagaagaggaagagtctccggccgagggcagcaaggatgagcctggggaacaggtggagctcaaggaggaggccgaggctcctgtcgaagatgggtctcagccccccccgcctgaaccaaaaggagatgccacacctgagggagaaaaggcgacagaaaaggagaacggagacaaaagcgaagcgcagaagccaagcgagaaggctgaggctgggcctgaaggtgttgctccagcgcccgagggggaaaaaaaacagaagccagcacggaagagaaggatggtcgaggagattggagtggaactggtggttttagaccttcccgatctgcctgaagacaaactagcccagagtgtacagaaactacaagatttgacactccgcgacctagagaaacaggaacgggaaaaagccgcaaattccctggaagcgtttattttcgaaacacaagacaagctgtaccagcctgagtaccaagaggttagcaccgaagaacagcgtgaggaaatttccggcaaactttccgcagcgtcaacttggctcgaggatgagggagtgggtgcaaccactgtgatgctaaaggagaaactggctgagttacgcaaactctgccaggggctgttcttcagagtagaggagaggaagaagtggcctgagcggttaagcgccttggacaaccttctgaatcactctagtatgtttctgaagggggcgagactaattccagagatggaccagattttcaccgaagtggagatgacaaccctggagaaggtcattaacgagacttgggcttggaagaacgctacactcgccgagcaggctaaattaccagcaacagaaaagcctgtcttgcttagcaaagacatagaggccaagatgatggccctagatcgagaggtgcagtatttgttgaacaaggctaaatttacaaaacctagaccacgccccaaagacaagaatggaacacgagctgaaccacctttaaatgcatcagcaagtgaccaaggcgaaaaggtgatccctccagcaggtcagactgaggacgctgagcccataagcgagccagaaaaagtggagaccgctggctctgaacctggagatacagagcccctggaattggggggccccggggcagaacccgaacaaaaggagcagtcaacgggccaaaagcgacctctcaaaaacgacgaactgtag

SEQ ID NO: 191188 - DNA, 3000 bp, synthetic construct
  misc_feature 1..3000: note = Description of Artificial Sequence: Synthetic coding sequence
  source 1..3000: mol_type = other DNA
atggccgacaaggtgcggcggcagcggccccggcggcgggtgtgctgggctcttgttgcagtcctgctggcggatctgctggcactttccgatacactggccgtgatgagcgtggacctgggttctgagtcgatgaaagtagctatcgttaagccaggcgtgcccatggagatagttctgaataaagaatctcgcaggaagacgccagtaatcgttactcttaaggagaacgaacggttcttcggggactctgctgcgtcaatggcaattaaaaatccaaaggcaaccctgcgctacttccagcacctgctgggcaagcaggccgacaacccgcatgtggccctataccaagccagattccctgagcacgaactcacttttgatcctcaacgtcagactgtccatttccagatctcctcgcagttgcagttctcacccgaggaggtgcttgggatggtgctcaactactctcgctccctggcagaggactttgccgaacagcccattaaggatgcagtgattacggtgcccgtctttttcaatcaggcagagcgccgagccgtgctgcaggctgctcggatggcaggacttaaagtccttcagctgatcaacgataatactgcgaccgctttgagttacggcgtgttccgacgaaaagacatcaacactacagcccaaaatattatgttctacgatatgggaagtgggtctacagtgtgcacaatcgttacataccagatggtaaagaccaaggaggctggtatgcagccgcagctccagatcaggggagtcggctttgatagaacactgggaggtctggagatggagctgcggttgagagaaagactcgccggcctcttcaacgagcagcgcaaagggcagcgcgctaaagacgtgcgagaaaatcctcgggctatggccaagctcctgagggaggccaataggctgaagactgtactgtcagctaatgctgatcatatggcgcagatcgaagggctcatggatgacgtcgatttcaaggccaaggttactcgcgtggaattcgaggaactgtgcgcagatctgtttgagagggttccgggccccgtccagcaggctttgcaatccgcggaaatgtcccttgatgagattgagcaggttatcctagtgggaggcgccacaagggttcctcgggttcaggaagtcttgttaaaagcagtgggtaaagaagagttgggtaaaaatattaatgctgatgaggctgctgcgatgggggccgtgtatcaggccgccgcactctcaaaagccttcaaagtgaaaccttttgtggtgagagacgccgtggtgtatcctatcctggtggagtttactcgcgaagtggaggaggagcccggaatacacagcctcaaacacaacaagagagtactcttcagtcgcatgggcccttaccctcaacgcaaggttatcaccttcaatcgctacagccacgactttaatttccacattaattatggggacctcggtttcctggggccagaggatttacgcgtttttgggagtcaaaacctaaccaccgtaaaacttaaaggcgtcggggactcatttaagaagtatcccgattacgaatccaaggggatcaaagcccattttaacctggacgagtccggcgtcctcagcttggacagggtggagtccgtgtttgagacactggtggaagatagtgctgaggaggagtcaaccctgacaaagctgggcaatactatctctagcttatttggaggaggaaccacacccgacgccaaggagaacggtacagacaccgtgcaggaagaagaggagagcccagcagaaggttcgaaagacgagcctggtgagcaggtggagctcaaagaagaggcagaagctcccgtagaggatggttcgcaaccacccccgccagagcccaagggggacgccacccctgagggcgaaaaagccactgaaaaggaaaacggcgataagtctgaggcccagaagcccagcgaaaaagccgaagcaggaccggagggagtggctcctgccccggaaggcgagaaaaagcagaagcccgcgaggaaaaggagaatggtggaggaaatcggcgtcgagttagtggtactggaccttcctgacttacctgaagataagcttgcacaaagtgtgcagaaattgcaggatctgaccctaagagatttagaaaaacaggagcgggaaaaggcggccaactctctcgaggcgttcatatttgagacacaggataagctgtatcagcccgaataccaggaggtttcgactgaggagcagcgggaggaaatctccggtaaactgtctgctgccagtacatggctcgaggacgaaggggttggagccacaaccgtgatgctaaaggaaaaactggccgagcttcggaaactttgccaaggccttttcttccgcgtggaagagaggaagaaatggcctgaaaggttatctgcgctggataatcttttgaatcattcgtctatgttccttaaaggcgcccgactgatccccgagatggaccagatctttacagaagtcgagatgacaacactcgagaaggtgattaatgagacctgggcctggaagaatgcaacgctcgcggagcaggccaaactgcccgcaaccgagaagcccgtgctgctcagtaaagacatcgaagcaaagatgatggccttggacagggaagttcagtacctccttaacaaggccaaattcaccaagcctcgccccagacctaaggataagaatgggacgcgcgctgagcctcctctgaacgcctctgcttccgaccagggtgagaaagtgattcccccagccggacaaaccgaagatgctgagcctattagtgagcccgaaaaggtggagaccggtagcgagcccggtgataccgagccactcgaacttggaggaccaggcgcagagcctgaacagaaagaacagtccacgggtcaaaagcgccctcttaagaatgacgaactgtag

SEQ ID NO: 191189 - DNA, 2547 bp, synthetic construct
  misc_feature 1..2547: note = Description of Artificial Sequence: Synthetic coding sequence
  source 1..2547: mol_type = other DNA
atggtgctgaactacagccggagcctggccgaggacttcgccgagcagccaataaaagacgcagtcataaccgttcccgtattcttcaaccaggccgaaaggcgcgccgttttacaagcagccaggatggcgggacttaaggtgctgcagctgataaacgataacactgcaacagccttatcatatggagtattcagacggaaagatatcaatactactgcccagaacatcatgttctacgatatgggtagtgggtctaccgtgtgtacaatcgtgacttaccagatggtgaaaaccaaggaggccgggatgcaacctcaattgcagattaggggcgtcggatttgataggaccctgggtggcctggagatggaacttagacttcgcgaacgccttgcaggcctgtttaacgagcagcggaagggccagcgcgcaaaagacgtcagggaaaaccctagggctatggcaaaactgctgcgggaagctaatcgcctcaaaacggtcctaagcgcaaacgcagaccatatggctcagatcgagggtctgatggatgatgtggattttaaagccaaagttactagggtggagttcgaggaattatgtgcagacctgttcgagcgggttccagggcctgtccagcaggcactccagtctgcggagatgtctctggatgaaatcgaacaggttatcctagtggggggagccactcgcgtcccacgcgtgcaggaagtcctgctgaaggctgtaggaaaagaggagctgggtaaaaacatcaacgctgacgaggccgcagcgatgggagcagtgtaccaggccgcggccctgtccaaagcgttcaaggtcaagccattcgtggttagagacgcggtggtgtatccaatcctggtggagtttacccgagaagtcgaagaagagcctggaatccactctctcaagcacaataagcgcgtgctgttcagcagaatggggccctacccacagcggaaggtaatcactttcaacaggtacagtcatgattttaacttccatatcaattacggcgacctgggatttctgggtccagaggacctacgagtctttgggtcacagaacctcactactgtgaagctaaagggggttggcgactcattcaagaagtacccagattacgagagcaaaggcattaaagctcacttcaacctggacgaatccggcgtgctttcactagaccgggtcgagtcagtttttgaaaccctcgtggaagactccgccgaggaggagtctacactgacgaaactgggaaacacgatctcatccctttttggtggcggcacaacgccggatgccaaagagaatggcacagacacggtacaagaggaagaggagtcgcccgctgagggatcaaaagacgagccaggagagcaggtcgagctcaaagaagaggctgaagccccagtggaagacgggagccagcctccaccccccgaacccaagggagacgccactccagagggagagaaagccacggagaaagagaacggggacaagtctgaggcgcagaagccgtccgaaaaggccgaagctggaccagaaggggtggcaccagctcccgagggggagaagaagcagaagcccgccagaaaaaggagaatggtggaagagattggcgtagagcttgtagttctggacctcccagaccttcccgaggacaaactcgcacagtcggtgcagaaactgcaggacttgacactccgcgatctggaaaagcaagaacgggaaaaggccgccaatagcttagaagcttttatcttcgaaacacaggacaagctttatcagccagaatatcaggaagtatcaacggaggaacagagggaggagatttccgggaaattgtccgcagcttccacttggcttgaggacgagggagtgggcgctacaacagtgatgctgaaggaaaagctcgcagagctccgcaagctgtgccagggcttattttttcgcgtcgaggaaagaaagaaatggcccgaaagacttagcgctctggataacttactgaaccatagctccatgttcttgaagggcgccagactcatccccgagatggaccagatcttcacagaagtagaaatgacgactctggaaaaggtgattaatgagacatgggcatggaagaacgctaccctggctgaacaagcaaagctccctgcaacagagaaacctgtgctcctgtccaaagatattgaagctaagatgatggcactggacagagaggtgcagtatctcctgaataaggcaaagttcactaagccaagacctaggccaaaagataagaacgggacaagggccgagccacctcttaatgcctctgccagtgaccaaggggaaaaggtgatcccacctgcgggacagactgaggatgccgaacctatctctgagccagagaaggtcgaaaccggatctgagcccggcgataccgagcctctcgagttaggaggcccaggagcggaacctgaacaaaaggaacagtccacaggccaaaaacgccccctgaaaaacgatgagttgtag

SEQ ID NO: 191190 - DNA, 2040 bp, synthetic construct
  misc_feature 1..2040: note = Description of Artificial Sequence: Synthetic coding sequence
  source 1..2040: mol_type = other DNA
atggccgacaaggtgcggcggcagcggccccggcggcgggtgtgctgggccctggtggccgtgttactggcagaccttcttgctctatccgacacccttgccgtaatgtctgtggatttgggttctgagtctatgaaggtggccattgttaagcctggtgtgcccatggagatcgtgcttaacaaggaaagccggaggaagacaccggtgatcgtgaccctcaaggagaatgagcggttcttcggggacagcgccgcctcaatggctattaagaaccccaaggccactctgcggtacttccagcacctgcttggcaagcaggctgataatcctcatgtcgctctttaccaagctcgcttcccagagcacgaactcacttttgacccccagcggcagactgtgcactttcagatcagctctcagcttcagtttagcccggaggaggtcctgggcatggtgcttaactactcgcgaagcctggcagaagactttgctgagcagccaatcaaggacgctgtgatcaccgtccccgttttttttaaccaggctgaacgccgtgccgtacttcaagcagccaggatggccggtctcaaggttttgcagttgataaacgataacactgctaccgccctgtcatatggcgtctttagaagaaaggacattaataccacagcccaaaatattatgttttatgacatgggttctggttctaccgtctgcaccattgttacatatcagatggtgaagacaaaggaagccggcatgcagcctcagcttcaaatccggggcgtgggtttcgatagaacgctcgggggactggagatggagctgaggctaagggagcggcttgccggcttgtttaacgagcagagaaaagggcaaagggctaaagatgtgagggaaaacccccgggcgatggccaagctactgagggaggctaaccggttgaagactgtgttgagcgccaatgcggaccatatggcacaaattgagggcctgatggatgacgtcgattttaaagctaaagtgactagagtggaatttgaggagctgtgcgccgacctgtttgaacgtgtacccggacctgtgcaacaggccctgcagagcgccgagatgagcctcgatgagattgagcaggtcattcttgtcggcggagccaccagggttcccagggtgcaagaggtgctcttaaaagcagtcggaaaagaagagctggggaagaacataaatgcggacgaggcagccgctatgggggctgtgtaccaggctgccgccttatctaaggcattcaaggtcaagcccttcgtcgtgcgggacgctgtagtctatcccatcttggtagagttcacaagggaagttgaggaggagcccgggatccattctcttaaacacaacaagagagtgttgtttagtagaatggggccctacccacaacgaaaagtcattaccttcaacagatattctcacgacttcaatttccacataaactacggagatttaggattcctcggacccgaggacctaagagtattcggaagccagaatctcaccacagtcaagctcaaaggcgtaggcgactcatttaagaagtaccccgattacgagagcaaggggatcaaggcccactttaatctggacgaatcaggggtcctcagcctcgatcgagtcgaatcagtcttcgaaaccttagtagaggattccgccgaggaagaatccaccctgaccaagttaggtaacacgattagttcgctgtttggtgggggtacaactcccgatgctaaggagaatggaacggacactgtgcaggaggaagaggagagcccagctgagggcagcaaagatgagcccggtgagcaggtggaacttaaggaggaggcggaggctccagtcgaggatggctcgcagccaccgccgcctgaaccaaaaggcgacgctacgcctgaaggagagaaagccaccgagaaggaaaatggtgataagagtgaggctcagaagcccacgtccgtgtgccgggcttcagtgacacgcttcgggttctag

SEQ ID NO: 191191 - DNA, 444 bp, synthetic construct
  misc_feature 1..444: note = Description of Artificial Sequence: Synthetic coding sequence
  source 1..444: mol_type = other DNA
atggccgacaaggtgcggcggcagcggccccggcggcgggtgtgctgggcactggtggcagtcctgctggcagacctgttggccttatcagataccctcgccgtgatgagtgtggacctcggcagcgagtccatgaaagtagcgattgtcaagcctggtgtcccaatggagattgtcctcaataaagagtctaggcggaaaacacccgttatagtgacactgaaggagaacgaacggttctttggtgacagcgccgccagtatggccatcaagaaccccaaggcgacccttcgatactttcagcacctgctaggcaaacaggcggacaaccctcacgtagctctctaccaagcccgcttccccgagcatgaattaactttcgatcctcagagacagactgtgcattttcagattagtagccagctccagtttagtcccctttag

SEQ ID NO: 191192 - DNA, 1680 bp, synthetic construct
  misc_feature 1..1680: note = Description of Artificial Sequence: Synthetic coding sequence
  source 1..1680: mol_type = other DNA
atggccatcaagaaccccaaggccaccctgcggtacttccagcaccttttaggcaaacaggcagacaacccccacgtggcgttgtaccaggcaaggttcccagaacatgagctgacattcgatccacaacggcagaccgtgcatttccagatcagctcacaactgcagttctcccccgaggaagtgttggggatggttctgaactactccagatcactggccgaggactttgcagagcagccaatcaaagatgcagtgataaccgtcccagtttttttcaatcaggcggagcgtcgcgcggtgctacaagcagcgcgaatggctggcctgaaagttctacagttgattaatgataataccgctactgccttatcttatggtgttttcagacggaaggacatcaataccaccgctcagaacatcatgttctacgatatgggctcaggctccaccgtgtgcacaatcgtaacatatcagatggttaagaccaaagaagccgggatgcagccccaattgcaaatccggggagtcggcttcgatcggactctgggtgggctagagatggagctgcgactgcgggaacgacttgccggcctctttaatgagcagcgaaaaggccagcgggccaaagacgtcagagaaaaccctcgggcgatggctaagctgcttcgggaggcgaatcgactgaagaccgtgttatccgccaacgcagatcatatggcacaaatcgagggactcatggacgacgtggattttaaggcgaaggtgacaagagtggaatttgaagaactctgcgctgacctcttcgagagggttcctgggccagtgcaacaagcattgcaatcagcggagatgtcactggatgagattgagcaggttattctcgtcggaggggctacaagagtgccccgcgtacaggaggtgctcctcaaagcagtggggaaggaggagttgggcaagaatatcaacgcagatgaggcagctgccatgggggcggtttaccaggcagctgctctttcgaaagcgttcaaggttaagcctttcgtggtaagagacgcggtcgtgtatcctatactggtcgagttcacccgtgaggtcgaggaggagccaggaatccactctctgaagcataataagcgcgtgttgttctctcgaatgggcccatatccacagaggaaagttattacattcaacagatacagtcacgactttaactttcacatcaattacggtgacctgggcttcctggggcctgaggaccttcgcgtctttggatcccagaatctaacgactgtgaagttaaaaggggtcggcgactcgtttaaaaagtaccctgactacgaatcaaagggtatcaaagcacacttcaatctggacgagagcggggtgctgtccctggatcgtgtcgagagcgtcttcgagacgctagtcgaggattccgcagaggaagaatccactttgacgaaattaggaaacactatttctagtctattcggcgggggcacaacacctgatgccaaagaaaatggtaccgacaccgttcaaatgctgttcttgtgtcctgctagactccctcagagcaaacaggctatagacaggttccatactgcagtcacttgtatggagccaccatggggacgaaggtgtcgtgcccgcccagcctggaggctatgctcatag

SEQ ID NO: 191193 - DNA, 2943 bp, synthetic construct
  misc_feature 1..2943: note = Description of Artificial Sequence: Synthetic coding sequence
  source 1..2943: mol_type = other DNA
atgtggcagagccggggccccatgctgttccacctgggcctgtgcgttggggctgccggcatgattcgggagtggtttgtgccaatcagacgcgaaaaaggatctcgcttgatttgcccaggaggcactatggccgacaaggtgcggcgccaaagaccacgacgaagagtttgctgggccctcgttgcagtgctactggccgacttgttggctctgagcgacaccttggctgtcatgtccgtggacctcggatcagaatccatgaaggtggcaatagttaagcccggggtgcccatggaaattgtcctcaacaaagaatccaggagaaagacaccggtaatagttaccctcaaggagaacgaacgtttctttggtgattcagccgccagcatggctattaaaaacccaaaagcaacgctgagatacttccaacacttactgggtaaacaagctgacaacccacacgtggccctatatcaggcgcgcttccccgagcacgagctaacattcgatcctcaacgccagacagtgcacttccagattagctcccagctgcagttctcgcccgaggaagtgctggggatggtgctgaattatagcaggagcctggctgaagattttgctgaacagccgataaaggatgcagtgattaccgtacctgtcttctttaaccaggcagaacgacgggccgtcctgcaagcagcccgcatggctgggctcaaggtgctgcagctcatcaacgataacaccgccacagcactttcttatggcgttttccgccggaaagatataaacacaaccgcccagaatattatgttctacgacatggggagcgggtccacggtctgcaccatcgtgacttaccagatggtaaagactaaggaggctggtatgcagccacagttgcagatcaggggtgtgggcttcgatcgcacacttggaggcctggagatggaactgcggttacgtgagagactggcgggcctcttcaatgaacagcgcaaagggcagagagctaaagacgttagggagaaccccagggcgatggctaaactgctgagagaagcgaaccgtctgaaaacggtgttatctgcaaatgccgaccacatggcccagatcgaaggccttatggatgacgttgactttaaggccaaggttacgagagtggagttcgaagaactctgtgctgatctgtttgagagagtgccagggcccgtccagcaagccctgcagtcggccgaaatgagtctggacgagattgaacaggtgatactcgttggtggagccactcgtgttccacgagtgcaggaggtgctgcttaaggccgtggggaaggaagaactcggaaaaaacataaatgctgatgaggccgccgctatgggagcagtgtaccaagccgcggctctgtcaaaagctttcaaggtgaagccatttgtagtgcgcgacgccgttgtttatcctattctcgttgaattcactagagaagtcgaggaagaacccggtattcattccttaaaacataacaaacgcgtcttattctctcgcatgggaccctacccccaacggaaggtaataacattcaaccgctattcccatgacttcaatttccatatcaactacggcgatcttggttttctgggccctgaagatctgcgcgtgtttggtagccaaaacctaacaaccgtgaagctcaaaggcgtgggcgattcatttaaaaaataccccgattacgaatctaagggtataaaggcccatttcaacttggacgagagcggtgtgctgtccctggatcgggtggaatcagtctttgagaccctcgtggaggactcagccgaagaggaatcaactctgactaaactcggtaatactatctcctcattatttggcggggggacgacaccggacgccaaagaaaacggaacagataccgtccagaagccctccgagaaagccgaggctggcccagagggggtcgcacccgctcctgagggggagaaaaagcaaaagccagcacggaagcgccgtatggtggaagaaatcggagtcgaactggtagttctggacctgccagacttgcccgaggacaaactggcacagtcagtgcaaaaactgcaggaccttactctgagggatctcgagaagcaagagagggaaaaagcagcaaattcgctggaagctttcatattcgaaacacaggacaaactctatcagccagagtaccaggaggtcagcacagaagaacagcgcgaggagatctctggaaaactgagcgccgcctctacctggctcgaagatgagggcgtgggcgcaaccaccgtgatgcttaaagagaagctcgccgagctgagaaagttatgccaaggccttttcttccgggtggaagaaagaaagaaatggccggaaagactgtcagccctggacaacctcctgaatcactcatcaatgtttctgaagggagctaggttaattcccgaaatggaccagatcttcacagaagtagaaatgacaacactggagaaggtgatcaatgagacatgggcctggaagaacgccacactggccgagcaagcgaagttgcctgcaactgagaagcccgtgctgttgtctaaggacattgaggccaaaatgatggcccttgatcgggaggttcagtatcttctgaataaggctaaattcactaaaccacgcccacgcccaaaagataagaatggcacgcgagccgagccgccgttaaacgctagtgcttcagaccagggcgaaaaggtcattccacctgcaggacagaccgaggacgctgaaccaatcagtgagcccgagaaagtggagacaggatcggaaccaggcgacacggagcctctggaattaggcgggcccggcgccgaacccgagcagaaggagcagagtacagggcagaagcggcctctgaagaatgacgaactgtag

SEQ ID NO: 191194 - DNA, 333 bp, synthetic construct
  misc_feature 1..333: note = Description of Artificial Sequence: Synthetic coding sequence
  source 1..333: mol_type = other DNA
atggccccccggggctgcatcgtggccgtgttcgccatcttctgcatcagtcgtctgctctgctcccatggcgcgcccgtggcgcccatgacgccatatctgatgctgtgccagcctcataagaggtgcggagataagttctatgatccgctgcagcattgctgctatgatgacgctgtcgtccctcttgccaggacccagacttgcgggaattgcacattcagagtctgtttcgaacaatgctgtccctggaccttcatggtcaaacttatcaatcagaattgcgactccgcccggaccagtgatgatcgtctgtgtcggagtgtcagctag

SEQ ID NO: 191195 - DNA, 360 bp, synthetic construct
  misc_feature 1..360: note = Description of Artificial Sequence: Synthetic coding sequence
  source 1..360: mol_type = other DNA
atggtgccccggatcttcgcccccgcctacgtgagcgtgtgcctgctactgttatgtccacgggaagtcattgcccctgccggatctgaaccttggctatgtcagcccgcccctcgatgcggagataagatttataacccactggagcagtgctgttacaacgatgccatcgtcagtctgtccgagacccggcagtgtggccctccctgcacattttggccctgtttcgagctatgttgcctggactcattcgggctgacgaatgattttgttgtgaagctcaaggtccagggcgtgaactctcagtgccacagctccccaatctcctcaaagtgtgagtcacgtcggcggttcccttag

SEQ ID NO: 191196 - DNA, 393 bp, synthetic construct
  misc_feature 1..393: note = Description of Artificial Sequence: Synthetic coding sequence
  source 1..393: mol_type = other DNA
atgcggttcagcgtgagcggcatgcggaccgactacccccggagcgtcctagccccagcttacgtgtctgtgtgtctgttattgctgtgtcctagagaagtgatcgcccctgctggctccgagccctggctctgtcagcccgcccctcggtgcggtgataagatatacaatccactagagcaatgctgctataatgatgccatcgtctccctgagcgaaacaagacagtgtggtcctccttgtaccttctggccttgcttcgagctttgttgccttgactcgtttggactcaccaatgatttcgtcgtgaagctcaaagtccagggcgtgaattcgcagtgtcactcttctcccatctcatctaagtgtgaaagccgtcgacggtttccctag

SEQ ID NO: 191197 - DNA, 378 bp, synthetic construct
  misc_feature 1..378: note = Description of Artificial Sequence: Synthetic coding sequence
  source 1..378: mol_type = other DNA
atgcggccccggtgctgcatcctggccctggtgtgctggatcaccgtcttcctgttgcagtgctccaagggcaccactgatgcgcccgtcggctctgggctctggctgtgccagccgactcccaggtgtggtaataaaatttacaaccctagcgagcagtgctgttacgacgacgccattctttccttgaaggagactcgcaggtgtgggagcacttgcactttttggccatgtttcgaattatgctgccctgaatccttcggccctcagcagaagttcctagttaagttgagagtgctcggaatgaagtcccagtgccatctgagcccaatcagcagaagttgcacacggaatcggaggcatgtgctttacccatag

SEQ ID NO: 191198 - DNA, 375 bp, synthetic construct
  misc_feature 1..375: note = Description of Artificial Sequence: Synthetic coding sequence
  source 1..375: mol_type = other DNA
atggtgccccggatcagcgccgccatcttcatcttcgagctgctgggttctaatagtgaaggcgtgactgacctgcgcctatggttgtgtcagcctgccccgagatgcggggaatggacttataatccccttgaacagtgctgcgatgatggcgtgatactggatctgaatcaaacacggctgtgtggaagtagctgcaccttctggccttgcttccagcactgctgcctggagtctttgggcagccaaaaccagacagtcgtgcgatttaaggtacctggcatgaagcccgattgcaagtcaagccccatcacccggatctgcgcacaggaatatcatcctaaaagccccgtcagtagatctgacctgatctag

SEQ ID NO: 191199 - DNA, 1068 bp, synthetic construct
  misc_feature 1..1068: note = Description of Artificial Sequence: Synthetic coding sequence
  source 1..1068: mol_type = other DNA
atgggccccggccggtgcctgctgaccgccctgctgctgctggcccttgccccacctccagaagctagccaatactgtggacgcctagaatactggaacccggataacaaatgttgctcatcttgtctacagcgttttggcccccctccttgcccggactacgagttccgtgaaaactgcggactgaatgaccacggagatttcgtgacgccaccctttcgcaagtgctctagcggccaatgcaacccagatggcgccgagctgtgtagtccatgcggtggcggggcagttactccaactcctgctgctggcggaggccgcacaccctggcggtgccgcgaacggcccgtgccagccaagggtcactgccccctcaccccaggaaacccaggggccccttccagtcaggagaggagttccccagcctcaagcattgcttggaggaccccggagcctgtccctcagcaggcctggcccaattttctcccactggtggtgctggttctgctgctcacattagctgtcattgcgattcttctgtttatcctgctttggcatctatgttggccgaaagaaaaagcggatccctatccatatcccggcctagtgtgtggggtgcccaatacacacacacctagctccagccatctcagctctccgggggcgcttgagacaggcgatacttggaaagaggcaagcctgttgcctctcctttctcgagagctctcttccctggcaagtcagccgctgtcacgcctcctggacgagctggaggtattggaagaactcatcgtactgctcgaccctgaacctggcccaggcggaggtatggcacatggaaccacccgacacttagccgcaaggtacggactgcccgcagcttggagcacctttgcctactctctgcgcccctctcgttcaccccttagagccctcatcgaaatggttgtagcccgggagccatcagccagtcttggccagttggggacgcacttggctcagttagggagagccgatgcgctgagagtgctgagcaaacttggctcaagtggcgtgtgttgggcttag

SEQ ID NO: 191200 - DNA, 504 bp, synthetic construct
  misc_feature 1..504: note = Description of Artificial Sequence: Synthetic coding sequence
  source 1..504: mol_type = other DNA
atgggccccggccggtgcctgctgaccgccctgctgctgctggccctggctcctcccccagaagcgagccaatattgtggccggctggaatattggaaccccgataacaagtgctgtagctcatgtctgcaaagatttggccccccgccatgcccagagctgagcagtctcgcatcccaacctctaagtaggctgctggacgagctggaggtgctcgaagagcttattgtgctactggaccccgagccaggaccaggaggagggatggcccatggcaccactaggcatctggccgctcgctatgggttgccagcagcctggagtacattcgcttattccctgagaccatctaggtccccgttgagggccttgatagagatggtggtggcacgcgagccctcagcaagtctgggccagctgggcactcacctggcgcagttaggcagagccgacgcactcagggtgctgtcaaaacttggaagtagcggcgtgtgctgggcgtag

SEQ ID NO: 191201 - DNA, 723 bp, synthetic construct
  misc_feature 1..723: note = Description of Artificial Sequence: Synthetic coding sequence
  source 1..723: mol_type = other DNA
atgcccgagcgggacagcgagcccttcagcaaccccctggcccccgatggtcacgacgtggacgatccacattcctttcaccagtccaagctgaccaacgaggattttcggaagttgctaatgacaccccgggccgccccaacttctgctcccccgtccaaatcccgtcaccacgaaatgccccgtgagtacaatgaggatgaggaccctgccgccaggcgtagaaagaaaaaatcctattacgccaagttgcggcagcaggagatcgaacgggaaagagagctggctgagaaataccgtgaccgcgcaaaagagcgcagggatggtgtgaacaaggactatgaagagacagaacttatatctacgactgccaattacagagctgttgggcccaccgctgaagctgacaaatctgcagctgaaaaacggcggcagttgattcaagagtctaagtttctgggcggggatatggagcatacccacctagtcaaggggttggactttgcactgctccagaaagtgcgggccgaaatcgccagcaaggagaaagaagaggaggaactgatggagaaaccccaaaaagaaacaaagaaagacgaagaccccgaaaataaaatagagtttaaaacccgcctgggtagaaacgtgtaccggatgttgtttaaatccaaggcctacgaacgaaacgagttgttcctcccgggtcggatggctatgtggtag

SEQ ID NO: 191202 - DNA, 1674 bp, synthetic construct
  misc_feature 1..1674: note = Description of Artificial Sequence: Synthetic coding sequence
  source 1..1674: mol_type = other DNA
atgcccgagcgggacagcgagcccttcagcaaccccctggcccccgatgggcacgacgtcgatgatccccactcttttcaccagagtaaattgaccaacgaggacttccgtaagctcctcatgaccccgcgcgcagcgcctacatcagcccctcctagtaagagtcggcaccatgaaatgcccagggaatacaacgaagacgaagatcccgcagctaggcggaggaaaaagaagtcatattacgcgaagttgcgacagcaagaaattgaacgagagcgcgaactcgcagagaagtaccgcgatagagccaaggagaggcgcgatggcgtcaacaaagactatgaggagactgagctgatatctaccactgccaactaccgtgccgtcggccccacggccgaggccgacaaatctgcggccgaaaaacggcgtcagttgatccaggagtccaaatttttgggcggtgacatggagcacacacacctagtgaagggcttggattttgctctgctccagaaagtgagggccgagatcgctagcaaagaaaaagaggaggaagagttgatggaaaaacctcagaaagagaccaaaaaagatgaagacccagaaaataaaattgagtttaaaacacgcctgggaaggaacgtatatagaatgttgtttaagtcaaaagcttacgaaaggaatgagctttttcttcccggccgtatggcctatgtggttgacctggatgacgagtatgctgacactgacatacccacaacgctgatacgaagcaaagcagactgccccaccatggaggcgcagactacccttacaacgaatgatattgtcatctccaaacttacccagatcctgtcttatcttcggcagggcactcgaaacaaaaaactgaagaaaaaggacaaggggaagctggaggaaaagaaaccaccagaggccgacatgaacatctttgaggatatcggtgactatgtaccctccacgacaaaaacaccccgcgataaagagcgagagcggtatcgggaaagagagcgtgatcgggagagggaccgggaccgcgatagggaacgcgagcgcgagcgagacagagaacgcgaacgtgagcgggacagggaaagagaggaggaaaagaaacgtcacagctattttgagaagcccaaagtggacgacgagcccatggacgtggacaaggggcctgggagcactaaagagctcatcaaatcgatcaatgagaagttcgctggatctgcaggttgggaggggacagagtccctcaaaaagcctgaagacaaaaaacagttgggagatttcttcggtatgtcaaattcttacgctgaatgttaccctgctaccatggatgacatggccgtagactcagatgaagaagttgattacagtaagatggatcagggcaacaagaaggggcccctgggccggtgggattttgacacacaggaggaatactcggaatatatgaataacaaggaagctctgcccaaggcagccttccagtatggcatcaaaatgtcagagggccggaagacgcgcaggtttaaagagaccaacgataaggccgagttagaccgccagtggaagaagattagtgcgataatcgagaagagaaagaagatggaggcagatggggtggaagtcaaaagacctaagtactag

SEQ ID NO: 191203 - DNA, 1560 bp, synthetic construct
  misc_feature 1..1560: note = Description of Artificial Sequence: Synthetic coding sequence
  source 1..1560: mol_type = other DNA
atggacgccgacgagggccaggacatgagccaggtgagcggcaaggaatctccacccgtaagcgacactcccgacgagggagacgagccgatgcctattcccgaggacctaagcactacatcaggagggcagcagtccagtaagagcgacagggtcgtggcatccaacgtgaaggtagagacccaatctgacgaagagaatggtcgggcttgcgaaatgaacggtgaggagtgtgctgaagatcttcggatgctcgacgcctccggggagaaaatgaacggtagccacagagaccaggggtcttcagctctgtccggggtaggaggaatccggctgcccaacggaaaactgaaatgtgatatttgcgggatcatttgtataggccctaacgtgttgatggtacacaagcggagccatactggggagagacctttccagtgcaatcagtgtggcgcaagttttacccagaagggtaacttgctgagacacatcaaactgcattccggtgaaaaaccatttaagtgccatctgtgtaattacgcttgtcgccgcagggacgcgctaacaggtcatcttagaacacattcagtcggcaagcctcacaagtgtggatattgcggacgctcgtataaacagagaagctccctggaggagcacaaggagcggtgccataactaccttgagagtatgggcctgcccgggaccctgtacccagtgatcaaggaggagaccaaccacagcgagatggccgaggatctgtgtaagattggctccgagagaagtctggttctggaccgactggcttcgaacgtcgccaaaaggaagagcagcatgccacaaaagttcctgggggataagggacttagcgacacaccatatgatagcagtgcatcttacgagaaggagaacgaaatgatgaagagccatgtcatggaccaggccattaataacgccataaattacctgggcgctgagtcgctcagacctctggtccaaacccccccaggaggctccgaagtggtccccgtgatcagcccaatgtaccagcttcacaaacctcttgctgagggtaccccacgtagcaatcatagcgcgcaagacagcgctgtcgagaacctgcttcttctaagcaaggccaagctcgtgccaagcgagagagaagcctctccttccaattcatgtcaggactccactgacacagagtccaataacgaggagcagagatctggactgatatatcttacaaatcatatcgccccccatgccagaaatggcttgtctctgaaggaagagcaccgggcctacgatctgctacgagccgcaagcgagaacagccaggatgccctacgggtagtctcaacatcaggcgagcagatgaaagtgtataaatgcgagcattgtagagtgctcttcctagaccatgttatgtacactattcacatgggctgccatgggtttagagatccttttgagtgtaatatgtgcggatatcatagccaggatagatacgaattcagctcacacatcacacgaggagaacatcgattccatatgtcttag

SEQ ID NO: 191204 - DNA, 1299 bp, synthetic construct
  misc_feature 1..1299: note = Description of Artificial Sequence: Synthetic coding sequence
  source 1..1299: mol_type = other DNA
atggacgccgacgagggccaggacatgagccaggtgagcggcaaggaatcaccgcctgtgtccgacaccccagatgaaggcgacgagcccatgcctattcctgaagacttgtccacaacctccgggggtcaacagagttcaaagagtgaccgtgtggtgggagaacgcccgttccaatgcaaccagtgtggcgcaagcttcacgcaaaagggaaacctcctgcggcacattaagcttcattcaggcgagaagccattcaagtgtcacctgtgcaactacgcttgtcggcgaagagacgctttgactggccacctcaggacacatagcgtaggaaaaccacataaatgcggatactgtggccgctcgtataaacaaaggagttccctagaagaacacaaagagcgttgccacaactacttagagagtatgggcctgccgggaacactttacccagtgattaaggaagaaacaaaccacagcgagatggcagaggatctttgcaaaatcggtagcgaacgctcacttgtgctagacagactcgcgtccaacgtcgctaagagaaagtcctctatgccacaaaaattcctaggggacaaaggcctttccgataccccgtacgatagttccgcctcctacgaaaaggaaaacgagatgatgaagtcacatgttatggaccaggccatcaacaatgctattaactatctgggggccgagagcttgaggccactcgtgcagacccccccgggtggttcagaggtcgtacccgttatcagtcctatgtaccagctgcacaaaccgctggcagagggcaccccccgttcgaaccattctgcgcaggattccgcagtggagaacttactcttactgtctaaggctaaactggttccatccgagagggaggcttcacctagtaatagctgccaggactccacggacaccgagtctaataacgaagaacagcgctcagggctcatctatctaaccaaccatattgccccgcatgcgcgaaatggcctgagtctgaaagaagagcaccgggcttacgatctcctgcgcgctgccagcgaaaacagccaggacgccctccgagtcgtgagcacttcaggagagcagatgaaggtttacaaatgtgagcactgtagggtcctcttcttagaccatgtgatgtacacaattcacatgggctgtcacggctttcgcgaccccttcgaatgtaacatgtgtgggtaccacagccaggaccggtacgaattcagctctcacattacccgtggggagcaccgcttccacatgtcgtag

SEQ ID NO: 191205 - DNA, 870 bp, synthetic construct
  misc_feature 1..870: note = Description of Artificial Sequence: Synthetic coding sequence
  source 1..870: mol_type = other DNA
atggacgccgacgagggccaggacatgagccaggtgagcggcaaggagtcaccccctgtcagtgacacacctgacgagggcgatgaacctatgccaatcccagaagacctgagtactacttctgggggacagcagtccagtaaatctgatagggtggtgggtgataagggactttctgatacaccttacgattcctcggcaagctatgagaaggaaaatgaaatgatgaagtcccacgtgatggaccaggcaattaataatgccataaactatttgggggcagagtcactgcgccccctcgtgcagaccccccctggaggaagcgaggtggtccctgtgatctccccaatgtatcagcttcacaagccactagccgaaggtactccccggagcaatcacagtgcacaggacagtgccgtggagaatcttttgttgctcagtaaagcgaaactggtgccttccgaacgcgaagcgagtccgtccaattcgtgtcaagactccactgatacggagagcaataatgaggagcaacgctctggtctgatctacctgacaaatcatattgctccacatgctagaaacggcttgtcactcaaggaggagcatcgggcctatgacttgctgcgagcggcatccgagaatagtcaggacgctttgagggtagtgagcacgtccggtgaacagatgaaggtgtataagtgcgagcactgtcgggttctcttcttggatcatgtaatgtacaccatccatatgggatgtcacgggttcagggatccattcgaatgcaatatgtgtgggtaccactcccaagatcgatatgagttttcgagtcatataactcgaggcgaacatagattccacatgagctag

SEQ ID NO: 191206 - DNA, 1131 bp, synthetic construct
  misc_feature 1..1131: note = Description of Artificial Sequence: Synthetic coding sequence
  source 1..1131: mol_type = other DNA
atggacgccgacgagggccaggacatgagccaggtgagcggcaaggagtccccccccgtctcggatacgcctgacgaaggggacgagcccatgcccatccccgaggacctttctaccacctcaggcggtcagcagtcctccaagtccgacagagtggtcgcctccaacgtcaaggtggagacccagtctgacgaggagaacggaagagcctgcgaaatgaacggcgaggaatgtgccgaggacctacgaatgctggacgcctcaggtgagaaaatgaatgggagccacagagaccaggggtcttctgcactctcaggcgtaggcggaattaggctgcctaatggcaagttgaagtgtgacatatgtgggatcatttgcattggacctaacgtcctgatggtgcacaagagatcgcatacaggagataaaggattatccgataccccttatgactcctccgcctcttacgaaaaggaaaacgagatgatgaagtcacacgtaatggaccaggctattaacaatgccattaattacctgggggccgagtcattgagacctctggtgcagacacctccgggcggcagcgaagtcgtgcccgtgatctccccaatgtaccagcttcataaacctctagccgaagggactccccgttcaaaccactccgcccaggactcagctgtcgaaaatctgttactgctctctaaagcgaaactagtgccttctgaacgtgaggcaagtccctccaactcctgtcaagattccactgatactgaatcaaataatgaggagcagcgctcgggactgatctaccttaccaaccacatagcccctcatgcaagaaatggcctatctctgaaagaagagcaccgggcatacgatctgctgcgggcagccagtgagaatagccaagatgcactgcgggtcgtatctacctccggagagcaaatgaaagtctataaatgtgagcactgtagagtgctgtttcttgaccatgtgatgtacaccatccacatgggttgccatggcttccgagaccctttcgagtgcaatatgtgcggataccattcgcaggaccggtacgagttctctagccacatcacgcgcggggagcaccgcttccatatgagctag

SEQ ID NO: 191207 - DNA, 1299 bp, synthetic construct
  misc_feature 1..1299: note = Description of Artificial Sequence: Synthetic coding sequence
  source 1..1299: mol_type = other DNA
atggacgccgacgagggccaggacatgagccaggtgagcggcaaggaaagtccaccggtcagcgatactccagacgagggcgacgagcctatgcccatcccagaggacttgagcactacctcagggggccagcaaagtagcaagagtgatagagtggtcgcgtctaacgttaaagtcgaaactcagtcggatgaggaaaatggccgagcttgcgagatgaacggagaagagtgtgcggaggacctccgcatgctggacgcctccggcgaaaagatgaatggcagccaccgagatcagggatcttctgcgctgtccggagtaggcggcattcgtctccctaacggcaaattaaagtgcgatatctgtggcattatctgtattgggcccaacgtcttaatggtccataagagatctcatactggcgagcgacctttccagtgtaatcagtgtggtgcaagcttcactcaaaagggaaacctgctgagacacattaagctgcactcaggcgaaaaacctttcaagtgtcacctctgtaactacgcctgtcggcgacgcgacgcattgacaggacacctgaggacgcattccggagataaggggctgtccgatactccctacgattctagcgcgtcctacgagaaagaaaatgagatgatgaaatcacatgtgatggaccaggcaattaataacgcgataaattacctgggggcggaatcgctgcgccctctggtgcagacgccacctgggggctctgaggtagtgcccgtgatatcccccatgtaccagttacacaagccgctggcagaaggaacccccaggagcaaccacagtgctcaggatagtgcggtcgagaatttacttttgttatcaaaggcgaaactcgtgccatccgagcgagaggcatctccttctaacagctgccaagactcaactgacactgagagcaataacgaggagcagcggtccggactgatctatctgacgaaccacatcgccccccatgcccggaatggactttccttaaaggaagagcacagggcctacgatctgctgagggctgcatccgagaactcgcaggacgctttgagagtcgtttcaacgtcaggggagcagatgaaggtgtacaagtgcgagcattgtagagtgctctttcttgaccatgttatgtacactatccacatggggtgtcatggattccgggacccctttgagtgtaacatgtgtggatatcacagccaagatcgctatgagtttagcagccacatcacacgaggagaacatcgctttcacatgagttag

SEQ ID NO: 191208 - DNA, 1434 bp, synthetic construct
  misc_feature 1..1434: note = Description of Artificial Sequence: Synthetic coding sequence
  source 1..1434: mol_type = other DNA
atggacgccgacgagggccaggacatgagccaggtgagcggcaaggaaagtccaccagtttctgacacacctgatgagggggatgaacctatgcctatccctgaagatcttagcacaacttccggtggccagcagtcgagcaagtcagaccgggtggtggccagtaatgtgaaggtggaaacccagagcgatgaagaaaatggccgggcatgtgaaatgaacggtgaggagtgtgccgaggacctgagaatgttggatgcctccggcgaaaagatgaatggctcccatagggatcagggcagctctgccctgtcgggagttggagggatccggctccctaacggaaagctgaagtgcgatatctgtggcatcatctgcatcggacccaacgtgctgatggtacacaagaggagtcacacaggtgagcggccattccagtgtaatcagtgcggggcctcttttacacagaagggcaacctgctccggcatatcaaacttcattccggtgaaaagccctttaaatgtcacctctgcaactacgcttgtagacggagggatgccttgacaggccaccttaggacccattctgtgattaaggaagagacaaaccattctgaaatggccgaggacctctgcaagattgggagcgaaaggagtctggtccttgaccggctggcttcaaacgtggcaaagaggaaaagcagtatgccgcaaaaatttctgggggacaaaggtttgtcagacaccccttacgactcctcagcttcttacgaaaaagagaatgagatgatgaagtcccacgtgatggatcaggctataaacaacgcaatcaattacctgggtgctgagtcattgagacctctggtgcagactccaccaggggggtcggaggtcgtcccagtcattagtcctatgtaccaacttcacaaaccgttggccgagggcacgcctaggtccaatcattctgcccaagattcggcagtggagaaccttctcctgctgtcgaaggctaaactcgtaccctcagagagggaggccagccctagtaacagttgtcaagattccaccgacacggagtccaataatgaagagcagagaagcggcctcatttacctaaccaatcatatcgcgccccacgcccgaaacggcttgagcttaaaggaagagcatagagcttacgaccttctcagggccgcctccgagaatagtcaggatgcactgagggttgtcagcacctccggagaacagatgaaagtgtacaaatgcgagcactgccgcgtgttgtttctggaccacgttatgtacaccattcacatgggctgtcacgggtttcgcgaccctttcgagtgcaatatgtgtggataccattcccaggaccgatatgaattttcctcgcatattacacgtggagagcacagatttcatatgtcctag

SEQ ID NO: 191209 - DNA, 1299 bp, synthetic construct
  misc_feature 1..1299: note = Description of Artificial Sequence: Synthetic coding sequence
  source 1..1299: mol_type = other DNA
atggacgccgacgagggccaggacatgagccaggtgagcggcaaggaatctcctccagtgagcgacacacctgacgagggagatgagcctatgcctattcccgaagatctgtctacaactagcggaggtcagcaatcttcaaaaagcgacagggtcgtcggtgagcggcccttccaatgtaatcagtgtggggcctcgttcacacagaagggcaaccttttgagacatataaaacttcatagcggtgaaaagccttttaagtgtcatctttgcaattacgcctgtaggcgtagagacgcacttaccggtcacctgcgaacgcattccgtggggaagccacacaagtgtggctactgtggtagaagctacaagcagcgctcctcgttggaagaacataaggagaggtgccataactacttggaatcaatgggtctgccaggaaccctgtaccccgtgatcaaagaagagaccaaccattctgaaatggccgaagatttgtgtaagattgggtcagaacgatctctggtactcgaccggctggcgagtaacgtggccaaaagaaagagcagcatgccgcaaaagtttctgggtgacaagggcctgagcgacacgccatacgactcctccgcttcatacgagaaagaaaatgaaatgatgaaatcccatgtgatggaccaagctattaataacgccatcaattacctcggagccgagagcttgcgcccccttgtgcaaaccccccccggaggaagcgaagtcgtgcctgtgattagtcctatgtaccagctgcataaacccttggcagagggaacccccaggtctaaccatagcgctcaggatagcgctgtggagaacctgctgcttcttagcaaagccaaactcgttcctagcgaacgcgaagcaagcccatctaacagctgccaggattctacagataccgagagtaataatgaagagcaacggtccggcctgatctatttaaccaatcacattgctccccacgctcgcaacggcctgagtctgaaggaggagcaccgggcctacgacctgctgcgggctgcttcagagaatagccaggacgcactgcgggtcgtgagcacgtccggcgagcaaatgaaagtgtacaaatgcgagcattgcagagtcctgttcctggatcacgtgatgtacaccatacacatgggctgccacgggttcagagatccatttgagtgcaacatgtgcggctaccatagccaggaccgatacgagttcagttcacacattacgcgtggagagcacaggttccacatgtcctag

SEQ ID NO: 191210 - DNA, 1434 bp, synthetic construct
  misc_feature 1..1434: note = Description of Artificial Sequence: Synthetic coding sequence
  source 1..1434: mol_type = other DNA
atggacgccgacgagggccaggacatgagccaggtgagcggcaaggagtctccacctgtctccgatacccctgacgagggagatgagcccatgcctatcccagaagacctcagcacgaccagtgggggccaacaatcaagcaagtctgaccgggtggtggcttccaacgtcaaagtggagacacaatcggacgaggagaatggacgtgcttgtgaaatgaacggagaggagtgtgctgaggacctgcgcatgttagacgcatccggggagaaaatgaatggtagtcatcgtgaccagggcagttccgccctgtcaggggtgggaggaattagactccccaacggcaaactcaagtgtgacatctgtggcattatctgtataggtcccaacgtgctaatggtccataagaggtcacacacgggggagcggccattccagtgcaaccagtgtggtgcttcatttactcagaagggaaacttgctccgacacattaagttgcactcaggcgagaagccatttaagtgccatctatgtaactacgcatgccggaggcgtgatgcattgaccggccacttacgaacacacagcgtgatcaaggaagaaactaatcatagcgaaatggctgaggacttgtgtaaaattggctccgagaggtccctcgtgctggaccggctcgcaagtaacgtggccaagcgtaagagttcgatgccccagaaattcctcggagataaaggtctttcagacactccatacgactccagcgcaagttacgaaaaggagaatgagatgatgaaaagccacgtgatggatcaggccatcaacaacgcaataaactatctgggggcagagagtctgcgccccttggtacagactccccccggaggctcggaggttgtgccagtgatctcccccatgtaccaattgcacaaacctctggcagagggtacaccgcgcagtaaccactccgcgcaggactctgcagtcgagaatttacttctgctaagcaaagctaaactcgtcccctctgaaagagaggctagccccagtaactcttgtcaggactccacagataccgaaagtaacaacgaggagcaaaggtccggcctgatctacttaaccaaccatatagccccccatgcacgcaatggactgagcctcaaggaagaacaccgcgcctacgacctgctgcgggcagcctcagagaatagccaagatgcactgagggttgtctcaacaagcggtgaacagatgaaggtgtacaaatgcgagcactgtcgggttctgttcctggatcacgtgatgtacaccatccacatgggttgccacgggtttagggaccctttcgaatgcaatatgtgcggataccactcccaggaccgttacgaatttagcagccacatcaccaggggagagcaccgctttcatatgagttag

SEQ ID NO: 191211 - DNA, 681 bp, synthetic construct
  misc_feature 1..681: note = Description of Artificial Sequence: Synthetic coding sequence
  source 1..681: mol_type = other DNA
atggacgccgacgagggccaggacatgagccaggtgagcggcaaggagagccctccagtttcagacacgcccgatgagggagatgagcctatgcctatccctgaagacctctcgaccacatctggagggcagcaaagctcaaaatctgaccgggtcgttgccagtaacgtgaaggtggaaacccaatcagacgaggagaacggcagagcttgtgagatgaatggggaggaatgcgccgaggacttacgcatgctcgacgcaagtggggaaaaaatgaacggcagtcatcgcgaccaggggtcttccgcactatcaggggttggcggcatcaggcttcctaacggcaagttgaaatgtgatatttgcggcattatctgtatcggccccaacgtccttatggttcataagcgatcccacaccggagagcgcccctttcagtgtaatcagtgcggggcatctttcactcaaaagggtaacctcctccgccacatcaaactacactccggcgaaaagccattcaagtgccatctgtgtaattacgcatgtagacgacgcgacgcgctgacagggcacttgaggactcactctgtgatcaaggaagagacaaatcattccgaaatggccgaggacctgtgtaagatcggctccgaaattagccgcgcaggccaaacctccaaatag

SEQ ID NO: 191212 - DNA, 1758 bp, synthetic construct
  misc_feature 1..1758: note = Description of Artificial Sequence: Synthetic coding sequence
  source 1..1758: mol_type = other DNA
atgcacaccccccccgccctgccccggcggttccagggcggcggcagggtcaggacgccagggtcccatagacagggaaaagataatctcgaaagggatccttctggaggttgtgtcccagactttcttccacaggcccaggattccaatcacttcattatggagtctctgttttgtgagtccagcggtgacagcagcctcgagaaagaattcctgggcgcccccgtcgggcccagcgtctctacacccaactcccagcattccagccccagccggagcctgtccgctaatagcatcaaggtcgagatgtacagcgatgaggagtcatcgaggctcctgggcccagatgagaggctattggaaaaagatgatagcgttatcgtagaggatagcctgtccgagcccttgggatactgtgacggatcaggacctgagcctcactcccctggcggtatcaggctccctaatgggaaactcaaatgcgatgtgtgcggcatggtgtgtattggccccaatgtgctgatggtgcataagcggtcccacactggtgagcgaccctttcactgtaaccaatgtggcgctagctttactcagaagggcaatctgctgcggcatatcaaacttcatagtggtgagaagccttttaagtgccctttttgtaattacgcatgtcggcggcgcgatgctctaacggggcatctgcggacacacagtgtatcatctccaactgtaggtaaaccctacaagtgcaattactgtggaagaagttataaacagcaatctacgctggaagaacataaggaaaggtgtcacaactacctgcagtcgctgagtacggaagcccaggctctggctggccagcccggtgacgagattcgagacctagagatggtaccagattcaatgctgcattcctcaagcgagcgtccgacattcatagacaggctggcgaactcactcacaaagcgtaagcggtcaactccgcagaaattcgttggtgagaagcaaatgcgcttctccctttccgacctgccatacgacgtcaacagtggcggatatgaaaaggacgtggagctggtggcacatcattcactagagcctggatttggatcgagtctggcctttgtgggcgctgaacacctgcgtcctctgcgacttcctcccaccaactgtatctctgagcttaccccagtgatctcctctgtgtatactcagatgcagcccctccctggcaggctggaactccccggatcccgggaggcaggagaaggcccagaggatctcgcagatggaggtcctcttctgtacaggcctaggggcccactgaccgaccccggagcttcaccctccaacggttgccaagactctaccgacacagaatccaaccatgaagatcgtgtagctggagtggtttcccttcctcagggaccgccacctcagcccccacctactattgttgttggcagacatagcccagcctacgcaaaagaggatcccaagcctcaggagggattgctgagggggacccccggaccttccaaggaggtattaagggtggtcggggaatctggagaacctgttaaggccttcaaatgcgaacactgccgcatccttttcctcgatcatgttatgtttaccatccatatgggttgtcatggcttccgcgatccttttgagtgcaacatttgcggataccatagtcaagacaggtatgaatttagctcgcatatcgttagaggcgagcataaggtggggtag

SEQ ID NO: 191213 - DNA, 1452 bp, synthetic construct
  misc_feature 1..1452: note = Description of Artificial Sequence: Synthetic coding sequence
  source 1..1452: mol_type = other DNA
atgtacagcgacgaggagagcagccggctgctgggccccgacgagagactactagagaaagatgatagcgtaatcgtggaggatagcctgagtgaacccttgggctattgtgacggttccggccccgaacctcatagtcccggcggtatccgcttgcccaacggaaagctgaagtgcgatgtctgcggaatggtctgcatcggtcccaacgtgctgatggttcacaagaggtcgcatacgggagagaggccattccattgcaatcagtgtggggcttcttttacccaaaaggggaatcttctgcgtcatatcaagctccatagtggtgaaaagccttttaaatgcccattttgcaattatgcctgccggcggcgggacgctttaacgggccatcttcgtacccattctgtgtccagtccgacagtgggtaagccctacaagtgcaactactgcggcagaagttataagcagcagtccacacttgaggaacataaggagcgatgtcataattacctgcagagtttgtctaccgaggctcaagcgttagctggccagcctggagacgagattcgcgatctggagatggtgcctgatagtatgctgcactcaagctccgagcggcctaccttcatcgaccgcctggctaattcccttactaaaaggaagaggagcacaccgcagaaattcgttggtgagaagcaaatgaggttcagcctgtctgacctaccctatgacgtgaattcaggaggctacgagaaggatgtggaactcgtagcacaccattctcttgaaccagggttcggaagttcattggcctttgttggcgccgagcacctgcgcccgttgaggttacccccgaccaactgtatcagtgagttgactccagtgatcagcagcgtctacacccagatgcagcctcttccggggcgcctcgaactccctgggagcagagaggcgggggaagggcctgaagacctggccgacgggggacccctgctgtatcggccccgcggcccgcttactgatcccggcgcttctccaagtaatgggtgtcaagattcaaccgataccgaatccaatcacgaggaccgcgtggccggagtcgtttccttgcctcagggcccaccgcctcagcctccccctactatcgtcgtcggcagacattcaccggcctacgcaaaggaggatcccaagccccaggaaggactcttgcgtggtacccctgggccgtctaaggaagtgcttcgagtggtaggcgagagcggtgaacccgtgaaggctttcaagtgcgaacactgcagaatcctttttctggatcatgtaatgtttactatacacatgggatgtcacggctttagagatcctttcgagtgcaatatttgcgggtatcattcccaagatcgctacgagttctcttctcacattgtgcgaggggagcataaggtggggtag

SEQ ID NO: 191214 - DNA, 1758 bp, synthetic construct
  misc_feature 1..1758: note = Description of Artificial Sequence: Synthetic coding sequence
  source 1..1758: mol_type = other DNA
atgcacaccccccccgccctgccccggcggttccagggcggcggccgcgtgcgcacccctggcagccacaggcaagggaaggataacttggagagagacccctccggcgggtgtgtccccgattttctacctcaggcgcaagactctaatcacttcatcatggagtcactgttttgtgagtcctcgggagattcgagcctggagaaagaatttctcggagcccctgtgggccctagtgtgagtacacccaacagccagcattcttctccttccaggtcactgtcggctaattccataaaggtggagatgtactcggatgaggaatctagccggctgctaggtccagacgagagactacttgagaaagatgactctgtgatcgtagaagatagcttaagtgagcctctgggatactgcgatggcagcggtcccgaaccgcacagtccgggcggcatcaggttgccgaacggaaagctcaaatgcgacgtctgcgggatggtgtgtatcggcccaaatgtgcttatggtccacaaacgttcacatacgggcgagcggccgttccattgcaatcagtgcggggcctccttcactcagaagggtaacttgctcagacatatcaaacttcactctggcgagaaacctttcaaatgcccattctgtaactacgcctgcagacgcagggacgccctgacagggcacttacgtactcattcagtgtcatctccaacggtcggtaaaccttacaaatgtaattactgtggacggtcatataagcaacagagcacattagaagaacataaggagcggtgtcataattatttgcaaagcctatccacagaggcccaggcactcgctggacagcccggggacgagatccgggacctcgagatggttcctgattcaatgctacactcttctagtgagcgtcccacattcatcgaccgcttagctaactctctgaccaagaggaaacggagcacaccacaaaaattcgtcggggaaaaacagatgcgcttctccctctctgacctgccatatgacgtcaactctggggggtatgagaaagacgtggaactcgtggcgcaccacagtttggaaccagggttcggttcaagcctcgccttcgtgggagccgagcatctccggccacttcggctgccccctacaaattgtatctccgagctgacccccgttatctctagcgtatacacccagatgcagccccttcccggccgactggagcttcccgggtctcgcgaggcaggggagggaccggaagacttggccgatggaggccccctgctgtaccgtccacgtgggcctctgactgatccgggagctagccccagtaacggctgtcaagactctactgacaccgagtctaatcacgaggatcgagtcgctggagtcgttagcctgcctcaggggcctccaccgcagcctccccccacaatcgttgtaggccgccattccccagcgtatgccaaagaggaccctaaaccgcaggagggccttctgcgggggactcccggaccttccaaagaggttctacgggtggtgggcgaatcaggagagcctgtgaaggccttcaaatgtgagcactgtagaatccttttcctggatcacgtgatgtttacaatccacatggggtgccacgggtttcgtgaccctttcgagtgcaacatttgtggctaccacagtcaagatcgttacgagttctcttcccacatcgttaggggtgagcacaaagttggctag

SEQ ID NO: 191215 - DNA, 33 bp, synthetic construct
  misc_feature 1..33: note = Description of Artificial Sequence: Synthetic coding sequence
  source 1..33: mol_type = other DNA
atgcacaccccccccgccctgccccggcggtag

SEQ ID NO: 191216 - DNA, 1863 bp, synthetic construct
  misc_feature 1..1863: note = Description of Artificial Sequence: Synthetic coding sequence
  source 1..1863: mol_type = other DNA
atgaacaacttcatcctgctggaggagcagctgatcaagaagagccagcagaagcgtcggacctcacccagcaattttaaagtaagattttttgtactgacaaaagcatcgctggcatatttcgaagatagacatggaaaaaagcggaccctgaagggcagcatagagctaagtcgaattaagtgcgtggaaattgtcaaatctgatatcagcataccatgccactataaatatcctttccaggtggtacatgacaattatctactatatgtgttcgcacccgatagggagtcacgacagcggtgggtgcttgcgttgaaagaggagacccgaaataacaacagcctggtgcctaaatatcaccctaatttttggatggatggcaaatggcgctgctgctctcaactggaaaaactggcaacaggctgcgcccagtacgaccccacaaaaaatgcttctaaaaaaccactccccccaacccctgaggacaaccgaaggcccctgtgggagcccgaggagaccgtagtcatcgctctatatgattatcagactaatgatccccaggagcttgcccttcggcgcaacgaagaatactgtttgctcgatagcagcgagatccactggtggagagttcaggacagaaacgggcacgaaggctacgtcccttcaagctacttagtggagaagtccccaaacaacctggagacctacgagtggtacaacaagagcataagccgggataaggccgagaaactattacttgatacaggtaaggaaggggcttttatggtacgcgacagtagaacggctggaacatacactgtttcagtgttcaccaaggcagttgtgtcagaaaacaacccttgtatcaaacattatcacatcaaagaaacaaatgataatccaaagcgttactacgtggccgagaaatacgtgttcgactcgatcccgctattgattaactatcatcagcataacggagggggcctagtgacgaggcttaggtatcctgtttgctttggccgccaaaaggcaccagttactgctggcctgcgctatggaaagtgggtcatcgatcccagcgaactcacatttgtgcaggagattggatctgggcaatttggcctggtgcatctcggatattggctgaacaaggacaaggtcgccatcaaaacaattagggaaggggcaatgagtgaggaggacttcattgaagaggccgaggtgatgatgaagctgtctcaccccaagctggtgcagctttacggtgtctgtttagagcaggctcccatctgtctcgtgttcgagttcatggagcacggctgccttagtgactatttgcgtacccaaagggggttgtttgctgcagagactcttcttgggatgtgtctcgacgtgtgcgaagggatggcctatctggaagaagcctgcgtgatacacagagatctagccgcacgaaattgtctggttggcgaaaatcaggtgattaaggtatcagactttggcatgactcgctttgttcttgacgaccagtatacatctagcactggcactaagtttccagtgaaatgggcaagtcctgaagtcttctctttttcacgctactcttctaaaagcgatgtctggtcgttcggggtgctgatgtgggaagtgttctctgaggggaagatcccatatgagaataggtccaattcagaggttgtggaagacatcagtacgggcttccgcctctataaacctaggctggccagcacccacgtgtatcagattatgaaccactgctggaaagagcggcctgaggacagaccggcgttctctagattgttacgccagctggccgagatcgcagaaagcggattgtag

SEQ ID NO: 191217 - DNA, 1899 bp, synthetic construct
  misc_feature 1..1899: note = Description of Artificial Sequence: Synthetic coding sequence
  source 1..1899: mol_type = other DNA
atggagacccccgccgccgccgcccccgccggcagcctgttcccctcctttcttttgttggcttgcggtacactggtggccgctctgctgggcgctgcccaccgactggggctcttttaccaactgctgcacaaagtggataaagcatctgtaagacatggtggagaaaacgtcgctgcagtgctccgtgcacacggagtccgttttatcttcactctagtaggaggtcacatttcaccactattggttgcctgtgagaagttgggcatccgggtggttgacacaagacacgaggttaccgctgtttttgccgcagacgctatggccagactctcgggaacggtcggtgtggcggccgttacagccggcccaggtcttactaatacggtcactgccgttaaaaatgcccagatggcccagtctcccattctcctcttaggaggcgcagccagtacgcttctgcagaacagaggtgccctgcaggctgtggaccagttatccctgtttcggccgctgtgtaaattttgtgtgagtgtgcggcgtgtgcgagatatagtgcctactctgcgcgccgcaatggccgccgcacagtccggcacaccaggtcctgtgtttgtggagctcccagttgacgtactatacccatattttatggttcagaaagagatggtgccagcaaaaccgcccaagggtttggtaggccgagttgtgagctggtacctggaaaactacttggccaatctctttgcaggtgcgtgggagccccagccagaaggtcccctgccactggacatacctcaggcaagccctcaacaggtccagaggtgcgtggaaatcctttctagggccaagcggcccctgatggtgctgggcagccaggctctgttgacccccacatccgccgacaagctgagagcggcagttgagacactcggcgtgccatgctttttgggtggcatggcccgtgggcttttgggacggaatcacccccttcacataagggagaaccgttcagcggctttgaaaaaagcagacgtgatcgttcttgccgggacggtgtgcgacttccggctttcttacggaagggtcctgagccattcctcaaagattattattgtaaataggaatcgtgaagagatgttgttaaattctgacatcttttggaagccccaggaagccgttcaaggggatgtgggcagcttcgtattgaaacttgtggagggtttgcagggccagacctgggcccctgattgggttgaggaactgagagaggccgatcggcaaaaagagcagacctttcgcgagaaggcagctatgccggtagcacagcatcttaaccccgtgcaggtgctgcagctcgttgaagagacgctgcccgacaacagtatcttggtcgttgatggtggagattttgtgggcactgctgcccatctggtccaacctagaggacccttaagatggctggatcccggcgcattcggcacacttggggtaggagccggatttgcgctcggagccaagctgtgccggcctgacgccgaggtctggtgtttatttggcgatggggccttcgggtattcattgatcgaatttgacacctttgtacgccataagatcccggtcatggccttggtgggcaatgatgccggatggacacagataagccgggagcaggtgccctctctagggtctaacgtggcatgcgggctggcctatacagactatcacaaggcagcaatggggctaggcgcccggggactgctgcttagcagggagaacgaggatcaggtcgtcaaagttctgcatgatgctcagcagcagtgcagggacgggcaccctgtcgttgtgaatattttgattgggagaactgacttccgcgatggctccattgctgtctag

SEQ ID NO: 191218 - DNA, 678 bp, synthetic construct
  misc_feature 1..678: note = Description of Artificial Sequence: Synthetic coding sequence
  source 1..678: mol_type = other DNA
atggagacccccgccgccgccgcccccgccggcagcctgttcccctccttccttttattagcgtgcggaacactggtagctgcattgctgggggcagcccataggctcggtcttttttatcaactgctccacaaggtcgataaagcttcagtccgccacgggggggaaaacgtggctgctgttttgagggctcatggggttagattcatcttcacgcttgttggagggcacatcagtcctttgttggttgcatgcgaaaagctaggaatccgtgttgtcgacacgcgtcacgaggtgaccgcagtctttgctgccgatgctatggccaggctgtcaggcaccgtcggagtcgcagctgtcacagctgggccaggtctgaccaatactgtgactgccgtgaagaacgcccagatggctcaatctcctatcctactgctcggaggtgcagcgtccactcttctgcagaaccgcggcgcccttcaggcagtggatcagctgagcctgttccgcccccctcctggctgcgggcagcaccctcattgggaagacggattacctcgctggctccattgctgtattggcccatgtggttcaggacgactcgccgcttttctgcctctggattgcgtgcaactagtgtggtcattgataatagcatgccccggcccgattccttag

SEQ ID NO: 191219 - DNA, 789 bp, synthetic construct
  misc_feature 1..789: note = Description of Artificial Sequence: Synthetic coding sequence
  source 1..789: mol_type = other DNA
atggagacccccgccgccgccgcccccgccggcagcctgttcccctcattccttctgctcgcgtgtggcacccttgttgctgccctgctcggtgctgcccaccgcctaggcctgttttaccagctgctgcataaggtggataaagcctctgttcgccatgggggtgagaacgtcgcagccgtgctcagagctcacggcgtgagattcatcttcacactggtggggggccacatcagtcctcttctagtggcttgcgagaaactgggcatcagggtcgtcgatacccgccatgaggtgactgctgtgtttgcggctgatgctatggccaggcttagtggcactgtgggcgtggcggctgtcacagctggaccaggcctcaccaacaccgtgacggcggtgaaaaacgcccaaatggcacaatcccctatactgttgttgggaggagctgcttccaccctactacagaaccgtggggctttacaggccgtggaccagttgagtctcttccgacccctgtgcaagttttgcgtgagtgtcagaagggttcgggacatagtccctacactaagggctgccatggcagccgctcagtccggaactcctggacctgttttcgttgagcttcctgtcgatgtcctgtatccctattttatggtgcagaaggagatggtgccagccaagcctccaaagggcctcgtcggacgggttgtctcctggtacctggagaactatttagccaacctgtttgctggggcctgggaacctcaaccagagggcccccttccatag

SEQ ID NO: 191220 - DNA, 501 bp, synthetic construct
  misc_feature 1..501: note = Description of Artificial Sequence: Synthetic coding sequence
  source 1..501: mol_type = other DNA
atggagacccccgccgccgccgcccccgccggcagcctgttccccagcttcttactactcgcatgcggcacactggtggcggccctgctgggggccgctcatcggctcggcctcttttatcagctgctgcacaaggttgacaaagcctctgtaagacatgggggcgagaacgtagctgcagttctgagagcgcacggcgttaggttcatctttactttggtgggtggccacatctctccactccttgtcgcctgcgagaagctcggcataagagtcgtggatacccgccacgaggtcaccgctgtgttcgctgcggacgccatggcacggctatctggaaccgtcggggtggctgccgtgactgcgggcccaggattaaccaatacagtgacagcagtgaagaatgcacaaatggctcagtcccccattctgctgctcgggggtgccgcatccacactgctgcagaatcgaggcgccctgcaggctgtggaccaactttag

SEQ ID NO: 191221 - DNA, 621 bp, synthetic construct
  misc_feature 1..621: note = Description of Artificial Sequence: Synthetic coding sequence
  source 1..621: mol_type = other DNA
atggccgccacccggtgcctgcggtggggcctgagccgggccggcgtctggttgctccccccaccagcgcgctgtccacggagagcactgcataaacagaaagacggtacagagtttaaaagtatatattcactcgataagctttaccctgaatctcaaggatctgatacagcatggcgcgtgcctaatggagctaaacaggctgacagtgacatccccctggacagattgaccatttcttactgtaggagtagcggcccaggtggccagaatgtaaacaaggtgaattccaaggccgaggtacgattccacctcgccaccgccgaatggatagccgaacccgtgcgacagaagatcgcaatcacccataaaaacaagataaaccgactgggcgagttaattttgaccagcgaaagcagtcgataccagttcagaaacttagctgattgcctccaaaagatcagggacatgataaccgaggccagtcagacccctaaagagcccacaaaggaggatgtgaagctgcacaggattaggatagagaacatgaatcgtgagcgtctgcgtcagaaacgaatacattcagcggtcaagaccagcagaagggtggatatggactag

SEQ ID NO: 191222 - DNA, 471 bp, synthetic construct
  misc_feature 1..471: note = Description of Artificial Sequence: Synthetic coding sequence
  source 1..471: mol_type = other DNA
atgtgccacagccggagctgccaccccaccatgaccatcctgcaggcccctaccccagctccttcaacaataccaggacctcgcaggggctctggtcctgaaatcttcacctttgatcctttgccggaaccagcagcagcccccgcaggacgaccaagcgcctccagaggccatagaaaaagatcaaggagggtactgtacccaagagtggtcaggagacagctacctgtcgaggagccaaatccagctaagagactgctctttcttctgctgactatcgtattctgtcaaatcctaatggctgaagagggcgtgcccgccccactgcccccagaggacgccccgaacgctgcaagtctggctcctactcccgtttcggctgtcctcgagccattcaatctgacttcagaaccttcggactatgcactggatctctccacattcctgcagcaacacccggctgctttttag

SEQ ID NO: 191223 - DNA, 417 bp, synthetic construct
  misc_feature 1..417: note = Description of Artificial Sequence: Synthetic coding sequence
  source 1..417: mol_type = other DNA
atgtgccacagccggagctgccaccccaccatgaccatcctgcaggctcctacacctgcaccatccaccattcctgggccaaggcgaggctcaggcccagaaatctttacctttgacccactgcccgagcctgccgctgctcccgctggtcgcccctccgcaagccgcggacaccgcaagcgaagcaggcgcgtactctatccacgggttgtcagcattgccgaggtcggaattaggggggttcgctgccccggagttactggcgaacggcccgacagcagagggctcgaccttacatgcttgcttttttgcttgccactgggtcccgcacctgcggcctctaggggaacagaacccagtcaaaaggccagcctttcagctgcccaccatagactactgcctgatccggacggctag

SEQ ID NO: 191224 - DNA, 579 bp, synthetic construct
  misc_feature 1..579: note = Description of Artificial Sequence: Synthetic coding sequence
  source 1..579: mol_type = other DNA
atgtgccacagccggagctgccaccccaccatgaccatcctgcaggcccctactccagcaccttcaactatccctggccccaggaggggctcaggtcctgagatcttcacatttgatcctttgcctgaacctgccgccgcgcccgccggacggcccagcgcatcccgtggccatcgcaaacgtagtcggcgtgttctgccaagcagtggtgaataccgcaggtctggacacagtaggggcgcgctgccctggagtcactggggtactactaggctgcaggggctggaccttacatgtctgttgttctgcctacctctcgtgcgcagacagctacctgtcgaagagccgaatcccgcgaagaggcttctgtttctgcttctgacgattgtgttctgccagatcctcatggcggaggagggagtcccggcgcccctcccacccgaggatgcacccaacgccgccagtctggcaccgactccagtttctgccgtcctcgagccattcaacctgactagtgagccttctgattatgccctggatctgtctacctttctccagcagcacccggctgctttctag

SEQ ID NO: 191225 - DNA, 471 bp, synthetic construct
  misc_feature 1..471: note = Description of Artificial Sequence: Synthetic coding sequence
  source 1..471: mol_type = other DNA
atgtgccacagccggagctgccaccccaccatgaccatcctgcaggcccctacccctgccccatctacaatacctggtccccgcaggggcagcggcccggagatcttcactttcgatcctttaccagagcccgcggcagcccctgccggtcggccttctgccagccgtggacataggaagcgctctcgccgggtcttgtatcccagagtcgttaggaggcaacttccagtggaggaacccaatcccgccaagaggctgttgtttcttctactgactatcgtgttctgccagatcctgatggcagaggagggcgtacctgcgccattaccacctgaggacgccccaaacgctgcgagtctggcgcctacacccgtgagccctgttctcgagccattcaatctgacatccgaaccaagcgactacgccctggacctatcaaccttcctgcaacagcaccctgctgccttctag

SEQ ID NO: 191226 - DNA, 417 bp, synthetic construct
  misc_feature 1..417: note = Description of Artificial Sequence: Synthetic coding sequence
  source 1..417: mol_type = other DNA
atgtgccacagccggagctgccaccccaccatgaccatcctgcaggcccctactcctgccccttcaacgattccaggtccaagacgcggttccgggcccgagatatttactttcgatcctctcccagagccagccgcagcaccagctggcagacctagcgcgagtagggggcaccggaaacgttccagacgggtgctctacccccgggttgtgtcaatcgccgaggttggaatccggggcgtaaggtgccccggcgtgacaggcgaaagacctgactcacgcgggcttgatctcacgtgcttactattctgtctgccgcttggtcccgctcccgccgcctcaagagggacggagccatctcaaaaagcatccttgagcgctgcacaccatcgccttctcccagatcctgacggctag

SEQ ID NO: 191227 - DNA, 417 bp, synthetic construct
  misc_feature 1..417: note = Description of Artificial Sequence: Synthetic coding sequence
  source 1..417: mol_type = other DNA
atgtgccacagccggagctgccaccccaccatgaccatcctgcaggcccccaccccggcccctagtaccatccctggtccacgaagaggcagtggaccagagatttttacctttgatcccctgcctgagcctgcagccgcgcctgctggccgtccttccgcaagtcgcggacatagaaagcggagccgcagagttctttaccctagagtggtctccatcgcggaggtgggaattaggggagttcgatgcccgggcgtgaccggggagaggcctgactcgaggggcctggacctgacctgtctcctcttttgtttgcctctggggcctgctccagcggcctcgaggggtactgaacccagtcagaaggccagtttgtccgcagcacatcaccggctgcttcctgatccagacgggtag

SEQ ID NO: 191228 - DNA, 471 bp, synthetic construct
  misc_feature 1..471: note = Description of Artificial Sequence: Synthetic coding sequence
  source 1..471: mol_type = other DNA
atgtgccacagccggagctgccaccccaccatgaccatcctgcaggcaccgacccctgcaccgtccactattcccggaccccgaagaggatcaggccctgagatattcactttcgacccgctgccagaacctgcggccgccccagccggccgtccatcagcctcacgcggccaccggaagcggtcacgcagagtgctatatcctagagtggtgagacggcaattacccgttgaggagccaaaccccgccaaacgattgctgttcctgctgttaaccatcgtgttctgccaaatactgatggccgaagaaggtgtcccagcacctctgccgcctgaagatgcgcctaatgccgcctctttggctccaactccagtcagtccagtattggaaccatttaacctgaccagcgaacctagcgactatgcactcgacctttccacctttttacaacagcacccggcggccttctag

SEQ ID NO: 191229 - DNA, 417 bp, synthetic construct
  misc_feature 1..417: note = Description of Artificial Sequence: Synthetic coding sequence
  source 1..417: mol_type = other DNA
atgtgccacagccggagctgccaccccaccatgaccatcctgcaggcccctacgcccgcgccttctacgatccccgggccaagaagagggagcggccccgagatcttcaccttcgatcctctgccagagcctgcggccgctcctgccgggcgaccatccgcttctaggggtcaccggaaacgcagccgcagggtgttatatccccgagtagtgtccatagctgaggtgggcatccgcggcgtgaggtgccctggcgtcaccggagaaagacctgactctagaggcttagatctgacttgcctattattctgtctgcctctggggccggctccagcggcctcccgaggtactgaaccaagccagaaagcgtccctcagtgccgcccatcacaggttgttaccagaccccgatggctag

SEQ ID NO: 191230 - DNA, 471 bp, synthetic construct
  misc_feature 1..471: note = Description of Artificial Sequence: Synthetic coding sequence
  source 1..471: mol_type = other DNA
atgtgccacagccggagctgccaccccaccatgaccatcctgcaggcaccaacaccagccccatcaacaatccctggtccccggaggggctctgggccagagatctttacatttgatccactccctgaacccgctgccgcaccggccggaaggccttctgcgtccagaggtcaccggaagcgctcccgtcgagttctttaccccagagtcgtccggcggcagcttcctgtggaagagccaaatccagccaagagactcctcttcctgctgctgaccatcgtattttgtcagatcctgatggccgaggagggcgtcccggcacccttgccaccagaggatgcccccaacgctgcaagccttgctcccactcctgtgagtcctgtgctggaacccttcaatttgacgagtgaaccctctgactatgcactcgacttgagtactttcctgcagcagcaccccgccgccttctag

SEQ ID NO: 191231 - DNA, 417 bp, synthetic construct
  misc_feature 1..417: note = Description of Artificial Sequence: Synthetic coding sequence
  source 1..417: mol_type = other DNA
atgtgccacagccggagctgccaccccaccatgaccatcctgcaggcccctactcccgccccgtccaccatcccgggaccaaggcgcgggagcggccctgagatattcacttttgaccctctgccagaacccgccgctgcacctgcggggcgaccaagcgcctctaggggccatcgaaaaagatccaggagggtgctgtaccctcgagtagtgagtattgcagaggtgggaatcagaggtgtgcgctgtcccggggttaccggggagcgacccgattcacgggggctggacttaacctgccttttgttctgtctgccactgggccccgctccggcggcttctaggggtacagagccatctcagaaggcttcactgagcgccgcccatcatcgtctgctgcctgaccctgatggctag

SEQ ID NO: 191232 - DNA, 471 bp, synthetic construct
  misc_feature 1..471: note = Description of Artificial Sequence: Synthetic coding sequence
  source 1..471: mol_type = other DNA
atgtgccacagccggagctgccaccccaccatgaccatcctgcaggcaccaacaccagccccgtccacaattcccgggccccgtcggggcagtggccccgagatctttactttcgatccccttccagagcccgccgctgcacctgccggccgtcccagcgcttccagaggccatcgcaaacgtagtagacgggtgctttatccgcgggtggtgagacgccaattgcctgtcgaggaacctaatcccgccaagagactgttgttccttctgctgactattgttttctgtcaaatcctcatggccgaggagggggtccctgccccactcccaccggaggacgcacccaatgcagcaagcctggcacccacccctgtgagccctgtgttagagccctttaacttaacttctgaaccctccgactatgctctggacttatcaacttttctccagcagcatcccgccgctttctag

SEQ ID NO: 191233 - DNA, 417 bp, synthetic construct
  misc_feature 1..417: note = Description of Artificial Sequence: Synthetic coding sequence
  source 1..417: mol_type = other DNA
atgtgccacagccggagctgccaccccaccatgaccatcctgcaggcccccacaccagccccatcaaccattccgggtccacgccggggcagcgggccagagatcttcacgttcgatcccttgccagaacccgccgccgcacccgccggtcggccaagcgcttcaagggggcacagaaagcggtcacggcgagtgctctacccacgggtggtttcaatcgcagaggtgggaattcgtggggtgcggtgtcctggagtgaccggtgaacgcccagactcacgaggattggacctgacctgtctgttgttttgtctgcctcttggacctgcaccagcagcatcccgtggtacagagccatctcaaaaggcttcattgtcagcagcccatcatcgcttattacctgatcctgacgggtag

SEQ ID NO: 191234 - DNA, 471 bp, synthetic construct
  misc_feature 1..471: note = Description of Artificial Sequence: Synthetic coding sequence
  source 1..471: mol_type = other DNA
atgtgccacagccggagctgccaccccaccatgaccatcctgcaggctcccacacctgctcccagcacaatcccgggacctaggcgggggtctggccctgagatttttaccttcgaccctcttcctgagcctgcggcagctccagcaggacgcccctccgcaagcaggggccacaggaaacgaagtaggcgggttttgtatccccgcgtcgtccgtcgccagttacccgtcgaagagcctaaccctgccaagaggctgctattcctgcttctgactatcgtgttttgccagatcttgatggccgaagaaggcgttccggcgcccctgcctcccgaggacgcgcctaatgccgcctccctggcacctacaccagtaagccccgtgctagagcccttcaacctcacctcagagccttctgattatgctctggacttatcaacattcctccagcagcaccctgccgcattttag

SEQ ID NO: 191235 - DNA, 249 bp, synthetic construct
  misc_feature 1..249: note = Description of Artificial Sequence: Synthetic coding sequence
  source 1..249: mol_type = other DNA
atggccttcaccctgtacagcctgctgcaggccgccctgctgtgcgtcaacgctattgccgtcctgcatgaagagcgctttctgaaaaacatcggctgggggacagaccaagggataggagggttcggtgaggagccgggcatcaagagccagctgatgaatctcattcgctccgtgagaactgtgatgcgcgtcccgttgatcatcgtgaacagtatagctatcgtgctcttgctactgttcggatag

SEQ ID NO: 191236 - DNA, 984 bp, synthetic construct
  misc_feature 1..984: note = Description of Artificial Sequence: Synthetic coding sequence
  source 1..984: mol_type = other DNA
atggagttcaagctggaggcccaccggatcgtgagcatcagcctgggaaaaatctacaacagtagggtgcagagggggggaatcaaattgcacaagaatttgctggtaagtctggtcctccgtagcgctcgacaagtgtacttgtctgatccttgtccaggactgtacttggccggccctgctggtactcccgcccctccgccgcagcagcaaccaggcgaaccggcggccggaccccctgccgggtggggcgaacctccacccccagctgctcgcgcttcctggcctgaaactgaaccgcagcctgagaggagttccgtgagtgatgccccccgcgttggagacgaggtacccgtcgcgaccgtcaccggagtaggggacgttttccaagggggcgaggcagatgccaccgaggcggcttggtcccgggtcgaaggacccagacaagccgcagccagggaagcagagggcacagccgggggatggggcgtgttcccggaggtcagcagggctgcccgccggccttgtggctgtccactcggaggagaagacccccctggaacaccagctgctacacctagagccgcatgctgttgcgcacctcagcctgctgaggacgaaccaccagctccccctgctgtgtgtccacgaaagcgctgcgccgccggcgtagggggtggccctgcggggtgcccggccccaggaagtactcctctcaaaaagccacgaagaaatctagaacagcctccttcaggaggggaggatgatgacgcagaagagatggaaacagggaatgtggcaaaccttattagcattttcggttcgagcttctctggcctgctgcggaagagcccaggcggcgggcgggaggaagaagaaggcgaagagtcgggccctgaggccgccgagcctgggcagatctgctgtgataagccagtgttacgggatatgaacccctggtccacagcaattgtagctttctag

SEQ ID NO: 191237 - DNA, 420 bp, synthetic construct
  misc_feature 1..420: note = Description of Artificial Sequence: Synthetic coding sequence
  source 1..420: mol_type = other DNA
atggagttcaagctggaggcccaccggatcgtgagcatcagcctgggcaagatctataactcaagagtccagcggggcggcatcaagctacacaagaacctgctggtcagtctggttttaaggtcggccaggcaggtctatctaagcgatccctgtcctggattatatctcgcgggaccagctggcactcctgcgcctccaccccaacagcagccaggggagcctgccgctggccctcctgcagggtggggggaaccgccgccacctgccgcccgggcttcctggccagaaacagagccccagccagaacgatcatcagtgtccgatgctccaagagtgggagacgaggtccctgtggcaactgttacaggagttggagacgtgtttcagggccgcagcgcagctatctctcgatgctag

SEQ ID NO: 191238 - DNA, 546 bp, synthetic construct
  misc_feature 1..546: note = Description of Artificial Sequence: Synthetic coding sequence
  source 1..546: mol_type = other DNA
atggaggccatgaacgtggagaaggccagcgccgacggcaacctgcccgaggttatcagcaacataaaggagaccctcaagattgtctctagaacaccggtaaatatcaccatggccggcgactccggcaatggtatgtccacgttcatctctgctctgcgaaacaccgggcacgaaggtaaggccagtcctcccacagagttagttaaagccacacaacgctgcgcatcctattttagctcacactttagcaatgtcgtgctgtgggatctaccagggaccggttccgcaactacgactctcgagaattacctgatggagatgcagttcaaccggtacgacttcatcatggtggcttccgcccagttcagtatgaaccacgttatgttggccaaaactgcggaggatatgggaaaaaaattttatatagtctggacgaagcttgacatggacctgtctactggagccctgccagaggtgcaactgctgcagattcgagaaaacgttctggagaacttgcagaaggagagagtgtgtgagtattag

SEQ ID NO: 191239 - DNA, 1020 bp, synthetic construct
  misc_feature 1..1020: note = Description of Artificial Sequence: Synthetic coding sequence
  source 1..1020: mol_type = other DNA
atggccgccgaggacgagctgcagctgccccggctgcccgagctgttcgagaccggaaggcagcttcttgatgaggtggaggttgctactgaacctgcagggagtaggatagtacaggaaaaggtgttcaaagggctggatctgctggagaaagctgccgagatgctgtctcagctcgacctcttttcaagaaacgaggatctagaggagattgcgtcaacggaccttaagtatctcctagtgccggccttccagggagcattaaccatgaagcaggtgaatccctcaaagagactcgaccatctgcagagagcacgggagcacttcatcaactacttaacccagtgccactgttatcatgttgcggagtttgagctcccaaagacaatgaacaattctgccgagaatcacacagccaatagtagcatggcttatccttctctggttgcgatggcttcccagaggcaagctaaaatccaaaggtataaacagaaaaaggaactcgagcaccggcttagcgccatgaagtcagcggtcgagtcaggccaggcagatgatgaacgcgtgcgcgagtattacctgcttcatctccagcggtggattgatattagtctggaggaaatcgagtccattgaccaggagataaagatcttacgtgagcgagactcttctagggaggcctcaacttccaattcctcaagacaggaaaggccaccagtgaaacccttcatcctgacccgcaatatggcccaggcaaaggtgttcggcgctgggtacccctcactgcccaccatgacagtttccgattggtacgagcagcatcgcaagtacggagcacttcccgaccagggtatcgcgaaggccgcaccagaggagttcaggaaggccgctcagcagcaggaagaacaggaagaaaaggaagaggaggatgatgaacaaactctgcaccgtgcccgggagtgggacgattggaaggatacgcatcctcgtggctacgggaacaggcagaacatgggctag

SEQ ID NO: 191240 - DNA, 1020 bp, synthetic construct
  misc_feature 1..1020: note = Description of Artificial Sequence: Synthetic coding sequence
  source 1..1020: mol_type = other DNA
atggccgccgaggacgagctgcagctgccccggctgcccgagctgtttgagaccggcaggcagctgctggatgaggtggaagtggcaacggagcccgcgggaagccgtatagtgcaggaaaaggttttcaaaggactggacctgttggagaaggcggcagagatgctttcccagctcgacctatttagtcgaaacgaggatttggaggaaatcgcctcaaccgaccttaagtacctgctggtgccagcgttccagggtgctttgacaatgaagcaggtgaatccatccaagcgcctggatcatttgcaaagggcccgagagcacttcataaattatctgactcagtgtcattgctaccacgtggccgagttcgagctgccaaaaaccatgaataacagcgctgaaaaccacacagccaactcctcaatggcatacccctctctagttgctatggctagccagcgacaggccaagatccagaggtacaagcagaaaaaagaactcgaacaccgcctttccgcaatgaagtcagccgtggagtctggccaagccgatgacgaacgcgtaagagagtattacctgttgcaccttcagcgatggatcgacattagccttgaagagatcgagtccattgatcaggaaatcaagattctacgagagcgtgactctagcagggaagctagcacttcaaattctagcaggcaagagcggccgcccgtcaaaccttttatattaacccgtaacatggcacaggccaaggttttcggagcagggtacccaagcctgcccaccatgaccgtttctgattggtatgagcaacatagaaaatatggcgctctgcctgatcaggggattgcaaaagccgcccctgaggaatttagaaaggcggcgcaacagcaggaggagcaagaagagaaagaggaagaggacgacgagcagactctccatcgtgcgcgagaatgggacgactggaaagatacacacccaagaggatatggcaaccggcaaaatatgggctag

SEQ ID NO: 191241 - DNA, 480 bp, synthetic construct
  misc_feature 1..480: note = Description of Artificial Sequence: Synthetic coding sequence
  source 1..480: mol_type = other DNA
atgaagaaccacctgctgttctggggcgtgctggccgtgttcatcaaggccgtccacgtgaaagcccaagaagacgagagaatcgtcctcgtggataataagtgtaaatgcgcccgaattacaagtcgaataattcgaagtagtgaagatcctaacgaggacatcgtcgaacgcaacattcgcattatcgtgcccttaaataatagagagaatatttctgatcctacctctcccctgcgaaccagatttgtctatcacctgtccgacctttgcaagaagtgcgatcctaccgaagtggagctggacaaccagattgtgaccgccactcagagcaatatctgcgacgaggactccgcgaccgaaacttgctacacctacgaccgaaacaaatgttatactgccgtggtgcctctggtatacggtggtgagacaaaaatggtagagaccgctcttacacccgatgcctgctaccctgactag

SEQ ID NO: 191242 - DNA, 213 bp, synthetic construct
  misc_feature 1..213: note = Description of Artificial Sequence: Synthetic coding sequence
  source 1..213: mol_type = other DNA
atgaagaaccacctgctgttctggggcgtgctggccgtgttcatcaaggctgtccatgtgaaggcacaggaggacgagcggatagtgcttgtggacaacaagtgcaagtgtgctcggatcacctcacgaatcatacggagttccgaagaccccaacgaggacatcgtggagagaaatatccggattattgttcctttgaataatcgcgagtag

SEQ ID NO: 191243 - DNA, 480 bp, synthetic construct
  misc_feature 1..480: note = Description of Artificial Sequence: Synthetic coding sequence
  source 1..480: mol_type = other DNA
atgaagaaccacctgctgttctggggcgtgctggccgtgttcatcaaggctgtgcacgttaaggcccaagaggatgaaaggattgtcctggtcgacaacaaatgcaagtgtgctaggatcacctcccggattatcagatcgtccgaggatccaaatgaggacattgtcgagagaaatatacgcatcattgtaccattaaataatcgcgagaacatctcggaccccacatcaccgctcagaacccgcttcgtgtaccacttatccgatctgtgtaaaaagtgtgacccaacggaagttgaactggataatcaaatcgttacagccactcagtcaaatatctgtgacgaagactccgccaccgagacttgttatacttacgataggaacaagtgctatactgctgtagtacccttagtgtatggcggcgaaaccaaaatggtcgaaaccgcgttgacacctgacgcctgttatcccgactag

SEQ ID NO: 191244 - DNA, 528 bp, synthetic construct
  misc_feature 1..528: note = Description of Artificial Sequence: Synthetic coding sequence
  source 1..528: mol_type = other DNA
atgaagaaccacctgctgttctggggcgtgctggccgtgttcatcaaagccgtccatgtgaaaggtagccgggactcgtccgcctcggcaagccgcgtggctggaatcaccgcacaggaggacgagcggattgtgctcgtggacaataaatgtaaatgtgcacgtattacgagtcgcattataagaagtagtgaggatccaaatgaggatattgttgagcgcaatatccgcattattgtaccattgaacaatagggaaaacatttccgatcctaccagccctctgcgcacaagatttgtttaccatctgagtgacctctgtaaaaagtgtgacccaacagaagtcgagctggacaatcagattgtcactgccacccagtcaaatatctgtgacgaagatagtgcaacagaaacatgctacacgtatgacagaaataaatgctatacggcagtcgtgccgctcgtatacgggggagagacaaaaatggtcgaaacagcattaacccctgatgcctgttatcctgattag

SEQ ID NO: 191245 - DNA, 642 bp, synthetic construct
  misc_feature 1..642: note = Description of Artificial Sequence: Synthetic coding sequence
  source 1..642: mol_type = other DNA
atgcggcccggcaccggccagggcggcctggaggcccccggcgagcctggccccaacctgaggcagagatggcccctgctcttgctgggactagcagtcgtcacccacgggcttcttcgccccactgcagcgtcccagagtcgggccttgggccccggcgcacctggtggctcatcaagaagttcacttcgctcgcggtggggacgattcttgttgcagcgtggttcctggacaggccctaggtgctggccccggggatttcagagtaagcacaactctgtaacccacgtgtttggttctggcacccaactgaccgttctctcacagcctaaggcaacaccatcagtcactctgttcccgcccagtagcgaggaacttcaagccaacaaggctacgctcgtctgcttgatgaatgacttctaccccggaatcctaacagtgacctggaaggcagacgggactcctatcacacagggcgtagagatgacgaccccctctaagcagagcaataacaagtatgctgcttcatcatatctctcactcacacctgagcagtggcggtcacggcgatcttactcctgccaagtgatgcacgagggatctaccgtggaaaagacggtggccccagcagagtgttcctag

SEQ ID NO: 191246 - DNA, 255 bp, synthetic construct
  misc_feature 1..255: note = Description of Artificial Sequence: Synthetic coding sequence
  source 1..255: mol_type = other DNA
atgcggcccggcaccggccagggcggcctggaggcccccggcgagcccggcccaaatcttcggcagaggtggcccctgcttctcttaggtcttgcggttgttacccacggattactgcgtccaacagcagcttcccaatctcgcgccctgggtccgggagcccctggcggcagctcacgatccagcctgcgctctcggtggggaagaagcgcccaaggccatcctctggggcactctgtacctgctgtgctttag

SEQ ID NO: 191247 - DNA, 2982 bp, synthetic construct
  misc_feature 1..2982: note = Description of Artificial Sequence: Synthetic coding sequence
  source 1..2982: mol_type = other DNA
atggccagcgccgccgtggagagcttcgtgaccaagcagctggacctcttggaactcgagcgagacgctgaggtagaagaaaggagaagctggcaggaaaacatcagcctaaaggagctccaaagtcggggtgtgtgcctgctaaaactgcaagtttcctcacagcggacaggactctacggtcggctattagtcacttttgagcccagacggtacggctcggccgccgcgctgccgtcaaacagctttactagtggtgacatagtgggactgtatgatgccgctaatgaagggtcccagttagcaacaggtattctgactagagtgactcagaaatcagtcacggtggcattcgatgagagccacgattttcagctctctctggatagagagaattcttatcggctcctgaagctggctaacgatgttacctataggaggctgaaaaaggcactcattgcccttaagaaatatcatagcggtcccgcatcaagccttatcgaagtgctctttgggagatctgctccatctccagcctctgagatacatccactcactttcttcaatacctgcctggacacatctcagaaggaggccgttcttttcgcactcagccagaaagagctggcaatcatccatggtcccccggggaccggaaagaccacaaccgtggtagagattatcctccaggccgtaaaacaaggcctcaaggtactctgctgtgcaccctcaaacatcgccgtcgataatctcgtggagcgtctggctctgtgcaagcagaggatcctgaggctcgggcacccagcacgcctcctggagtcaattcagcaacacagtctcgacgccgtgctggcacggtcagattcagcccagattgttgcagatataaggaaggatatagaccaggtgttcgtgaagaataagaagacacaggacaaaagagaaaaatctaactttcgaaacgaaatcaaactgttaagaaaggagctaaaagagcgagaagaagctgcgatgcttgagagccttacctcagctaatgttgttcttgctactaatactggggccagcgccgacgggccactgaaactgctgccagaatcttattttgatgtcgtcgtgatcgacgaatgtgcccaggccctcgaggccagttgttggatccccctgctaaaggctaggaaatgcattctcgccggcgatcacaagcagctccctcctactacggtcagccacaaagccgcgctggctgggctcagcttgagcctgatggagagactggccgaggaatatggcgctcgagtggtgaggaccctgactgtccagtataggatgcaccaggccattatgcggtgggcaagcgataccatgtacttggggcagttgacagctcacagctccgtggcgcggcacctgcttagggatctgcctggcgtggcggctaccgaggaaactggggttcccctgctgctggtggacacagctgggtgtggcttgttcgaattggaagaagaagacgaacagtcaaaaggaaaccctggggaagtaagactcgtttccctccatatacaggcactcgtagacgccggcgttcctgcaagagacatcgccgtagtgagtccttataacctgcaggtggatttgctgagacaaagcctggtacacagacatccggagctggagattaaaagcgtggacgggttccaggggcgtgagaaggaggcagtgattctaagtttcgtgaggagcaacagaaaaggcgaagtgggcttcttggctgaagaccgcaggatcaatgttgctgtgacacgagcacgcaggcacgtggccgtgatatgtgattcacgaacagtaaataaccatgcctttctgaagacactcgtcgagtattttacgcaacacggtgaagtgcggactgcgttcgaatacttggacgacattgtgccggagaattatagtcatgaaaatagtcaaggctcgagccacgcagcaaccaagcctcagggtcctgctacgagcacccgaaccggctcccagaggcaggagggcggacaggaggcagcggctccagctagacaaggacgaaagaagcccgcaggcaaatctttagcctcagaagcaccctcccaaccaagtttaaatggtggatcccccgagggcgtcgagtcccaggacggcgttgatcatttcagggcaatgatcgtcgaattcatggctagcaaaaagatgcaactagagttcccaccatccctgaattcccatgacagactgcgggtccaccagattgccgaggaacacggccttcggcacgattcgtcaggcgaaggtaaacgacggttcatcacagtgtccaagagggcgccccggcctagagcagctcttggacctccagccggcacgggtgggcccgctcctttacagcccgttcctcccactcccgcccagacagaacagccccctcgtgagcaaagaggacctgaccagcccgatctgaggacgctgcatctagaaagattgcagagggtaaggagcgcacaagggcagcccgcctcaaaagagcaacaggcttcaggccagcaaaagctgccagaaaagaaaaagaaaaaggctaagggccaccccgctacggacttgccaactgaagaagattttgaggctttagtgtccgctgcagtgaaagcagataatacatgcggattcgcaaagtgcacagccggcgtcaccaccctgggccagttctgtcaactctgttcccgacgatattgcttgtcccatcacctgcccgaaatacacggttgcggagaaagggcccgcgcacatgcgagacaacgaattagccgggaaggggttctctatgccgggagtggcacgaaaaatggatctttagatccagcgaaacgggctcagttgcagcgcagactggacaagaagctgtctgaactgagtaatcagcggacatcacggcgtaaggagcggggcacctag

SEQ ID NO: 191248 - DNA, 1287 bp, synthetic construct
  misc_feature 1..1287: note = Description of Artificial Sequence: Synthetic coding sequence
  source 1..1287: mol_type = other DNA
atgcaggagctgcacctgctgtggtgggccctgctgctgggcctggctcaagcttgtcctgaaccttgcgactgtggagagaagtatgggtttcaaatcgccgactgtgcttatcgcgacttggagagcgtgccgcctggtttccccgccaacgtgactacattatccctttccgctaacagactacccggccttcccgaaggggcttttcgagaggtccctctcctgcagtccctatggctcgcccataatgaaattcggaccgttgcagccggtgccctcgcttcgctgagccacctgaaatctctggatttgtctcacaatctgatcagcgattttgcgtggagcgacctgcacaacctgagcgcccttcagctgctaaaaatggattctaatgagctgacttttataccccgagacgcattccggtcactgagagcccttcgaagtttacagcttaaccataatagactccacactctcgccgagggtactttcactcctcttacggccctgtcccacctgcagataaatgaaaacccatttgattgtacatgcggaattgtgtggctgaagacatgggcactgaccacagccgtgagcatacctgagcaggataatattgcctgcacatccccgcatgtactcaaggggacaccactgagtagactccccccattaccctgcagtgccccaagtgtccagctgtcgtaccagccatctcaggatggcgctgaactacgacccggttttgtactggcactgcattgcgacgttgacggacagcctgctccgcagctccactggcatatccagatcccctccggtatcgtcgaaatcacatcccctaatgtagggactgacggcagggccttgccgggaacacctgtggcctccagccagcctcggtttcaggctttcgccaacggaagtctgctaatcccagatttcggtaagctggaggagggtacatactcgtgccttgccaccaatgagctggggtcagcagaaagttctgtggatgttgcgctcgcaacgcctggcgagggcggcgaagatacgctcgggcggagatttcacgggaaggctgtagagggaaaaggatgctatacggtcgacaacgaagtgcaacctagtgggcccgaggacaacgtggtaataatctatctgagtagagccggcaatccagaggcggccgtagcagagggcgttcccggacagctacctccaggcctcttgctactgggacagagtctacttctatttttctttctgacgagtttctag

SEQ ID NO: 191249 - DNA, 1287 bp, synthetic construct
  misc_feature 1..1287: note = Description of Artificial Sequence: Synthetic coding sequence
  source 1..1287: mol_type = other DNA
atgcaggagctgcacctgctgtggtgggccctgctgctgggcctggcccaggcttgtccggagccgtgcgactgcggtgagaaatatggtttccagattgccgactgtgcctatcgtgatttggagagcgttccgccaggcttccctgccaacgtgacaactctgtccctctccgccaatcggcttccgggactccccgaaggggccttccgcgaagtccccctgcttcaaagcttatggctcgcacacaacgagatccgcactgtggccgctggagctctggctagcctctcccacctgaagtccctggacctgagtcataaccttatctccgacttcgcatggtcggatctgcacaacctgagcgccctgcagctccttaagatggactccaatgaattgacctttatccctcgggacgcttttcgttccctgcgcgcccttcggtctctacagctaaatcacaatagactacataccctggctgaaggaactttcaccccactgactgccctgtcccacctccagatcaatgagaatccttttgattgcacatgcggtattgtttggctgaagacctgggcccttacaactgccgtgtccatcccagaacaagacaacatcgcgtgtacaagtcctcacgtcctcaagggaaccccgctctctcgtctaccgcctcttccatgtagtgctccaagtgtccagctgtcctaccagccctcccaggatggagcggaactgcggccaggcttcgtcctggcactccattgtgatgtcgacggtcaaccagctccccagctgcactggcacattcaaattccttctggaattgtggagataacatcccctaacgtgggtactgatggacgcgcacttcctggaactcccgtggccagttctcaacccagatttcaagcgtttgccaacggcagtctcctgatccctgactttggtaagctggaagaaggtacttactcatgcctcgccaccaacgagctgggcagtgcagagtcatctgtggacgtggccttggcgacccccggtgaaggcggtgaggatacattaggaagaagatttcacggaaaagctgttgagggtaagggatgttacacagttgacaacgaagtgcagcctagtggcccggaggataacgtggttattatttacttgtctcgggccggaaaccctgaggctgccgtcgcggagggtgtgccaggacagttaccccctgggcttcttctgttgggacaaagccttttactgttttttttcctcacttccttttag

SEQ ID NO: 191250 - DNA, 444 bp, synthetic construct
  misc_feature 1..444: note = Description of Artificial Sequence: Synthetic coding sequence
  source 1..444: mol_type = other DNA
atgcaggagctgcacctgctgtggtgggccctgctgctgggcctggcccaggcctgccctgagccctgtgattgtggcgaaaagtatggattccaaattgctgactgtgcttacagggatctggagagtgtgcctccaggatttcccgctaacgtcactacattaagcttgtcggcaaataggctgcctgggctgccagaaggagctttccgggaagtgccacttctgcaatccctgtggctagctcacaatgagatccgcaccgtcgctgctggcgccttagcatcactgagccacctgaaatctctagatctcagccacaatctcattagtgattttgcatggtctgacctgcacaacctctcggcccttcagctgctgaagatggattccaacgagctgacctttatcccacgggatgctttcagaagtttgcgcgcctag

SEQ ID NO: 191251 - DNA, 552 bp, synthetic construct
  misc_feature 1..552: note = Description of Artificial Sequence: Synthetic coding sequence
  source 1..552: mol_type = other DNA
atgcaggagctgcacctgctgtggtgggccctgctgctgggcctggcccaggcctgccccgaaccttgtgactgcggtgagaagtacgggttccaaattgctgattgcgcctatagggatctcgaatctgtgcctccaggattccctgcaaacgtgaccaccctctcgctctcagctaaccgcctccccggactgccggagggcgcgttcagagaagtcccgctcttgcagagtctttggctggcacataatgagatcaggactgtggctgcgggtgcgctcgccagtctatcccatctaaagtccctggatctctcccataacctgataagcgattttgcatggagtgatctgcacaacctttcagccctgcagctgttaaaaatggattccaatgagctgactttcattccacgagatgcattccgaagtcttcgagcactgaggtcactacagctgaatcataaccgcttacatacactcgcagaagggacctttaccccattgaccgccctatcccacctgcagatcaacgagaatcccttcgattag

SEQ ID NO: 191252 - DNA, 2238 bp, synthetic construct
  misc_feature 1..2238: note = Description of Artificial Sequence: Synthetic coding sequence
  source 1..2238: mol_type = other DNA
atgttccccctgcgggccctgtggctggtgtgggccctgctgggcgttgcgggatcgtgtccagagccttgtgcttgtgttgacaagtacgcccatcagtttgctgattgcgcatacaaggaactgagagaagtcccagagggactcccagccaatgtgaccaccctctcattatcagctaataaaattactgttctgcgccgaggagcgttcgctgacgttactcaggtgacctccctgtggctcgcccacaacgaagtgcggactgttgagcctggagcattagcagtactctcacaactcaagaacctggatttgtcacacaattttatttcctcatttccttggtctgacctgcggaaccttagtgcgctgcagctcctcaaaatgaatcacaatagactagggagcctacctcgcgacgccctcggggcactgccagacttgcgcagtctcagaattaacaataacaggctgaggaccctagctcctggcacgtttgacgccctctccgcactcagccacctccagctctaccacaatccttttcattgcggctgtgggctggtgtggctgcaagcctgggccgcctcaacccgcgtgtccctccctgaacccgactctatcgcttgcgccagtccaccggccttacagggcgtgcccgtatatcgactcccagcactcccctgcgccccaccttcagtacacctcagtgctgaaccacctctggaagcccctgggacgcctctcagggcgggtctggcttttgtcctccactgtatcgctgacggccatccaactcctcgactgcagtggcaactgcaaataccggggggcactgtggtattggaacccccagtgctgagcggggaggacgatggtgtgggcgccgaagaaggagagggggaaggtgatggggatttgctcacacaaacacaggcacagacacccactcctgcccctgcctggccagcccctcccgctacccccagattcctggcactcgcgaacggctccctgttggttcccttgctgtccgccaaggaggccggagtttacacgtgccgtgcacataacgagctcggcgccaactctaccagtattagggtagccgtggcggctacagggccaccgaagcacgcccccggcgcaggcggggaacccgacggacaggcccctactagtgagagaaaatccaccgcgaaaggcagaggtaattctgttcttccttcaaaaccagaaggaaaaattaaggggcaggggctcgccaaagtcagtatcctcggcgagaccgaaacagagcccgaagaggacacctctgaaggcgaggaggccgaagaccaaattttggcagacccagcggaagagcagcgatgcggaaatggggacccatccaggtacgtgagcaaccatgcattcaatcagagtgcagaattaaagccgcatgtctttgaactgggcgtgatcgccctggacgtggctgagagagaggcacgcgtacaactgacacccttggcagcccgatggggccctggccccgggggagctggcggggcacctcgtccaggaagacggcctctgcggctgctgtatttgtgccccgctggtgggggggctgcggtccagtggagcagggtagaggagggtgtcaacgcgtactggttccgagggctgcgacctggcacaaattactccgtgtgtctagctctggccggagaagcctgtcacgtccaagtggtgtttagcaccaaaaaggaactcccttccctattggtgatcgtcgctgtttctgtgttcttgcttgttctggccactgtcccactcctaggagctgcatgctgtcatctgctggccaagcaccctggcaagccctaccggctgattcttcgcccccaggcccctgatcctatggagaaacgtatcgccgccgacttcgaccctcgggcatcctacctagaaagcgagaagtcatatcccgccggaggcgaagccggaggcgaagaaccagaagacgtgcagggggaaggcctggatgaggatgcagaacagggagacccctctggcgacctacagagggaggaaagcctggccgcttgcagtctggtggagagccagtcaaaagctaatcaggaagaatttgaggccggcagtgagtatagcgatcgcttgcccctaggggccgaagccgtgaatattgcacaggaaatcaacgggaattaccggcagactgcgggatag

SEQ ID NO: 191253 - DNA, 1005 bp, synthetic construct
  misc_feature 1..1005: note = Description of Artificial Sequence: Synthetic coding sequence
  source 1..1005: mol_type = other DNA
atgttccccctgcgggccctgtggctggtgtgggccctgctgggcgtggcggggtcctgccccgaaccatgcgcgtgcgtggacaaatatgctcatcagttcgctgattgtgcctataaagaactgagagaggtgcccgagggcctgcccgccaacgttacgactttgtccttatcagccaacaagatcactgtcctgcgccgcggggcctttgcggacgttacccaggttacaagcctgtggctagcccataacgaggtgcgaaccgtggaaccgggcgcacttgccgtgttgtcccagcttaagaacttggacttgtcccataactttatatcgagtttcccatggtccgaccttcgaaacctttctgccctgcagttgctgaaaatgaatcacaacagactgggctcactgccacgagatgctttgggcgcccttcctgatctgcgttcactgcgaataaataacaacaggctggctggagaggcctgtcacgtccaagttgtgtttagtactaagaaggagctaccatctctcctcgttattgtagcagtttccgtgtttctgcttgtgctggctactgtgccattactgggcgcagcatgttgccatttacttgcaaagcatccggggaagccctatagactgatcctgcggccccaagctccagaccctatggagaaacgtattgctgcagattttgatcctagggcgtcttacctcgagtcagaaaaaagctacccagcaggaggcgaagccgggggtgaggagcctgaagacgtacagggggagggccttgatgaggacgctgagcagggcgacccttccggtgatctgcaaagggaggagtcactggctgcatgcagcctagtggagtcccagtcgaaggccaaccaggaggaatttgaagccggcagtgaatattccgatagattgcctttgggcgcagaagccgtgaacattgcacaggaaattaatggtaattaccggcagacagccgggtag

SEQ ID NO: 191254 - DNA, 2238 bp, synthetic construct
  misc_feature 1..2238: note = Description of Artificial Sequence: Synthetic coding sequence
  source 1..2238: mol_type = other DNA
atgttccccctgcgggccctgtggctggtgtgggccctgctgggcgtcgctggatcgtgtcctgagccatgcgcctgtgtggataagtacgcccaccagtttgcggattgtgcttataaggaacttagggaggtgcccgaagggctgcccgccaatgtgactacactgtcactgagcgcaaataaaataactgttttgagacgcggagccttcgccgacgtcactcaggtcacatcactgtggctggcccacaatgaggtgcgaactgtcgagcccggtgccctcgcggtcctctcacagctgaaaaatttggatctgtcccataatttcatctccagtttcccctggtctgacctgcgaaatttgagcgcccttcaactgctgaaaatgaaccacaacaggctcggctccctccctcgcgacgcactgggcgcccttcccgacctgcggagcctgaggattaacaacaatcgcctaaggactctcgcaccggggacgtttgatgccctgtccgccctgtcccacctgcagctgtatcacaaccccttccactgcggctgtgggctggtgtggctccaggcttgggccgcctccactcgggtaagccttcctgagcccgactccatcgcttgtgcctctcctccagctcttcagggagtgccggtatacaggctgcctgctttaccatgtgcaccaccttccgtacacctctcagcggaaccccccctcgaggcccccggaacaccactgcgggctggcctggccttcgtactacactgcattgccgatggacaccctacccctcgactgcagtggcagcttcagattcccggtggtactgtggtccttgagcctccggttttaagcggcgaggacgacggggtgggcgctgaagaaggagagggtgaaggtgatggagacctcctaacccagacccaggcccagacaccgacccccgccccagcctggcctgccccaccggccacaccgagatttctcgcactggctaacggcagtctgctcgttcctctgctgtccgctaaggaggctggtgtgtacacctgtagagcacataacgaactgggcgctaactcaacttccattcgcgtcgccgtcgcagccactggacctcccaagcatgcaccaggcgcaggaggggaacccgacggtcaggccccaactagcgagaggaagtcaactgctaaaggacggggtaattccgtacttccttccaaaccagagggcaagataaaggggcagggattagctaaggtgagtatcctgggcgaaacagaaacagaaccagaggaggacacatctgaaggcgaggaggcagaggaccagatactcgccgaccctgccgaagaacagaggtgcggaaatggggaccctagccgctatgtttccaatcacgcatttaatcaatcagccgagctgaagcctcacgtttttgagcttggcgtgatagcactcgatgtggctgagagagaggctagagtacagcttacaccgctggccgcacgctgggggcctggaccgggcggcgctgggggagcaccccgccctggccgccgtccccttaggctgttgtacttgtgtcctgccggaggtggggcagccgttcagtggagccgcgtagaagagggggtcaatgcttactggttccgcggcctacgccccgggactaactatagcgtttgcttggcacttgctggagaagcctgtcacgtccaggttgtctttagtactaaaaaggaacttccaagcttgctcgtaatagtggcagtctccgtgtttctcctagtacttgcaactgtacctttgcttggagctgcctgctgccacctccttgcaaagcacccaggtaaaccctataggctgatcctccgacctcaagctccagacccgatggaaaagaggatcgccgcagacttcgaccctagggcctcatatttagaaagcgagaagtcttaccccgccggaggagaggccggaggcgaggaacccgaggacgtccaaggcgaggggctggacgaggacgcagagcaaggggacccgtcaggagatttgcaaagggaagaaagcctggccgcatgcagcctagtggaaagccagtcaaaagccaatcaagaagagttcgaagcgggatccgagtattccgatagactccctctgggcgcagaggccgtgaacattgcccaggagatcaacgggaactaccgtcaaacagcgggatag

SEQ ID NO: 191255 - DNA, 2238 bp, synthetic construct
  misc_feature 1..2238: note = Description of Artificial Sequence: Synthetic coding sequence
  source 1..2238: mol_type = other DNA
atgttccccctgcgggccctgtggctggtgtgggccctgctgggcgtcgccgggtcctgccccgagccatgcgcttgtgttgacaagtatgcccatcaatttgcggattgcgcgtataaggagctgcgggaagtcccagaaggcttaccagccaatgtgaccacgctgtccctgtccgctaacaaaataactgttttgcgccggggtgccttcgccgacgtcacacaggtgacaagtctctggctggcacataatgaagtgagaaccgtggagcccggggccttagccgttcttagtcagctgaagaacctcgatctctcccacaatttcatctcctctttcccctggtctgatttacgcaacctgagcgcactacaattactgaagatgaaccacaatcgactaggcagtttgcctcgggacgccctcggtgcactcccagatctaaggagccttcgcataaataacaaccgattaaggacattggctcctggaacatttgacgccctctccgctctgtcacacctacagctctaccataaccctttccactgtgggtgtgggctggtctggctgcaggcctgggccgcttcaacacgcgtgtctctgccggagcccgactctatcgcatgcgcctctcctccggcactgcagggggtgccggtgtatcgtctacctgctctgccgtgcgctccaccatcagtgcatctttctgccgagccaccattggaggcccctggcacacctttgagggcaggcctggccttcgttttacactgtattgctgacggacacccgacccccaggctgcaatggcaattacaaattcccgggggtacagtcgtcctggagccaccagtgctttctggagaggacgacggggttggagccgaggagggcgaaggggagggagacggtgacctacttacacagacccaggcgcagactcccactcctgcccccgcctggccggccccgcccgccacgccaaggttcttggccctcgctaacggaagccttcttgtgccgcttctttcagctaaggaagcaggggtttatacatgtcgtgcgcataacgagctcggtgccaacagcacaagcatacgggttgccgtggccgcaacgggcccacccaaacacgccccaggggctggtggtgagcccgatggtcaggcaccaacatcagaacgtaaatcaaccgctaagggaagaggaaattctgttctgccatctaagcccgagggcaaaattaagggacagggcctggccaaagtgtctattcttggcgagacagaaacggaaccagaggaagacacaagcgagggtgaggaggcggaggatcagattctcgctgacccagcagaagagcagcgctgcggcaacggcgatccgtcacggtacgtctccaaccacgccttcaatcagagtgctgagcttaaacctcatgtgtttgagctcggagtgatagctttggacgtggcggaacgtgaggctcgggttcaactgacacccctagctgcgaggtgggggcccgggcctggaggcgctggaggagcaccacgccctgggagacgcccactccgtctcctctatctctgccccgcagggggcggagcagctgtgcagtggtcacgggtggaggaaggagtgaacgcttactggttcagggggcttagacccggcacaaactatagcgtgtgcctcgccttggcgggcgaggcgtgtcatgtgcaagtggtgttcagtaccaaaaaggaactgccctcactgttagtgattgtagccgtatctgtattcttactggtattagcaacagtccccttgctcggcgcagcttgctgtcaccttctggctaaacatccagggaagccatataggctcatattgagaccccaagcgccagaccccatggagaaacgaatcgccgccgattttgaccccagggcaagctaccttgagtccgagaaatcctatcctgccggcggagaagcgggaggtgaggaaccagaagatgtgcagggcgagggcctggatgaggatgcggaacagggagacccctcgggcgacttgcagagggaggagagcctggccgcatgctccctagtcgagtcccagagtaaggccaatcaggaagagttcgaagccggttccgaatacagcgatcggctgccccttggggcagaggcagtgaatattgcccaagagataaatggtaattacaggcagaccgccggatag

SEQ ID NO: 191256 - DNA, 2238 bp, synthetic construct
  misc_feature 1..2238: note = Description of Artificial Sequence: Synthetic coding sequence
  source 1..2238: mol_type = other DNA
atgttccccctgcgggccctgtggctggtgtgggccctgctgggcgtggccggttcatgtccagagccttgtgcctgtgttgataagtatgcacatcagtttgccgactgcgcctacaaggagctgagagaagtgcccgagggcctacctgcaaatgtgactacgttaagtctgagcgccaacaaaatcaccgtgctgcgaaggggcgcttttgcagacgttacccaagtaaccagcctgtggcttgcccataacgaggtgaggaccgttgagcccggcgcccttgccgtcctctctcagttgaaaaatctcgacctcagtcataacttcatctctagcttcccttggagcgacctaagaaatttgtccgccttacagctgctcaagatgaaccacaaccgcctggggagcctgccccgtgacgcgctgggagcactgccagacctgcgatcattgcgaataaacaacaatagactgcgcaccttagcccctgggacttttgacgcactgagcgcgctctcccatctgcagttgtatcacaacccatttcattgtggatgtggactcgtgtggctgcaggcatgggccgcttcaaccagagtatcattgccagaacccgattccatcgcgtgcgcctccccacccgctctacagggcgtcccagtttatcgcctgcccgccctcccttgtgcacctcccagtgtgcatctgtctgcggaacctcctctggaggcccccggcacccccctgcgtgctggcttagccttcgtgctccattgtatcgcggatgggcatcccactcctcgcctgcagtggcaactgcagatccctggcggtacagtggtgctagaaccacccgtgcttagcggagaagacgacggagtgggtgctgaggagggtgagggggaaggtgacggcgacctgctcacccagactcaggcccagactccaaccccggccccggcatggcccgctccaccagccacaccgaggtttctggctctagctaacggatctctgttagtgccgctcctgagcgccaaggaagccggagtgtacacctgtcgggcccacaatgagctgggtgctaatagcacctcgatacgcgtcgccgtggccgctacgggtccacctaaacacgcccccggcgccggaggcgagcctgacggacaggcccccacgtctgaaaggaaatcgacggccaaagggcgaggtaacagcgtgcttccttccaagccagaaggcaagatcaaaggccagggcctggcaaaagtaagcatcttgggcgagaccgagacggagcccgaggaggacacctcagagggagaggaggcagaagaccagattctggccgaccctgctgaagagcagcggtgtgggaatggcgacccctctcggtatgtaagcaaccacgctttcaaccaatcagccgaactgaagccccacgtattcgaactaggagtcatcgcactggacgttgccgagagagaagctcgcgtccagctgaccccgctcgctgcccgctggggccccggcccggggggagccgggggcgcccctcgacctgggaggcggccacttagactcttatatttgtgccctgccggtggtggtgcagccgtacagtggtcacgcgtggaagagggtgtcaatgcttattggttcagggggctccggcccgggaccaactacagcgtttgtctggcgctggctggagaggcttgtcatgtgcaggtggttttcagcacaaaaaaggaattgcccagtctcttagtcatagtggccgtgagtgtgttcctgctcgttctggctactgtcccactgctaggcgccgcttgttgccacctactcgccaaacacccgggaaagccatatagactaatcctccgacctcaagcgcccgatccgatggagaaacgaattgccgctgacttcgacccgcgcgcttcatatctggaaagtgagaaatcctaccccgctggaggagaggcaggcggagaagagccagaagatgtgcagggtgagggattggacgaggacgccgaacagggagatccatctggcgatctgcagcgggaggaaagtttagcagcatgcagcctagttgagtcacagtccaaggctaaccaggaagagtttgaagccggatcagagtattccgaccgtctgcctctgggcgccgaggcggtgaacattgcacaggaaatcaatgggaattaccgacagaccgcaggctag

SEQ ID NO: 191257 - DNA, 2238 bp, synthetic construct
  misc_feature 1..2238: note = Description of Artificial Sequence: Synthetic coding sequence
  source 1..2238: mol_type = other DNA
atgttccccctgcgggccctgtggctggtgtgggccctgctgggcgttgccggaagttgccctgagccctgtgcctgtgtggataagtacgctcaccagttcgccgactgcgcttataaagaacttagagaagtcccggagggtctcccggccaatgtcacaacccttagtttgtctgcgaacaagatcacagtgttgagacgcggcgccttcgccgatgttacgcaggtaacaagtttatggctggcacacaatgaagttcggactgttgaaccgggtgcgctagccgtactgtctcagctgaaaaatctggacctgagtcataacttcatttcttcttttccctggagcgatctcaggaacttgtctgcacttcagttactgaagatgaaccataatcggctgggaagccttcctcgcgacgcactcggcgcgcttccagatctccgatctttgcgcatcaacaacaaccggctgcgaacactcgctccagggacattcgatgccctgagtgccttatctcacctgcagctgtatcacaacccctttcattgcggatgtggactcgtgtggctgcaagcctgggcagcatctacccgagtatccctgcccgaacctgattccattgcctgcgcgagccctcccgcactccaaggcgtgccagtgtataggctgccagcccttccttgcgctccgccatcagtgcacctctctgctgaaccaccactggaggcccctggtaccccgctccgggcgggcctcgcattcgtgctccattgcatcgccgatggacaccccactcctaggctgcagtggcaattacagatcccaggggggacagttgtgttagagccaccggtgctgtctggcgaagacgatggggtcggggccgaagaaggtgaaggcgagggtgatggagatctgttgactcagacacaggctcagacccctacccctgccccagcatggcccgctcctccggcaacacctcgcttccttgctctggccaacggctctctgctagtccccctcctaagcgccaaggaagccggagtgtatacatgtagggcacacaatgaacttggtgctaacagcacgtctatccgggttgcggtggccgcaactggtcctcctaaacacgctccgggggccggcggcgagcccgatggtcaggccccaacttctgaacggaagtccaccgccaaggggaggggaaattctgtccttcctagtaaaccagaaggaaagatcaagggccaaggactggccaaggtaagcattctcggcgagacagaaacggagcccgaggaggacacaagcgaaggggaagaggcggaagaccagattttggcagaccctgcagaagaacagaggtgcggcaatggtgatccctccagatacgtcagtaaccatgcctttaatcagtccgctgaactgaaacctcatgtcttcgagttgggagtaatcgccctggacgtggccgaacgtgaagcccgagtgcaactgactcctctagctgcaagatggggacccgggccagggggcgctggaggagcccctcgtcctggccggcgccctcttaggctgctctacctgtgtccagcggggggaggagccgcagtgcaatggtctcgcgtcgaagagggcgtgaatgcttactggtttagaggcctgcgccctggaacaaattattctgtgtgcctggcgctggccggggaagcctgccatgttcaggtggtgttctcaacaaagaaagaactcccatcgttgttagtgatcgtggccgttagtgtgtttcttctcgtcttagcgactgtgcccctgcttggggccgcatgttgccatttgctggccaaacacccaggtaaaccatatcgcctaattctcaggccccaggctccagatcctatggagaagcgaatcgccgctgattttgatccacgggcaagctatctggagagtgaaaaatcctaccctgcgggcggtgaggccggtggggaagaaccggaggacgtgcaaggtgaaggcctggatgaggacgcagaacagggagatccttccggagacttgcagcgcgaggagtcgctggctgcctgttccttggttgagtcacaaagtaaagccaaccaagaagaattcgaggcgggatctgagtattcagatcggcttccactcggagctgaagctgtcaacatcgcccaggaaataaatggcaactacaggcagaccgccgggtag

SEQ ID NO: 191258 - DNA, 4011 bp, synthetic construct
  misc_feature 1..4011: note = Description of Artificial Sequence: Synthetic coding sequence
  source 1..4011: mol_type = other DNA
atgaccctggaccggcccggcgagggcgccaccatgctgaagaccttcactgttctcctcttctgtatccgtatgagcctgggaatgacaagtatcgtaatggatccccagcctgaattgtggatagagtccaactatcctcaggctccctgggaaaatatcacgctctggtgtaggtctcccagtagaatctctagtaagtttctgctgctgaaggacaagacacaaatgacatggatccgaccctcccacaaaactttccaggttagcttcttaattggcgcgctaaccgagtccaacgctggattatataggtgctgctactggaaagagacaggatggtccaagccctcaaaggtgcttgagctggaagcccctggtcaactccccaagcccatcttctggatccaggcagaaactcccgccctgcccgggtgcaacgtcaacatcctttgtcacggttggctgcaggacctggtattcatgctgtttaaagaaggttacgctgaacccgtcgactaccaagtgcctactgggactatggccatcttttcgattgataatttgactcctgaggacgagggagtgtatatctgtcggacacacatccagatgttgcccaccctgtggtcggaaccatcgaaccccctcaagctagttgtcgcaggactctaccccaaacccacacttacggcccatcctggacctatcatggcacctggggaatctctcaatctccgttgccagggtccaatttacgggatgacctttgctctgatgcgcgttgaagatctggagaaaagcttctaccacaaaaaaactattaaaaatgaggccaatttcttctttcagtccctaaagattcaggacaccgggcactacctctgtttctactatgacgcttcctaccggggttctctactttctgatgtactgaaaatctgggtgactgataccttcccgaagacttggctcttagcccggccatctgcggtagttcaaatggggcagaacgtgtcactgcgatgccgaggcccggtggatggcgtgggcctcgccctgtataagaaaggcgaggataagccactacaattcctagatgccaccagtattgatgacaatacaagcttttttttgaacaatgtgacctactccgatacgggcatttactcatgccattatctgctgacctggaagaccagcatccgaatgccctcacacaataccgtagagcttatggtggtggataaaccacccaaacctagtctctcagcatggccctccaccgtgttcaaactggggaaggctataacactccaatgtcgcgtgagtcatcccgtgctcgagtttagcctggaatgggaagagagggaaacgttccaaaaattttctgtgaatggggattttattatctcaaacgttgacggaaagggcaccgggacttactcttgtagctaccgcgtcgagacacatcctaacatctggagccatcgcagtgaacctctgaaactcatggggcccgctgggtacctgacatggaattatgtgctgaacgaggctatccggctgtcccttatcatgcagctcgtcgctctgcttttagtcgtcctgtggatcagatggaaatgccggcgtttgcgcattagagaagcttggctcctcggaacagcccagggcgttactatgctgtttatcgtgacggctcttctttgctgtggcttatgtaatggagttttgattgaagagaccgaaatcgtcatgcccacaccaaagcccgagctttgggccgagactaacttcccgctggcaccttggaaaaatctaacactgtggtgccgcagcccatcagggtccacaaaggagttcgtgcttctgaaagatggcacaggctggattgctaccagacccgcttctgaacaggtgcgggccgcattcccgctcggcgcacttactcagagccataccggatcctaccattgtcactcctgggaggagatggccgtatctgagccttccgaggcactggaattagtagggactgatatactgccaaagcccgttatttccgcgagcccgaccattcgcggccaggaactgcagttaaggtgtaagggctggctggcgggcatgggattcgcgctatataaagagggcgagcaggagccggtgcaacagttaggggcggtcggcagggaggcatttttcaccattcagaggatggaagacaaggatgagggtaactacagttgccggacacatacagaaaagagaccattcaagtggtctgaaccctccgagcctctcgagctggtcatcaaagaaatgtaccccaaaccattcttcaaaacttgggcttctcccgtggtgacacccggagcccgcgtgacattcaactgctcaacccctcaccaacacatgtctttcatcctgtacaaggacggtagcgagatcgccagctctgaccgcagctgggcttcacccggagcttcagccgctcacttcctgattatctccgtcggcatcggagatggtgggaactattcctgcaggtactacgacttttctatttggtctgaacctagtgaccccgtggagttagttgtgaccgaattttatcccaagcctacacttcttgcccaacccggccctgtagtgttcccagggaaatccgtcattctccgctgccagggtacttttcagggtatgcgtttcgccctgctccaggagggagcgcatgtcccgctccagttcaggagcgtatccggaaactccgccgacttcttgttgcacaccgtcggtgccgaggacagcggcaattatagctgtatatattacgagaccaccatgtctaaccgtggctcttacctgtccatgccgctgatgatttgggtaacagacacattccctaagccttggctgttcgctgaaccatctagtgtcgtgccgatgggacagaacgtcactctctggtgccggggcccagtgcatggcgtggggtacatcctccacaaagaaggggaggctacttcaatgcagctgtgggggtctacgagcaatgacggggcctttccgattactaatattagcggtactagtatggggcgctactcttgctgctaccatcctgactggacctcatccattaaaatccagccctctaacactttggaacttctcgtcactggccttctcccaaagcctagcctactggcgcagccaggcccaatggtcgccccaggtgagaacatgaccctgcaatgtcagggcgagctgccagattcaacgtttgtgctgctcaaagaaggtgctcaagagcccctggagcagcagaggcctagcgggtaccgggccgacttctggatgcccgccgtaagaggagaggatagcggaatctactcttgtgtgtactatctggacagcacgccatttgctgcatcaaaccactccgatagccttgaaatttgggtaacagacaagccccctaaacccagtctgtcggcctggccctctacaatgttcaagctgggcaaagatatcacccttcagtgccgcggaccacttcccggcgtagagtttgtgttggagcacgacggtgaggaggcccctcagcagtttagtgaggatggagattttgtgatcaacaatgtagaaggaaagggtattgggaattattcttgctcataccgtttacaagcataccccgatatctggtctgaaccatcggaccccctggagctggttggagccgctggccctgtcgcccaggaatgcaccgtgggcaacattgttaggtcctctctgatagtggtggtagtcgtggctctgggcgtcgttttagcaattgaatggaagaagtggcccagacttagaaccagagggtcagagacagatggcagagatcagacaatagcactcgaggagtgcaatcaagaaggcgagccaggcacccctgctaacagccccagtagcacttcacagcgcattagcgttgagctccccgtccctatctag

SEQ ID NO: 191259 - DNA, 729 bp, synthetic construct
  misc_feature 1..729: note = Description of Artificial Sequence: Synthetic coding sequence
  source 1..729: mol_type = other DNA
atgaccctggaccggcccggcgagggcgccaccatgctgaagacctttactgtcctgttgttttgtattcgaatgtccttgggcatgacatctatcgtgatggatccccagccagaattatggatagagagtaattaccctcaggccccctgggaaaatatcacgctttggtgtagatcaccatcccggatcagctctaaattccttctcttgaaggataagacccagatgacctggatccgaccgtcgcataagaccttccaggtgtcttttcttattggagcactgacggagtctaatgccgggttatatcgctgctgctactggaaagaaacgggttggtcaaagccctccaaggtcttggagctcgaggcacccgggcagttaccaaagcctatcttctggattcaggcggagactccagccctccctggctgcaatgtaaatattctgtgccatgggtggctgcaggacctggtgttcatgctatttaaggagggctacgccgagccagtggactaccaggtccccaccggcacgatggcaatcttctccattgataatttgactcctgaggacgagggagtctatatctgcagaactcacatacagatgctccccacgttgtggtctgagccatcaaatcctctcaagttggttgtagcaggtggctgtggatatggctgttggcatctggccattgtggtcccaggtattatggcaggatag

SEQ ID NO: 191260 - DNA, 729 bp, synthetic construct
  misc_feature 1..729: note = Description of Artificial Sequence: Synthetic coding sequence
  source 1..729: mol_type = other DNA
atgaccctggaccggcccggcgagggcgccaccatgctgaagaccttcaccgtcctgctgttctgcatcagaatgagtctcggcatgacctccattgtaatggatcctcagccagagctgtggatcgaaagtaactacccgcaggcaccttgggaaaacattaccctgtggtgccgatccccaagccggatcagctcaaaattcctgctgctcaaggataagacccaaatgacctggattagaccttctcacaaaacattccaagtgtcatttctgatcggggcccttaccgaatctaatgcaggtctgtacaggtgttgttattggaaagaaactggttggtcaaaaccttctaaggtgttggaactcgaagcaccagggcagctccccaagcctatcttttggatccaagctgagaccccggcactgcctggatgtaatgtaaacatactgtgccacggctggttacaggatttggtgtttatgctcttcaaggagggttatgctgagccggtcgattatcaagttccgacaggtacaatggcgatcttctccattgataatctgaccccggaggatgaaggcgtttacatctgtcggacgcatatccagatgcttcctactctatggtccgaaccatctaatcctttgaagctagtggtggctggcggatgtgggtacgggtgctggcatctggccattgttgtaccagggattatggcagggtag

SEQ ID NO: 191261 - DNA, 4026 bp, synthetic construct
  misc_feature 1..4026: note = Description of Artificial Sequence: Synthetic coding sequence
  source 1..4026: mol_type = other DNA
atgaccctggaccggcccggcgagggcgccaccatgctgaagacctttactgtgttactgttttgcatcagaatgagccttggaatgacctccatcgtgatggaccctcaacccgagctctggattgagagcaattacccacaggccccgtgggagaacatcactctttggtgtaggtcaccttccagaatctcttcgaagtttctcttactgaaagataaaactcagatgacatggattaggcctagtcataagacttttcaggtctcctttctcatcggggccctgacagaaagtaatgcaggcttgtataggtgctgctactggaaagagacgggttggtccaagccttctaaagtgctggagctggaggcccctggtcagttaccaaagcctatattctggattcaagccgagacgccagcacttccagggtgtaacgtgaacatcctatgtcatggctggctccaggatctagtattcatgctgttcaaagaaggctatgcagagcccgtggactatcaggttcctacgggaacaatggctatcttttccattgacaatcttactcctgaagacgaaggcgtctatatttgccgcacccatatccagatgcttcccacattatggtcggagccatctaacccattgaaactggtagtagcgggactgtatcctaaacctaccctcacagcgcaccctggaccaataatggcccccggtgaatcgctaaatctgcggtgtcaaggtccaatctacgggatgacttttgccctgatgagggtcgaggaccttgagaaatccttttatcataagaagacaatcaaaaatgaagccaatttcttctttcagagccttaaaatacaggatacaggacattacctgtgtttttactacgacgcctcctataggggctctctgctcagcgatgtattaaagatctgggtcactgacactttccccaagacctggctattagctcggcccagcgccgttgtgcagatggggcaaaacgtcagcctgcgctgtagaggtccagtggatggggtggggctggctctctacaagaagggcgaggataagcctctgcagtttctggatgccacctctatcgacgataataccagcttttttctgaataacgtcacatattcagacacggggatctattcctgtcattacctgctgacctggaagacaagcatccggatgccctcccacaataccgtggaactcatggtcgtagacaagcctccaaagccctctttaagcgcgtggcctagcactgtatttaagcttggaaaagctataacactccagtgtcgggtgtcacatccggtgctcgagttctcacttgaatgggaagagcgagagacctttcaaaaatttagtgtcaatggtgattttatcatttccaacgtcgatggaaaagggactgggacctattcctgttcatatcgggtcgaaactcaccccaatatatggagccaccggtccgagcccctcaagctgatgggccccgccgggtatttgacatggaactatgttttgaacgaagccatccggctgtcgctgatcatgcagctggtggctcttcttctggtggtgctgtggattcggtggaagtgcagaagactgagaatcagagaggcgtggctactaggaacggcacaaggtgtgacaatgctgtttatcgtaacggcgttactgtgttgtgccatctccttcgccggactctgtaacggagtactgattgaagagactgagattgtgatgccgacgccaaaaccagagctatgggcagaaaccaatttccccctggctccgtggaagaacctaaccctgtggtgcaggagcccctcaggcagcactaaggagttcgtgctgctcaaagatggcacaggctggattgctactcggccagcctctgagcaggttagagctgccttcccactgggtgccctgacacagtctcacactggtagttaccattgtcattcatgggaagagatggcagtgtctgagccctccgaggccctggagctggtgggaaccgatatcctacccaagcctgtaatcagtgctagtcccactataagaggacaagaactgcagctgcgctgcaagggctggctggctggcatgggcttcgcactgtataaggagggcgagcaggagcccgtgcaacagctgggggccgtcggcagggaggcctttttcactatccagcgtatggaagacaaagatgaggggaactatagttgtcgcactcatacagaaaagcgcccttttaaatggtccgagccaagcgagcccctggagctggtgatcaaggagatgtatccaaaacctttttttaagacctgggccagtcctgtggtgacacctggcgcccgggtaacgttcaactgctcaaccccccatcagcacatgtcgtttatcttatataaggacggaagtgagatcgcaagcagtgatcgaagctgggcttcccccggcgcaagcgctgcgcatttcttgattatctccgtgggcattggagacggcggcaactattcttgccgttactatgatttcagtatctggagcgagccttctgatccagttgaactggtggtgactgagttttatcccaagcctaccctgctcgcccagcctggaccggttgtgttccccgggaagagcgtcatcctacgctgtcagggtacctttcagggaatgcgctttgcgcttttacaggaaggggcacatgtccccctacagttccgatccgtatctggcaactctgccgatttcctgttgcacaccgtgggagctgaggacagcgggaattactcatgcatatactacgaaaccactatgagtaatagaggaagctacctgtcaatgccattgatgatttgggtaaccgacacctttcctaaaccctggctattcgcagagccctcctcagtcgtgcccatgggtcagaatgtgacactgtggtgtaggggtccagtgcacggcgtgggctacattttacacaaggagggagaagcaacgtccatgcagctttggggatctactagtaatgacggagccttccctatcacaaatatcagcggcacctccatgggcagatattcatgttgttaccaccccgattggacatccagcatcaagattcaacctagcaatacgcttgagctgctggttacgggtctgcttcccaagccttctcttctggcccagcctggacccatggtggccccgggcgagaatatgaccctgcaatgtcagggggagctaccagactctacctttgtcttgctaaaggagggtgctcaggaacctctggagcagcagagaccgtctggataccgggccgacttctggatgcccgctgtcaggggcgaagatagtggaatttacagctgtgtatactatctcgacagcactcctttcgccgcttcaaaccattcagactctctcgagatttgggtaaccgacaagccccctaagccaagcctgtcagcctggccctccacaatgttcaagttagggaaagacattacactgcaatgtcggggaccactacccggcgtggagttcgtgttggaacatgacggcgaggaggcccctcaacagttctccgaggacggggattttgtcattaataacgtggagggaaaaggcatcggcaactattcatgcagctataggcttcaagcttatcccgacatttggtcggaaccatctgatcctttggaactcgtcggcgctgcgggccctgtggcccaggaatgcactgtaggtaatatagtccggtcttcactaattgtggtagtcgtcgttgcattgggggtggttctggcaattgagtggaagaaatggccccggcttcggaccagagggagtgaaacagatggccgggaccagactattgcactagaggaatgcaaccaggaaggtgagcctggtacgcctgctaattccccatccagcactagccagcggatcagcgtggagctgcccgtgccaatttag

SEQ ID NO: 191262 - DNA, 3984 bp, synthetic construct
  misc_feature 1..3984: note = Description of Artificial Sequence: Synthetic coding sequence
  source 1..3984: mol_type = other DNA
atgaccctggaccggcccggcgagggcgccaccatgctgaagaccttcacggtcctcctcttttgtatactcatggacccacagcctgagctctggatagagtccaactacccccaggccccttgggaaaatatcacactgtggtgcagaagcccgagcaggataagcagtaaatttttactgcttaaggacaaaactcagatgacttggattcggccgtctcataaaacgtttcaagtcagttttctgattggtgccctgaccgagtccaatgcgggcttgtaccgctgctgttactggaaggaaaccggctggtcgaagccttcaaaagtcttagagctagaagctcccggtcagctccccaaacctattttctggatccaggccgagacaccagccctaccaggctgtaacgtgaatattctgtgccacggttggctccaggacctggtattcatgctctttaaggagggttacgcggagcctgtggactaccaggtgcccactgggacgatggcaatattttcaattgataacttgacccctgaggatgagggagtgtacatctgccggacgcacatccagatgctccccactctgtggagcgagccgtctaaccccttaaagcttgtggtggcgggactctacccaaagccgaccctaacagcacacccaggaccaatcatggcccccggtgaatcactcaacttaagatgtcaggggcctatctacggcatgacatttgcattgatgagggtggaggacctggaaaaatcattttatcacaaaaagacgattaagaatgaggccaatttttttttccagtccctgaagatacaagacacggggcattacctctgcttctattacgatgcttcttatcgcggatccttgctttccgacgtgttgaagatctgggttacagatacatttcctaagacgtggctactggcaagaccctctgctgtagttcagatgggtcagaacgtgtcactccgctgtcggggccctgttgacggtgttggtcttgcgctgtataaaaaaggcgaggacaagcctctgcagttccttgacgccacaagcatcgatgataacacatcctttttcctgaataacgtgacttactccgacactggaatttattcatgccattatctcctgacctggaagacaagcatccgaatgccgtctcacaataccgtagagttaatggtcgtggataaaccccctaagcccagcctttcagcctggccttccaccgtcttcaagctgggcaaagctatcacactccagtgtcgtgtcagccaccctgtccttgagttctctctagaatgggaggaacgcgaaaccttccaaaagttctctgttaatggcgattttataatctcgaacgtcgacggcaagggcacaggaacctactcctgctcctatcgcgttgagacacaccctaatatatggagccacaggtccgagcctttaaaactgatggggcctgcaggttacctaacctggaattacgtgctgaatgaggcgattcggctgagcctaatcatgcagcttgtggcgctcctcctcgtggtactgtggatcagatggaagtgcagacggcttcgtatcagggaggcgtggttacttggcacagcccagggggtcaccatgctgtttatcgtgactgctctgttgtgttgtggcttgtgcaatggtgttctgattgaagaaacagagattgtgatgcccacacctaaacccgaattatgggccgagaccaacttcccactcgccccttggaagaatcttaccctatggtgcaggagcccaagcggctccacaaaagaattcgtgctgctgaaagatggcaccggctggattgctactcgcccagcctctgagcaagtaagggccgcgttcccacttggcgctctgacccagtcccacacgggctcctatcactgccactcatgggaggaaatggcagtcagtgagcctagcgaggctctcgagcttgttgggactgatatactgcccaaacccgtgattagcgcctcccctacaatacggggacaagagctgcagctgaggtgcaaagggtggctcgctgggatgggattcgccctatacaaggagggtgaacaggaacccgtgcagcagttgggcgctgtgggcagggaggccttttttaccattcagcgcatggaggataaggacgagggcaattacagttgcagaactcacaccgagaaaagaccctttaaatggtcagagccaagtgagcctctggagctggtgattaaagaaatgtacccaaaacccttttttaaaacctgggccagtcctgtggtcaccccgggcgctagagtgacctttaattgctccactccccaccagcacatgtctttcatcctgtacaaggacggatccgaaattgcttcttcggacagaagctgggctagtcccggagccagcgcagctcattttttaattatttctgtaggaataggcgatggcggcaattattcttgccgttactatgacttttccatctggtccgaaccctccgatccagtggagctggtagtaacagaattttaccccaaaccaacactgcttgcacagccgggaccggtggtgtttcccgggaaatccgtgatactgcggtgtcaggggacctttcaggggatgcggttcgccctgctgcaggagggcgctcatgtccccctgcagtttcgttccgtgagtggcaactctgcggattttttgttgcacacagtcggggccgaggactctggcaactactcatgtatctactatgaaaccactatgtctaaccggggctcttaccttagcatgcctctgatgatttgggtgacagacaccttccccaaaccgtggttgtttgccgagcctagttctgtggttcctatggggcagaacgtgacactatggtgtagaggtccggtgcatggtgtgggttacattcttcacaaggaaggagaggcgaccagtatgcaattgtggggctccacatcgaacgacggcgctttccccattactaatatttcgggaacttcaatgggccgatattcctgttgttatcacccagactggacttcatcaataaaaatacagccgtcgaacaccctggaactgctggtgaccgggttgttgcctaagccgtcactcctcgcacagcccggcccgatggtggcaccgggcgaaaatatgaccctacagtgtcagggtgagcttcctgattcaacatttgtgctgctgaaggagggcgcccaggagcccctcgaacagcagagaccttcaggatatcgggctgatttctggatgccagccgtgcggggcgaggactctgggatttatagctgcgtctactatttggactcaactccatttgcagcttccaatcactcagacagtttagagatctgggtgacagacaagcctcccaagccatcgctgtccgcatggccatcaacgatgtttaaattagggaaggatatcacacttcagtgcaggggtccacttccaggagtcgagttcgtcctcgaacacgacggagaggaagcccctcagcagttttcagaagatggcgactttgtcattaataacgtggagggaaaaggcataggtaactactcatgcagctatagacttcaggcctatccggatatctggagcgaaccctcagacccactcgaactggtgggcgccgccgggccggtcgctcaagagtgcacagtagggaacatcgtcagatcaagcctaatagttgtggtggtggttgcactaggcgtagtgctcgctatagaatggaagaagtggccgcggctaaggacccggggcagcgaaaccgatgggagggaccagactattgcactggaggaatgcaaccaggagggagaacccgggaccccagccaactccccttcatctacgtcccagaggattagtgttgagctccctgtgccaatatag

SEQ ID NO: 191263 - DNA, 3984 bp, synthetic construct
  misc_feature 1..3984: note = Description of Artificial Sequence: Synthetic coding sequence
  source 1..3984: mol_type = other DNA
atgaccctggaccggcccggcgagggcgccaccatgctgaagaccttcacagttctgttattctgtatactgatggacccccagcctgaactgtggatagagagtaattatcctcaagcaccatgggagaacatcactctgtggtgtcgctccccaagccgaatcagcagcaaattcctgctgttaaaggataagactcaaatgacgtggattaggcccagccataaaacatttcaggtttctttcttgatcggcgcactgactgagtctaatgcaggcctgtataggtgctgttattggaaggagacggggtggagcaaacccagtaaggttctcgaactggaggcacccggccagttacctaagccgatcttctggatccaggcagaaacccctgcgctcccaggatgtaacgtgaatatcttgtgccacggatggctccaagacctggtgttcatgcttttcaaagagggctacgccgaaccagtagattaccaggtgcccacaggaacaatggctatcttctccattgacaaccttacaccagaggatgagggggtttacatatgtcggacacacatccagatgctgccaacactgtggagcgagccctcaaaccccctcaagttggtggtcgcgggcctttacccgaagccgaccttgactgctcacccaggccccattatggcgcctggcgaaagcctcaaccttagatgtcaagggcccatctacggaatgacttttgccttaatgcgggtcgaagatctggagaagagcttctaccataagaagactattaagaatgaggcaaactttttctttcagtcgctgaaaatacaagacactgggcattatctgtgcttctattatgatgcaagttaccgcggaagtctgttaagtgatgttctgaagatctgggtgacagatacttttccaaagacttggttgctcgctcgcccttctgctgtagtccagatgggccagaatgtgagtttgcgctgccgcggccccgtggatggagtcggccttgcgctctacaaaaaaggtgaagacaagccactccagtttctcgacgctacctctatcgacgataacacatctttcttcttgaacaacgtcacgtactcggatactggaatatactcttgccactatctgttgacctggaagacttcgatccgtatgccctctcacaacaccgtcgagcttatggtggtcgacaaacctccaaagccatcacttagcgcttggccgagtaccgtatttaagttgggcaaggccatcacactgcagtgtcgtgtgtctcaccccgtcctggagttttccctcgaatgggaggagagagagaccttccagaagttctccgtgaatggcgatttcatcatttctaacgtcgacggaaaaggcaccggaacgtactcatgttcctacagagtcgaaactcatcccaatatttggagccacagaagcgaacctctgaaactaatgggacctgctggctatctgacctggaactatgtacttaatgaagcaatacggttgtccctcataatgcaactggtcgccctgctcctggtggtcctgtggataagatggaaatgtaggcggctccgaattcgggaggcctggctccttggcaccgcccagggagtgacaatgctgttcatcgtgactgccctactttgttgtggcttgtgtaacggcgtgttaatcgaagagactgaaatcgtgatgccgactccaaagccagagttgtgggcagagactaatttccccctcgcaccatggaaaaaccttaccctttggtgcagatctccatcagggtctacgaaggagtttgttcttttgaaagacggtactggttggatcgccacgaggcctgcgagtgaacaggtccgagccgccttcccattaggggcgcttacccaatcccacactgggtcctaccactgccacagttgggaagagatggcagtgtctgagcccagtgaagcccttgagctggtaggtaccgacatccttccaaaacctgttatatcagcgagccctactatccggggccaggagctgcagctacgttgtaaaggctggctcgccggcatgggcttcgcactctataaagagggcgagcaagaacccgtgcagcagttaggagctgttggaagagaagcatttttcacaattcagagaatggaagacaaggacgaaggtaattattcttgcagaacccatacggaaaagcgtccttttaagtggtcagagccatccgagccgctggagttggtgattaaagaaatgtaccctaaacctttttttaagacttgggcctcaccagttgtcacgcccggagcgcgagtgactttcaattgttctacccctcaccagcacatgtcctttatcctttacaaggacggcagcgaaatagcctcttctgatcgtagttgggccagcccaggtgcttcagcagcgcactttctcataattagcgtcggcatcggcgatgggggcaactacagctgtaggtactacgacttctctatttggtccgaacctagcgatccggtggagctggttgtgaccgaattttatcccaaacctacgctcttagcacagccaggaccagtggtatttcctgggaaaagtgtgattctgcggtgccaggggacatttcagggcatgagatttgcgctgctacaggagggggcccatgttcccctgcagttccgttcagtaagtggcaactccgccgatttcctgctgcatactgtgggtgccgaggacagcgggaactactcctgtatatactacgaaactactatgtccaatcgcggaagttacctgagcatgcccttgatgatttgggttaccgacacctttccaaagccctggctgttcgccgaacctagtagcgtcgttcccatgggccagaacgtgaccttatggtgtcggggacctgtgcatggggttgggtacatcctgcacaaggagggggaagctacatctatgcagctgtggggctcaacttctaacgacggtgcctttcctatcaccaacatttctggtacctctatgggacggtattcatgctgttatcacccggattggaccagtagcatcaaaatccaaccatccaataccctggaacttcttgttacaggactgcttcctaagccttcgctccttgcacaacctggccctatggtggctcccggggaaaatatgaccttgcagtgtcagggggaattgcccgatagcaccttcgtcttattaaaagagggtgcccaggagcctctagagcagcagaggccgagtggatatcgagcagatttctggatgcctgcagtgagaggagaagattcgggcatttattcttgtgtatattacctcgacagtacgccgtttgcagccagcaaccattctgattcactcgagatatgggttaccgacaagccccctaagcccagcctttcagcctggccgtctaccatgttcaaactggggaaggatataactctgcagtgccgcgggcccctgcccggtgtggaatttgtcctggagcacgacggtgaggaagccccccagcagtttagcgaggatggagacttcgtaattaacaatgtggagggcaaagggattggaaactattcttgctcgtataggttacaggcttacccagacatctggtctgagccctccgatcctctggagctcgtgggcgcggcgggacccgtagctcaagagtgtaccgtgggcaatattgtgagatcgtcactcatagtcgttgttgtagttgctctgggcgtcgtgctagctatagaatggaagaagtggcctaggctccgaacacgaggctccgagaccgacggtagagaccagacaatcgccttggaggagtgtaatcaggagggcgaacctgggactccagctaacagcccctcttcaacatcccaaagaatctccgtggagctcccagtgcccatttag

SEQ ID NO: 191264 - DNA, 3645 bp, synthetic construct
  misc_feature 1..3645: note = Description of Artificial Sequence: Synthetic coding sequence
  source 1..3645: mol_type = other DNA
atgaagtgcttcttccccgtgctgagctgcctggccgtgctgggcgttgtatctgcacagcggcaggtgaccgtgcaggaaggccccctgtacagaaccgaaggctcacatattacaatttggtgtaacgtctccgggtaccaggggccctcggagcaaaacttccagtggtctatttatctgccatcttcccctgagagagaagtgcagatcgtttcaaccatggattcttcttttccttacgccatatacactcagcgtgtgagggggggaaagatctttatagagcgagtgcagggcaactctaccctgcttcatatcaccgacttacaggcaagagacgcaggcgagtacgaatgccacacccctagcaccgacaaacagtactttggcagctatagtgcgaaaatgaacttagtggtgatacctgacagtctgcagacgaccgccatgcctcagaccctgcacagagttgagcaagacccgcttgaactgacctgcgaagtagcgtctgaaacaatccagcatagtcatctttcagtggcctggcttaggcagaaggtcggtgagaagccggtggaagtcatcagtttgtcacgagactttatgctgcactcaagctccgagtacgcacagcggcagagcctcggcgaagttagattagataagctggggcgcactacatttaggctgacaatttttcatctgcagcccagcgaccagggagagttctactgtgaggctgccgaatggatccaagacccggatggatcctggtatgccatgacacgaaagagaagcgaaggtgcagtggtcaacgtgcagcctacggataaggagttcaccgtgaggctggaaacagaaaagaggcttcacacagtcggggaaccggtggaatttcgctgcatcttagaggctcagaacgtccccgatagatacttcgctgttagctgggcgttcaacagctccctcatcgctactatgggtccaaatgctgttcctgtgttgaactcagagtttgcccaccgagaagctagaggccagctcaaagtggcaaaggagtcagactctgtgttcgttctgaagatataccacctcaggcaggaagatagcgggaaatacaactgcagagtgacggaacgggaaaaaaccgtcacaggagagttcatagacaaagagagtaagcggccgaagaatattcctattattgtgttgcccttaactgataactgggttgtgaaagttcctcagcaccatcagttgctctctcagggacatctcgagtcttccatctccgtcgaggtcgctagcaatgcttccgtgatactggagggggaagaccttagattctcttgttccgtgagaaccgcaggacgacctcagggccggtttagcgttatctggcagttagttgacagacagaatcggcgcagtaatatcatgtggctggaccgtgacggcactgtgcagcccggctctagctattgggagcgcagctcctttgggggggtgcaaatggagcaagtgcaaccaaatagcttttccctaggcatctttaactcccggaaggaagatgagggccagtacgaatgccatgtcaccgagtgggtcagagccgttgacggcgagtggcaaattgttggcgaacggcgagcttctaccccgatatctataactgcactggaaatgggctttgcagtgactgccatctctagaacccctggggtgacttattccgattcctttgatctgcaatgcattataaagcctcactatccagcatgggtgccagtctccgtgacatggcgcttccagcctgtgggcactgtcgaattccatgatttggtaactttcacgcgggacggcggagtgcagtggggagatcgctccagcagcttcagaacgagaacagccattgagaaggcagaaagttcaaacaacgtgcgcctgagcatcagccgcgcatctgacacagaggccggcaaatatcaatgcgttgctgagctctggcggaagaactataacaatacatggaccagacttgcagaaaggactagcaacctgctcgaaataagagtcctccaaccagtgaccaaattacaggtctccaagagcaagcggacactgactctggtagagaacaagcctatacaactgaattgctcagtgaagagccagacaagtcagaactcccacttcgcggtgctctggtatgtgcataagccatccgatgccgacgggaaactgatccttaagaccacgcacaactcagccttcgagtacggaacctatgctgaggaggagggactgagagctcgtctgcagttcgagcgccacgtttctggcgggctgttcagcttaactgtgcagcgggcggaggttagtgacagcgggtcctattactgccacgttgaggaatggctcctttcacccaattatgcatggtataagctggccgaggaggtgagtggtcgaacggaagttactgttaaacaaccggacagcaggctcaggttatcacaggcacaaggaaacctgagtgtgctcgaaacgcgacaggtacaattggaatgcgtggttttaaatagaactagcatcacttctcaactgatggttgagtggtttgtttggaaacctaaccacccagaacgtgagactgtcgcacgtcttagccgggacgccacatttcactatggggaacaggcagcgaagaataatcttaaaggacgcttacatctggagtctccaagccccggggtttaccggctcttcatacagaatgtggcggtgcaggattctgggacctacagttgtcacgtggaggagtggctgccatcaccatcgggcatgtggtataagagggctgaggacactgctggccagaccgcattgacggttatgagacctgacgcatctctacaggtcgacacggtagttccaaacgctaccgtcagtgaaaaagctgcattccagctagactgctcaatcgtatctaggagcagtcaggattccaggtttgcagtcgcttggtacagcctgagaaccaaagccggcggcaagcgttcatccccaggattggaggagcaggaggaggagagggaggaagaggaggaagaggatgacgatgatgacgatgaccccaccgaacgaaccgccctcctcagtgtggggccagatgccgtgttcggacctgagggaagcccctgggaaggtcggttacgcttccaaaggctgtccccggtcctgtaccgactcacagtccttcaggcctcccctcaggacaccggcaattactcttgtcacgtggaggagtggctgcccagcccccaaaaagaatggtacaggctaactgaggaagagtccgcacctattggtatccgcgttcttgacacctcgcccaccctgcagagcatcatctgttcaaacgacgcccttttctatttcgtttttttctatcccttccctattttcggaattcttatcatcacgatcttactagtcagattcaagtctagaaattcatctaaaaactccgatggtaagaacggagttcccctcttatggatcaaagagccacacctgaactattcgccgacatgtttagagccccccgtcctgtctatccacccaggggctatcgactag

SEQ ID NO: 191265 - DNA, 3645 bp, synthetic construct
  misc_feature 1..3645: note = Description of Artificial Sequence: Synthetic coding sequence
  source 1..3645: mol_type = other DNA
atgaagtgcttcttccccgtgctgagctgcctggccgtgctgggcgtcgtctctgcacaacgccaggtgactgtacaagaaggaccactgtataggaccgaaggctcccatatcaccatctggtgtaacgtttcaggatatcagggcccctccgagcagaactttcagtggagcatctatttaccctcttcacccgaaagggaagtgcagatcgtgtcgacaatggactcatcctttccctacgctatttatacacagagagttcgtggcggcaaaattttcatcgagagggtgcaaggcaacagtactctcttacacatcaccgacctccaggcccgcgatgcgggcgaatacgagtgtcatacaccaagtacagacaagcagtatttcggtagttattccgcgaagatgaacctggttgtgatccctgactcactgcagaccacagcaatgccccagactctccacagagtcgaacaggacccactcgaacttacatgtgaagttgcctccgagaccattcagcatagtcatctgtcggtggcctggttgaggcagaaagtgggagagaaaccagtcgaggtcatcagcctctctagagattttatgcttcactcctcctcggagtatgcccaacgccagtctctgggcgaggtgaggctcgataaattgggccgaaccacctttcgtcttaccattttccatctgcagccctccgaccagggggagttttactgcgaggcggctgaatggattcaggacccagatgggtcatggtacgcgatgacaaggaagcgttctgagggggccgtggttaatgttcagcccactgataaggagtttaccgtgcggttggagactgaaaagcgcttacataccgtgggagaaccagtcgagtttaggtgtatactcgaagctcagaacgtccccgaccgctacttcgcggtgtcttgggctttcaatagtagcctgatcgcgaccatggggcccaacgctgtgccagtgttgaactcagagttcgcccaccgcgaggccagaggccagctgaaagtcgctaaagaatctgactctgtgtttgtgctgaaaatctaccatctgagacaagaggattccggaaaatataattgccgtgtgacagaaagggagaagactgtgactggagagttcatcgataaagagtcaaaaagaccaaagaacatcccaatcatcgtgctgccactgaccgacaattgggttgtgaaagtacctcagcaccaccagctactgagccaggggcatttggaatcatccatcagcgtcgaagtggcctccaacgctagcgtgatattggagggagaggacctgaggttttcttgcagcgtacgtactgcgggacgaccacagggaaggttttcagttatctggcaacttgtggatcgacaaaacagaagatcaaacatcatgtggctcgatcgggatggtaccgttcaacccggatcctcatattgggagaggagcagttttggtggagtgcagatggaacaagtgcagcccaactccttttcactgggtatctttaatagtcggaaggaggatgaaggccagtatgagtgtcatgtgacagagtgggtgagggccgtggacggggagtggcaaatcgttggagagcgaagggcttcaacccccataagcatcaccgccctggagatgggatttgcggtgaccgcaatcagtaggactccaggggtaacgtactccgactcattcgatcttcagtgtattatcaagccacattatcctgcttgggtgcctgtctcagtaacctggaggtttcagccggtgggcactgttgagtttcatgatctggtaacttttacccgggacggcggcgtgcagtggggcgaccgatccagttccttcaggacacgcaccgcgatagaaaaggctgaaagctctaacaatgtccgtttgtctatttcccgggcaagcgacactgaggccgggaagtaccagtgcgtggcggaactgtggaggaagaactataacaacacttggacccgactggccgaacgcacgagcaatttgctcgaaatcagagtgctacagcctgtcacaaagctccaggtgtctaaaagcaagcgaaccctcacgctggtggagaacaaaccaatccaattgaactgttctgttaaaagtcaaacctctcaaaatagccactttgccgtgctgtggtacgtgcataagccatcagacgcagatgggaagctgatcctgaagacaacacataactccgccttcgagtacggtacgtatgctgaggaagaaggcctgcgggcaaggttacagttcgagaggcatgtgagcggaggcttgttttcactgactgtccagcgagccgaagtctccgatagcggatcgtattactgtcatgtagaggagtggctgctaagtccaaactatgcatggtacaagctggctgaagaggtctcaggacgcactgaggtgaccgtgaaacaacctgactctcggttgcgcttgagtcaggcccagggcaacttgtccgtattggaaaccaggcaggtacagctcgaatgtgtcgtcctcaataggacctccatcacctcacaacttatggtggaatggttcgtgtggaagccaaatcaccctgaaagggagacagtggcacgcttatctcgcgatgcaacttttcactacggggaacaggccgctaaaaacaatctaaaaggacgcctgcacctcgagtctccttcccccggtgtgtaccggctgtttatccagaatgtggcagtgcaggattccgggacatactcatgccatgtggaggaatggttaccgtctccctccggcatgtggtataaaagagcagaggatacagctggccagacagcgctcaccgtgatgcgccccgacgcctcgcttcaggttgataccgtggtgccaaacgccactgtttcggagaaggcagcatttcagctggactgttcgatagtgtcccgctcatctcaggactctcgctttgccgtcgcttggtatagtctcaggaccaaagccggagggaaaaggagcagcccaggcctagaagaacaggaggaagagagggaagaggaggaggaggaagacgacgatgatgatgatgatcccaccgagcgcaccgctcttctgtctgttggcccagacgcggtgttcggacccgaaggcagcccctgggaaggcagactgcgatttcagaggctttcccctgtgctctacaggctgacagtcctacaggccagcccccaggataccggcaactattcatgtcatgtggaagagtggcttccatcccctcagaaagaatggtatcggttaacagaggaggagtctgcacccatcggaatacgggttttggacacaagccccacattgcagtccattatttgcagtaatgatgcgttgttctacttcgtgttcttctacccgttcccgatttttggcattctgatcatcacaatattgctagttcgttttaagagtcggaattcctccaaaaacagcgatggaaagaacggtgttcctttgttgtggattaaggagccacacctcaactacagccccacctgtctagagcctcctgtactctccatccatcccggcgccatcgattag

SEQ ID NO: 191266 - DNA, 3585 bp, synthetic construct
  misc_feature 1..3585: note = Description of Artificial Sequence: Synthetic coding sequence
  source 1..3585: mol_type = other DNA
atgaagtgcttcttccccgtgctgagctgcctggccgtgctgggcgtcgtaagtgcccagcgccaggtgacagttcaggaggggcctctctaccgcactgagggttcacatattacgatctggtgtaatgtgagcggatatcagggccccagcgagcagaatttccagtggtcgatttatctgcccagtagccccgagcgcgaagtacagatcgtgtccactatggacagttcattcccttatgctatctacacacagcgcgttcgcggtgggaaaatcttcatcgagcgcgtgcaggggaattccacactcctgcacattacggatctgcaggcccgcgatgcaggagagtacgaatgtcacacgcctagcacggacaagcagtactttgggtcctattctgcaaagatgaacctagtcgtgatcccagacagtctgcagaccactgccatgccgcaaacgttacacagggtagagcaagatcccctggaattgacttgcgaagtggcgtccgagaccatccagcatagtcatttgagcgtggcctggcttcggcagaaggtcggtgaaaaaccagtggaagtgatttcgctctcccgcgatttcatgctgcactctagcagcgaatacgctcagcgacagagcctgggtgaagtccgtctcgacaagctcggcagaacaacattccgcctgactatctttcacctgcagccttcagatcagggtgaattttattgtgaagccgctgaatggattcaggaccctgacgggtcatggtatgcaatgacccggaagcgatccgaaggagcggttgtgaatgtccagcccacggataaagaattcactgtgagactggagactgaaaaaaggctgcacacagtgggtgagccggtggagttccgatgcatattggaggcgcagaacgtcccagaccgctacttcgccgtgtcctgggcgtttaactccagtcttattgcaacaatgggccccaatgccgtgcctgtactgaactcagagtttgcacatcgcgaagcccgcggccagcttaaggtggcgaaagaatccgactctgttttcgtactgaagatctaccacctgcggcaggaggacagtggcaagtacaactgcagagtgacagagcgcgagaaaaccgttactggggaatttattgacaaggagagcaaacgccctaaaaatatccctatcattgttttgccactcaagtcctcgatttccgtggaggtcgcgtcaaatgcatccgtcatcctggagggagaggatctgagatttagctgctccgttaggacggccggaagaccccagggtaggttctccgtgatctggcagctggtggatcgacagaaccgcaggtccaacatcatgtggctggacagggacgggaccgtccaaccaggcagcagttactgggagagatcttctttcggaggagtacagatggagcaagtgcagcctaatagcttctctctcggcatttttaactctagaaaggaggacgaaggccagtacgagtgtcacgtgactgagtgggtgcgtgctgtggatggagaatggcagatcgtaggggagaggcgggcatctacgcccatttcaattaccgcccttgagatggggtttgcggtaacagccatcagccgtactccgggcgtgacatacagtgactcattcgatctccagtgcattattaaaccacattatcctgcttgggtaccagtaagcgttacctggcggttccagcccgttgggaccgttgaatttcacgatctagtgacctttacacgggatggcggcgtgcagtggggtgacaggtcgtctagctttagaactaggacagccatagagaaggctgagtctagcaataacgtgaggttgtccataagcagggcttcggacactgaagctggaaaataccagtgcgtcgccgagctgtggcgcaaaaactataacaatacctggacgcgcctcgctgaacggacctctaacctgctggaaatccgcgtgttgcagcctgtgaccaaattgcaggtgtctaagagcaagcggacacttactttggtggaaaacaagcccattcagttaaattgtagtgtgaaaagccagacatcgcagaatagccattttgctgtcctgtggtacgtccataaacccagcgacgccgatggaaaattgatactgaaaacaacacacaatagtgctttcgagtatggaacctacgccgaggaagaaggtcttagagcccggctacagttcgaacggcacgtgtcgggagggctttttagcttaacagtgcagcgagccgaggtgagcgattccggtagctattattgtcatgtcgaagagtggctactttcgccgaactacgcttggtataaattagctgaagaggtgagcggccgaacagaggttaccgtcaaacaacctgattcccggttaagactttcacaggctcaggggaacctaagtgtgctggaaacccgtcaggttcagctggaatgcgtggtgctaaaccggacctcgatcacctcccaactaatggtggagtggtttgtgtggaaacccaaccaccctgagcgggagacagttgcacggctttcccgagacgcgacttttcattacggtgagcaagctgctaagaacaacctcaagggccgtctccatctagaatcccccagcccaggggtttaccgcctcttcatccaaaatgtggcagtgcaggactcaggcacctacagttgccatgtggaagagtggctccctagcccctccggtatgtggtacaaaagggcagaggatactgccgggcagactgctttaacagtaatgcgaccggacgcctctctgcaggtagatactgtagtccctaacgctaccgtgtctgagaaggcggccttccagctggactgcagcattgtgagtcgctcatcccaagatagcaggtttgccgtggcctggtatagtttacgaaccaaagccggcgggaaaagaagcagcccgggtctggaagagcaggaggaggaacgcgaagaagaggaggaagaagatgacgatgatgacgacgatcccaccgagcgcaccgcgctactatccgtaggaccagacgcagtcttcggccccgaaggctccccatgggagggaagattacgtttccagcggctctctcccgttctctataggctgactgtcttgcaggcatccccccaggacactggtaattactcgtgccacgtggaggaatggttgccatctccacagaaggaatggtatcggctgacagaagaagaaagtgcccccattggtatcagagtcctggacacatccccaaccttgcagtccatcatatgcagcaatgacgcgttattctattttgtgttcttttaccccttcccaatcttcggcatcctgatcatcacaatactgttggtgcggtttaagagtcggaacagttcaaagaatagcgacggaaagaacggggtaccactcctctggatcaaggagccccatctaaattatagcccaacatgcttagaaccgcccgttctctctatccatcccggcgcaatagattag

SEQ ID NO: 191267 - DNA, 726 bp, synthetic construct
  misc_feature 1..726: note = Description of Artificial Sequence: Synthetic coding sequence
  source 1..726: mol_type = other DNA
atgggcaccgccagccggagcaacatcgcccggcacctgcagaccaacctcatattgttctgcgtaggagccgtgggtgcctgtactctatccgtgacccagccttggtatctggaggtcgattacacccacgaggctgtgacaataaaatgtacatttagcgccacaggatgccccagtgagcagccgacttgtctgtggtttaggtacggggcgcatcagcctgagaatttgtgcctggacggatgcaaatctgaagcagataagtttactgtcagggaggccttgaaagaaaaccaggtgagcctgacagtgaacagggtgacgtcaaatgattcagccatctacatttgcggaatcgctttcccttccgtcccggaggcccgagccaagcagacaggaggcgggactactctggtggtgcgggagattaagttactctccaaagagttaaggagcttcttaacagcgctcgtctcgctgctgtccgtgtacgtgacaggcgtttgtgtagcattcattctgctgagcaagtcaaagagcaatcctctccggaataaggaaatcaaagaggactctcagaagaaaaagtcagccaggcgtatctttcaggagatcgcacaagagctgtaccataaacgccatgtggaaacaaaccagcagtctgaaaaggacaacaatacatatgaaaatcgtagagtgctatccaattatgagagaccgtag

SEQ ID NO: 191268 - DNA, 1842 bp, synthetic construct
  misc_feature 1..1842: note = Description of Artificial Sequence: Synthetic coding sequence
  source 1..1842: mol_type = other DNA
atgggcgccctgcggcccaccctgctgccccccagcctgcccctgctgctgttacttatgctgggcatgggatgctgggcacgcgaagtgttggtccccgagggacccctgtatagagtcgctggaaccgctgtaagtatatcttgtaatgtgacaggctacgaaggtccggcccagcagaactttgagtggttcttatatagaccggaggcccccgacactgctctgggcattgtttccacaaaggacacccagttttcctacgccgtatttaagtcacgagtcgtggccggagaagtgcaggttcagagactgcagggggacgccgtcgtgctcaaaatcgcccgacttcaggcccaggatgccggtatttatgagtgtcatacaccttctacagatacccggtatctgggaagctacagcggtaaggtagagctccgggtcttgccagatgtcttacaggtgagcgctgccccaccgggacccaggggacgccaggcaccaacaagcccaccccgaatgacagtccatgaaggtcaggagcttgccctcgggtgcttggctagaacctctacccagaaacacacacacctggcagtgagcttcggtcgttctgttcctgaggctcccgtgggcaggagtaccttgcaggaagtggttggcatcagatctgacctggccgtcgaggcaggggctccatacgctgagcggctcgctgcgggcgagcttaggttgggcaaagaaggaaccgataggtaccgcatggtggtggggggtgctcaggcgggcgacgcaggcacttaccactgcacagcagccgaatggatccaggaccctgatggctcttgggcacagatcgcggagaagcgggccgttcttgcccatgtcgacgttcaaaccctctctagtcagttagccgtgacagtgggacccggcgaaagacggatcggcccaggcgaacccctggaactgctctgcaatgtgtcaggagcactgccccctgctgggcggcacgctgcatattctgtcgggtgggagatggcacctgccggagcccctggcccgggccgccttgttgcgcaacttgatactgaaggcgtcgggagcctgggtcctgggtacgagggaaggcacatagccatggaaaaggtcgcttcccgaacatatcggcttcgactggaggccgccagaccgggggatgctggcacatacaggtgtctagcaaaggcttatgtcagggggtctgggacccgcctccgcgaagctgcgagcgcacggagccgccctctccccgttcacgttcgggaagaaggcgtggtgctggaagcggtcgcatggcttgcaggcggcaccgtctacaggggtgaaacagcctctctcctgtgtaacataagcgtcagaggcggcccacctgggctccgcctggccgcgtcctggtgggtagaacgccccgaagacggagaactaagcagtgtgcctgcgcagctagtgggtggcgtcggacaggatggcgtcgcagagctcggagttcgccccggaggtggcccggtgtctgtcgaactagtgggcccccgctcccatcgtctgaggttacactctctcggacccgaggacgaaggcgtatatcattgtgctcctagtgcttgggtgcaacatgcagactactcttggtatcaggccggcagcgctcgctctggccctgtgaccgtttacccctacatgcatgctttggatactctgtttgttccccttctcgtgggaaccggagtagcgctcgtcaccggagccactgtcctcggtactatcacatgttgttttatgaagagactaaggaaacgttag

SEQ ID NO: 191269 - DNA, 1581 bp, synthetic construct
  misc_feature 1..1581: note = Description of Artificial Sequence: Synthetic coding sequence
  source 1..1581: mol_type = other DNA
atgggcgccctgcggcccaccctgctgccccccagcctgcccctgctgctacttttgatgcttggaatgggctgttgggctagggaggttctggtgcctgaaggacctctgtatcgagtcgcagggacggctgtctctattagctgtaacgtgacgggctacgaaggccccgcacagcagaattttgagtggttcctttaccggccggaagcccctgacaccgctctgggcattgtctccacaaaggacacacagtttagttatgcagtttttaagtcacgcgttgtggcgggcgaggttcaggtgcaacgtttgcagggcgatgccgtggtgttgaaaatcgcccgtctgcaggcgcaggatgccggcatctatgagtgtcatacccctagtaccgacaccagatacctgggatcttactccggtaaagtggagctccgcgtgcttccagacgtcctgcaggtcagcgcagcccctcctggaccacgcggaagacaggcccctacctctccccctcgcatgacggtccatgagggacaggagctggctttaggatgtcttgcaagaacgtctacgcagaaacacacccatctcgccgtgtcatttgggcgatccgtccctgaagccccagtaggccggtccactctacaggaggttgttggaattcgctcagacctggctgtggaggcgggcgcaccttatgctgagcggctcgcggcaggagagctgagactcggcaaagagggcactgatcgctaccggatggttgtcggcggagcacaagccggcgacgcaggcacctatcactgtaccgcggctgaatggattcaggaccctgacgggagttgggcccaaattgccgagaagcgggccgtgctggcacacgtggacgttcaaactctttcttctcagctggccgtcactgtcgggcctggtgaaagacggatcggtcctggcgagcctctggagcttctgtgtaacgttagtggtgcgttacctcctgcaggcagacacgctgcgtatagtgtcgggtgggaaatggcccccgcgggggctcctggtcccggacgcctggtagcgcagctggacactgagggtgttgggagcttaggtcccggctatgagggtagacacatagcaatggagaaggttgcgtctaggacctatcgcctacgcttggaggctgctcgccccggagatgcgggcacatatcgatgtctggccaaggcctacgtacggggatccgggacccgcctgcgagaagctgcatcagcgcggagtcgcccgctgcctgtgcacgtccgagaggaaggcgtggtattggaagccgtggcctggcttgccggcggaactgtttatcgcggagagacggcttccttgctgtgcaacatttcagttcggggcggcccacccggattgagaagcgctcgttctggtccagtgacggtttacccttacatgcatgccctcgatacgctctttgtgcctcttctggttggaactggagttgcattggtgacaggcgctaccgtgttgggaaccatcacctgctgtttcatgaagcgactgcggaagcgttag

SEQ ID NO: 191270 - DNA, 1842 bp, synthetic construct
  misc_feature 1..1842: note = Description of Artificial Sequence: Synthetic coding sequence
  source 1..1842: mol_type = other DNA
atgggcgccctgcggcccaccctgctgccccccagcctgcccctgctgttgctgctgatgctcggcatgggatgttgggcccgtgaggtactggtcccagaagggccactctatagggtcgctggtaccgctgtgagcatctcatgcaatgtgaccggatatgagggccccgcccaacagaactttgagtggttcctctacaggcccgaggctccagatacagccctgggaatagtgtccaccaaagacacgcagtttagctacgccgtatttaagtcaagggttgtggccggcgaggtccaggttcagcgtctgcagggtgacgcagtggtactaaaaatcgcccgactgcaagcacaggatgctgggatttatgagtgtcacacaccctccaccgacacacggtacctgggatcatactcaggaaaggtggaactgcgtgtcttacccgacgtgctgcaggtgtcagctgcaccgcctgggccccgagggaggcaagcccctactagtcccccgagaatgacagtacatgagggtcaggaacttgcactgggatgcctcgccaggaccagtacccagaaacacactcatctggctgtctccttcggacgttcagtgcccgaagcgcccgttggccggtccacactgcaagaggtagtggggattcgctccgatctggccgtagaggccggggctccttacgcggaacggttagccgctggggagctgagactgggcaaggaaggcaccgatagataccgtatggtcgtcggaggggcccaggcgggagacgccgggacctatcactgcacagcggccgaatggattcaggaccctgatggaagttgggcccagatcgccgagaaaagggctgtcctcgcccatgtcgacgtgcagactctgtcgagccagctggcagtgaccgtgggcccaggtgagagaaggattggacccggcgaacccttggaattgctatgcaacgtgtcgggtgccctgccccctgctgggcgccatgccgcatacagcgtcggatgggagatggcccctgcaggtgcccccggcccagggcgcctcgtcgcacagctcgacaccgagggggtgggctcgctgggcccgggctatgaaggccgccatatagccatggagaaggtggcgtcacgcacgtaccggctacgcctcgaggccgcacgtcctggcgacgccggtacatacagatgtctggctaaggcttatgtcagagggagtggcacacgattacgggaagctgccagcgctcggtcccggcctcttccggttcacgtaagggaagaaggcgtggtcctggaggcagtggcttggctggcaggaggcaccgtgtacaggggggagacggcgtccctgctatgtaacatcagtgttagggggggtccacccgggctccggctggctgcatcatggtgggtcgaacgaccagaagacggcgagctgagctcggttcccgctcaactggtgggcggagtaggtcaggatggagtcgccgagttgggagttcgccctggcggcggacccgtgtccgtcgaacttgtgggtccgcggtcgcaccgcctgcgtctgcattcactgggccctgaggatgaaggcgtctatcattgtgctccgtccgcttgggtccaacacgccgactacagctggtaccaagctggaagcgcccgcagcggtcctgttacagtctacccgtatatgcatgcactagacactctgttcgtcccgctgttagtgggaacgggagtggctctggtcacgggggctactgtgctgggaactatcacctgttgtttcatgaaaaggctacggaaacggtag

SEQ ID NO: 191271 - DNA, 906 bp, synthetic construct
  misc_feature 1..906: note = Description of Artificial Sequence: Synthetic coding sequence
  source 1..906: mol_type = other DNA
atgggcgccctgcggcccaccctgctgccccccagcctgcccctgttgctcctgttaatgctagggatgggctgctgggcaagggaagtcctggtccccgaaggtccattgtatcgtgtagctgggaccgcggtcagcatctcttgcaacgtcactggatacgagggccctgcccagcagaattttgagtggttcttataccgcccagaggcccctgataccgccttgggcatagttagcactaaggacacccagttttcatatgcagtcttcaagtctcgcgtggttgctggcgaggttcaagtgcagagattgcaaggcgatgcagtggtgctcaagattgcgcgtctccaggcccaggatgctggcatctatgaatgtcataccccttccactgacacccgatacttaggcagctacagcgggaaggtcgaattgcgggtgcttccagacgtcctgcaggtctcagctgcgccccctggtccgaggggcaggcaggctcctacctctcccccgagaatgaccgtccatgaggggcaggaactggctctgggttgcttggcaaggacaagtacgcaaaagcacacacacttagcggtttcattcggaaggagcgtgcccgaagcccctgtgggtagaagcacactacaggaggttgtgggtattcgctccgaccttgctgtagaagccggagccccatacgctgagcggcttgcagccggtgaactcagactgggaaaagagggcacagatcgatacagaatggtagtcggtggagcccaagccggtgacgctggtacataccattgcacagcagccgagtggatccaggaccctgatggaagctgggctcagattgccgagaagcgagccgtactcgcgcatgttgacgtacaaactctgtag

SEQ ID NO: 191272 - DNA, 2154 bp, synthetic construct
  misc_feature 1..2154: note = Description of Artificial Sequence: Synthetic coding sequence
  source 1..2154: mol_type = other DNA
atggtgtggtgcctgggcctggccgtgctgagcctggtgatcagccagggcgctgacggccgtggcaagcccgaagtggtctcagtggtcggccgcgcaggagagtccgtggtgctgggatgcgacctcttgcctcccgcaggacgccctccactgcacgttatcgagtggctgcggtttggcttcttactaccaatatttatccagtttgggttgtactcgccacggatcgatccagattacgtgggtagggtaaggctgcagaaaggggcaagcctacagatcgaaggattgagggttgaggaccagggctggtacgaatgtagggtgttcttcctcgatcagcacattccggaagacgacttcgctaacggatcctgggttcaccttaccgtgaactctcccccacagttccaggagacgcctcccgctgtattggaggtccaggaattagaaccagtgacgctgcggtgcgtcgcgaggggaagtccactgccccacgtgacgtggaaactacgcgggaaagacttaggccagggccagggccaagttcaggtccagaacgggaccctcaggattagacgcgtagaacgcggctcgtcgggagtatacacgtgccaggcgtcctctactgaggggtcggccacccatgctacccagctgttagttctaggtccgccggtgatcgtggtacccccaaaaaattccacagtcaacgccagccaggacgtcagtctggcttgccacgctgaagcctatccagctaacttgacatatagttggtttcaagataatatcaacgtgttccacatctcccgcctccaaccccgcgttagaattctcgtcgacggtagtttgcgcttgttagccactcagccggacgacgccggctgctatacatgtgtcccttctaacgggttactccaccccccaagcgcatcggcctacctcaccgtgttgtacccagctcaggtcacagctatgccgccagaaaccccactgccgattggaatgcccggtgtgatccgctgccccgttagggccaaccctccactgctctttgtcagctggacaaaagatgggaaagccctccaactcgataagtttccaggctggagccagggcactgagggatcactgataatcgccctgggcaacgaagacgccttgggggaatactcctgtaccccttataatagcttggggactgcaggaccttcgcccgtgactagggtgctcctcaaggccccacccgccttcatcgagagacctaaagaggaatatttccaggaggtgggtcgggagctcctgattccctgcagcgcccaaggcgacccacctcccgcagcccccccttctccactccccgggcccggcccgctcctgcagtatctcagcctgccattttttagagaaatgaatgtggatggcgattggcctcctctcgaagaacccagtcctgccgccccgccagattatatggacacacggagatgcccaacgtcatctttcctcagaagccctgaaacccccccggtctcacctagggaatctctcccaggcgcagtggttggcgcaggagccacagccgagcccccatataccgcactggccgactggaccctgagggagaggttgctgcctgggctgctcccagcagcccctcgcgggtccctgacctcccagtcctccggtagggggtctgcgagcttcctccgcccaccttcaacggctccctccgccggtggctcttatctcagtccagcaccaggagatacgtcctcttgggccagcggaccagagcgatggccacggcgggagcatgtggtcacggtgagcaaaagaaggaacacaagcgtggatgaaaactatgaatgggactctgagtttccgggggatatggaactcctggaaacccttcaccttggactggccagcagtcggctgcgacctgaggctgagccagaacttggcgttaagactcctgaagaagggtgccttctcaacacagcacacgtaaccggccccgaggccaggtgcgcagccctgagggaggaattcttggcattccgacggaggcgcgacgctacccgggctcgcctaccagcttatcgacagcccgtgcctcacccggagcaagccaccctgctctag

SEQ ID NO: 191273 - DNA, 3492 bp, synthetic construct
  misc_feature 1..3492: note = Description of Artificial Sequence: Synthetic coding sequence
  source 1..3492: mol_type = other DNA
atggtgtggtgcctgggcctggccgtgctgagcctggtgatcagccagggggccgacggccggggtaagccggaggtagtcagcgttgtggggcgcgcgggcgaaagtgtggtgctcggatgtgacctcctaccacctgctgggcgacctcctctgcacgtaattgaatggctgcgctttggatttcttctccctattttcattcaatttggcctgtactccccaagaattgaccccgactacgttggccgcgtccgcctgcagaaaggggcctccctgcagatcgaaggactgcgggttgaggaccagggatggtacgagtgtagagtattcttcttagaccaacatattccggaggatgattttgccaacggaagctgggtgcatctcactgtcaattcacccccccaatttcaggagactcctcctgcagtccttgaagtccaggagctagaacccgtgacactccgctgcgtggcgcggggctcacccttgccacatgtgacctggaaattgagaggcaaagatttgggccaggggcaaggacaagtgcaagtgcagaatgggacccttcggatcaggagggttgagaggggctccagcggggtatacacctgtcaggcatcatctactgagggcagcgcaacacacgcgacacaactgttggttttaggcccccccgtcatcgtggttcctcctaaaaattccaccgtcaacgccagccaggatgttagtctggcttgccacgccgaagcttatcctgccaatctcacttattcctggttccaggataatattaacgttttccatatttccaggcttcagcctcgcgtgaggatactagtcgatgggtcactcaggctgttggctactcagcctgacgatgcaggttgctacacatgcgtgcccagcaacgggctgctgcatccaccctcagcctccgcgtatttaacagttctttgcatgcccggagtgatcagatgcccggtgcgcgccaatcctccactgctcttcgtcagttggaccaaggacggaaaagccctgcagctcgacaaatttccaggttggtctcaaggaaccgagggtagcttgatcattgccttgggaaatgaagatgctttaggagagtatagctgtacgccatacaacagcctcgggacggccgggcccagccccgtaacccgcgtcttgctgaaggcccctcctgcttttattgagaggcccaaggaggagtactttcaggaagtgggtcgcgaactactgataccatgttccgcccagggtgatcccccccccgtcgtgagttggaccaaagtgggccgcggtctccagggccaagcgcaggtcgacagcaatagtagcctcattctccgccccctcactaaagaggctcacggtcattgggaatgcagcgcttccaatgctgtggctcgtgttgccacaagcaccaatgtctacgtactggggaccagccctcacgtggtgacaaacgtgtcagttgtggcacttccaaagggggcaaatgtttcttgggagcccgggtttgatggaggctacttgcagcggtttagcgtgtggtacacaccgctggcaaagaggcccgatcgtatgcatcatgactgggtttcactggccgtgccagtgggcgctgcccacctgcttgttcccggtctgcagccccacactcagtaccagttttctgtcctagcccagaacaagctcggctccggtcctttctccgaaatcgtattgtcagcgcctgagggcctgcctactacacctgccgcccctggcctgccccctacggaaatccccccccccttgagccctccccgaggcttggtggcagtccggacaccccgcggcgtgttgctgcactgggatcccccagaactcgttcctaagaggctagacggatacgtgctcgaaggccggcaagggtcccagggctgggaggtcctggatcccgccgtggctggcactgagacagaactgctcgtgcccgggctaataaaggacgtcttgtatgagttcagactagtggctttcgccggctcttttgtgagtgatccctcaaacactgcaaatgtgtccacatccggtctggaggtttacccatctcgaacccaactgccagggctgctgccgcagccagtcctagctggcgtcgttgggggagtttgcttcctcggggtcgcagtccttgtcagtatcctggccgggtgcctgctgaatcggcgccgcgccgcccgccggcggcgcaaaagacttcgacaggaccctcccctcatcttctccccaacgggcaagtccgctgccccgagtgctctcggctcagggtctcctgactccgtggccaagcttaagctgcagggctcacccgtacctagcctgagacagtccctcctctggggtgaccccgccggcaccccgtcaccgcatccagacccgccttcttcacgcggccccctgcctcttgagcccatatgtcgcggccctgacggcagattcgttatgggacctacagtggcagcaccccaggagcggtcaggcagagagcaagcggagcccagaactcccgctcaacgcctcgcccggagctttgactgtagcagctcatccccgagtggtgctccccagcctctttgtatcgaagatatatctcccgttgctccgccccccgccgcgccgccctcaccccttcccggtcccggcccgctgttgcagtacctcagcttgcccttcttccgggagatgaatgttgatggggactggcctcccttggaggaaccttctcctgccgctccgccagattacatggacacccgacggtgtcccacatcgtcttttttgcgttccccagagacccctcccgtgagtccacgggaatcgctccccggtgcagtcgtcggggcaggcgcaacggccgaacccccctataccgccctagcggactggactctgagggaacggctgttgcctgggctcctccctgctgccccgcggggctctttaacgtcccaaagctctggcagggggagtgcatccttcctgcgtccaccctctactgctccatcagcagggggttcgtatctgtcccctgctccaggcgatacctccagctgggctagcggaccagagcggtggcccaggcgcgagcacgtagtgacggtaagcaaacgaaggaacacttctgtggacgagaactatgagtgggactcagaattcccaggggacatggagttactggagacgctgcacctcggcctggccagctcacgtttgaggccagaggccgagcccgaactaggcgtgaaaacgcctgaggaagggtgcctgctcaatacagcgcacgtgacaggccccgaggccagatgtgcggctctgagagaagagtttctagcctttagacgcagaagagacgccacgcgggcgcggctgccagcatatcggcagcctgtgccacaccccgagcaagctacgctcctgtag

SEQ ID NO: 191274 - DNA, 3540 bp, synthetic construct
  misc_feature 1..3540: note = Description of Artificial Sequence: Synthetic coding sequence
  source 1..3540: mol_type = other DNA
atggtgtggtgcctgggcctggccgtgctgagcctggtgatcagccaaggggccgatggccgggggaaacccgaggtagttagcgtcgtgggaagagccggagagagtgtggtcttaggctgtgacctactgccacctgccggtagaccacccctgcatgtgatcgagtggcttcgctttggcttcctgctgcctatcttcattcaattcggactctatagccctagaatcgatcctgattacgtgggcagagttagactgcagaagggcgccagtctccaaatcgagggcctgcgcgtcgaagaccagggctggtacgaatgtcgtgtcttttttctggaccagcacattcctgaggatgacttcgcgaatggcagctgggttcacctgacagtgaatagccccccacaattccaggagacacctccggccgtcctggaggttcaggagctggagcctgtcacactgcgatgcgtggcccggggaagtcctctaccccacgtgacatggaaactgcggggcaaggacttgggccaggggcagggacaggttcaggtgcagaacggcactctgcggattcggagggtggagagaggatcatcgggagtctatacctgtcaagcttcctccactgagggaagcgccactcatgcgacccagctactcgtcctaggaccacccgtaatcgtcgtccccccgaaaaactctacggtgaatgccagccaggatgtctctctcgcctgccatgccgaagcttaccccgcaaacctgacctactcatggtttcaggataacataaacgtgttccatattagtcggctacagcctcgagtgagaatccttgtggacggctccctaagactgctagccacccaacccgacgacgctgggtgctatacgtgtgtcccctccaacggcctgcttcaccctccatcggctagcgcatatttgactgtgttatatccagcccaagtgactgcaatgcctcctgagacgcctctgcccatagggatgccgggagtgattcgatgtcccgtgagagcaaatccccccctgctgtttgtctcgtggacgaaagatggcaaggctctgcagctggacaagttccctggctggagtcagggaaccgagggttctctaattattgccctggggaacgaggacgcactgggcgagtactcttgcactccatacaattccctgggaaccgccggtccaagtcctgtaactcgggtcctgctgaaagcaccacctgccttcatcgagagaccaaaggaggagtacttccaagaggtggggagagagctccttatcccatgttccgcccaaggagacccacctcctgtcgtgagctggacaaaggttggccgtggcctgcagggtcaggcgcaggtggacagcaactcaagtctaatcctgcgccccctgacaaaagaagcccatggtcattgggaatgttcagcatctaacgccgttgcccgggtcgccacatccaccaacgtgtacgtgctgggcactagtccacacgtggtgaccaacgtgtcggtagtcgccctgccaaaaggtgcgaacgtctcctgggagccgggcttcgatgggggttatctgcagcgcttctcggtatggtacacaccattagctaagagacccgataggatgcaccatgattgggtatcactggcagtccctgtaggagctgctcaccttctggtgcctggactccagccccacacacagtatcagttctcggtattggctcagaacaaactaggcagtggccctttctctgagatagtgttaagcgcgcctgaaggactccccacaacccccgctgcaccgggcctgccaccaaccgagattcctccgccgctgtccccgcctcgtggactggtcgcagtgcgcacacctcgcggagtgctcctccactgggaccctccagagttggtccccaaacggctcgacggatacgtcctggaagggaggcagggttctcaggggtgggaggttctagacccagcagtggcggggaccgaaacagagttgctggtgccaggcctcataaaagatgttttatatgaattccggctggtggcgttcgcaggtagtttcgtctccgaccccagtaatacagcaaatgtgagtacatctggtctggaggtgtacccttctcgaactcagcttccaggtctgctgccacaacctgtgctcgccggggtggtcgggggtgtgtgtttcctgggcgtggccgttttggtctcaatattagccggatgcctcctgaataggcgtcgtgctgccagacgaaggaggaaaagactgcggcaggaccctcctctgatcttcagccccacgggtaaaagtgccgctccatccgccctggggagtggctccccagactcagtagcaaagttgaaactccaaggatcccccgtgccttcactcaggcaatcactgttatggggagatcccgccggcacccctagtccgcatcccgacccgccttcctcccgcgggccactccccctggagccaatttgtcgcggtccggacgggagatttgtgatgggtccaactgtggctgcaccccaggaaagatcagggcgggaacaggcggaaccacggacccccgctcagagactggcaaggagtttcgattgttctagttcctctccctcaggagctccgcagcctttgtgcattgaggacataagcccagttgccccaccaccagccgcacctccctcacctctgcccggcccaggtcccctgctgcagtatctgagcctgccgttctttcgggagatgaatgtggatggcgattggcctccccttgaagaaccaagccccgccgcgccccccgattacatggatacacgccgatgtcctacttcatcattcctccgctcacctgaaacgccccccgtttcccctagagagtccctgcccggagccgttgtgggtgccggagctacggcagaaccaccatacacagccctggcggattggaccctacgagaacggctactccccggcttgcttccggcagctcctaggggctcgctgacctcccaaagttcagggaggggatctgcgagtttcctacgacccccctccacagccccttccgcaggtgggtcctatctttcacctgctccgggcgacaccagttcatgggcatcaggaccagaacggtggccacggcgagaacatgtagtgaccgtgtctaagcggaggaatacctccgtggatgagaattacgagtgggactccgagttcccaggggatatggagcttctggagacactgcacctaggtctcgcaagttcccgcctgcgcccagaggccgagcctgagctcggcgttaagacccctgaggagggctgtctcctgaacaccgcgcacgtgacaggcccggaggcgagatgcgctgcactccgggaggagttcttggccttcagaaggagacgcgacgctactcgcgctagactacccgcatatcggcagcccgtgcctcacccagaacaagctacacttctgtag

SEQ ID NO: 191275 - DNA, 4050 bp, synthetic construct
  misc_feature 1..4050: note = Description of Artificial Sequence: Synthetic coding sequence
  source 1..4050: mol_type = other DNA
atgatctggtacgtggccaccttcatcgccagcgtgatcggcacccgaggcctcgccgcagagggagcccacgggctacgtgaagaacctgagtttgttacagccagggccggggaaagtgtggtgttgcgctgtgacgtcatccatccagtgaccgggcagcccccaccttacgtggtggagtggtttaagttcggagtgcccattccaatctttataaaattcgggtattatcctccccatgtggatcccgagtacgctggtcgagccagcttgcacgacaaagcttctctgaggcttgagcaagtacggtccgaagatcagggctggtacgaatgcaaggtattgatgctggatcagcaatacgacacttttcacaatggcagctgggtgcacttgacaataaatgctccacccacctttacagaaactccaccccaatacatcgaagccaaagagggcggttccattactatgacttgcactgctttcggaaatccgaagcctattgtgacatggctcaaggagggtactctcctgggcgcctctgggaagtatcaggtgtctgacgggagtctcaccgtgacgtcggtttctcgagaagataggggagcctatacatgtagagcatattccattcagggcgaagcagtgcacacaacgcacctcctggtccaggggcctccgttcatcgtctcgccccctgagaacatcacagttaatatctcacaggacgccctgcttacctgcagggccgaggcttacccaggaaatttgacttatacatggtactggcaggatgagaacgtgtatttccagaatgacttaaaactccgtgtgagaatactcattgatggcacattaattatctttcgtgtaaagcctgaggactccggcaagtatacatgcgtgccttccaactccttaggacggtccccttcagcctctgcatatctgacagtgcagtatcctgcccgtgtcctgaacatgccgccagtgatctatgtcccggtggggatccatggctacataaggtgtcctgtggacgccgagcccccggccacagtggtgaaatggaacaaggacgggcggccacttcaagtggagaaaaatctgggatggacactgatggaagatggctctattcgcattgaagaagccaccgaggaagctcttgggacgtacacctgtgttccttataacactctgggcacaatgggccaaagcgccccggcacggctggtcctgaaagacccgccatacttcaccgtgctgccgggctgggagtacaggcaggaggcaggtagggaacttctgatcccttgcgccgcagccggagacccattccctgtcatcacgtggcgtaaggttggaaaacccagtagatccaagcacagcgccctcccgagcggctcccttcagtttagagcactctccaaagaggaccacggagagtgggagtgtgtggcaactaatgttgtgacaagtataaccgcttccactcacctcactgtcattggaactagccctcatgccccaggctcagtacgcgtgcaggtgtcaatgaccactgcgaacgtgagttgggagcccggttatgacgggggttatgaacagacctttagcgtgtggatgaagcgagctcaattcggtccgcatgattggctcagtcttcctgtcccacctggcccctcttggctcctagtagacacactggaacctgaaacagcctaccagttttctgtcctcgcacagaacaaacttggaactagcgctttctctgaggtggtgaccgtgaacacgctggctttccctatcaccactccagagcccctcgttttggtaacaccgcctaggtgtttaatcgccaatcggacgcagcagggagtgctcctctcatggcttcctccagctaaccacagttttccgatcgatcgatacattatggaatttagggtggccgaacgatgggaactcctggacgacggcatcccaggaaccgaaggagagtttttcgcaaaggatctgtcacaagacacctggtacgaatttcgggtgcttgccgtgatgcaggatttgatttctgagccctctaacattgctggcgtgtccagcactgatatcttccctcagcctgatctgaccgaggatggtctggcccgcccagtcctggctggcatcgttgcaaccatttgtttcttggccgccgccatcttgttttcaactttggccgcatgttttgttaataagcagcgcaagcgcaagctgaagcgcaagaaagatccacctctgtcaattacacactgtcgaaaatcccttgagtctcccctgagcagcggtaaggtctcccccgaaagtataagaaccctgcgggccccttccgaaagctcagacgaccagggacagcctgcagcaaaacggatgctctcccctacccgtgagaaggagttgtctctctacaagaagaccaagagggcaattagctctaaaaaatacagtgttgccaaagctgaggccgaggcagaagctacaacaccaatcgagctgatcagccgcggcccggacgggagattcgtcatggacccagctgaaatggagccctccctgaagagccgccggatcgagggattcccattcgcagaagagaccgacatgtacccagagtttaggcagtctgacgaggagaatgaggatcctctcgtgccaacctcagtcgcggccttaaaatcccagcttacacctctgtctagcagtcaggagtcctaccttccaccccccgcgtactccccgagatttcagccacgtgggctcgaaggcccaggaggattagagggtcggctgcaagccactggacaggcacgtccgcccgcccccagacctttccatcacggacagtactacggatacctgtcgtcttctagtcccggggaagttgagccacctcctttttatgtccctgaagtaggctcacccctgtcttcagtgatgtccagtcctcctctgcccacagagggtccttttggccaccctaccatccctgaggaaaacggcgagaatgcctcaaattcaacactgccattaacgcaaactcccaccggcggcaggtcaccggaaccgtggggacgccctgagttccctttcggtggactcgaaacgcccgccatgatgttcccacatcagctgcctccctgcgatgtgcccgagagccttcagcccaaggcaggtctaccaaggggcctgcctcccacctcattgcaagtgccagccgcctatcccggcatactcagcctggaggcccccaaagggtgggccggaaagagtcccggtcggggccctgtgccagctccccctgcggcgaaatggcaggaccgaccaatgcagcctctggttagccagggccagttgcggcacacaagtcaaggaatgggtattccggtgctgccttatccagaaccagcggagccaggcgcacacggggggcccagcaccttcggcttggacactaggtggtatgagcctcagccccgaccccgaccaagtccccgtcaagccaggagggctgagccttctctccatcaggtcgtcttacaaccttcccggttgtcccctcttacacagtcaccccttagttctagaaccgggtcccctgaattggctgcgagagcccgcccacggcctggcctgttgcagcaggccgaaatgtccgaaattaccttacaaccacctgctgctgtaagtttttctcgaaaaagcaccccatccacaggcagccccagccaatcctctagaagcgggagcccctcataccggccggccatgggcttcaccacactggccacagggtaccccagtccaccacctggacctgcaccggcaggcccaggagactccttggacgtctttgggcagacgccgagcccacggaggacaggggaggaattgctgcggccggaaactccacctcccacgctgccgacctccggcaagctgcagagagacagaccggcacccgccacatctccccccgagagagctctgagcaaactctag

SEQ ID NO: 191276 - DNA, 1509 bp, synthetic construct
  misc_feature 1..1509: note = Description of Artificial Sequence: Synthetic coding sequence
  source 1..1509: mol_type = other DNA
atggcctggcccaagctgcccgccccctggctgctgctgtgcacctggttaccagccggttgtctgtcactgcttgtcaccgtgcagcacacagagaggtatgtgacattgttcgcctcaatcatcctcaagtgtgattacactacatcagcccagctgcaggatgtggtagtgacttggcggtttaaaagcttttgcaaggatcctatcttcgattattactcggctagttatcaggctgcccttagtttgggtcaggatcccagcaatgactgcaatgacaatcagagggaagtcagaatcgtggcacagcgccgaggtcaaaatgagcccgtgctcggcgtcgactaccggcaacgcaagattactatccaaaatagggctgatctcgtcattaacgaggtgatgtggtgggatcatggcgtgtattactgtacaatcgaagctcctggagacacctcaggcgaccccgacaaagaggtgaaactgatcgttctgcactggcttactgtcatctttattatcctgggagccctgctgctgcttcttctcattggcgtgtgctggtgccagtgttgcccgcagtactgctgctgctacatccgttgcccgtgctgccccgctcactgttgctgtcccgaggaggacctatcactacccagctcactccctcaaatgccaatgacccagaccacgaatcagcccccgattgccaatggcgttttggagtacttggaaaaagagctaaggaacctgaatttggcgcagcctcttccacccgacctcaaaggccgctttggccacccttgttcaatgctgagcagtttggggagcgaagtggtggagaggaggattattcacctgcccccattaatccgcgatttaagctccagtaggaggacaagcgattcgcttcaccagcaatggcttacgcctatccccagtcgaccgtgggatttgagggaaggacggtcccatcatcactaccctgactttcatcaggagctgcaggatagagggccgaagtcttgggccttggaaagacgcgagctggacccttcatggtcgggaagacaccgctcttctcgactaaacggatcccccattcactggtcagacagagacagcctctcagatgtgccctcttcttcagaggctcggtggagaccgtcacaccccccgtttcgctccaggtgtcaagaacgaccacgccgccccagtcccagggagagtacccagcgacacggacgtcgcagacgccatcggtcttatagcccccctttaccaagtggtcttagctcctggagctcagaagaggataaagagaggcaaccacagtcgtggcgggctcaccgcagaggaagccacagcccacactggcctgaggagaaacccccgtcctatcgatccttggatatcactcctgggaagaacagccggaaaaagggatcggtggaacggagatccgagaaggacagctctcacagcggcagatcagtcgtgatctag

SEQ ID NO: 191277 - DNA, 1641 bp, synthetic construct
  misc_feature 1..1641: note = Description of Artificial Sequence: Synthetic coding sequence
  source 1..1641: mol_type = other DNA
atggcctggcccaagctgcccgccccctggctgctgctgtgcacctggctgccagctggctgcctgtctttactggttacagtgcagcacactgagaggtatgtgactctgttcgcttctattatcctgaagtgtgactatacgaccagcgcccagctccaggacgttgttgtcacttggaggtttaaatccttctgcaaagatcccatattcgactactactctgcttcttaccaggctgcgctcagtttgggacaggacccctcaaatgattgtaacgacaaccaacgggaagtgcgaatcgtagcccagaggagaggacagaatgaacctgtgctgggcgttgactacaggcagagaaaaataacgatccagaatcgggctgaccttgtaatcaatgaagtcatgtggtgggaccacggagtttactattgtaccattgaagcccccggggacaccagcggagatccagacaaagaagtcaaactgattgtattacattggcttacagtgattttcattatactcggggccctcctcctcttactactgattggtgtgtgctggtgccagtgttgcccccagtactgttgttgctacattcggtgtccatgctgccccgctcactgctgctgccccgaggaagctctggcacggcaccgctacatgaaacaggcccaagctctgggtccacagatgatggggaaacccctatattggggagctgatcgctcaagccaggtctcctcttacccaatgcatccattgctgcagagggaccttagtctgccatcttcccttcctcagatgcctatgacacagactaccaatcagccacctattgccaatggagtgctggagtatcttgaaaaggagctcaggaacctgaacctggctcagcctctgccccccgatctgaaagggcgctttggacatccctgttctatgctaagcagtttgggaagcgaggtcgttgagaggaggatcatacatctcccgcctctgatcagagacctgagcagctcccgacgcaccagcgatagtctgcaccagcagtggttaactcctataccaagtagaccatgggatttacgcgagggacgttcccaccaccattaccctgacttccatcaagagctgcaggataggggccccaagtcttgggctctcgaacggagggagctggatcctagctggagtgggcgccatcggtctagccgtcttaatgggtccccgatccactggagcgatagagattcgctttccgacgttccctcatcctctgaagcgcggtggcgccccagccatcccccatttcggagccgctgccaggaacgaccccgaagaccgtccccaagagaatctacgcagcggcacggaaggcggcgacgtcaccggtcttactcgccacctcttccctccggactaagcagctggtcatccgaagaagacaaggaaagacaacctcaaagctggcgcgcccaccgtcggggctctcactctccccactggcccgaagagaagcccccgtcttacaggtccctggatataacacccggaaagaacagcagaaaaaagggctcagtcgagaggaggtccgaaaaagatagttcgcacagtggccgctcagtggtcatctag

SEQ ID NO: 191278 - DNA, 639 bp, synthetic construct
  misc_feature 1..639: note = Description of Artificial Sequence: Synthetic coding sequence
  source 1..639: mol_type = other DNA
atggcctggcccaagctgcccgccccctggctgctgctgtgcacctggctgcccgcaggctgcctgtctttgctggtaaccgttcagcataccgaacgttacgttacactattcgcaagcatcatcctgaagtgcgattataccacctctgcacagcttcaagatgtggtggtgacctggagatttaagtcgttttgtaaggaccccatttttgactattatagtgccagttaccaggccgccctgtctttaggccaggatccatctaatgactgctgttgctgtcctgaagaggcattggctagacaccgttatatgaagcaagcccaggccctgggaccccagatgatgggcaagcccctttattggggcgccgaccgctcttctcaggtgtcttcatatcctatgcaccccttgctgcaacgagacctgtctctgccctcaagcctgcctcagatgcctatgacgcaaactactaaccaaccccctatagcaaacggagtcctggagtacctggaaaaagagctgaggaatctcaacttagcgcaacccttaccaccggatctgaagggacgttttggacacccctgttccatgttgtcatccctagggtccgagaatcagatcgaagagttctag

SEQ ID NO: 191279 - DNA, 1374 bp, synthetic construct
  misc_feature 1..1374: note = Description of Artificial Sequence: Synthetic coding sequence
  source 1..1374: mol_type = other DNA
atggcctggcccaagctgcccgccccctggctgctgctgtgcacctggctcccggccggatgtctgtcactgctagtcaccgtgcagcacacagagcggtatgtgactctgtttgcgagtatcatcttaaagtgcgactataccacgagcgcccaactacaggatgtcgtcgtcacttggaggtttaaatccttctgtaaggatcccatattcgactactacagtgcctcataccaggcggctctctcactagggcaggaccccagcaatgactgcaacgacaaccagcgggaggtccgcatcgtagcacagcgacgcggacaaaatgaaccagtgttgggcgttgattaccgacagcgcaaaattacaatccagaaccctctcgccagacataggtacatgaagcaggctcaggccctggggcctcagatgatgggaaagcccttatattggggggccgaccggagctctcaggtgtcatcttacccaatgcatcctttgcttcagagggatctctccctgccctcttctcttccccaaatgccgatgacccagaccactaatcagcccccaatagcaaacggggtgctggaatacctggagaaagagctgcggaatttgaacttggctcaaccgcttcccccggatctgaagggtaggtttggccatccttgttccatgctctcctcattaggatctgaagtggtcgagcgcaggattattcatttgccccccctcattcgcgaccttagttccagtaggcgcacatcagattcacttcatcagcagtggctgacgcccattccaagtcgcccctgggatctgcgcgagggaagaagccaccatcactaccccgacttccaccaggagctccaggaccgaggtcccaaaagttgggccttagaacgccgtgagctggatccctcttggagcggccgccatcggtcctcccgactcaatgggtcccccattcattggtcagaccgggactctctgtcagatgtgcccagctcctctgaggccagatggcggccgtcacatcctccgttccgctccaggtgtcaggagcggcctaggagaccctctccaagagaatctacgcagcggcatggtcgcaggcgaagacacaggtcatactctcccccattaccttctggattaagtagctggtctagcgaggaggataaggaacgccagccgcagtcctggcgggcacacagacggggatctcacagtcctcactggcctgaagagaaacccccatcctacagatccctggatataacacctggaaaaaactctagaaaaaaaggaagtgtcgaaagaaggtctgagaaggattcttctcacagcggtcgaagcgtggtgatctag

SEQ ID NO: 191280 - DNA, 1545 bp, synthetic construct
  misc_feature 1..1545: note = Description of Artificial Sequence: Synthetic coding sequence
  source 1..1545: mol_type = other DNA
atggccggcaacatcttctgccccttcgccctgttcttcctgcccatgtcgcgagtgggacatcttcagcactttctgcttttgctcgcactcgggtgtttgagtttgctggtgacagtgcagcatactgagaggtatgttacactgttcgccagcattatcctgaagtgtgattacaccacttcagcccaactgcaagacgttgttgtgacttggaggttcaagtctttctgcaaggatccgatcttcgactattattccgcctcatatcaggcagctctttctttaggccaggatccctccaacgactgtaacgacaaccagagggaggttaggattgtggcacagcgaaggggtcagaatgaacccgtcctgggcgtggactacaggcagagaaagatcactattcagaaccgagcagatctggttattaacgaggtgatgtggtgggatcacggagtgtactattgtacgatcgaagctcctggtgatacatctggcgaccctgacaaagaggtcaaactgattgtgctgcactggctaaccgtgattttcatcatactcggggccttgcttctgctcctgttgattggcgtttgctggtgtcagtgttgtccccagtactgctgctgttacatccggtgcccctgctgtcccgcccattgttgttgccccgaagaggacctctctctcccatccagtctgcctcaaatgccaatgacacagaccaccaatcagccaccaatcgctaatggcgtgctggagtatctcgagaaagaactgagaaatcttaatctcgcgcaaccacttccgcccgatctgaaaggccggttcggccacccatgtagtatgctgtcctcgctggggagtgaagttgtggaacgtagaattatacatcttcctccactgatcagagatcttagttcatctaggcgtacatctgactcattacatcagcagtggctgacacctattccctctcgcccatgggatctgcgtgaagggaggagccaccaccactacccagactttcaccaggaactgcaagatagaggacccaagtcttgggctctggaaaggcgcgaattggacccttcatggtcaggccggcaccgctcaagccgtctcaatggttcacccatccattggtcggatagggacagcttgtccgacgtcccatccagtagcgaggcccgctggcgaccctctcacccacctttccgttcgagatgccaggagagaccgcgaaggccctctccccgcgaatccacacagagacacggacgaaggcggagacataggtcatattcacctcccctgcccagcggactatcgagctggagctctgaagaagacaaggaacgccagccgcaatcgtggagagctcaccgtcgaggatctcactcacctcactggccagaggaaaagcctccgagttacagatcccttgacatcactcctggcaagaatagcagaaaaaaaggaagtgtcgagcgacgtagcgagaaagacagttctcattcaggcaggtcagtagtgatctag

SEQ ID NO: 191281 - DNA, 1800 bp, synthetic construct
  misc_feature 1..1800: note = Description of Artificial Sequence: Synthetic coding sequence
  source 1..1800: mol_type = other DNA
atggagggccccctgacccccccccccctgcagggcggcggcgccgcagcagttccagagcctggggctaggcagcacccagggcacgagactgcggctcaacgatacagtgcccgccttttgcaggctggttacgagcctgagtccccacgcctcgatttagccacccatcctactactccgaggagtgagctgagctccgtcgtcctgctcgccggagttggggtgcagatggaccgtctgcgtcgggcatccatggccgactacttgatttcagggggcaccggatatgtccccgaagacggcctgactgcccagcaacttttcgctagtgctgacggcctcacatataatgatttcctgatccttccggggttcatcgacttcatcgcagatgaggttgatctgaccagtgcactgactcgcaaaatcactctgaaaacccccctgatttcgtcaccgatggataccgtgacggaggccgacatggccatcgctatggctcttatgggaggcatcggctttattcatcacaactgcacccctgagttccaggctaatgaagtgcgtaaggtgaagaaattcgaacaaggttttataaccgatcccgtcgtgctgagcccttcgcatactgttggtgatgtgttagaggccaagatgagacatggctttagcgggatcccaattactgaaactggtactatgggcagcaaactggtgggcatcgtcacgagcagggacattgatttcctggctgaaaaagatcataccaccctattgagtgaggttatgacaccaagaatcgagttagtggtggctccagctggggtgacgcttaaagaggctaacgagatcctgcagcgctcaaaaaaaggcaagctgcccattgtcaacgattgcgatgagctggtggcgatcatcgctcgcaccgacctcaaaaagaatcgggattatccgcttgctagcaaagacagccagaagcaattactgtgcggcgcagccgttggtactcgtgaggacgataaatacagactggacctactgacacaggccggagtagacgttatagtgttggactcctcccaggggaatagtgtgtatcaaatagcgatggtgcactacatcaaacaaaagtatccccatctgcaggtgattggcggaaacgtggtcaccgctgcccaagcaaagaatctgatcgatgcgggtgtcgacgggctcagggtcggaatggggtgcggttccatttgtatcacacaagaagtcatggcatgtggacggcctcagggaaccgctgtgtacaaggttgctgagtacgcaagacggtttggagtcccgatcatagctgacggtgggattcagactgttggacacgtagtcaaggcgctcgccctgggagcgtctactgtgatgatgggatccctgctcgcagctaccacagaagctcccggagaatacttttttagcgacggggtaaggcttaagaagtatcggggcatgggttccttggatgcgatggagaagtcatcatcgtcccagaaacgttacttctcagaaggtgacaaagtcaagatcgcgcagggcgtaagtgggagtatccaggataaagggagcattcagaaattcgtaccctacctaattgccggcatccaacatgggtgtcaggacataggagctagatccctaagtgtccttaggagcatgatgtactcgggggaactcaaatttgaaaaacgaaccatgagtgcacagattgaagggggagtgcatggcctgcactcttatgagaagagactctattag

SEQ ID NO: 191282 - DNA, 1470 bp, synthetic construct
  misc_feature 1..1470: note = Description of Artificial Sequence: Synthetic coding sequence
  source 1..1470: mol_type = other DNA
atggccgactacctgatcagcggcggcaccggctacgtgcccgaggatggcctcactgcgcaacaattgttcgccagtgctgacggactaacatataacgattttctcatcttacctggcttcattgattttatagctgacgaggtggaccttacatctgcactgacccggaagatcaccctgaaaacgccactcattagctctcctatggacactgtcactgaggccgatatggcgattgccatggccaaattcgaacaggggttcattactgatccagtcgtgctctcgccttcgcacaccgtgggagatgtgttggaggctaaaatgaggcacggcttctcaggaattccaattactgagacgggaactatgggctctaaactggtcggcattgtgactagccgcgatattgattttcttgcagaaaaggaccataccacactgctgtctgaggtgatgaccccaaggatcgagcttgtagtggcccctgccggagtgacactgaaagaggccaacgagatccttcagcgctctaaaaagggcaaattaccaatcgtgaacgactgcgacgagctggtcgctataatagcaagaacggatcttaaaaaaaatagggattaccctcttgcgtcgaaggatagccagaaacagttgctgtgtggggccgccgttggcaccagagaggacgacaaataccgccttgacctgctaacacaggcgggcgtcgatgtgatagtcttagacagctcccagggtaactcagtctatcagatcgccatggtgcactacatcaagcaaaagtatccacatttacaagtgataggaggtaacgtggtgacagcagctcaggcgaaaaatttgatagatgctggagtagacggtctgcgcgttggaatggggtgtggtagtatttgtattacgcaggaggtcatggcatgcggccgtcctcagggtaccgcagtttataaggttgcggagtatgctagacgtttcggggtgcctatcatcgccgacggagggattcagaccgtcggccacgtagtcaaagccctcgcccttggagcatccactgtcatgatggggtcactcctcgcggcaacaacagaagctcctggagaatacttcttcagcgatggagtgcggttgaaaaagtacagaggcatggggagcctggacgccatggaaaaaagcagctcaagccagaaacgctatttcagcgagggagacaaggtgaagatcgcccagggcgtgtccggatcgattcaggacaagggctccatccaaaagttcgtcccttacttgatcgcaggcattcaacacgggtgccaggacataggcgcacgcagcctgtcagtgttgcgctctatgatgtatagcggagaactgaagttcgagaaaaggacgatgtcagcccagatcgagggcggcgtgcatggtcttcacagctatgaaaagagactctactag

SEQ ID NO: 191283 - DNA, 1692 bp, synthetic construct
  misc_feature 1..1692: note = Description of Artificial Sequence: Synthetic coding sequence
  source 1..1692: mol_type = other DNA
atggagggccccctgacccccccccccctgcagggcggcggcgccgcagctgtgccagagcctggagctcgacaacaccctggccatgagaccgcagcccaaagatacagcgccagattgctgcaggcaggctatgaacccgaatcaatggccgactatctgatttccggaggaacaggttacgttccggaagacgggcttaccgcccagcagctgttcgcaagtgcagacggtctgacatataacgattttctcattctccctggctttatcgatttcattgccgatgaggtagacctcactagtgcattaacacgcaagatcacactcaaaacccccttgatctcatccccaatggacacagtcacagaggccgacatggccattgctatggctcttatgggaggaatcggtttcatccatcacaactgcaccccagagtttcaggcaaatgaggtccgtaaagtgaaaaaattcgagcagggcttcatcaccgatcctgtggtgctgagcccgtcccacacagtgggagatgtgctggaggccaaaatgagacatggcttctcagggatccctataacggagacaggcaccatgggttctaaactggttggaatagtgacttctagggacatcgatttccttgcagaaaaggatcatacgacacttttgtcggaagtgatgacgccccggatagagctagtcgttgctccagccggagtcactcttaaggaggcaaacgagatactgcagcgaagtaagaagggtaaactccctattgttaatgattgcgacgaattagtggcgattatcgcccgcaccgatttgaagaaaaacagagattaccccctggcgtctaaggattcccagaaacagcttctgtgtggggctgccgtgggaacaagagaagacgataaatatcggttggacttgctgactcaagccggagtcgatgtcatcgtgttggactctagtcaggggaattcagtataccagattgcaatggtccactatattaaacagaagtaccctcatcttcaggtgatcgggggcaacgtcgtgaccgcagcacaggctaaaaacttaatcgacgctggagtcgatggtctgagggtcggcatgggatgcggctctatctgcattacccaggaggtgatggcgtgcgggagaccccagggcactgcagtgtacaaagtcgccgagtatgcaagaaggttcggggttcctataatagctgatggaggcatccagaccgtgggccacgtggtcaaagcgttggcgctgggggcttctacagttatgatgggctcactcctggccgccaccacagaggcacctggcgaatacttcttctccgatggtgtgcgacttaagaagtatcgcggcatgggcagcctggatgcaatggaaaaaagcagctcaagccagaaacgctacttctcggagggcgacaaggtgaagatcgcacaaggagtcagtggctcgattcaggataaagggtccattcagaaattcgtgccttatctgatcgctggcatccagcacggctgtcaggatatcggggcccggagcctgagtgttctgagaagcatgatgtacagcggagaattgaaatttgagaaacgtacaatgagcgctcagattgaaggcggcgtgcacggactgcacagctatgagaagaggctctattag

SEQ ID NO: 191284 - DNA, 1770 bp, synthetic construct
  misc_feature 1..1770: note = Description of Artificial Sequence: Synthetic coding sequence
  source 1..1770: mol_type = other DNA
atggagggccccctgacccccccccccctgcagggcggcggcgccgcggccgtgcctgagccaggcgcccgtcagcatcctggacatgagacagcggctcagaggtatagtgcccgtctgctgcaggcggggtacgagcctgagtcttgctttttgctagaactatcctcagttgtcttacttgcaggagtaggagttcagatggacaggctgcgacgggcatcaatggccgattatctaatttcgggagggacaggatacgtacccgaggacggcttaacagcacagcagctgtttgcgagtgctgacggattgacatataacgacttcctcatcctgcctggtttcatcgactttattgctgatgaggtggacttgacctcagcattaacacgcaagatcaccctcaagaccccccttatttcctcacccatggacactgtcactgaggccgacatggctattgcaatggctctcatgggcggaatcgggttcatccatcacaactgcacgcccgagttccaggctaatgaggttagaaaggtgaagaagtttgagcagggcttcattacggaccccgttgtcctctctccatcccacaccgtcggagatgttttggaagctaaaatgcgccatgggttttccggcattcccattacagagacaggtactatgggctctaaactggtggggatcgtcacaagtcgggatattgatttcctcgccgagaaggatcacacaactctgctatctgaggtgatgacacccaggattgagctggttgtggcacctgcaggggtcaccctgaaggaggctaatgagattctccaaagatcaaaaaagggaaagcttcccatcgtgaacgattgcgacgaactcgtagcaataatcgcacggacagatcttaaaaaaaaccgcgactatccgctggcctccaaagactctcagaagcagctgttgtgcggcgcggcagttggcacccgcgaagatgacaagtaccggcttgatctcctgacccaagctggggtggacgtgattgtgttagattcctctcagggaaatagcgtttaccagatcgccatggtacactatataaaacaaaaatatccacacctccaggtgattggaggcaatgtggtcaccgccgcccaggctaaaaacctgatcgacgctggagtcgatggcttgcgagtagggatggggtgtgggtctatatgcatcactcaggaggtaatggcctgcgggaggccacaaggaaccgccgtatacaaggttgctgaatacgcaaggcgcttcggggtgcctattatcgcggatggtggcattcagacggtgggacacgtggtgaaagctctcgcgctgggggccagcactgtgatgatgggatccctgctggcagcgaccaccgaagcacccggcgagtatttcttctctgatggagtcagattgaagaagtaccgtggcatgggatccctggatgccatggaaaagagttcgagttctcagaaacggtactttagcgagggtgataaggtgaaaatcgctcagggggtgtctggatccatccaggataagggttccattcagaagttcgttccttatctgattgctggtatccagcatggatgtcaggacattggcgccaggtccctaagcgtgctgcgtagtatgatgtactcaggtgagctaaagttcgagaagaggaccatgtctgcccagattgaggggggtgttcatgggctgcactcatacgagaaacgactctactag

SEQ ID NO: 191285 - DNA, 1593 bp, synthetic construct
  misc_feature 1..1593: note = Description of Artificial Sequence: Synthetic coding sequence
  source 1..1593: mol_type = other DNA
atggagggccccctgacccccccccccctgcagggcggcggcgccgccgctgttcctgagcccggcgcccggcagcacccgggccatgaaacagcagctcagaggtattccgcacggctgttgcaggctgggtatgagcctgaatccgattttcttattttgccggggttcattgattttatcgctgacgaagtggacctgacgtctgcgctgactaggaagataactctcaagactcccctcattagcagtcccatggatacagttacagaagctgacatggctatcgccatggccctgatgggtggcattggctttatccaccacaattgtacaccagaattccaggccaatgaggtccgaaaggtcaagaagttcgaacagggcttcattaccgacccggttgttctaagcccatctcacacggtgggggacgtcctggaagctaaaatgcgccacggattctctgggataccaattactgagaccgggacaatgggaagcaaactcgttgggatcgtgacttctcgggatatcgattttctggctgaaaaggaccatacgaccctcctcagtgaggtgatgacgccacggattgagttggtggtggccccagccggtgtgaccttgaaggaggccaacgagattctgcagagaagtaaaaaagggaaactccccatcgtcaacgattgcgatgagctggtggcgatcattgccagaacagacttaaagaagaatcgcgactatcctcttgcctccaaggacagccaaaaacagttactctgcggcgcggccgtaggaacacgcgaggatgacaaatatcgcctggacttgttgacacaggccggcgtggacgtcatagtcctcgactcctcccagggcaactccgtgtatcagattgccatggtgcactatatcaaacagaagtatccacacctgcaggtgatcggcggcaatgtggtgactgcggcccaagccaagaatcttatcgacgctggagtggatggcttaagagtgggcatgggttgcggttcgatctgtataacacaagaagtgatggcatgcggccggccccagggcaccgccgtgtacaaagttgctgaatatgcaaggaggttcggcgtaccaatcattgccgacggtggcattcagacagtggggcatgtagttaaagcgctggcattaggagctagcaccgttatgatggggtctttgttagcagccactaccgaagctccgggggaatattttttttctgacggagtgaggttgaagaaatataggggcatgggaagcttggatgccatggagaaatctagctcctcccaaaaacggtacttttctgagggtgacaaagtcaagatcgcccagggggtatctggatcaatccaagataaagggagtatccagaaattcgtgccataccttatcgccggaattcagcatggctgtcaggacattggagctagaagcttgagtgtgcttaggtctatgatgtactcaggcgaattgaaatttgaaaaacggacgatgagtgcccaaatagaaggtggcgttcatggcctgcattcttacgagaaacgcttgtactag

SEQ ID NO: 191286 - DNA, 1701 bp, synthetic construct
  misc_feature 1..1701: note = Description of Artificial Sequence: Synthetic coding sequence
  source 1..1701: mol_type = other DNA
atggagggccccctgacccccccccccctgcagggcggcggcgccgctgcagtccccgagccgggcgcccggcagcacccaggccacgaaactgctgcacaaaggtactccgctcgtttattacaggcaggttacgaacctgagtctcccagactagatctggccacccatcctactactcccagatccgagctgagctccgtagtgctgctcgcgggcgttggtgtgcagatggaccgccttcgcagggcctccgattttctgatacttcccggctttatagactttatcgccgatgaagtcgaccttacctccgctctcacaaggaagataaccctgaaaacgcccctcattagcagccccatggacacagtgaccgaggctgatatggccatcgcaatggccctcatggggggcattgggtttattcaccacaattgcactcccgagttccaggcaaatgaagtccggaaggtgaaaaagttcgaacagggatttataacggatcctgtggtgctttccccatcccacacggtgggagacgtgctcgaagcaaagatgcgccacggtttttccgggattcccatcactgagacagggacgatgggctctaagttggtggggattgtgacgagtcgtgatattgacttcctggcagaaaaagatcatacaaccctgctcagcgaggtgatgactccgaggatcgagctggtagtagcccccgccggagtgacattaaaggaagccaacgagattctgcagagaagcaagaagggcaagctaccaattgtcaatgactgcgacgaactagttgccattatagctcgtactgacttgaagaagaaccgggactatcctctggcctccaaggactcgcagaagcagctactgtgcggggcagccgttggtacccgagaggacgataaatatcggctggatcttttgacacaggctggcgtggacgttatcgtgttggatagctcgcagggtaactctgtgtaccagatcgctatggtgcactacatcaagcagaagtaccctcacctacaggttatcgggggaaatgtagtgacagccgctcaggcaaaaaatctcatcgatgcgggcgtggatgggctgcgagtcggcatgggctgtggttctatctgtattacacaggaggtaatggcttgtggacggccacagggaactgctgtctataaagtcgcagagtacgctcgccgatttggggttcctattattgctgacggcggcatccagaccgtcggtcacgtggtgaaagccttggccctcggagcatccaccgtgatgatggggtctcttctagccgccaccacagaggctccgggcgagtacttcttcagcgatggagtcagattaaagaaatatagagggatgggatccctggacgctatggagaagtcttctagcagtcagaaaagatacttcagcgagggtgacaaggtgaagatagcccaaggcgtgtctgggtctattcaggataagggcagcatacaaaaatttgtgccttacttgatcgctggtattcagcacgggtgccaggacatcggcgcccggagtctgagcgtcttgaggtctatgatgtattcaggtgagttaaagtttgagaagcgtacaatgagcgcacaaatcgagggaggtgtgcatggactgcacagctacgaaaaaagactgtattag

SEQ ID NO: 191287 - DNA, 1530 bp, synthetic construct
  misc_feature 1..1530: note = Description of Artificial Sequence: Synthetic coding sequence
  source 1..1530: mol_type = other DNA
atggccgactacctgatcagcggcggcaccggctacgtgcccgaggacggcctcacggcgcagcagctgttcgccagcgccgatgggcttacatataatgacttcctgattctccctgggtttattgatttcatcgcagacgaggttgacctgacttccgcactgactcggaagataacactcaagacacctcttattagcagtccaatggacactgtgaccgaagctgacatggccattgcaatggcactgatgggtggcatcggcttcatccaccataactgcacgcctgaattccaagcgaatgaaaaatttgagcagggattcatcacagatcccgtggtgctctcccccagtcatactgtgggtgacgtgctggaagctaagatgcgtcacggcttctctggaattccaattactgagacaggcaccatgggctccaaactcgtcggtatcgttacatccagggatattgacttcctcgccgagaaagatcacacgacgttgttgtcggaagtgatgacgcctaggattgagcttgttgttgctcctgctggggtgacccttaaggaagctaacgaaatcctgcagaggtcaaaaaaggggaaattgcccatcgttaatgactgtgacgaactcgtagccatcattgcgcgtactgatctgaaaaagaatagagactatccactggcttccaaggacagccaaaagcagctgctctgtggtgcagcagttggcacaagagaagatgacaagtacaggttagatctgctcacacaagccggagttgatgtgatcgtgctcgattcgagccagggaaacagcgtctaccagattgccatggtgcattatatcaaacaaaagtacccccatttgcaggtgatcggcggcaatgttgtgaccgctgcccaggccaaaaacctcatcgacgccggggtggatggcctgcgagtgggtatgggctgcggcagcatctgcatcacacaagaggtgatggcctgtggccgtccacaaggcacggcagtatataaggttgctgaatatgcacggcgctttggagttccgatcatcgcagacggcgggatccagaccgtcggacatgtggtgaaggcgctggccttaggagcttctacggtcatgatggggtcccttttggcagcaacaaccgaggcccccggcgagtacttcttcagcgatggggtaaggttgaaaaagtacagggggatgggctccctagacgctatggagaagagtagtagctcacaaaagcggtattttagcgagggtgacaaagttaagatcgctcagggtgtgtccggttcaatacaggataagggctctatccagaaatttgttccatacctcatagcggggattcagcacggctgccaggacatcggagccagatcgctgtccgtcctaagaagtatgatgtactctggagaactaaagttcgagaaaagaactatgtccgcacagattgaaggcggggtgcacgggctgcactcttatgaaaaacgtctgtactag

SEQ ID NO: 191288 - DNA, 1470 bp, synthetic construct
  misc_feature 1..1470: note = Description of Artificial Sequence: Synthetic coding sequence
  source 1..1470: mol_type = other DNA
atggccgactacctgatcagcggcggcaccggctacgtgcccgaggatgggctcacggctcaacagctctttgcatcagccgatggactcacttataacgatttcctgattttgccaggctttattgacttcatcgctgatgaggtggacctgacctctgccctgacaagaaagatcacacttaaaacccctctcatctcttctccaatggacaccgtcacagaagcagatatggccattgccatggcaaaattcgaacaggggttcattacagaccccgtggttcttagcccctcccacacagttggggatgtccttgaagccaagatgcggcatggatttagcgggattcccataactgaaacaggaacaatgggctctaagctggtgggcatcgttaccagcagggatattgactttcttgccgagaaagatcacaccacactactgtccgaggtgatgacaccccggattgaactcgtggtggcgccggccggggtgactctcaaggaagctaacgagatcctccaacgctcaaagaaagggaagctccccatcgttaatgactgcgatgagctcgtggccatcatcgctagaaccgatttgaagaaaaatagggattatcctctagcctcaaaggattctcagaagcagttactgtgtggcgccgcggtggggacacgggaggacgacaagtacaggctggatctgcttactcaagccggcgtggacgtgatagtcctcgactcctctcagggaaattcagtctatcagattgccatggtccactatataaaacaaaagtacccgcatctccaggttattggagggaacgttgtgactgcagctcaggctaaaaacctcatagacgctggcgtagatggactgcgggtcggcatggggtgcgggtccatatgtattacccaggaagtcatggcttgcggacgcccccaggggaccgctgtctataaagttgctgagtatgccagaaggttcggcgtgccaatcattgctgacggcgggatccagacagtggggcatgtcgtgaaagccctggctctgggtgcatccacggtaatgatgggatcactccttgcagctaccaccgaggcgcctggagagtatttcttttccgatggagtacgcctgaagaaataccgggggatgggcagcctagacgccatggagaaaagttcttcttcccaaaagcggtacttcagcgagggcgacaaagtcaagattgctcagggcgtgagtggaagcattcaagataaggggtctatacagaagttcgtcccatatctgatcgccgggattcagcatggatgccaagacatcggcgctcggagcctctcagtgctgaggtccatgatgtatagtggagagttgaagttcgagaagcggacgatgagtgctcagattgaggggggagtccacggactacattcctacgagaaacgcctgtactag

SEQ ID NO: 191289 - DNA, 1545 bp, synthetic construct
  misc_feature 1..1545: note = Description of Artificial Sequence: Synthetic coding sequence
  source 1..1545: mol_type = other DNA
atggccgactacctgatcagcggcggcaccagctacgtgcccgacgacggcttaacagcccagcagctgttcaactgtggcgatggactgacctacaatgacttcttgattctgccggggtatatcgactttactgctgaccaggtggatctgacatctgcattgacgaagaagatcactctaaaaacacctctcgtcagctcaccaatggacacggtgactgaagctggcatggctattgcgatggctcttacgggggggattggattcattcatcacaactgtacaccagagtttcaggcgaacgaagtaagaaaagtgaagaaatatgagcagggctttattaccgatccagttgtactttctccaaaggatcgggtgagggatgtatttgaggccaaagcgagacacggattttgcggcatccccattaccgacaccggtcgtatggggagccgcttggtgggcattatctcaagcagggatattgattttctgaaagaagaggaacacgactgcttcctcgaggaaatcatgacaaagcgcgaggatctggtagtggcgcccgccgggattacgctcaaggaggcaaacgaaatcctgcagaggtccaagaagggaaaactacccatagtgaacgaggatgatgagcttgtagctatcattgccagaacagatcttaagaaaaatcgcgattatcctctggctagcaaagatgcgaaaaagcagctgctgtgcggcgccgccatcggcacgcacgaagacgacaaatatcgattagacctcctggcccaggctggggtggatgttgtcgtcctagactcaagccagggcaattccattttccagattaacatgatcaaatatattaaggataagtaccccaaccttcaggtaattgggggaaatgttgtcaccgccgcccaagctaagaatttgatagatgccggtgtggatgccctccgagttggcatgggatccgggagtatttgtattactcaggaggtgcttgcatgcgggcgccctcaagccacagccgtgtataaggtctcagaatacgctagaaggtttggagttcccgtgattgcagacggcggtattcagaacgtgggacacatcgcgaaggccctagctctgggggctagcacagtgatgatgggatcattgttggctgccaccacagaggcacctggcgagtatttcttttctgacggcattcggctcaagaaatatcggggcatgggaagtctggacgctatggacaaacatctgagtagccagaaccgctatttctctgaagccgacaaaatcaaggttgctcagggtgtttccggggcagtacaggacaagggaagtattcataagttcgtgccttatctgattgcagggatccagcacagctgtcaggatatcggagctaagagcctcacacaggtgagagccatgatgtatagcggggagctcaagtttgaaaagagaactagctctgcccaggtggaaggcggagtccattcgctgcatagctacgagaagcggctcttttag

SEQ ID NO: 191290 - DNA, 1074 bp, synthetic construct
  misc_feature 1..1074: note = Description of Artificial Sequence: Synthetic coding sequence
  source 1..1074: mol_type = other DNA
atggccgactacctgatcagcggcggcaccagctacgtgcccgacgacggcctgaccgcccagcagctgttcaactgcggcgacggactcacctacaatgattttctgatcctgccaggatatattgactttaccgccgatcaggttgacctcacgtctgctctgaccaaaaaaattacgttaaagacccctctggtttcctcgcctatggatacagtaactgaagcagggatggccattgccatggcccttaccggcggcatagggttcatccaccacaactgcacacccgagttccaggccaatgaagtcaggaaggtaaagaaatacgaacaggggttcatcacagatcccgttgtgctcagccccaaggacagagtacgggacgtatttgaagcgaaagcgcggcatggattctgcggcattcccatcactgacacaggtcgaatggggtctagactggtcggtattataagcagtcgcgatatcgattttctcaaagaggaggaacacgattgcttcctcgaagaaatcatgaccaaacgagaggacctggtggtcgcacccgcaggcatcacgctgaaggaagcaaacgagattttgcagcgctccaaaaaggggaaactccccattgtgaatgaggatgacgagctggtggccatcatcgcacgtactgatttgaagaaaaacagagattatcctctggcgtcaaaagacgcgaagaaacagctgctgtgtggtgccgccatcggcacacatgaggacgacaagtaccggttggacctgctcgcacaagcaggagtagacgtcgtggtgctggacagctcacagggtaactctatatttcagatcaacatgattaagtatataaaggacaaatacccaaatctccaggtcattggaggcaatgtcgtgactgctgcccaagcaaaaaacttgatcgacgcgggcgtggatgctctccgtgttggaatgggatctggctctatttgcattacccaggaggtcctggcgtgtgggaggccacaagccaccgctgtttgtacccagaagcagcaccctcacttccagtag

SEQ ID NO: 191291 - DNA, 501 bp, synthetic construct
  misc_feature 1..501: note = Description of Artificial Sequence: Synthetic coding sequence
  source 1..501: mol_type = other DNA
atgctgcggggcgtgctgggcaagaccttccggctggtgggctacacaatccagtatgggtgcatagctcactgtgctttcgagtacgttggcggggtcgtgatgtgcagtggtcctagtatggagccaactatacagaattcggatatcgtatttgctgagaacttatctagacacttttatgggattcaaagaggcgacatcgttattgccaaaagccctagtgatccaaaaagtaacatttgtaagagggtcataggactggagggagacaagattttgacaacctctccttccgacttttttaagtctcacagctacgtgcctatggggcacgtgtggctggagggcgataacctgcagaatagcaccgactcccgatgttacggtccgattccgtacggtctgatcagagggcggattttttttaagatatggccactgagcgactttgggtttctgcgggcctctcctaacggacacagattttccgatgactag

SEQ ID NO: 191292 - DNA, 324 bp, synthetic construct
  misc_feature 1..324: note = Description of Artificial Sequence: Synthetic coding sequence
  source 1..324: mol_type = other DNA
atgctgcggggcgtgctgggcaagaccttccggctggtgggctacactatccagtacggctgcattgcccattgtgcttttgaatatgtgggcggggtagtgatgtgcagtggccctagtatggagcctaccatacagaatagcgatatagtgtttgccgaaaatctgagccgccatttctacgggattcagaggggcgatattgtgatcgccaaatccccttccgaccctaaatccaatatatgtaaaagagtgataggtctcgaaggagacaaaattcttactacgtctccttcggatttctttaaaagccatagttattag

SEQ ID NO: 191293 - DNA, 291 bp, synthetic construct
  misc_feature 1..291: note = Description of Artificial Sequence: Synthetic coding sequence
  source 1..291: mol_type = other DNA
atgctgcggggcgtgctgggcaagaccttccggctggtgggctacaccatccaatacggctgcattgcgcattgcgccttcgagtatgttggcggggtcgttatgtgcagcggaccgagtatggaacccacgatccagaactccgatatcgtgttcgcagagaatctcagccgacatttctacgggatccaacgcggggacattgtcattgctaagagcccgtccgatccaaagtcgaatatctgcaagcgcgttatcggtctggagggcgataagatactaacgacgtag

SEQ ID NO: 191294 - DNA, 501 bp, synthetic construct
  misc_feature 1..501: note = Description of Artificial Sequence: Synthetic coding sequence
  source 1..501: mol_type = other DNA
atgctgcggggcgtgctgggcaagaccttccggctggtgggctacacaattcagtacggatgcatcgcccattgcgccttcgagtacgtaggaggagtggttatgtgttcgggaccctctatggaacctacgatccagaacagtgacatcgtattcgccgaaaatctgagtcgacatttttacggcatacagaggggcgatatagtcattgcgaaaagtccatccgaccctaaaagtaatatctgcaaacgcgtgattggtctggaaggcgataaaattctcaccacttcgccatcggactttttcaagagccacagttacgtccctatggggcacgtttggctggaaggagacaatctccaaaacagcacagactccaggtgctacggcccaatcccatacggcctgatccggggcagaatattcttcaagatctggcctcttagcgatttcgggttcttacgggcctcaccaaacggtcataggttttctgacgactag

SEQ ID NO: 191295 - DNA, 528 bp, synthetic construct
  misc_feature 1..528: note = Description of Artificial Sequence: Synthetic coding sequence
  source 1..528: mol_type = other DNA
atggcccagagccagggctgggtgaagcggtacatcaaggccttctgtaagggcttcttcgttgccgtccctgtcgcagtcacttttctggatagggtcgcttgcgttgccagggtggagggggcatcaatgcagccttccctgaaccccggaggaagccagagcagcgacgtcgtcctcctcaatcattggaaagtacgtaacttcgaagtgcaccggggagacatcgtgtcactggtctcgccaaagaaccctgagcaaaagatcataaaaagagtcatcgccctcgaaggggacatcgtccgtacgattggtcataagaatcgatatgtgaaagtcccgagggggcacatctgggtggagggtgatcaccatggacatagttttgacagcaactcatttggccccgtgtctcttggcctgctgcacgcgcatgccacacatattctctggccccctgagcgctggcagaagctggaatctgttcttccgcccgaaaggctgcctgtccagcgggaagaggaatag

SEQ ID NO: 191296 - DNA, 528 bp, synthetic construct
  misc_feature 1..528: note = Description of Artificial Sequence: Synthetic coding sequence
  source 1..528: mol_type = other DNA
atggcccagagccagggctgggtgaagcggtacatcaaggccttctgcaagggcttcttcgttgccgtgccagttgcagtcacatttttggacagagtagcgtgtgtggcccgcgttgaaggggcgtcaatgcaacctagcctcaatcccggcggaagtcagagtagtgatgttgtgctgctcaaccactggaaggttagaaattttgaggtgcaccgaggagatatagtaagcctggtgtctccaaagaacccggagcagaaaatcattaagcgggtcatcgcactggagggtgatatagtgagaaccataggccacaagaataggtacgtgaaggttccccgaggccatatttgggtagagggtgaccaccacgggcatagcttcgatagcaattcgtttggccccgtgtccctggggctgctgcacgctcacgccactcacattctatggccgcccgaaagatggcagaaactggagagtgttcttccccctgagaggctccctgtgcaaagagaagaagaatag

SEQ ID NO: 191297 - DNA, 528 bp, synthetic construct
  misc_feature 1..528: note = Description of Artificial Sequence: Synthetic coding sequence
  source 1..528: mol_type = other DNA
atggcccagagccagggctgggtgaagcggtacatcaaggccttctgcaaggggtttttcgttgcagtacccgtagcagtgacgttcctagatagagtggcctgcgttgcccgggtggagggagcgtccatgcagccgagcctcaacccgggtggctctcagagctccgatgtggttcttttgaatcattggaaagtgcgtaacttcgaagtccatcgcggggatatcgtgtctctggtctcacccaaaaacccagaacagaaaattattaagagagttatagccctggaaggcgatattgttcgaaccatcggtcataaaaatcgttatgtaaaggtacccaggggccatatttgggtggaaggagatcaccatggccacagtttcgattctaattcgttcggaccagtgagcttgggactgttgcacgcccacgctacccatatcctctggcctcccgaaagatggcagaaattggaatccgtgctgccaccagaaagacttccagttcagagagaggaggagtag

SEQ ID NO: 191298 - DNA, 333 bp, synthetic construct
  misc_feature 1..333: note = Description of Artificial Sequence: Synthetic coding sequence
  source 1..333: mol_type = other DNA
atggcccagagccagggctgggtgaagcggtacatcaaggccttctgcaagggcttttttgtggcagtccctgtggccgttacttttctggaccgcgttgcctgcgtggcccgggtggaaggtgcctcaatgcaaccaagcctgaaccccggtggcagccagagcagcgatgtggtgctcttgaaccattggaaggtccgaaattttgaggtgcaccggggagacattgtgtccttagtatctcccaagaacccagaacagaagataatcaaacgggtgatcgctctggaaggagacattgtgagggatggcaggaagctgaaaagaatctag

SEQ ID NO: 191299 - DNA, 240 bp, synthetic construct
  misc_feature 1..240: note = Description of Artificial Sequence: Synthetic coding sequence
  source 1..240: mol_type = other DNA
atggcccagagccagggctgggtgaagcggtacatcaaggccttctgcaagggcttcttcgtggcagtcccagtggcagtgaccttcctcgacagagtcgcctgcgtggctcgggtggaaggagcctctatgcaaccctcactcaatcccgggggcagccagagctcagatgttgtcttgctcaaccactggaaggtgagaaattttgaagtccatcgaggtgacattgtcagcctttag

SEQ ID NO: 191300 - DNA, 528 bp, synthetic construct
  misc_feature 1..528: note = Description of Artificial Sequence: Synthetic coding sequence
  source 1..528: mol_type = other DNA
atggcccagagccagggctgggtgaagcggtacatcaaggccttctgcaaaggcttttttgtagctgtaccggttgccgtcacttttttggatagggtggcctgcgtggctagggtcgagggtgcttcaatgcagcctagccttaatcccggcggctcacagagcagcgatgtcgtccttcttaatcactggaaggttcgaaatttcgaagttcatcgcggcgacattgtatctctggttagtcccaagaatccagagcagaagattatcaagagagtaatcgccctcgagggggatattgtgcggaccatcggccacaagaacagatacgtgaaagtgccaagaggtcatatttgggtggagggggatcaccacggccacagtttcgattcaaacagctttgggccagtcagtttagggctgctgcacgctcatgcaacacatatattgtggcctccagaacggtggcagaaactcgaatcagtcctgccacccgaacgactgcctgtgcagcgtgaagaagaatag

SEQ ID NO: 191301 - DNA, 555 bp, synthetic construct
  misc_feature 1..555: note = Description of Artificial Sequence: Synthetic coding sequence
  source 1..555: mol_type = other DNA
atggtgcggaagctgaagttccacgagcagaagctgctgaagcaggtggactttctgaactgggaggtgacagatcataatcttcacgaactgcgtgtgctcaggcgatacagactgcagagaagagaagactacacccgatacaatcagctgagtcgggctgtccgtgaactcgctcgtcgactgcgtgacttacctgaaagggaccagttccgagtgagagcatctgcagcactgttggacaagctttatgcgctgggccttgttcctacgcgaggctccttagaactttgcgacttcgtgactgcaagctccttttgccgtcgccgcctccccacagtgctgctgaaactgagaatggcccaacacctgcaggcagctgtcgcctttgttgagcagggccacgtcagagtgggccccgatgtggttaccgatcccgcattcctggtcactcggtccatggaggactttgtgacttgggttgattcgtccaaaattaagcggcatgttttagaatataatgaggaacgggacgacttcgatctggaggcctag

SEQ ID NO: 191302 - DNA, 555 bp, synthetic construct
  misc_feature 1..555: note = Description of Artificial Sequence: Synthetic coding sequence
  source 1..555: mol_type = other DNA
atggtgcggaagctgaagttccacgagcagaagctgctgaagcaggtagactttctgaactgggaagtaactgaccataatctacatgagctgcgagtcttgcggcggtaccggttgcagcggcgggaggactatacaaggtataaccagctgtctcgagctgtccgcgaactggccaggaggctgcgcgacttgcccgaacgggaccaatttcgagtgcgcgcctccgcggctctcctcgacaaattgtacgccttgggattggtccctaccaggggctctctggagctttgtgacttcgtgacagcatctagtttttgtcggcgcagacttccaaccgttcttttgaagctcaggatggcacaacacctgcaggcagcagtggcctttgtggaacagggacatgtgcgggtgggaccggatgtcgtgaccgaccccgcttttctggtgaccagatcaatggaagacttcgtgacatgggtggactcctcaaagataaagcgccacgtgctagaatacaatgaagagcgcgatgattttgaccttgaggcctag

SEQ ID NO: 191303 - DNA, 96 bp, synthetic construct
  misc_feature 1..96: note = Description of Artificial Sequence: Synthetic coding sequence
  source 1..96: mol_type = other DNA
atggaggacttcgtgacctgggtggacagcagcaagatcaagcggcacgtcttagagtataacgaagaacgcgacgattttgacctggaagcctag

SEQ ID NO: 191304 - DNA, 876 bp, synthetic construct
  misc_feature 1..876: note = Description of Artificial Sequence: Synthetic coding sequence
  source 1..876: mol_type = other DNA
atgctgcggcgggaggcccggctgcggcgggagtacctgtaccggaaagctcgtgaggaggcccagcggagtgctcaagagcggaaggaaaggcttcggcgtgccctggaagagaaccgcttgataccaaccgagctccgtagggaagccctggctctgcagggcagtctagagtttgacgatgccggcggtgaaggcgtaacttcacatgtggatgacgaataccgctgggcgggagtggaggaccccaaggtgatgataactacatcgcgggatcccagttcccgtttaaagatgttcgcgaaagaattgaagctcgtgttcccaggtgcacagcgaatgaaccgcggcagacacgaggtaggtgctctggtgagagcctgcaaggccaacggggtgacagacctactggtagtccacgaacacaggggtacccctgtaggactaattgtctcccacctcccatttgggcccactgcttatttcactctctgcaatgtagtgatgcgtcacgatatcccagatctgggaaccatgtcagaggcaaaacctcatctcatcacacacgggttcagctcccgcctaggaaagcgagtgagcgatattctccgctacttgttccccgtccctaaagacgactcccatagggtaatcactttcgctaatcaggatgattatatttccttcagacatcacgtgtataagaagacagaccacagaaacgtggagctaaccgaggtgggtcccagattcgaactgaagctctatatgattcggttaggtacactggagcaggaggccactgccgacgtggaatggcgctggcacccttacaccaatacagcaaggaaacgagtgttcctgtccacggagtag

SEQ ID NO: 191305 - DNA, 2928 bp, synthetic construct
  misc_feature 1..2928: note = Description of Artificial Sequence: Synthetic coding sequence
  source 1..2928: mol_type = other DNA
atggacctgaacagcgccagcaccgtggtgctgcaggtgctgacccaagcaactagccaggacacagctgtcctcaagcccgccgaggagcagcttaagcagtgggaaacccaacctgggttctatagcgtactgttgaatatcttcactaatcacacattagatattaacgtgagatggctggcagtgctatattttaagcatggtattgatagatattggcgacgggtggcccctcatgctttgtcggaggaggaaaaaaccaccctgcgggccggcctgatcaccaacttcaacgaacctatcaatcagatagcaacacagatcgccgtattgatcgctaaagtcgccagactggattgtccgaggcaatggccagaactaatccctaccctgatagagtctgtcaaagtccaggacgatcttcgccaacatagggccctgttgacattctaccacgtgacaaagaccctggccagtaagaggctggcagccgacaggaagcttttttatgatcttgcatcagggatttacaattttgcgtgttcattgtggaaccatcatactgatacttttctgcaggaagtaagctcaggtaatgaagccgcaatattatcttcgctcgagcgcacgctcctgagcctgaaggtcctgcggaaactgacagtcaatggcttcgtggagccccataagaatatggaggtgatgggctttctgcacggaatttttgagcgcctgaagcagtttctggagtgctctagaagtatcggaacagacaatgtttgcagagatcggctggagaaaactattattctgttcacgaaggtgctgctggatttcctggaccagcatccattttcgtttactccattaattcagcggtcccttgaattcagcgtcagttacgttttcactgaggtgggcgaaggcgtcacttttgagaggttcatcgtgcagtgcatgaaccttatcaaaatgatagtcaagaactatgcttacaagccttccaaaaacttcgaggactcgtctccagaaacactcgaggcacataaaatcaaaatggcgttctttacatatccgacactgacagagatctgtcggcggctggtgagtcattacttcctcctgactgaggaggaattaacaatgtgggaggaggatccagaggggtttacagtagaggagacaggaggcgatagttggaaatattcgctcaggccatgtaccgaggtgttgttcatcgatatattccacgaatataaccaaacactcacacccgtgctactggagatgatgcagacactccagggcccaacaaatgtggaagatatgaatgccctgttaatcaaagacgctgtctataatgcagtcggactggccgcttatgaactgttcgactccgtggacttcgatcagtggttcaaaaaccagctacttccagagctgcaagtcattcataaccggtacaaaccactgagacggcgcgtcatctggctgatcgggcagtggatcagtgtcaagtttaagagtgatctccgccccatgctttacgaggcaatatgtaatctcctgcaagaccaggatctggtggttaggattgaaaccgccaccaccttgaagctgaccgtggacgattttgaatttcgtacagatcagttccttccttatctggaaaccatgttcacgctgctgtttcagctcctgcagcaagtgaccgagtgtgacacaaagatgcacgtgctccatgttctctcctgtgtaattgagcgcgtgaatatgcagatccgtccatatgtgggatgccttgtccagtatttgcccctgctgtggaagcagtccgaagagcataacatgctgcgctgcgcaatcttgactactcttatccaccttgtgcaagggctgggcgcagactcgaagaatctgtaccccttcctcctgccggtgattcaactatccaccgacgtgagtcagccgccacacgtttacttgcttgaagacggcttggagttgtggctggtgacacttgaaaactccccatgtattactccggagctgctcaggattttccagaatatgtcacctctccttgagctatcctctgagaatttgaggacatgcttcaagataatcaatggatacattttcctgtcgagcacagaattcctgcaaacctatgccgttgggctgtgccaatccttttgcgagttgctgaaggagatcacaacagaaggacaggttcaggtcctgaaagttgtggagaacgctttaaaggtcaaccccatcctcggtcctcagatgttccagccgattctgccatacgtgtttaaggggattattgagggggaaagataccctgtcgtcatgagcacctacctgggcgtgatgggaagagtccttctgcagaatacctcgttcttttcaagcctgttgaatgaaatggcccacaagttcaatcaggaaatggaccagcttctcggtaatatgatcgaaatgtgggttgaccgcatggacaacattactcagcctgagcgccgtaagttgagtgccctggctctactgagcctgttgccatcagataattccgttatccaggacaaattttgtgggataattaacatttccgttgaggggttgcacgacgtaatgactgaagaccccgaaactggaacctacaaggattgcatgttaatgtcacatctggaagagccaaaggtgacagaagatgaggaaccacctaccgagcaggacaagcgcaaaaaaatgctagctctgaaggaccctgtgcacacagtatccctccagcaatttatatacgagaagctcaaggcccagcaagaaatgttgggcgagcaggggtttcagtccttaatggaaactgtggatacagaaatcgtgacccaactgcaggagtttcttcagggcttttag

SEQ ID NO: 191306 - DNA, 3048 bp, synthetic construct
  misc_feature 1..3048: note = Description of Artificial Sequence: Synthetic coding sequence
  source 1..3048: mol_type = other DNA
atggtgcagcccatcatccacctgggctacgtggtgtacagcctgctgtacctgggctacaaacctgtacagcacgtaactgctttgaacactgtgtctagttgtcataagatggtctctatggacttgaattcagcatccaccgtggttctccaagtgttgacacaggcgacttcccaggatactgcggtgctcaaacccgccgaggaacagctgaagcagtgggagactcagcccggtttctacagtgtattgctcaatattttcacaaatcacacactggacatcaacgtgagatggctcgccgttctctattttaagcatggtatcgatcgatactggcgtcgggttgctcctcatgcgctgtccgaagaggagaagaccaccctaagagcggggttaataactaattttaacgagcccattaatcagattgccacgcaaatcgcggtgctgattgcaaaagttgcgcgcctcgattgcccccgccagtggcctgagctcatcccaaccctgatcgagagcgtgaaagtacaggacgatttacgccagcatcgcgcactgctaacgttctatcatgtcactaaaacgttagcgagcaagagactcgccgccgatagaaaactgttctatgatctcgcctctggaatttacaacttcgcatgtagtctctggaatcaccatacagatacgttccttcaggaagtctcctctgggaatgaggccgccatactgtcttccctggagagaactctactgtctctgaaagtgctgcgtaaactcaccgtcaatggtttcgtggaaccacacaagaatatggaggtcatgggctttttgcatgggatctttgagagactcaagcagttccttgagtgctctcggtccatcggtaccgacaacgtctgcagagaccggctggaaaagactattatcctgtttaccaaggtgctgttggactttttggaccaacacccatttagtttcacacctctcatccagagatctcttgaatttagtgtttcctatgtgtttactgaggtgggggaaggggtcacttttgaacggtttatcgtgcaatgcatgaatctcatcaaaatgatagtaaaaaactacgcctacaagccatcgaagaacttcgaggacagctcacctgaaaccctcgaagctcacaagattaaaatggccttctttacgtaccccactctgactgagatctgtaggcggttggtgtcccactacttcctcctgaccgaggaagagttgaccatgtgggaagaagaccctgagggattcaccgttgaggagaccggaggagactcatggaaatatagtctccgcccctgcacggaggtgcttttcatcgatatttttcacgaatataaccaaacgctcacaccagtcctgctcgagatgatgcagacacttcaaggccccaccaacgtggaagacatgaacgcactgcttattaaggatgcggtttataacgcagtcggattggctgcttatgagctgtttgattccgtggactttgaccagtggtttaaaaaccagctgctgccggaactgcaggtcattcacaaccgatacaagccccttcggcgcagggtgatttggctgattggccagtggatctcagtgaagtttaaaagcgacctacgcccgatgctatacgaggccatctgcaacttgcttcaggaccaggatttggttgtgagaattgagaccgcaactactctcaagctgaccgtggatgacttcgaatttcggacagaccagttcctgccttaccttgagacaatgttcacactactgttccaactactccagcaagtcacagaatgtgacaccaaaatgcacgtcctgcacgtgctcagctgtgtgattgagagagtaaacatgcagatccgtccttatgtcggatgcctggtacagtacctgcccctgctgtggaagcaaagcgaggagcacaacatgttgcgctgcgctattctgacaaccctcattcacctggtgcagggtctgggggccgattctaaaaatctgtatccttttctgctgcccgtgattcaattaagtacagacgtcagccagcccccccacgtgtaccttttggaggacggactagaactgtggctagtgaccctagaaaactcaccctgcattactcccgaactgctacggatattccagaatatgtcaccactacttgaactgtcgtccgaaaatctgaggacttgcttcaagattataaatgggtatattttcctgagcagcacagagtttctgcagacttacgctgttggcttatgccaatctttctgtgagctgctcaaagaaattacaaccgagggtcaggtccaggtgctaaaggtcgtcgagaatgcccttaaggtaaatcccatcctaggccctcaaatgtttcaaccaatcctgccgtacgtttttaaaggtatcatcgagggggagcgataccctgtggttatgagcacctatcttggtgttatgggcagagtactgctgcaaaataccagctttttcagtagcctgctcaacgagatggcacataagtttaaccaggagatggatcagcttctcggcaacatgatagaaatgtgggttgatcggatggacaacatcacccagccagaacgtagaaaacttagcgccctggcactcttaagtctgctgccgagcgacaactccgtgatccaagataagttttgcggcataatcaatatcagtgtggaaggactgcacgatgttatgactgaagaccctgagactggaacttacaaagattgtatgcttatgtcgcacttagaagaacctaaagttacggaggatgaggaaccccccacagaacaggacaagcggaaaaaaatgctggccctgaaagatcccgtgcatacagtgtccttgcagcagtttatatacgagaagctgaaagctcagcaggagatgctgggggaacaaggatttcagagtctgatggagactgtcgataccgagatcgtcacacagttgcaggaattcctgcagggtttttag

SEQ ID NO: 191307 - DNA, 195 bp, synthetic construct
  misc_feature 1..195: note = Description of Artificial Sequence: Synthetic coding sequence
  source 1..195: mol_type = other DNA
atggacctgaacagcgccagcaccgtggtgctgcaggtgctgacccaggcgacatctcaggacaccgccgtgctgaagcccgcagaggagcaactcaaacagtgggaaacccagcccggtttctactctgtcttgctgaatattttcactaatcacacattagatattaacgtccggtggttagctgtactctag

SEQ ID NO: 191308 - DNA, 489 bp, synthetic construct
  misc_feature 1..489: note = Description of Artificial Sequence: Synthetic coding sequence
  source 1..489: mol_type = other DNA
atggacctgaacagcgccagcaccgtggtgctgcaggtgctgacccaggccacctcccaggataccgctgtactgaaacccgctgaggaacagctgaagcagtgggagactcagccaggtttttacagtgtgctgctaaacatctttacaaaccacacgcttgacatcaacgtgcgctggctggctgttctttactttaaacatggcattgaccgttattggcggcgcgtggcaccgcacgcgctgagcgaagaggagaagacaacactccgagctggactaattacgaactttaacgagccgatcaaccaaatcgcaacccagatagcagtgctgatagctaaggtggcgagactggactgcccacggcaatggccagaattaataccaacactgatcgaatctgtgaaggtacaagatgatctccgccaacaccgggccctattgaccttctaccacgtgacaaaaaccctggcctcaaagcgatag

SEQ ID NO: 191309 - DNA, 450 bp, synthetic construct
  misc_feature 1..450: note = Description of Artificial Sequence: Synthetic coding sequence
  source 1..450: mol_type = other DNA
atggacctgaacagcgccagcaccgtggtgctgcaggtgctgacccaggccacttctcaggacactgccgtgcttaaaccagccgaagaacaactgaagcagtgggaaacccagccagggttctactctgtcctgttgaatattttcaccaaccacacactggacatcaacgtgcgctggctagctgtcctgtattttaagcatggaattgatcggtattggcggcgagtggccccccatgccttaagtgaggaagagaagaccaccctgcgggcgggactgattaccaacttcaacgaaccaattaatcagatcgctacccaaattgcagtgctgattgccaaggtggcccgcctagattgccctaggcagtggcctgaactgattcctactttaatagagtcagttaaggtgcaggacgatttacgtcagcatcgcgccctgctctag

SEQ ID NO: 191310 - DNA, 1425 bp, synthetic construct
  misc_feature 1..1425: note = Description of Artificial Sequence: Synthetic coding sequence
  source 1..1425: mol_type = other DNA
atgatgcagaccctgcagggccccaccaacgtggaggacatgaacgctctgctgataaaagatgcggtgtacaacgctgtgggccttgccgcttacgaactgttcgacagtgtggactttgaccagtggtttaaaaaccagctgctgccagagctacaagtgatccacaaccgctacaagccactccggcggcgagtgatctggctcattggccagtggatttccgttaaatttaagagtgaccttcgccccatgttgtatgaagcaatctgcaacctgctccaggatcaggatttggtggtgcgtatcgagaccgctacaacactgaaactaaccgtggatgactttgaatttagaactgaccagttcctgccttatctggagacaatgttcacactgctgttccagctactccaacaggtcactgagtgtgacacaaagatgcatgtcctgcatgtactgtcttgtgtgatcgagagggtgaatatgcagattaggccttatgttgggtgccttgtgcagtacctgcccctgttgtggaaacaaagcgaggagcacaatatgctgcgctgcgccatcctgaccacactgatccacctagttcaggggttaggagccgactcaaaaaatctgtatccatttttactcccagtgatccagctgtctactgacgtgtcgcagcccccacacgtgtatctcctagaggacgggctggagctctggcttgtgactctcgagaactctccgtgtattacacccgaactgcttcgtatcttccagaacatgagtcccttgctggagctgagttcagaaaatctcagaacctgcttcaaaataataaatgggtatatctttctgtcatccactgaattcctacagacgtacgcagtgggactgtgtcagtcattctgcgaactgctgaaggagattaccacagaggggcaggtacaggtgttgaaggtggtcgaaaatgccctgaaggttaatcccatactcggccctcaaatgtttcaacccatcctcccgtacgtctttaagggaattatcgagggcgagcgataccccgtcgttatgtcgacctatctcggagttatgggccgggttttgctccaaaacacgagcttctttagttctttgctgaatgagatggcacacaagttcaatcaagagatggaccagctgctgggcaatatgattgaaatgtgggttgatcggatggataacattactcagcctgaaagaagaaagttaagtgccctggccctcctctctttgctcccaagcgataatagcgttatccaggacaagttttgtgggatcatcaacatttctgtggagggactgcacgatgtgatgactgaggatccggagacagggacatacaaggattgcatgttgatgtcccacctggaggaaccaaagtag

SEQ ID NO: 191311 - DNA, 3117 bp, synthetic construct
  misc_feature 1..3117: note = Description of Artificial Sequence: Synthetic coding sequence
  source 1..3117: mol_type = other DNA
atggaccccaacaccatcatcgaggccctgcggggcaccatggaccccgcactgcgtgaggctgccgagcgccaactgaacgaggctcataaatccctgaattttgtgtctacactgctgcagataactatgtctgaacagctcgacctgccagtgcgccaggcaggagtgatttacctcaagaacatgattactcaatattggccagatcgagaaaccgctccaggagatatttcaccctacacaattcctgaggaagacagacattgcatcagagaaaacatcgtcgaagctatcattcacagccctgagctgatccgcgtgcaactgacaacatgtatacaccacatcatcaagcatgattatcccagccgctggaccgcgattgtagataagatcggtttctacctgcagtctgataacagcgcttgctggctaggaatcctgttatgcttataccaattggttaagaattacgaatataaaaagccagaagaacgctcacctctagtcgctgcaatgcagcatttcctaccagtcctgaaagatcgtttcatccagttactttcagaccagagtgatcaaagtgtcttgattcaaaagcagatatttaagattttctacgctctcgtgcagtataccctcccactggagctaataaatcagcagaatctaaccgaatggattgaaattctgaagacggtggtcaaccgagacgttcccaatgagacacttcaggtggaggaagatgatcgccctgagcttccctggtggaagtgtaagaaatgggccctgcacatattggctcgtcttttcgagcgttatgggtctcccggaaatgtctctaaggaatacaatgaatttgcagaggtattcctgaaagccttcgccgttggcgtgcaacaggtcctactcaaagtcttgtatcagtacaaagaaaaacaatatatggcacctagagtgctgcaacaaacactcaactatatcaaccagggggtatcgcacgctcttacatggaagaacctcaagcctcacatccaaggaattatccaggacgtgatcttccctctgatgtgctataccgatgccgacgaagagctctggcaggaggatccatatgaatacatacgcatgaaatttgacgttttcgaggactttatttctcctactacagctgctcagaccctgctgttcactgcttgttcgaagcgaaaagaggtgctgcagaaaactatggggttttgttaccaaatccttaccgagcccaacgcggacccgcgaaaaaaggatggcgctctgcacatgatcggctcactagccgaaatcctgctaaagaagaaaatttacaaagatcagatggaatacatgctgcagaaccacgtcttcccacttttcagcagtgagctgggttatatgagagcgcgtgcgtgctgggtcttgcactatttctgcgaagttaagttcaagtctgaccagaacctccagactgcccttgagctgaccaggcgatgtctgatcgatgaccgagagatgccagtaaaagtggaggccgcaatcgcccttcaagtgctgattagcaaccaagagaaggctaaagaatacatcacaccttttataagaccggtgatgcaggccctgctgcacattattagagaaacagagaacgacgatctgaccaatgtgatccagaaaatgatatgtgaatacagcgaagaagtgactcccattgctgtggaaatgacacaacatctcgctatgaccttcaatcaggtaattcagaccggacccgatgaggaaggttctgatgataaagcggtgacagcaatggggattctgaataccattgataccctcttgtccgtggtggaggatcataaagagataactcagcagctcgaaggcatctgcctgcaggtgatagggaccgtgttgcagcagcatgttctcgagttctacgaggagatattctcactggcccacagtcttacctgtcagcaggtttctccacagatgtggcagctcctacctctggtattcgaagtgttccaacaggacggctttgattactttacggacatgatgcccctgctgcataactacgtgaccgtggataccgacacactgctttccgacaccaagtacctggagatgatctatagtatgtgcaagaaggttttgacaggtgtcgctggagaggacgccgagtgccacgctgcaaaactgttggaggtcattatattacagtgcaagggccggggcatcgaccagtgcatccccttgtttgtcgaagctgccctggagagattgactcgcgaagtgaagacctcagagcttcgcacgatgtgcctgcaagtggctatcgcggcgctgtactataacccacacctgttgcttaatacactggagaacctgagatttcccaacaatgtggagccagtcactaatcattttataacccagtggttaaatgatgttgactgcttcctcgggctccacgatagaaagatgtgtgtgctgggcctctgcgctttgattgatatggaacagattccccaggtactcaaccaggtgtccggccagatcctccccgctttcatcctgctctttaacggcttgaaacgcgcttatgcatgtcatgccgaacatgagaatgactcagatgatgacgacgaagccgaagacgacgacgaaaccgaagaactgggtagcgacgaggatgacatcgacgaggacggacaggagtacttagagatcttagctaagcaggccggggaggacggcgacgacgaagattgggaagaagacgatgccgaggagactgccctggaggggtatagcactattattgatgacgaggacaatcctgttgacgaataccagatctttaaggcaatctttcagacaatccaaaatcgcaatccagtttggtatcaggctctgacccacggacttaacgaagaacagcgcaaacagctgcaggatatcgccaccctggccgatcaacgacgcgccgctcatgaatcaaagatgattgagaagcacggcgggtacaaattcagtgcccccgttgtgcccagcagctttaactttggcgggcccgcgcccggcatgaattag

SEQ ID NO: 191312 - DNA, 3114 bp, synthetic construct
  misc_feature 1..3114: note = Description of Artificial Sequence: Synthetic coding sequence
  source 1..3114: mol_type = other DNA
atggacctgaaccggatcatccaggccctgaagggcaccatcgaccctaagcttagaattgcagctgaaaatgaattaaaccagtcatataagattattaactttgccccatctttgctccgtatcatcgtttctgaccacgtggagtttccagtcaggcaggctgcagctatttacttgaagaacatggtgactcagtattggcctgatcgggaacctcccccgggagaggccatcttcccctttaatatacacgaaaatgaccggcagcagattcgtgacaatatcgtggaaggcattattaggagtcccgatctcgtccgcgtccaattgactatgtgcctgcgcgccatcattaaacacgatttcccaggccattggccaggcgtggtggacaagatcgactattacttacagtctcagtcatccgcaagttggcttgggagcctcctgtgtctttaccagctagtcaagacatatgagtataagaaagcagaagaacgtgagccgctgataatcgccatgcagatattcctaccacggattcagcagcagattgttcagttactccctgatagttcttattattccgtgctgttgcaaaaacagattctgaaaatcttctatgcactggtgcagtacgcactcccactgcaattagtgaataatcaaacaatgaccacatggatggagatttttagaacgatcattgatagaacagtcccacctgagaccttacacattgacgaggacgatcggcccgagttagtttggtggaagtgcaagaagtgggcactccatatcgtggcaaggctgttcgagaggtacggcagccccggcaacgtgactaaagagtatttcgagttctctgaatttttcttaaagacttatgctgtgggcatccagcaggtactcctgaagattctggaccagtacagacagaaggagtatgtggccccgcgcgttctgcagcaggcattcaattatttaaaccagggtgtggtgcatagtatcacttggaagcagatgaagccgcacatccagaacatctctgaggatgttatcttcagcgtcatgtgttataaagacgaggacgaagaactttggcaggaagatccctatgaatatattagaatgaagtttgatattttcgaagactatgcaagccctacgactgcagctcaaacacttctgtacaccgctgccaagaagcggaaggaggtgctgccaaaaatgatggcattctgttaccagattcttaccgaccccaactttgacccccggaagaaagatggtgccctccacgtgatagggagcctggcagaaatcctcctgaaaaagtcattgtttaaagaccagatggaactcttcttacagaaccacgtttttccgctgctcctgtccaatctcgggtacctcagagcacgaagctgctgggtgctccacgccttctcatctctaaagttccacaatgaattgaacctccggaacgctgttgaattggctaaaaaatcacttatcgaggacaaggagatgccagtcaaggtggaagcagccttggcgctgcagagtctgatctcaaaccagattcaggccaaagagtatatgaaacctcatgtgaggccaatcatgcaggaactcctgcacattgtccgggagactgagaacgatgatgtgacaaatgttattcaaaaaatgatctgcgaatattcccaggaagtggcttctattgccgtcgacatgacccagcatctcgctgaaattttcggcaaagttcttcagtctgacgagtacgaggaagttgaagacaagaccgttatggcaatgggcatcctgcacacgatcgacaccattctgaccgtggtggaggaccacaaagaaatcacccaacagctggagaatatttgcctaaggataattgacctcgtcctgcaaaagcatgttatcgagttttacgaggaaattctgtcacttgcctacagcctcacctgtcatagcatcagtccacagatgtggcagctgctggggatcctatacgaggtgttccaacaggactgtttcgagtacttcacagatatgatgccgctactgcataactatgtcactatcgatacagatacactcctttccaatgcaaaacacctggagattctgtttacgatgtgtcgtaaagtgctgtgtggcgatgctggagaggacgcagagtgccatgccgctaaactgttagaagtgatcatacttcagtgcaaggggagagggatcgaccagtgcattcccctcttcgtccaattggtgctggagcggctgacacggggcgtcaagactagcgagctgcggacgatgtgtctgcaggtagctattgccgccctgtactacaatccggatcttctcctgcacacgctcgagaggatccagcttccacataaccccggaccgattactgtacaattcattaaccagtggatgaacgatacagactgcttccttggccaccacgatcggaagatgtgcatcattgggctcagcatactgctggagctccagaacaggccaccagcagtggacgctgtagtcggacagattgtgccttccatactttttctcttcctcgggttaaaacaagtttgtgcaactcggcagctggttaaccgcgaagaccgatcaaaggctgagaaggccgacatggaggaaaatgaggagattagcagcgatgaagaagagactaacgtaaccgcccaagccatgcaatctaataacggcaggggggaggatgaagaggaagaagacgacgactgggatgaagaggtccttgaggagaccgccttggaaggattctctaccccccttgacctggataattctgtggacgaatatcaatttttcacacaggccctcataacagtacagagtagagatgcagcatggtaccaattgcttatggcgcccttgagtgaggaccagaggaccgctctccaggaagtgtacacgttggcagaacatagacggaccgtcgctgaagctaagaagaaaatcgaacagcagggaggttttacgttcgagaataagggcgtcttgtctgcttttaacttcggaacagtgcccagcaataactag

SEQ ID NO: 191313 - DNA, 2499 bp, synthetic construct
  misc_feature 1..2499: note = Description of Artificial Sequence: Synthetic coding sequence
  source 1..2499: mol_type = other DNA
atggagagcctgaccctgaagggctacgccctgcccctgcagctggtgaacaatcagacaatgacaacctggatggagatcttccgaacaattatcgatcgtacagtgccccccgagacactgcacattgacgaagatgatcggcccgaacttgtctggtggaagtgtaaaaaatgggcactgcacattgtggctagactttttgaaagatacgggtctccagggaatgtcaccaaagaatatttcgagtttagtgagttcttcttaaagacatatgctgtcgggattcagcaggtcttgctgaagatcctagaccaatacagacagaaagaatacgttgcaccgcgggtgctgcagcaggccttcaattatctgaaccaaggagtggttcattcaattacctggaagcagatgaagcctcacattcaaaacattagtgaagatgtgatcttcagtgttatgtgttacaaagatgaagatgaggagctttggcaggaggacccatatgaatatattaggatgaaattcgacatcttcgaggattacgcaagcccaaccaccgccgcccaaactctgctttatacagctgctaaaaaaaggaaggaagtgctgcctaaaatgatggctttttgttaccagatcctcactgaccccaactttgaccccaggaagaaagacggagctctgcatgttattggcagcctcgccgagattctgttgaagaagtctctgtttaaagaccagatggagctattcctgcaaaaccatgtgttcccactgcttttgagtaatctgggttacttgcgggccagatcatgttgggtcctgcacgccttttcgagtctcaaattccacaacgaactaaatctgagaaacgctgttgaactggctaaaaaaagtctgatcgaggacaaggaaatgcccgtgaaagtggaagccgctctcgcactacagtctcttatctcgaatcaaatccaagccaaagagtatatgaaaccacacgtccggccaattatgcaagagttgctccacatcgtgagagagactgagaatgatgatgtaaccaacgtgatccagaagatgatctgcgagtatagtcaggaagtggcctctatcgcagttgatatgacacagcacctggcggagatctttggcaaggtactgcaatcagacgagtatgaagaagtggaggataagaccgtaatggctatgggcattctgcataccatagatactatactcactgtggttgaggatcacaaagaaattacacaacagctggagaatatttgtctgaggataatcgacctcgtgctgcagaagcatgtgattgaattctatgaggagatcctgtcgctggcttactctctgacatgccacagcatttcaccccagatgtggcagctcttgggaatcctgtacgaagtcttccagcaagactgcttcgaatactttaccgatatgatgcctcttctccacaactacgttacaatcgacaccgataccctgctgtcaaatgcgaagcatctggagatcctgtttactatgtgccggaaagtgctgtgtggagacgccggcgaggatgccgaatgccacgctgccaaactgttagaagtcattattctgcagtgtaagggccgtggaattgaccagtgcatacctctcttcgtccaattggtgcttgagaggttgacccggggagtgaagacatcagagctgaggactatgtgtctccaggtagcaattgctgcactgtactacaaccccgacctgctgttacatactctggagagaatccagcttccgcataatcccgggccaatcacagtgcaatttataaaccaatggatgaacgatacggattgttttttaggacatcacgacaggaagatgtgcatcattgggctgtctatcctgctggaattacagaaccgacctcccgccgtcgacgccgtagttgggcagatcgtcccgtcaatccttttcctgttcctcgggcttaagcaggtctgtgcaacccggcagctcgtgaatagggaagatcgttcaaaagccgagaaggccgatatggaggagaacgaggagatctcctcggatgaggaggaaacgaacgtgactgcacaggccatgcaatctaataatgggcgaggtgaagatgaggaagaggaagacgatgattgggacgaggaggttctcgaagaaaccgcattggaggggttctccactcctttagatctcgacaacagcgtggatgagtaccagttttttacgcaggccctgatcactgtgcaatccagagacgctgcgtggtatcagctacttatggcgcctctatctgaggatcaacgaactgctctccaggaggtgtacacactggcagaacacagacggactgttgccgaggcgaagaaaaagattgagcagcagggtggttttactttcgagaataagggagtcctaagcgcgtttaacttcgggacagtcccctcgaacaactag

SEQ ID NO: 191314 - DNA, 1542 bp, synthetic construct
  misc_feature 1..1542: note = Description of Artificial Sequence: Synthetic coding sequence
  source 1..1542: mol_type = other DNA
ctgagcagcggccacgagctggccaaggagtacatgaagccccacgtccggcctatcatgcaggagctgttacatatcgtgagggaaaccgaaaatgacgacgtgacgaatgtgatccagaaaatgatatgtgagtacagccaggaggtggcctctatcgccgtggatatgacccagcatttggcagaaatttttggcaaagtcctgcagtcagatgaatatgaagaagttgaggataaaactgtgatggctatgggcattctccacactatcgatactattctgaccgtggtggaggatcataaggagatcacacagcagctagagaacatctgcttaagaataattgatctcgtgctacaaaagcacgtgatcgagttctacgaggaaatcctcagcctggcgtatagccttacctgccatagtatttctccacagatgtggcaacttttggggattttatatgaagttttccagcaggactgttttgagtattttacggatatgatgccactgttgcataattatgtaaccatcgacacagacaccctgctgagcaacgctaagcatctggaaatactctttacgatgtgtaggaaggtgctgtgtggcgacgctggcgaggacgcggaatgtcatgctgccaagctgctggaagtgattatcttgcagtgcaagggtcgggggattgaccagtgtattccgctgttcgtgcagcttgttctcgagcgactgacacgcggggtgaagactagtgagttgagaacaatgtgtcttcaagttgctatcgcagccctatactacaacccagacctcctgctgcacacgctcgaaagaattcagctgccgcacaatcctggccctataaccgttcagtttataaaccagtggatgaacgacaccgactgcttccttgggcatcatgataggaaaatgtgtataatcggcctgtcaatccttcttgaactgcagaataggcccccggctgtggacgccgtcgtcggccagatagtgccttctattctattcttattcctcggcctgaaacaggtgtgtgcgacccgccagctcgtgaaccgggaggataggagtaaggcggaaaaagctgacatggaagagaatgaggagatctcaagtgacgaggaggagaccaacgtaacagctcaggctatgcagtccaacaatggacgcggcgaagacgaagaggaggaggacgatgattgggacgaagaagtcctcgaggaaaccgcactggaaggcttctcaacccccctggacttggataactccgtcgatgaataccagtttttcacccaggccttaatcactgtccaatctcgtgatgcagcctggtaccagttgcttatggctcctctaagcgaagatcaacgcactgcccttcaggaggtgtacactctggccgaacatagaagaactgtggcagaggcaaaaaagaaaatcgaacagcagggggggttcacatttgaaaacaagggcgttctcagcgctttcaatttcggtacggtgccgtccaacaactag

SEQ ID NO: 191315 - DNA, 3546 bp, synthetic construct
  misc_feature 1..3546: note = Description of Artificial Sequence: Synthetic coding sequence
  source 1..3546: mol_type = other DNA
atgcccgagaaccccgccaccgacaagctgcaggtgctgcaggtgctggacagactaaaaatgaagctgcaggagaagggagatacctcacagaatgagaagctgtctatgttttatgaaacactgaagtcacccctctttaatcagatactcacactgcagcaatctatcaagcagctgaaaggccagctgaatcacattccttccgattgttccgccaacttcgacttttctcggaaggggcttctggtatttacagacgggagcataacaaatggcaatgtgcatagaccctccaacaattctacagtctccgggctttttccatggacacccaagctcggcaacgaggattttaacagcgtgattcaacaaatggcccaggggaggcaaatcgagtacatcgatatcgagcggccaagcaccggtggtctgggattctccgtggtcgctctgcgttcccaaaatcttggaaaagtggatattttcgtgaaggatgtacagcccggcagcgtggccgatcgggatcaaaggctgaaagagaacgaccagatcttagccatcaatcacacccccctggaccagaatattagtcatcagcaagcgatcgcgctcctccaacaaactacagggtctctgaggctgatcgtggcacgcgagcctgtgcacaccaagtcatccacaagcagcagcctgaatgacacaactctcccagaaacagtgtgctggggccatgttgaggaggtggaactgatcaacgatgggtcgggcctgggcttcgggattgttgggggtaaaacctccggcgtggttgtgagaacaattgtccccggcgggctagccgacagagacgggcgcctgcaaacaggcgaccatatcctgaagataggaggcacaaatgtgcagggcatgacctccgaacaggttgctcaggtactcaggaactgtggaaatagcgttcgaatgcttgtggcccgggaccctgctggcgacattagcgttacccccccagctccggccgccttacctgtcgccctgcccactgtggcatccaaaggccctggatccgacagctctctgtttgaaacttataatgtggaattggtacgcaaggacgggcagtcgttgggcattcgaattgttgggtacgtcgggacatcccacaccggggaggcctctggaatctacgtgaaaagtatcattccaggaagcgccgcctaccacaacgggcatattcaggtgaatgacaagatcgttgccgtcgacggcgtgaacattcagggctttgcaaatcacgacgtagttgaggtgctgaggaacgcaggccaagtggtccacctcaccctcgtaagaagaaagacctccagctccacttccccactagagcccccatctgacagaggaactgtggtggagcctctgaaacctcccgcccttttcctgacaggtgccgttgagacagaaaccaacgtggatggcgaagacgaggagataaaggaacggatcgacacgctgaagaatgacaacatacaggcgctggagaagctcgaaaaagttcctgacagtcctgagaatgagttaaaaagtcggtgggaaaacctgctggggcctgattatgaggttatggtggccacgctggacacccaaatcgccgacgatgcagaactgcagaagtactctaagctgctgccaattcatacccttcggctaggcgtggaagtggacagcttcgatggacaccactacatttcatctatcgtgagcggggggcctgttgatactcttgggctcctgcaacctgaggacgaactgttggaagtgaatggtatgcagttgtacggtaagtcccgccgggaagctgttagctttctcaaggaggtgccacctccatttacgctggtctgttgcaggcgtctgttcgacgatgaggcctccgttgatgagcctcgccgaactgagacctctctcccggaaacagaggtcgatcacaatatggacgtgaacactgaagaagatgacgacggcgaactggcactatggagtccagaagttaaaatcgtggagctcgtcaaggactgcaagggccttgggtttagtatcctggactatcaagaccctcttgaccctactagaagtgtgatcgtaattcggtcgcttgtggccgacggcgtcgccgaaagatcaggcggacttttacccggtgatcggttagtgtctgtaaacgaatactgtctcgataatacctctctggccgaggctgtagaaatcctcaaagccgtcccacccggactcgttcatctgggtatttgtaaacctctggtagaggacaatgaggaggaatcatgttacatccttcactcttcctccaatgaggacaaaacagagtttagtggaaccatccacgatataaacagttccttgatcctggaggctcccaagggctttagggatgagccctacttcaaggaagagctggtcgatgagccatttttggatctgggcaaatcctttcactcacagcaaaaggagattgaacagtctaaggaagcatgggaaatgcacgagttcctgaccccacggttgcaagaaatggacgaggaacgggaaatcctggtggacgaagaatacgagctttaccaggatccatctccaagtatggaactatatcccctaagtcacatacaagaggcaacacccgtcccttctgtcaacgagttgcacttcggtacgcagtggctgcacgacaatgaaccatctgagtcccaagaagccagaacgggccgcactgtatactcacaggaggctcaaccctatggctactgtcctgaaaacgtaatgaaggagaacttcgtcatggagtcactgccgtctgtgccttccacagaaggcaactctcagcaggggcggttcgacgacctcgagaatcttaactcgctagcgaaaacatcattggatttggggatgattcccaatgacgttcagggcccaagcctgctcatagacctgcctgtggtcgcacaacggcgcgaacaggaagatctaccgctgtaccagcatcaggccactagagtgattagtaaggctagcgcatacacaggcatgctcagtagtcgttatgcaacagacacatgcgaacttcccgaacgtgaggagggggaaggtgaggagactcccaactttagtcactggggcccacctcgaatagtggaaatttttcgcgaacctaatgtgagtctgggcattagcatcgtcggggggcaaaccgtaattaaacgactgaagaacggtgaagaactaaaggggatctttataaagcaggtgcttgaagactcccctgcagggaaaacgaacgccctgaagaccggcgataaaatcctggaggtaagcggcgtggaccttcagaacgcgagccattccgaagccgtagaggcaattaagaatgcaggaaacccagtggtatttatcgtgcagagtctgtccagcaccccagcgtgggtcactgagcaggactcggtcagcaaaaaaaagaagaatcacgaaggctag

SEQ ID NO: 191316 - DNA, 600 bp, synthetic construct
  misc_feature 1..600: note = Description of Artificial Sequence: Synthetic coding sequence
  source 1..600: mol_type = other DNA
atggtgcagggcggcttccccgagaagatccggcagcggtacgccgacctgccaggggaactacacatcatcgaactggagaaggataaaaacggattggggttgtccctggcagggaacaaagacaggtccaggatgagtatctttgtcgttggcattaaccccgaaggacccgccgccgctgacggtcggatgaggatcggggatgagctgctggaaatcaataaccagatactgtacggtcggtcgcaccagaatgcttccgctatcataaaaaccgccccgagtaaagtgaagctggttttcattcgaaacgaggatgctgtcaatcagatggctgtgacgccgttccccgtgccgagcagtagtcctagctccatcgaggaccagtccggaactgagcccatctcatctgaagaggatggctcggtcgaggtcggcattaagcagctgccagaatcagagtcttttaaactggcggtcagtcaaatgaaacagcaaaaatatcccacaaaggtgtccttctcctcccaggagattcctctggctcccgcatcaagctaccacagcacggacgctgattttacgggttacggatag

SEQ ID NO: 191317 - DNA, 4746 bp, synthetic construct
  misc_feature 1..4746: note = Description of Artificial Sequence: Synthetic coding sequence
  source 1..4746: mol_type = other DNA
atgcccgagaaccccgccaccgacaagctgcaggtgctgcaggtgctggatcggctgaaaatgaaactgcaggaaaaaggggataccagtcaaaatgagaagctgtctatgttttatgagactttaaaatcaccactattcaatcagatcctcacgttgcagcagtcaattaagcaactgaagggccagcttaatcacattccctctgactgttcagcaaacttcgacttctctcgcaagggtcttctggtgtttaccgacgggagcatcacaaatggaaatgtgcaccgcccaagcaacaactcaaccgtctccggattgtttccgtggaccccgaaactcggcaacgaagactttaatagcgtcattcagcagatggcacagggaagacagatcgagtatatcgatatcgaaaggccctccacaggcgggctcggtttttcggtggtcgcccttaggtctcagaatcttgggaaggtggatatttttgtcaaagacgtacagccaggcagcgtggcggatcgggatcagcgtctgaaggagaacgaccagattcttgccatcaaccatacccctctggatcagaacataagccatcagcaggcgatcgccttactccagcagacaaccggaagtctcagacttattgtggcccgcgagcctgtccataccaagagcagtacatcgtcttcactgaacgacacgactctgcccgagactgtatgttgggggcatgtggaggaggtggagttaattaacgacggctctggtcttggattcggcatcgtggggggcaagacttcaggcgttgtggtacgaaccatcgtaccaggaggacttgctgacagagatggacggctccaaacaggtgatcacatccttaaaataggaggcactaacgtacagggaatgacttccgagcaggtggcacaagtcttaagaaactgcggcaactcggtccgcatgcttgtcgcccgggatcccgccggtgacatttccgtgacaccccctgctcctgccgctctaccggtagccctgccaacagtggccagcaagggtcctggctctgacagttccttattcgaaacctataatgtagagctcgtgcgcaaggatgggcagagcctgggcattcgaatcgtcggatatgtgggaacctcccataccggcgaggccagtgggatctacgttaagagtattatcccaggctcagcagcgtaccacaacgggcacatacaggtaaacgacaaaattgttgcagtggacggggtaaatatccagggatttgccaatcacgatgtggtggaagtgctcagaaatgctggccaggtcgttcatctcactctggttagacgtaagacgtctagttctacctcccccctggaacccccatccgaccgtggtaccgtggttgaacccctcaagcctcccgcattgttcctaaccggagctgtcgaaacagaaacaaacgtcgacggcgaagatgaagagattaaggaaaggatcgacactctcaaaaacgacaacatacaggctctcgagaagcttgagaaggtgccagattctcccgagaacgaactgaagtctaggtgggagaacctattaggccccgactatgaggtcatggtggccaccctggacacccaaatcgcagatgacgctgagctgcaaaagtatagcaaactgctgccgatccacacactgagactgggcgtcgaagttgacagcttcgatggacaccattatatctcaagtattgtgtccggcggaccggttgatacattgggcctccttcagccagaggacgaactgctggaggtcaatggcatgcagctgtacggtaagagcaggagagaggctgtcagctttctcaaggaagtaccccccccgtttacgctggtgtgttgtcgcaggctgtttgacgacgaagcaagcgtagatgagcctcgcagaaccgagacaagcctgcctgaaaccgaggtggaccacaacatggatgttaacacagaggaggatgatgatggggagctggccttgtggtcccctgaagtaaagatagtggaattggtcaaggactgtaaggggctgggcttctccatccttgattaccaggacccactcgatcctacaaggtccgtcatcgtgattagaagtcttgtggcagacggcgttgctgagcgatccggggggctgttaccgggtgaccgcttggtgagcgtgaatgagtactgtctggacaacacatcactggctgaggcagtggaaattctgaaggccgtacctcccggattggtccacctcggaatctgtaaaccccttgtagaagataacgaggaagaatcatgctacattctccacagttcctcaaatgaagacaaaaccgaattcagtgggacgatccatgacattaactcctccctgattcttgaggcacccaaggggtttcgggacgagccctactttaaggaggaactggtggatgaaccattccttgacctgggtaagagctttcactctcagcagaaagagatcgagcaatctaaggaagcatgggagatgcacgagttcctcacgccccggctgcaggagatggacgaagagagagagatcctcgttgatgaagagtatgaactgtatcaggaccccagccccagcatggagctataccctctgtctcacatccaggaggctacccccgtcccttccgtgaatgagctccatttcggaacccagtggcttcacgacaatgagccgtctgagtcccaggaagcgaggacgggtcgtactgtgtattcccaagaggcccagccctacggatattgccccgaaaatgtgatgaaggagaattttgtgatggaaagtcttccatcggtgccttccacagaagggaactcgcaacaaggacggttcgacgatttggaaaatcttaatagtctggcaaaaacaagtctcgatttgggaatgattcctaatgatgtccagggcccctccctgctcatcgatctccccgtggtcgcacaaaggagagaacaggaggaccttcccctctatcagcatcaggccaccagggtgatctccaaggcctctgcttacacagggatgctgagttcacgatatgccaccgacacatgcgaactcccggagcgcgaagagggagagggggaggaaactcccaacttctcgcattggggtccgcctcgcatcgtggagatcttccgagagccaaatgtgagcttggggattagcattgtgggcggccaaacagttatcaaaaggttaaaaaacggggaagagctaaaaggtattttcatcaaacaagttttagaggacagcccggccggtaaaacaaatgctttgaaaaccggagataagatcctggaggtgagcggagtcgacttgcagaacgctagtcattctgaggccgttgaagcaatcaagaacgccggcaaccccgtagtttttattgtgcagtccctgtcgtccacacctagggtcatcccgaacgtacataacaaagcaaacaaaatcactgggaaccagaaccaggatactcaggagaagaaagaaaagcggcagggaactgccccgcccccaatgaagctcccaccaccttacaaggctcttactgacgactctgatgagaatgaggaggaggacgcattcaccgatcagaaaatcaggcagagatacgcagatttaccaggtgagcttcacattatagaacttgagaaggacaagaacggactgggcctgagtctcgcaggcaataaggatcgtagccggatgtctatctttgtagtcggcatcaaccctgaaggccccgccgctgcagacggacgcatgcgaataggagacgagctcttggagattaataaccagatactctacggtagaagccaccagaatgcctcagccataataaagactgccccatcaaaagtcaaactcgtctttattaggaacgaagatgccgtgaatcagatggcagtgacgccttttcccgtgccctcatcaagcccctccagcattgaagaccagagcggaactgaacccatatcgagcgaggaggacggctccgtcgaggtcggaatcaagcagctgcccgaaagcgagtcatttaagctcgcagtctcccagatgaaacaacagaagtatcccaccaaggtgagcttttcttctcaagaaatccccctggcccccgcgtccagttatcactctaccgacgcagacttcacaggctatgggggttttcaggccccgctgagtgtcgatccagccacttgcccaattgttccaggccaagagatgataattgagatttctaagggtagaagcggccttggactgagcattgttggcggcaaggacacacccctgttttggaggctgggatctcctcgagcctggtctcagcacctggtccgcgctttcatgctccaccatccagttaccgaagtcgagggccagaatgctatcgtcatccacgaggtttacgaggagggtgcagccgctagagatggaagactgtgggctggagatcagatccttgaggtcaacggggtcgacctccgcaactcctcacatgaagaagccatcacagccctgcgacagacaccccaaaaagtgcggctggtagtttatagggatgaggctcactacagagatgaagagaaccttgagatctttccagtggacctgcagaagaaagctggccgcggtcttggactgagcattgtgggaaagtag

SEQ ID NO: 191318 - DNA, 5406 bp, synthetic construct
  misc_feature 1..5406: note = Description of Artificial Sequence: Synthetic coding sequence
  source 1..5406: mol_type = other DNA
atgcccgagaaccccgccaccgacaagctgcaggtgctgcaggtgctggataggctaaagatgaagctccaggaaaagggcgacacctcccaaaacgagaaactgtctatgttctatgagactctgaaatcccccctttttaaccaaatcctcacgctccagcaatctatcaagcaactcaaggggcagctgaaccacattccctccgattgcagcgctaactttgacttcagcaggaagggtcttcttgttttcaccgacgggtctattacaaatggcaacgttcatcgtccaagcaacaacagtactgtcagcggcttgttcccgtggaccccaaagctcggtaacgaagacttcaattctgtgattcagcagatggctcaagggaggcaaattgagtatatcgacattgaaagacccagcactggtggacttggattcagtgtcgtcgctctaaggtctcagaatctaggtaaagtggacattttcgtgaaggatgtacagcctggcagcgtggctgatagagaccagagactgaaggagaatgaccagatcctggccataaatcacacccccctcgaccagaacatctcgcatcaacaggcaatcgcactgctccagcagactacaggttcactgaggctgatcgtggccagagaacccgtccacactaaatcttcgacttcctcttctcttaacgacacaacactcccagaaaccgtatgctgggggcacgtcgaggaagtggagctgattaacgatgggagcggcctgggtttcggcatcgtgggcgggaaaacttctggggttgtggtgagaaccatcgtccctggagggctggccgatcgagatggccgactgcagacgggcgaccatattctgaagataggcggcaccaatgtccagggaatgacaagcgaacaggtggctcaggttctacggaattgcgggaacagtgtgcgcatgctcgtcgccagggatccagccggggatatctctgtaacacctcccgcccctgcagctttgccagtggccttacctactgttgcttcgaaaggccctggttccgattctagtctctttgaaacatacaacgtggagctggtacgtaaggatggccagtccctgggaatccgcattgttggatacgttggcacctctcatactggggaagcctccggtatctacgtcaaaagtataatccctggttctgctgcataccacaatgggcacatccaggttaatgacaaaattgtagccgtggacggcgtgaacatccaggggttcgccaatcatgacgtggtggaagtcctaagaaatgctgggcaggtcgtccacctgacactggtccgtaggaaaacttcatcttctacctctcccctggagcccccctcagaccgcggtacagtggttgagcctctgaagccaccagccctgttcttgacaggagctgtggaaactgagacaaatgtggacggcgaggatgaagaaataaaagaaagaattgatactctcaagaacgacaacatccaagcccttgagaagctggaaaaagtccccgatagccccgaaaatgaactcaaatctcggtgggagaatttgcttggacccgattatgaggtgatggtggcgactttggacacccagatagctgacgacgccgagctgcagaaatatagtaaactcctgcccattcatacattgagattaggggtggaagtggacagcttcgacggccaccactatattagctcaattgtttctggcggcccagtcgatactctgggactccttcagccagaagacgagttgctggaggtaaacggcatgcaactttatggaaagagtcggcgtgaagcggtaagttttctgaaagaagtgccccccccattcacactcgtttgctgtagacggctgttcgacgatgaagccagtgtggacgaaccacgacggaccgaaacctccctccctgaaacggaggtggatcacaacatggatgtcaacaccgaagaagatgatgacggggagcttgccctttggtctcccgaggttaagatcgtggaactggtgaaagactgtaagggtctcggattcagtatcctcgattatcaagatcccctcgaccccacacgctctgtgattgtgattcggtccctggtagctgacggtgtggcggagcggtcaggaggattgttacccggcgaccggctggttagcgtgaatgagtattgtctggataacacttccctggcagaggcagtggaaatcctcaaggccgtcccccctggtctcgtgcacttagggatctgtaaaccactggtagaagataacgaggaggaatcgtgttatatactccatagctccagcaacgaggataagaccgaattctccggtactattcatgatatcaactcatcactcattctggaagccccaaaagggtttcgagacgagccgtatttcaaagaagagttggtggacgaaccattcttagacctcggtaaatcgtttcattcacagcagaaagagatagagcagtcaaaggaagcgtgggagatgcatgagtttctgacccctagactgcaggagatggatgaggaacgggaaattctggttgacgaggaatacgagctctatcaggacccgagcccctcgatggaactgtacccacttagccacatccaggaagccaccccggtaccttcagtgaacgagttacattttgggacacagtggctacatgataatgagccctccgaaagtcaggaggctaggactggtagaacagtgtactcacaagaagctcagccgtatgggtactgtccagagaatgtaatgaaggagaatttcgtgatggagtctctgccgagtgtgccatccaccgagggcaattcgcagcagggcagatttgatgacctggagaaccttaattctctcgcaaagaccagtctggatttgggaatgataccaaacgatgtgcagggaccaagcctgctgattgatttaccagtggtagcgcagcggcgagaacaggaagacctcccgctgtaccaacaccaggccacacgagtgattagtaaagctagcgcctacactggaatgcttagctcccggtacgccacggacacatgtgaactgccggagagagaggaaggagaaggagaggagaccccaaactttagtcactggggaccgccgcggatcgtggaaattttcagggaaccgaacgtgtcccttggcatcagcatcgtgggcggtcagacggtcattaagcggttgaagaacggcgaggaactgaaaggaatcttcatcaagcaagttctcgaagattcccctgcaggtaaaactaacgctctgaaaacaggagataagatactggaggtctccggggtggatttacagaatgcaagtcactccgaagcagtggaagccatcaagaatgccggcaaccccgtcgtgttcatcgtccaaagccttagcagcacgccccgcgtcattcccaatgtgcataacaaagcgaataaaattactggcaaccagaatcaggacactcaggagaaaaaggagaaaaggcagggtacagccccgccccctatgaagcttccccccccatacaaagccctgacagacgactccgacgagaacgaggaggaggacgccttcactgatcaaaagattaggcaaagatacgccgatctccctggagagctgcacattattgagctcgaaaaagacaagaatggcttgggccttagtctggccggtaacaaagaccggagccggatgagtatcttcgttgtgggaataaacccagaaggcccggctgcagcggatggccgaatgcgcattggagacgaactgctcgaaatcaataatcagattctctacggcagaagccaccagaatgcttctgctatcattaagacagcaccgagcaaagttaagctcgtttttataaggaatgaggacgcggtgaaccagatggccgtgacaccgtttcccgtgcctagtagcagcccaagcagtatcgaagatcagtcgggcacagagcccatatcgagtgaggaggatggctctgtagaggtagggatcaaacagctccccgagtcagaaagctttaagctcgccgtcagccaaatgaaacagcagaagtatcctacgaaggtgtccttttcttctcaggagataccactggcacccgcctcgagctaccactccacggatgcagattttacaggttacggggggttccaggcgcccctgtcagtggacccagcgacctgtccaatcgttccgggacaggagatgatcatcgagatttcaaaagggcgaagcggccttggcctttcaatcgtgggagggaaggacacgcccctgaatgccattgttatccacgaggtgtacgaggagggagcagcagcccgggacggtagattgtgggccggcgatcaaattcttgaggttaatggagtagacctgaggaacagttcacacgaggaggctattactgccctgcgccagactcctcaaaaggtccgcttggtagtgtacagagatgaagcccactaccgcgacgaagagaacttggaaatcttccccgtcgacctacagaaaaaggcaggacgggggctgggcctttctatagtgggaaaacgcaacggcagtggcgtttttatctccgacattgtgaaaggcggggccgctgacctggacggccgcttgatacagggagaccaaatactgtcagtcaacggtgaggatatgagaaacgcttctcaggagactgtagcaactattctgaaatgcgctcagggcctcgtccagctggagattggaagacttcgcgcaggcagctggacaagtgcaaggacaacatcccagaactcacagggctcgcaacagtcagcacatagcagctgtcacccatccttcgcccccgtcatcactgggctccagaacttggtgggtactaaacgagttagcgatccaagccaaaagaattcaggaaccgacatggagccaaggactgtggagataaatcgcgagctgtccgacgccctgggaatctccattgcaggggggagaggcagccctctgggtgacattccagtgtttattgctatgatccaagcgtctggggtggcagccagaacccagaagctgaaagtgggagaccggattgtttctattaatggacagccattggatggccttagccacgcggatgtggtgaatcttctgaagaatgcctacgggcggattatcctccaggtggtagccgacacaaacatttcagcgatcgccgctcagctggagaacatgagcaccgggtaccatctggggtcccctacggctgaacaccaccctgaggacactgaggagcagttgcagatgacggccgattag

SEQ ID NO: 191319 - DNA, 4572 bp, synthetic construct
  misc_feature 1..4572: note = Description of Artificial Sequence: Synthetic coding sequence
  source 1..4572: mol_type = other DNA
atgcccgagaaccccgccaccgacaagctgcaggtgctgcaggtgctggaccgcctcaagatgaagctccaggagaaaggggatacctcccaaaacgaaaaattgtctatgttctatgaaactcttaaatcccctctgtttaaccaaatcctcactttgcagcaatctataaagcagctgaaaggccagctcaaccatatcccttccgattgtagtgccaactttgacttcagcaggaagggactgctagttttcaccgacgggagcattacaaacggcaacgtgcaccggccatccaacaactcgacagtcagcggcctctttccctggacgcccaagctgggcaatgaagatttcaattctgtgattcagcagatggcgcagggaaggcagatcgaatacatcgatattgagcggcctagcacgggaggcctgggatttagcgtggtcgccctgcgctcacagaatctgggtaaggtggacatttttgtcaaagacgtgcagccaggttcagtagctgaccgcgatcaacgtctcaaggaaaacgatcaaatccttgctattaatcatactccattagaccagaacatcagtcaccagcaggctattgcactgctccagcagacaacagggtccctcagactgattgtggcccgggaaccagtccacaccaagtctagtacttcctcctccctcaatgacaccactctccccgaaacagtgtgttggggacacgttgaagaggttgaactaattaatgacggctctggccttggtttcgggattgtaggagggaagactagcggcgtggtggtgcggaccatcgtgccgggaggactcgctgacagagacggcaggctccaaacgggcgatcacatcttgaagatcggaggcacaaacgtccagggcatgactagcgagcaggttgctcaagtactgcggaattgcggtaattccgtgagaatgctggtggcgagggaccccgcaggagatatcagcgtcacaccccccgctcccgccgccttgcccgtggccctaccgacagtagccagcaagggacccggatcagattcctccttgtttgaaacgtacaacgtagagttagtccgaaaggacggacagtccctagggattcggatcgtgggctacgtgggcacttctcatacaggagaggcgtcagggatctatgttaagtcaatcattcccggttccgccgcataccacaacggccacatacaggtcaacgacaagatagtggcagtcgatggcgttaatatacaaggatttgccaatcatgatgtagtggaggtgctcagaaacgccggtcaggttgtgcacctgactctcgttcggaggaagacgagttcttctacaagcccgctggagccccccagcgataggggcacagtggtggagccgctgaaaccacctgccctgtttcttacgggagcagtggaaaccgagaccaatgtcgacggtgaagacgaggagattaaggaacgcatcgacacgttaaagaatgataatatccaagcactcgaaaagcttgaaaaagtaccagattccccagagaatgagctcaaaagtcgttgggaaaacctgcttggtcccgattacgaagtcatggtcgcaaccctcgatactcagatcgccgatgacgcggaactccagaagtatagcaagttattacctattcacaccctccggctcggagtggaggtggactcttttgacggacatcactatatttccagtatagtgtccggtggccccgtggacactcttgggctgctccagcccgaagacgaactgttggaggtaaatggcatgcagctgtatggaaagtcccggcgcgaggccgtgagtttcctgaaggaggttcctccccctttcacacttgtttgctgccgtaggctgttcgacgacgaagcttccgtagacgagcctagacgtaccgagaccagcctgcccgagactgaggtggatcataacatggacgtgaacacagaggaggacgacgatggggaactcgcgctgtggtcccctgaagtgaagatcgtggagttagtgaaagattgtaaaggactgggattctcgattcttgattatcaggacccactcgatcccacaagaagtgtaatagtgatacgatcactggtggctgatggtgtcgccgaaagatctgggggacttctccctggtgatcggcttgtcagcgtgaatgagtactgcctggataatacaagcttggctgaagctgtcgagatcctgaaagctgtgcccccaggactggtgcacttaggcatctgcaaaccgctcgtcgaagataacgaggaagaaagttgttacattctgcatagttctagcaatgaggacaagactgaattttctggtaccattcacgatataaactctagcctcattctcgaggcccctaagggcttcagggacgaaccctatttcaaggaagagctcgtcgacgaacctttcctggatctggggaaatccttccacagtcagcaaaaggagatcgagcaaagtaaagaggcgtgggaaatgcacgaattccttacccctcgcctgcaggaaatggatgaggagcgggaaatccttgttgatgaagagtatgaattgtaccaggaccccagcccgtctatggagctttaccctctgagccatatccaagaggccacgccggttccttccgttaatgaactgcatttcgggacccagtggctgcatgataacgaaccaagcgagtcccaggaggcaagaacaggtcgcactgtctattctcaggaggcacaaccatatggatattgcccagagaatgtgatgaaagagaattttgtgatggagtctttacccagcgtgccttcaacggaaggcaattcccagcagggccgcttcgatgacctagaaaacctgaacagcctggctaagacttctctcgacctcgggatgattcctaacgatgtgcaggggcccagcctgttgattgacttacccgtggttgcccagcgccgggaacaggaagacctcccgctttaccagcaccaggcgactagagtgattagcaaagcgtcagcatataccggtatgctctcctcacgctacgccacggatacatgtgagctgccagaacgggaagaaggggagggggaagagaccccaaatttcagtcactggggacctccaagaattgttgaaatctttagagagcccaatgttagtctcggcatttcaattgtaggaggacagacagtgattaagagattaaaaaacggggaagaactgaagggcatatttattaagcaagtattggaagatagcccagcaggtaagaccaacgctctgaagaccggggacaaaatcctggaagtctctggggtggacttgcagaatgcttcccacagcgaggctgtcgaggccataaagaatgcgggaaatcctgtggtgttcattgttcaaagcctttcgagcactcctagggttattccaaacgtacataataaggccaacaagattacaggaaaccagaaccaggatacccaggagaagaaggaaaaacgccaagggaccgcccctccacctatgaaactcccacctccctacaaagcacttacagacgactccgacgagaacgaggaagaggacgctttcactgatcagaagattcggcaaaggtacgcagacttaccaggggaactccatataatcgaactggaaaaagacaaaaatggattaggcctcagcctggcgggaaataaggaccggagtagaatgagtattttcgtcgtcgggataaacccagaaggaccagccgccgcggacggaagaatgcggataggcgacgaattgctcgagattaacaaccagatactctatgggagaagtcaccaaaatgcttcagctattatcaagacggctccttcaaaggtgaagctggtcttcatacgcaatgaggacgcagtgaaccaaatggcagttactccattccctgtgcccagctctagcccgagcagtatcgaagatcaaagcgggactgagcctatctccagcgaggaggacggcagtgtggaggtaggtatcaagcagctgcctgaatcagagtccttcaagctggcagtgagtcagatgaaacagcagaagtaccctaccaaggtctcattcagttcccaggagattcctctggcccccgcatcgagctaccattcgactgatgccgatttcaccggttatggtggatttcaggctcccctctccgtggatccagccacctgccctatcgtccccggacaggaaatgataatcgaaatttctaagggcagaagcggacttggactcagcatcgtaggcgggaaagatacccccctcgtcaacggcgtggacctgcggaatagcagtcatgaagaggcaatcacagccctgcgccagaccccacagaaggtgagattggttgtgtatagggatgaggcccattacagggacgaggagaaccttgaaatcttcccagtggacctccagaaaaaggccggccgaggcctggggctgtcaatcgtcgggaagtag

SEQ ID NO: 191320 - DNA, 1359 bp, synthetic construct
  misc_feature 1..1359: note = Description of Artificial Sequence: Synthetic coding sequence
  source 1..1359: mol_type = other DNA
atggtgcagggcggcttccccgagaagatccggcagcggtacgccgatttgcctggagaactgcacattatcgagcttgaaaaggataaaaacggcctgggcttatctcttgccggcaacaaagaccgatcccgtatgagcatctttgttgtaggaatcaacccagaaggtcccgccgccgctgatggccgcatgagaatcggggacgagctgctggaaatcaataatcagatcctgtatggcaggtctcaccaaaatgcctctgctataatcaagacagcacccagcaaggtgaagctcgtctttattcggaacgaggacgccgtaaatcagatggcagttactccctttcctgtgccaagctcaagcccatcaagtattgaagatcagtctggcacagagcctattagctccgaagaggatgggagcgtagaggttgggattaaacaactgccagagagcgagtcattcaaattagcggtctcccagatgaagcagcagaagtaccccactaaagtgtccttttcatcccaagagatccctttggccccggcctcctcttatcactccacggacgctgactttacaggctacggcggattccaggccccactttccgtggatcccgctacctgtccaatcgtacctgggcaggaaatgataatcgaaatcagcaagggacggtcgggcctcgggttatctatcgtggggggtaaggacacacccttattttggaggctggggtctccacgggcctggagccaacacttggtcagggcctttatgcttcaccaccctgtgaccgaggtagaggggcaaaatgcaatcgtcatccatgaagtatacgaggaaggagctgccgctagggacggaagactctgggcaggcgatcagatactcgaagttaacggtgtcgatctccggaattcaagtcacgaagaagccattacggccctgcgtcaaaccccgcagaaggtaagactggttgtttatcgagatgaggcgcattacagagacgaggagaacctggaaatcttcccagtggacctccaaaagaaggcgggcagggggcttggtctctctatcgttggaaaacggaatgggtctggcgtgttcatctccgatattgtcaaagggggagcagccgaccttgacggcagactgatccagggagaccagattctgagcgtcaacggagaggatatgaggaacgcctcgcaggagaccgtggcaacgatcttgaagtgtgcccagggtctggtgcaattagagatcggaagactccgcgcaggatcatggacatcggcccggaccacctcccagaacagccaggtcgtggatggtttttccagcgattag

SEQ ID NO: 191321 - DNA, 594 bp, synthetic construct
  misc_feature 1..594: note = Description of Artificial Sequence: Synthetic coding sequence
  source 1..594: mol_type = other DNA
atggccgtgacccccttccccgtgcccagcagcagccccagcagcatagaagatcaatccggcactgaacctatcagcagcgaggaagacggtagtgtggaagtgggcattaaacaattgcccgagagtgagagcttcaaactggctgtcagccagatgaagcaacaaaagtatccaacaaaagtgtcctttagcagccaggaaatacctctggccccagcttccagctatcattcgacagatgccgacttcaccggttacggcggcttccaggcacccctctccgtggatccagctacatgtccaatagtgccaggacaggagatgatcattgagattagcaaaggaaggtccggcctcgggctgagtatcgtcggagggaaggatacacctctggtgaacggggtcgacttgcgtaattcctctcacgaggaggcaatcacagccctccggcagacaccccagaaagtgagactggtagtttacagagacgaagcccactaccgggatgaggagaatctggaaatatttcctgttgatctccaaaaaaaagcaggtagaggcctggggcttagcatcgttgggaagcgctag

SEQ ID NO: 191322 - DNA, 1236 bp, synthetic construct
  misc_feature 1..1236: note = Description of Artificial Sequence: Synthetic coding sequence
  source 1..1236: mol_type = other DNA
atgagccccgcccggctgcggccccggctgcacttctgcctggtgctccttctgcttctcgtcgtgcccgccgcatgggggtgcgggcctggccgcgttgtcggctcccgtcgcaggccaccgaggaagctcgtccccttagcgtataagcagttcagtccgaatgttccagaaaaaaccctgggagcatccgggagatatgaggggaagatagctagatcttctgagcgatttaaagagctgacccccaactacaatcctgacattattttcaaggacgaggaaaacacgggtgcagatcgcctgatgacccagaggtgcaaggataggcttaactcactggctatctctgtgatgaaccagtggcctggcgtcaaactgagggtgaccgaggggtgggacgaggacggacaccattcagaggaaagtctgcactacgagggtagggccgtggatattacaacgagcgacagggacagaaataagtatggactgctcgccaggttggccgtggaagctggcttcgattgggtctactatgagtctaaagcccatgtacactgtagcgtgaagagtgagcatagtgcagccgccaagaccggagggtgtttccccgctggagctcaggttcgactggagagcggtgccagagtcgctctctctgcagtgagaccgggcgaccgcgtccttgccatgggtgaggatgggagcccgacattttccgacgtcctaatcttcctagaccgtgaaccacaccggctgcgggcttttcaggttatcgagactcaggacccaccaaggcgcctagcgctgacacctgcccatctgctgttcacagcagataaccacactgagcccgccgctagattcagggcaaccttcgcctctcacgtgcagcccggccagtatgttctggtggccggggtgccaggtctccaaccggcaagggtggccgcggtgagcacacatgttgcactaggggcttatgcccccctcactaaacacggcaccttggttgttgaagacgtggtggcctcatgcttcgctgccgttgcagaccatcatttggcccagcttgctttctggccgctacgcctgttccacagcctggcatgggggtcttggacccctggcgaaggcgtgcactggtacccccagctcctgtatcgtctggggaggctgctgctcgaagaggggagcttccaccccctggggatgtcaggagcgggctcatag

SEQ ID NO: 191323 - DNA, 1212 bp, synthetic construct
  misc_feature 1..1212: note = Description of Artificial Sequence: Synthetic coding sequence
  source 1..1212: mol_type = other DNA
atggcccacgccatggagaacagctggaccatcagcaaggagtaccacattgacgaggaggttggatttgcccttcctaaccctcaggaaaacttaccagatttctacaacgactggatgttcatagcgaaacacttacccgatttaatcgaatcggggcaacttcgggaaagggtcgagaaacttaacatgctgagcattgaccacttgactgatcacaagtcacaaaggctggcaagattggtgctggggtgtatcaccatggcatacgtgtggggaaaaggccatggcgatgtgcgcaaagtcctgcctcgaaacatcgctgtgccctattgtcagttatctaaaaagctggagctgccccctattctggtgtatgccgattgtgtcctcgccaattggaaaaagaaggatccgaataagcccctgacgtatgaaaacatggacgtcctcttctccttccgtgacggcgactgctctaaaggcttctttctggtgtctctgctggttgagatagcagcagcttccgccattaaagttattccaacagtgtttaaggccatgcaaatgcaggaacgtgatactttgctgaaagcactgttggaaatcgcatcttgcctggaaaaggctctacaggttttccatcagatccacgatcacgtgaatcccaaagcctttttcagtgtgttgagaatctatcttagcgggtggaaaggaaaccctcagctgagtgacgggctcgtgtatgaagggttttgggaggatcccaaggagtttgctggggggtcagcaggacaatcaagcgtgtttcagtgcttcgacgtcctgctgggaatccagcaaactgctggtggtgggcacgctgctcaattcctccaggacatgcgtcgctacatgccaccagcccacaggaattttctgtgttccctcgagagcaacccctccgtgcgggagttcgtgctgagtaagggagatgcagggcttcgcgaagcatatgacgcatgtgtgaaagccctggtaagcctgcgctcataccatctgcagatcgtgacaaagtatatcctgatccccgcatcacagcagcccaaggagaacaagactagtgaggacccgtccaagttggaagccaaaggtacaggcggaaccgacctgatgaatttcttaaaaacagtcaggtcgacaactgaaaaaagcctgctgaaggaaggctag

SEQ ID NO: 191324 - DNA, 237 bp, synthetic construct
  misc_feature 1..237: note = Description of Artificial Sequence: Synthetic coding sequence
  source 1..237: mol_type = other DNA
atggcccacgccatggagaacagctggaccatcagcaaggagtaccacattgacgaagaagtgggttttgcactgccgaatccccaagagaacctccctgacttctacaacgattggatgttcatagcgaagcacctccctgacctcattgagtctggtcaactgcgtgagcgggtcgagaagctcaatatgctgtccattgatcacttgaccgaccacaaaagtcaacgcctgtag

SEQ ID NO: 191325 - DNA, 543 bp, synthetic construct
  misc_feature 1..543: note = Description of Artificial Sequence: Synthetic coding sequence
  source 1..543: mol_type = other DNA
atggcccacgccatggagaacagctggaccatcagcaaggagtaccacattgacgaagaggtcggctttgccctgccaaacccccaggaaaatttgccagacttctacaacgactggatgttcattgccaaacacctccccgacttaattgagtccggacagctgcgcgaaagggtggagaagctgaacatgctcagcattgatcacctgacagaccataagagccagagactggcgaggctggtcctgggttgtatcaccatggcctacgtttggggcaaaggccacggcgacgtgaggaaagtccttcctaggaacattgccgtgccttattgtcagctctccaaaaagctggagttgccacctatcctcgtgtacgccgattgtgtgctagcgaactggaagaaaaaggatcctaataagcccttaacgtatgaaaatatggacgtgctgttctctttcagagatggcgactgcagtaaaggattttttctcgtcagcctactggtggagatcgcagctgcctctgccatcaaagtgtag

SEQ ID NO: 191326 - DNA, 1212 bp, synthetic construct
  misc_feature 1..1212: note = Description of Artificial Sequence: Synthetic coding sequence
  source 1..1212: mol_type = other DNA
atggcccacgccatggagaacagctggaccatcagcaaggagtaccatattgatgaagaggtcggcttcgctctgccaaaccctcaagaaaacttacccgacttttacaatgactggatgttcatcgccaaacatctgcctgatctaattgagtcagggcaattgcgtgaacgggtcgagaaactgaacatgttgagcattgaccatctcacggaccataagagtcaaaggctggcccggctggttctgggatgtattacgatggcctatgtgtggggcaagggccacggcgatgtgcgcaaagtgctgcctcggaacatagcagtgccctactgtcagctgagtaagaaacttgaacttccaccaatcctcgtgtacgctgactgcgtgctcgccaattggaaaaagaaagaccccaacaagcccctcacttacgaaaatatggatgtcctgttctctttcagggatggtgactgctcaaagggctttttcctagtgtcgttactcgttgaaattgctgccgcatcagcgatcaaggttattccgaccgtctttaaagcaatgcagatgcaggaacgggacactctgctcaaggccctgctggagatcgccagctgtctggagaaagcccttcaagtcttccaccagatccacgatcacgttaacccgaaggcgttcttttcagtgttacggatttacctttctggttggaagggtaatcctcagctatcggatggattggtctatgaggggttttgggaagaccccaaggagttcgccgggggcagcgctggccaaagctcagtcttccagtgctttgatgttctgctgggcatccagcagaccgctggcggaggacacgctgcccagttcctgcaagacatgcgacgctacatgccaccagcccaccgcaatttcctgtgctctttagaatcgaatccatctgtaagggaattcgtgcttagcaagggggacgctggactccgggaagcttatgatgcttgcgtcaaggcacttgttagcctgaggagttaccatctgcagattgtgacaaaatacatcttgatcccggctagccaacagcccaaggagaacaaaacgtctgaggaccctagcaagctggaagctaaagggacaggcggtaccgacctcatgaatttcctgaagacggtgcggagtaccacggaaaagtcattactaaaggagggctag

SEQ ID NO: 191327 - DNA, 144 bp, synthetic construct
  misc_feature 1..144: note = Description of Artificial Sequence: Synthetic coding sequence
  source 1..144: mol_type = other DNA
atggcccacgccatggagaacagctggaccatcagcaaggagtaccacatagacgaggaggtgggtttcgctctgcctaatccacaagagaaccttccggatttctacaacgattggatgttcattgccaaacatctgccttag

SEQ ID NO: 191328 - DNA, 1224 bp, synthetic construct
  misc_feature 1..1224: note = Description of Artificial Sequence: Synthetic coding sequence
  source 1..1224: mol_type = other DNA
atggagccccaccggcccaacgtgaagaccgccgtgcccctgagcttggaatcctatcacatcagcgaagagtatgggttccttttgcctgacagcctgaaagaattacccgatcattatcgaccatggatggaaattgccaataaactgccacagctaatcgatgcccatcagttgcaggcgcacgtagataagatgcccttacttagttgtcagttcttgaaaggccatcgagaacagcggctggcccaccttgtgttgagcttccttaccatggggtatgtgtggcaagaaggcgaagcccagcctgcagaggtcctgccacggaacttggcactccccttcgttgaagtgtcacgaaacctagggctgcctcccatcctggttcacagtgacctggtcctgacaaactggacaaagaaggatcctgacggctttctagagatagggaacctggagaccattatatctttccctggaggagagtcactgcatggcttcattttggtgaccgccctggttgagaaagaggcagtgcctggtatcaaagctctggtccaggccaccaacgctatcttacagcctaatcaggaagctctccttcaagccctacagcgtctgaggttaagcattcaggatattactaagaccctgggtcagatgcacgactacgtggaccccgacattttctacgcgggaatacgcatcttcctgtcgggctggaaggacaacccggccatgccagctgggttaatgtatgagggagtctcacaagaacctcttaaatactctgggggcagtgctgctcaaagcaccgtactgcatgctttcgacgagttcctgggaatcagacacagcaaggaaagcggcgattttttatatagaatgcgcgattacatgcctccctcccataaggcttttatagaggacatccattcagcaccgagcttgagggactacattctctcctctggccaggatcatctcttgactgcgtataaccaatgcgtccaggccctggccgaactcaggtcataccatataactatggtgactaagtatcttataactgcggcggccaaagcgaaacacggtaaacccaaccatcttccaggacctccacaggcgctcaaggacagaggtaccggaggaactgctgtgatgtccttcttaaagtctgtaagggacaaaacgctcgaaagcatcctgcaccctaggggatag

SEQ ID NO: 191329 - DNA, 1263 bp, synthetic construct
  misc_feature 1..1263: note = Description of Artificial Sequence: Synthetic coding sequence
  source 1..1263: mol_type = other DNA
atgctgcacttccactactacgacaccagcaacaagatcatggagccccacaggcccaacgtcaagactgctgtccccctgtctcttgagagctaccacatctcagaggagtacggttttctgctgccagactctttaaaagagttaccagaccactaccgaccttggatggagatcgctaacaaacttccccagcttattgacgcccaccaactgcaggctcacgtggataagatgcctttactgagctgccagtttctcaaaggccaccgggagcagcgacttgctcatcttgtgctgtcctttctaactatgggatacgtttggcaggagggggaggctcagcccgccgaggtgctgccacggaacctcgccttgccttttgttgaggtatcccgcaacctcggcttgcctcccattctggtccactccgaccttgtgctgacaaactggaccaaaaaagaccccgatggcttcctcgagattggcaacctagaaacaatcatctctttccccggaggcgaatccctgcatggattcatcctggtcaccgctttggtagaaaaggaggccgtgcctgggattaaggcactggtccaagcgacaaatgccattcttcaacctaaccaggaggccctgcttcaggccttacagaggctgcggttatccattcaagatattactaaaaccctgggccagatgcacgactacgttgatccggatatcttttacgcagggatccgtatcttcctgagtgggtggaaagacaaccctgccatgcctgcaggattgatgtatgagggagtgtcacaagagcctttgaagtatagtggcggatccgcagctcagagcaccgtgcttcacgcctttgatgaattcctgggaattcgccattcgaaggagtctggcgactttctctaccgcatgagggattacatgcccccgagccacaaggcttttatagaggacattcactccgccccatcacttcgagattatattctctcatctggccaggatcatctgttaactgcttataatcaatgtgtgcaagccttggcggagttgagatcctaccacattacaatggtaacaaaatacctgatcacagccgcagcaaaagcaaagcatgggaaacctaaccatctgccggggccaccacaggccctcaaagaccgtgggaccggtggcaccgccgtgatgtcctttttaaagagcgtccgtgataaaactctcgaaagcatcttgcacccccgagggtag

SEQ ID NO: 191330 - DNA, 792 bp, synthetic construct
  misc_feature 1..792: note = Description of Artificial Sequence: Synthetic coding sequence
  source 1..792: mol_type = other DNA
atgaagggcggcttcaccggcggcgacgagtaccagaagcacttcttgcctagagattacctggccacctactattcatttgatgggtcccctagtcctgaggcggagatgctgaagtttaacctggagtgccttcacaagaccttcggcccaggtgggctgcagggggatacccttatcgacattgggtcaggacccaccatataccaggtgttagcggcctgtgattcatttcaggatatcacactcagcgacttcaccgatcggaacagagaagagctggaaaaatggcttaagaaagaaccgggggcatacgactggaccccagctgtcaagtttgcatgcgaacttgaggggaattcggggcgctgggaggagaaggaagaaaagctgcgtgcagctgtaaaaagagtgttgaagtgcgatgtccacctgggcaaccctctggctcctgcagtacttccgctggccgactgcgtgctgacccttctggctatggaatgcgcctgttgctcgttggacgcctatcgggcagccctctgcaatttggcctctcttctgaaaccaggtgggcaccttgtcacaaccgttactctccgcctgccctcctacatggtaggcaaacgcgagttctcttgcgtggctcttgaaaaagaagaggtagagcaagctgtgttggatgctgggttcgacattgagcagcttttgcactctcctcagtcttattccgtgactaatgccgcgaataatggcgtttgtttcattgtggccagaaagaagcccggcccttag

SEQ ID NO: 191331 - DNA, 789 bp, synthetic construct
  misc_feature 1..789: note = Description of Artificial Sequence: Synthetic coding sequence
  source 1..789: mol_type = other DNA
atgaagggcggcttcaccggcggcgacgagtaccagaagcacttcctgcctcgcgactacttggctacttattacagcttcgacggatccccatccccagaagcagaaatgttaaaatttaatttagagtgcctgcacaaaacatttggaccgggactgcaaggggacacgctgattgatataggatcaggcccaacaatatatcaggtgttggccgcctgtgattcctttcaggatattacgctgagtgatttcactgataggaatcgggaggaactagagaaatggctcaagaaagaacctggggcctacgattggactcccgcggttaaatttgcatgtgagctggagggtaacagcgggcgatgggaagagaaagaagaaaaactccgagctgccgtgaaaagagtcttgaaatgtgatgtccatctcggaaatccgctcgcacctgctgtcttaccactggctgactgcgtgttgaccttgctggcaatggagtgtgcatgctgctccctcgacgcatatagagctgcgctctgcaacctggccagtctgcttaagcccggaggccacctggtgacaactgtaacgcttcgcttacctagttacatggtgggcaagagggaattctcttgtgtagccttggagaaggaggaagtcgagcaggctgtccttgatgccggctttgacattgaacagctgctccatagtccccagtcttattccgtgaccaatgcagccaataatggcgtctgtttcattgttgcacgcaaaaagccagggccatag

SEQ ID NO: 191332 - DNA, 600 bp, synthetic construct
  misc_feature 1..600: note = Description of Artificial Sequence: Synthetic coding sequence
  source 1..600: mol_type = other DNA
atgaagagcggcctgtggtacttcttcctgttctgcctgcggatcaaagtgcttacaggtgaaattaacgggagtgctaactatgagatgttcatattccataatggcggtgtacagatactttgcaaatacccagacatcgtgcaacagtttaaaatgcaactgctgaaaggcggccagattctgtgcgacttgaccaaaaccaagggctctgggaataccgtgtcaattaaatcattgaaattttgccactcccagctctctaataattcagtcagctttttcctctacaacctcgaccactctcatgccaattactacttctgtaatctgtctatcttcgatcccccaccctttaaggtaaccctgactggggggtacctgcacatttatgagtcccagctctgctgccagctgaagttttggctgcctattggctgcgccgcctttgtcgttgtctgtatactgggctgcattcttatttgctggcttaccaaaaagaaatatagctcatcagtgcacgaccctaacggagagtacatgttcatgcgagctgttaacaccgccaaaaaaagccggctaaccgatgtcacgctgtag

SEQ ID NO: 191333 - DNA, 507 bp, synthetic construct
  misc_feature 1..507: note = Description of Artificial Sequence: Synthetic coding sequence
  source 1..507: mol_type = other DNA
atgaagagcggcctgtggtacttcttcctgttctgcctgcggatcaaagtgctcactggcgaaatcaatggcagcgcaaattacgagatgtttattttccataacgggggcgtacagatcctgtgcaaatatcctgacatcgtgcagcagttcaagatgcagttgctgaaagggggccaaatcctttgcgatcttaccaaaactaaggggtctgggaataccgtgagcattaagtctctgaaattctgtcatagccagttgagcaacaatagcgtgagtttcttcctttacaatctcgatcacagccacgcgaactactatttctgtaacctctctatctttgatcctcccccctttaaagttacactgactggagggtacttacatatctatgaaagccagctgtgctgccagctgaagttctggttgccgataggatgcgccgcatttgtagttgtctgtatcctggggtgcatcctcatctgctggctcacaaagaaaatgtag

SEQ ID NO: 191334 - DNA, 930 bp, synthetic construct
  misc_feature 1..930: note = Description of Artificial Sequence: Synthetic coding sequence
  source 1..930: mol_type = other DNA
atgcggctgggcagccccggcctgctgttcctgctgttcagcagcctgcgcgctgatacccaggagaaagaagtcagggctatggtgggatcagacgtagagctgtcttgtgcctgtccagaggggagccgattcgatctcaacgatgtctacgtgtactggcagacgtctgagagcaaaacagttgtaacctaccatattccccagaattcctcgctggaaaacgttgattcacggtaccggaacagggctttaatgtcccccgcaggaatgctccgcggggacttctccctcagattgttcaatgtgacaccccaagacgagcagaagttccactgcctggtgttgtcccagtcactcgggtttcaagaggtcctatccgtagaggttacactgcacgttgcagcaaattttagcgttccggtcgtttctgctcctcactctccatcccaggatgaattgaccttcacttgtacatccataaatggatatcctagaccaaatgtctattggatcaacaagaccgataattctctgctggatcaggcgctgcagaatgatacagtcttcctcaacatgcggggcttgtacgacgtggtcagcgttctgcgtattgcaagaaccccttctgttaacattggctgttgtattgagaacgtattactgcaacagaatctgacagtgggttcccagacaggcaacgacataggagaaagggacaagataacagaaaaccccgtgtctacaggcgagaaaaatgcagccacctggtccatacttgccgtgctctgtctcctggtggtggtggcagttgcaattggatgggtttgtcgcgataggtgtctgcaacactcctacgctggagcttgggcagtctcccccgagacagagctcacggagagctggaatctacttctgctcctctcctag

SEQ ID NO: 191335 - DNA, 558 bp, synthetic construct
  misc_feature 1..558: note = Description of Artificial Sequence: Synthetic coding sequence
  source 1..558: mol_type = other DNA
atgcggctgggcagccccggcctgctgttcctgctgttcagcagccttcgagccgccaactttagcgtacctgtcgtgtccgcccctcatagcccatcccaggacgagctgacctttacttgtacttctatcaatggctaccctaggccgaacgtttactggatcaacaagaccgacaacagtctgctggaccaagctctgcaaaatgacacggtatttctcaatatgcgcgggttgtatgatgtcgtgtccgtcctgagaatcgccagaacgccatctgtgaatatcggctgctgcattgaaaacgtcctcttacagcagaaccttacagtaggatcccagactgggaatgatattggggagcgcgacaagattactgagaatccagtgagtactggtgagaagaacgccgccacctggagcattctggctgtcctgtgtctcctggtcgtggtggctgttgccattgggtgggtgtgccgcgaccggtgtttacagcacagttacgccggcgcatgggccgtgtccccagagactgaactgacagggcacgtgtag

SEQ ID NO: 191336 - DNA, 909 bp, synthetic construct
  misc_feature 1..909: note = Description of Artificial Sequence: Synthetic coding sequence
  source 1..909: mol_type = other DNA
atgcggctgggcagccccggcctgctgttcctgctgttcagcagcctgcgggccgatacccaggagaaagaagtcagagccatggtgggctctgacgttgagctgagttgtgcttgtcctgaaggctcacggttcgatttaaacgacgtgtacgtgtactggcagaccagtgagtcaaagaccgtggtgacatatcatatccctcaaaacagctccctagaaaatgtggattcacgttaccggaaccgggcactcatgtccccggctggcatgctgcgcggcgatttttctttgaggctgtttaacgtgactccacaagatgaacaaaagttccattgcctggtcttgtctcagagtctgggctttcaggaagtccttagcgtggaggtaaccctgcacgtggctgccaacttttccgtgccagttgtttccgcaccgcacagtccgtctcaagacgaattgacttttacctgcacctctatcaacggttatcctaggcccaatgtgtattggattaataagacagacaattcactcctggaccaggccctgcagaatgacactgtcttcctcaatatgagaggtctgtacgatgtcgtgtccgtcttgcgcattgccagaactcctagcgtgaacattggctgttgcatagagaacgttctcctccaacagaacctgactgtgggatctcaaacaggaaatgacatcggtgaacgagacaaaataacagagaatcctgtctctactggggagaagaatgccgcaacatggtccatcctggcggtgttgtgcctgctggtggtagtggccgttgccattgggtgggtttgtcgggatcgatgtttacaacacagctatgctggtgcgtgggcggtatctcccgagacagaactaacaggccatgtgtag

SEQ ID NO: 191337 - DNA, 1101 bp, synthetic construct
  misc_feature 1..1101: note = Description of Artificial Sequence: Synthetic coding sequence
  source 1..1101: mol_type = other DNA
atggtgctgcacctgctgctgttcctgctgctgaccccccagggcggccacagctgccagggcctagagctcgcgcgggagttagtacttgcaaaggtgcgggctcttttcctggacgcactcggcccgccggctgttacccgggaaggtggggatccaggagtaagaaggctcccgcggcgacacgccctcggtggcttcacccatagagggtctgaacccgaagaggaagaagatgtgtcacaggctattctcttcccagccactgatgcaagttgcgaggataagtcggcagcacgcggcctcgcccaggaggctgaagaagggctctttagatatatgtttagaccgtctcagcataccagatcccgccaggtaacctctgctcagttatggttccatacaggcctggaccgacaggggaccgcggcgtccaactcttctgagccgctgctcggtctcttggcactcagccctggcggccccgttgcagtgccaatgagtttgggtcacgctccacctcactgggctgttctccatcttgcgactagcgccctgagccttctcacccatccagtactggtactcctccttagatgtcctctctgcacatgcagcgcccggcccgaagccacacccttcctcgtggcacatactcgcacccgaccacctagcggcggagagcgagcccgtagatctacaccattaatgtcctggccgtggagtcccagtgccctcagactgcttcaaaggcctcctgaggagcctgctgcccatgctaactgccatagagtggctctcaacatttcctttcaagagctggggtgggagcgctggatagtctatcccccatcctttattttccactactgccacggtggctgtggattacacattccacctaatttgtctcttccggtccccggcgccccgcccacaccggcacagccctactccttactgccgggggcgcagccttgctgtgcggcactgcctggcaccatgcgcccactgcacgtacgcaccacttcagatggaggctatagctttaagtacgagaccgtccccaatcttcttactcagcattgtgcttgtatttag

SEQ ID NO: 191338 - DNA, 1281 bp, synthetic construct
  misc_feature 1..1281: note = Description of Artificial Sequence: Synthetic coding sequence
  source 1..1281: mol_type = other DNA
atgcccctgctgtggctgcggggcttcctgctggccagctgctggataattgttcgctctagccctaccccaggaagtgagggccacagtgctgcccccgactgcccttcctgtgccttagcggctctgccgaaggacgtgcctaatagccagcccgagatggtcgaggccgtgaagaagcatatcctcaacatgctacatttgaagaagcgtcctgacgttactcaacccgtgccaaaggctgcactgcttaacgccattcgtaaactgcatgtgggcaaggtgggcgaaaacggatatgtggaaatagaggacgacattggccgtcgggctgagatgaacgaactgatggaacagacatctgagataataacctttgcagaatccggcacagccaggaagaccctgcactttgagatctccaaagaagggtccgaccttagcgtggtcgaaagggcagaagtctggctctttctcaaagtgccaaaggctaacaggacgcgtaccaaggttacaattcggctgttccaacagcagaagcacccacagggatcgctggatacgggggaggaggcggaagaggtgggattgaaaggcgagaggtcggagcttctactgagcgagaaggtcgtggatgctagaaaaagtacctggcacgtttttccagtttcctcttcaatccagaggcttttggaccaggggaaaagctcacttgatgtgcgtatcgcctgcgagcagtgtcaggaatccggtgcttcactagtgcttcttggtaaaaagaaaaaaaaggaggaagagggggagggtaagaaaaaaggaggaggagagggcggggctggagcagacgaggagaaggaacaatcccatcgcccatttttgatgctgcaggcccgccagagtgaggaccatccacacagaagacggcgccggggcctggaatgtgacggtaaggttaatatctgttgcaagaaacaatttttcgtgagtttcaaagatatcggctggaatgattggatcatcgcccctagcgggtatcacgcaaattattgtgagggggaatgtcctagccatatagccggaacatccgggtcctccctctcatttcactcaaccgtgatcaatcactatcgaatgcgcggtcactcgccgtttgcaaacctgaagtcctgttgtgttcctactaagcttcgcccaatgtcaatgttatattacgacgacggtcagaacatcatcaaaaaagacatccagaatatgattgtggaggagtgcggttgctcttag

SEQ ID NO: 191339 - DNA, 1281 bp, synthetic construct
  misc_feature 1..1281: note = Description of Artificial Sequence: Synthetic coding sequence
  source 1..1281: mol_type = other DNA
atgcccctgctgtggctgcggggcttcctgctggccagctgctggatcatagttagaagcagcccaacccctggcagtgagggccactccgcagcgcccgattgtcctagctgtgccttggccgcactccctaaagacgtgcccaattcccaacctgaaatggtggaggcagtcaagaagcatattctgaatatgctccaccttaagaaacggcctgacgtgacccaacctgttcccaaggcagctctcctgaacgccatccgcaaattgcatgtgggtaaagtgggtgaaaacggctacgtggaaatagaggacgacattggccggagggcggagatgaacgagcttatggaacagactagtgaaattatcacatttgccgagtctgggacagctagaaagaccctccatttcgagataagtaaagagggaagcgacctttccgttgtggagagggctgaggtgtggctattcctcaaggtgcccaaggccaataggacacgcaccaaggttactataaggcttttccagcagcagaagcacccccagggatcgctagatacaggtgaagaggcagaggaggtcggcctgaagggcgagaggagcgagctgctcctgtctgagaaggttgtggacgcacgcaaatcgacttggcacgtgttccccgtttcttcaagtattcagaggctcctggaccaaggcaagtcatcactggacgtccgaatcgcctgcgagcagtgtcaggagagcggagcttcgctcgtgctgcttggcaagaagaagaagaaggaggaggagggcgagggtaagaagaagggaggtggagaggggggagccggtgctgacgaagagaaggagcaatcccaccgccctttccttatgttgcaggctaggcagtctgaggatcatccacaccggcggagaaggcgcggtctggagtgcgacggcaaagtcaatatctgctgcaagaaacagtttttcgtatcgtttaaagacatagggtggaatgactggatcattgctcccagcggctatcatgccaattactgcgagggagaatgtcccagtcatattgcgggaacgtcaggaagcagcctctctttccatagcaccgtaattaaccactataggatgcggggtcatagcccttttgctaatctgaagtcctgctgtgtccccactaagctccgacccatgagcatgctctattacgacgacggccagaatatcattaagaaggacatccaaaacatgatcgtcgaagagtgcggttgtagctag

SEQ ID NO: 191340 - DNA, 1224 bp, synthetic construct
  misc_feature 1..1224: note = Description of Artificial Sequence: Synthetic coding sequence
  source 1..1224: mol_type = other DNA
atggacggcctgcccggccgggccctgggcgccgcctgcctgctgctactcgctgcaggatggttgggaccagaggcatggggctctcccaccccacctcccacacccgcagccccgccacccccacccccccctggctcacccggcggatctcaggacacgtgcacgagctgcggaggctttagacgccccgaggagctgggcagagtcgatggagacttcctcgaggcagttaaaaggcacattctttcccgattgcagatgaggggtcggcccaacatcactcacgcggtgccaaaagccgctatggtaactgctctgcggaaactgcacgcgggaaaagtccgagaggacggacgagtcgagatacctcacctggatggccatgcaagtcccggtgctgacggccaggagagagtgtccgagatcataagcttcgccgagaccgacggactggccagcagtagagtcagactgtactttttcatctccaatgaggggaatcagaatctgtttgtcgtccaggcctcactgtggctttatctcaagttgcttccgtacgtattggaaaagggatccagacgcaaggtccgcgtgaaagtctatttccaggagcaggggcatggagacagatggaatatggtcgagaagagggtagacctcaaacggtccggttggcacacctttccactcacagaagcgatccaggctttgttcgaacgcggtgaaagacgactgaaccttgacgtccagtgtgatagctgtcaggaactcgccgtggtacccgtgttcgtcgatcctggtgaagaaagccaccggccctttgttgttgtccaggcccgactgggagattcacgtcacagaatcagaaaaagaggcttggagtgtgacggcagaacaaatctgtgctgtaggcagcagttcttcattgatttccgactcataggttggaacgattggattatcgctcctacgggctattacggaaattactgtgagggcagctgtcctgcatatctggctggtgtaccgggaagtgcgagtagctttcacaccgcagtcgtcaatcagtatcgcatgagggggttaaacccaggaactgtgaattcctgttgcatcccgaccaaactctcaaccatgtccatgctttacttcgatgatgaatataatattgttaaacgggatgtgccaaacatgattgttgaggaatgcgggtgtgcatag

SEQ ID NO: 191341 - DNA, 1059 bp, synthetic construct
  misc_feature 1..1059: note = Description of Artificial Sequence: Synthetic coding sequence
  source 1..1059: mol_type = other DNA
atgaccagcagcctgctgctggccttcctgctgctggcccccaccaccgtggctacacctcgggccggcgggcagtgcccggcatgcggcggacctaccctggaattggaaagccagcgagaactgctactggatctcgccaaaaggtccattctggataaactgcatctcacacaacgcccaactttgaatcggcctgtgtcccgagccgcattgaggacagctctgcagcatctccacggagtccctcaaggcgccctccttgaggacaacagggagcaggaatgcgagataatttccttcgcggaaacaggcctctcaacaataaatcagaccagattagatttccacttctcgagtgataggacagctggtgatagagaggtgcagcaggccagccttatgttcttcgtacaactaccttctaacaccacttggactcttaaggtccgcgtcttggttctggggccgcataataccaatttaactctggcaacccagtacctccttgaggtagacgctagcggatggcatcagctcccgttagggcccgaggcacaggcggcctgttctcagggacatctaacactagagctcgtcttggagggacaagtggcccagtccagtgttatcctgggcggagctgcccatcgcccattcgtcgctgcccgagttagggtggggggcaaacatcagattcaccgaaggggcattgactgccagggcggaagtcggatgtgttgtcggcaggagtttttcgttgactttcgggagattgggtggcatgactggattatacagcccgaaggatacgcaatgaacttctgtatcgggcaatgtcctctgcacattgcaggcatgcctggaatcgcagcttcattccataccgccgtgcttaatttactgaaggccaatactgcggccggtacgacaggggggggatcttgctgcgtgcctactgcgaggcgcccacttagtctgttgtattacgatagggattctaacatagtgaagaccgacatccccgacatggtagtggaggcctgcggttgctcctag

SEQ ID NO: 191342 - DNA, 1053 bp, synthetic construct
  misc_feature 1..1053: note = Description of Artificial Sequence: Synthetic coding sequence
  source 1..1053: mol_type = other DNA
atgcggctgcccgacgtgcagctgtggctggtgctgctgtgggccctcgtgcgggctcagggcactgggtctgtttgcccttcctgcggcggctccaagctggcgccacaggccgagcgagctctcgtcctggagttagccaaacagcagattctcgatggtctgcaccttacttcccgcccaagaatcacgcatccacctccccaggccgcactaacgagggccttgcgacgactgcaacccggctctgtcgcgccagggaatggagaggaggtgatctcattcgccaccgtcacggacagtacctctgcttacagctctcttctgacgtttcacctctccactccgcgctcacatcatctctatcacgccagactgtggctgcatgtactaccaactctccctgggacattatgcttgaggattttcagatggggacccagaaggaggcgacagggctcaagaactctcttggctgagcaccatattacgaacctgggatggcacactctcacattaccttcctctggcctcagaggggaaaaaagtggcgtgcttaagctccagctggactgccgacccctggagggaaattccaccgtaacaggccaaccgagacgtctgttggacaccgccgggcatcagcagccgttcctggaactaaaaattcgtgcgaacgaaccgggggccgggcgggcacggaggaggacaccaacttgtgagcccgcaaccccactgtgctgccggcgcgaccactacgtggatttccaggaactgggctggcgcgattggattctccaacctgaaggttatcagctcaattactgttcagggcaatgccctcctcacctagctgggtccccaggaatcgccgcctcctttcactctgcagtcttcagcctacttaaagcaaacaatccctggcctgcgagtacctcttgttgtgtaccgacagcccggcgtccgcttagcctactgtaccttgaccacaacggaaacgtcgtcaaaactgacgtgcctgacatggtcgtggaagcttgtggatgctcgtag

SEQ ID NO: 191343 - DNA, 4062 bp, synthetic construct
  misc_feature 1..4062: note = Description of Artificial Sequence: Synthetic coding sequence
  source 1..4062: mol_type = other DNA
atgagcagccccatgcccgactgcaccagcaagtgccggagcctgaaacatgcactggatgtgctgtctgtggttacgaaagggtctgaaaaccaaatcaaggcttttctgagctctcattgttacaatgcagcaacaattaaggacgtgttcggccgcaatgccctgcatctcgtttccagttgcggcaaaaaaggcgtgctcgactggttaattcagaaaggggtggaccttctggtcaaggacaaagaatccgggtggacggccctgcaccgctcaatcttctacggccacattgactgtgtctggtccctgctgaaacacggagtgagcctatacatccaagacaaagagggtttgtctgccctggacttggtgatgaaggatcgccctacccatgtggtgtttaagaacactgatccaacagatgtttacacctggggggacaataccaacttcactctgggtcatggatcgcagaactctaagcaccacccagaactggtcgatttgttcagtcggtcagggatctatattaagcaagtggtgctctgtaagtttcacagcgtgtttctcagtcagaaaggacaagtttatacttgtgggcacgggcctggtgggcgcctcggacatggagacgagcaaacgtgcctcgtgcccagactggtggaggggttaaatggccacaattgttctcaggtcgctgctgccaaagatcatacagtcgtactcacggaggacggatgcgtatacaccttcggcctgaacatcttccaccagctgggcatcatacctcccccttcatcctgcaatgtcccacgacagattcaagcaaaatacttaaagggccgcaccattatcggggttgcagccgggagatttcatacagtgctctggactagggaagctgtgtacaccatgggactcaatggcggacagttaggctgcctgctggacccaaacggagaaaaatgtgttaccgcacctcgccaggtgagtgcgctgcaccacaaagatattgccctctctctggttgccgcctccgatggagctactgtgtgtgtgaccacccggggcgacatttacctacttgcggattatcagtgtaagaaaatggcatcaaaacagctgaatctcaagaaagtgctagtgtctggaggacacatggagtacaaggtggacccagagcacttgaaggaaaatggagggcagaagatctgcatcttggcgatggacggcgctggccgcgtattctgttggcggtctgtgaactcatctctcaaacaatgccggtgggcttaccctcgacaggtctttattagcgacattgcgcttaaccgcaacgaaatcctgtttgtcacacaggatggcgaaggctttcggggcagatggttcgaagaaaaaagaaagagcagtgagaagaaagagatactgtcaaacttacacaattcctcatcagacgtctcatatgtgagtgatataaacagcgtgtacgagcgcatcaggttggaaaagctcacattcgctcatcgggctgtatcagtgtctacagatccctccggatgcaattttgccatcctgcagtcagatcccaaaaccagcctgtacgaaatcccagccgtctcttcatcctctttttttgaagaattcggaaaacttctgcgggaggcagacgagatggactccatccatgacgttacattccaggtcggcaatcggctcttccccgctcataaatacatcctggccgtccattccgatttttttcaaaagctctttctttctgatggcaacacatccgagtttacagatatttaccagaaagatgaagactccgcaggttgccatttattcgtggttgagaaagtgcacccagatatgttcgagtacctgttgcagtttatatacaccgatacttgcgatttcctgacccacggattcaaacctcgcatccatctcaacaaaaatcccgaagaatatcagggaacacttaatagtcacctgaataaggttaacttccacgaggacgataaccagaagagcgctttcgaagtctacaagtcaaatcaggcccagacagtgtctgaacgccagaaaagcaaacccaagagctgtaaaaaggggaagaatatcagggaagacgacccagttcgtatgctgcaaacagtcgcaaaaaagttcgatttttctaatctcagcagcaggttggacggcgtgaggtttgaaaacgaaaagatcaacgtgatcgcaaagaataccggtaataagctgaagctgtctcagaaaaagtgctcctttctgtgcgatgtcactatgaagtccgtggatggcaaagagtttccctgccataaatgtgtgttatgcgcacggcttgagtatttccattctatgttgtcaagctcctggattgaagcctcaagctgcgccgctctcgagatgcccatccactccgacatccttaaggtgattctggactatctgtacactgacgaagctgtggttataaaggaatcccagaacgtggatttcatatgctctgtgcttgtggttgcagaccaactattgattacaaggcttaaggagatatgcgaggttgctcttactgagaaacttacccttaaaaatgcagcaatgctgctggaattcgcagccatgtattcagcaaagcagttgaaactgtcctgccttcagttcatcggcttgaacatggccgctctgttggaagcccgttccctggacgtcctctccgacggagtgttaaaggatctgagcgagttttatcgaaaaatgattcccgccatggatcggagggtcatcaccccgtaccaagacgggccagacatctcgtacttggaagtcgaggacggtgatatattcctgaaagaagaaataaatatggaacagaaccactcggagaccatgtttaagaaggctaaaaccaaggccaaaaaaaaacccagaaagagatctgactccagtgggggctataacctctccgatatcatccagagtcctagttccacagggctgctgaaatcgggtaaaactaacagcgtggaaagtctcccagagctgctcacaagcgactcagaggggtcatatgccggtgtggggtcccctcgagacctccaatctcctgatttcacaacaggattccatagcgataaaatagaggcgaaagttaaaccctatgtgaatggtacctccccggtctattctagagaggatctgaagccctgggagaaatcacctatcctgaagatttccgcaccacagcccataccttctaatagaattgacaccacatcatctgcctcttgggtggcaggatctttctccccagtgtcgccccctgtcgtcgatttgcgcaccattatggagattgaggaaagccgtcagaaatgtggagcaacccctaaatctcatttgggcaagaccgtctctcacggagtgaaactgtcccagaagcagcgaaagatgatcgcccttaccacaaaggagaacaactctggtatgaatagtatggagaccgtactgttcacccctagcaaagcacccaaaccggtgaacgcttgggcaagcagcctccacagtgtaagttctaaatctttcagagacttcctgctcgaggaaaagaagagcgttaccagccacagctccggagatcatgtgaaaaaggtgagtttcaagggcatagaaaattcccaggccccaaagatcgtaaggtgtagtacccacggaacacccggccccgaggggaaccatatatctgacctgccattgctggattcccctaatccttggttaagctcatcggttaccgccccaagcatggtggccccagttactttcgcctccattgttgaagaggagctgcagcaggaagccgccttgatcagaagtcgtgagaaacccttggcattaatccagatcgaagagcatgccattcaggaccttttagttttctacgaggccttcggaaatcctgaagagtttgttatcgtggagagaacaccccagggtcccctcgccgtgccgatgtggaataaacacggctgttag

SEQ ID NO: 191344 - DNA, 1386 bp, synthetic construct
  misc_feature 1..1386: note = Description of Artificial Sequence: Synthetic coding sequence
  source 1..1386: mol_type = other DNA
atgtggcagctgaccagcctgctgctgttcgtggccacctggggcatttctggcacccctgctcctctagactcagttttctcttcctctgaacgagcacatcaggttctgagaatacgcaaacgggcaaacagctttttagaagaattacggcattcaagcctggagagagagtgcatcgaggaaatttgtgacttcgaggaggccaaggagatattccagaatgtagatgacacgctagcgttctggtcaaagcacgtggacggcgaccagtgccttgtgctgcctctcgaacacccttgcgctagcctttgctgtggccacggcacttgcatcgatggcatcggcagttttagttgcgattgccgctccggatgggagggaagattctgccagagggaagtctcgttcctgaactgttctctggataacggaggttgtacccattactgtcttgaggaggtaggctggagacggtgcagttgtgcccccggctataagttgggcgatgatctcctccagtgtcacccggcggtgaagtttccatgtggccgtccttggaagagaatggagaagaaacgcagccacctgaagagagacactgaagatcaggaagatcaggtggacccccgcctcatcgatgggaaaatgaccagacgaggtgactccccttggcaggtggttctgcttgatagcaagaaaaagctggcttgcggtgctgtcctgatccatccatcatgggtgctgacggccgcccactgtatggatgaaagtaagaaactgctggtgagactcggtgagtatgacctgcggagatgggagaagtgggaactggatttggacattaaggaggtttttgtgcaccctaattattcaaaatccactaccgacaatgacatcgcacttttgcacctcgctcaacccgcaaccctcagccagaccatcgtccccatttgcttacccgacagcggcctcgcagaaagagagcttaaccaagcagggcaggagacccttgtaactggatggggatatcactcttcccgggagaaggaagcaaagcggaatcggactttcgtgttaaattttatcaaaatccctgtagtgcctcataatgagtgcagcgaggtgatgtctaacatggttagcgagaatatgctctgcgctggcattctcggggatcgtcaagacgcgtgcgagggggactccggcggacccatggttgccagcttccacggtacttggtttctcgtgggcctggtcagctggggcgaaggctgtggcttactgcataattacggcgtgtacacaaaggtatcccgctacctagactggattcacggccacatacgagataaagaagctccgcagaaatcatgggccccgtag

SEQ ID NO: 191345 - DNA, 405 bp, synthetic construct
  misc_feature 1..405: note = Description of Artificial Sequence: Synthetic coding sequence
  source 1..405: mol_type = other DNA
atgaaggccttcagccccgtgcggagcgtgcggaagaacagcctgagcgatcacagtttgggcatatctcgctccaaaacaccggtggacgatccaatgagtttactgtacaacatgaatgactgctattcgaaacttaaggaactggtgcctagtatcccccagaataagaaggtcagtaaaatggaaatcctacagcatgtcatcgattacatccttgacttgcaaattgccttggactcccacccaactatcgtcagcctgcaccaccagcggccaggccagaatcaagcaagccggactcccttaacgacgctaaacactgacattagtatactcagccttcaggccagtgaatttccatccgagttaatgagtaacgactccaaagctctttgcggttag

SEQ ID NO: 191346 - DNA, 405 bp, synthetic construct
  misc_feature 1..405: note = Description of Artificial Sequence: Synthetic coding sequence
  source 1..405: mol_type = other DNA
atgaaggccttcagccccgtgcggagcgtgcggaagaacagcctgagcgaccacagcttaggaatttcaaggtccaaaactcccgtggacgaccctatgagtctcttatataacatgaacgattgttattctaagctgaaggagctggtacccagcataccacagaataagaaggtatcaaagatggaaatactgcaacacgtgatcgattacatcttggatctccagatcgcattggacagtcacccgaccattgtcagcctccatcatcagaggcctggtcaaaatcaggcctcgagaaccccccttactactcttaataccgacatcagcatcttaagccttcaggcgagcgaattcccaagtgaactaatgagtaacgactcaaaagcgttatgcggctag

SEQ ID NO: 191347 - DNA, 360 bp, synthetic construct
  misc_feature 1..360: note = Description of Artificial Sequence: Synthetic coding sequence
  source 1..360: mol_type = other DNA
atgaaggccctgagccccgtgcggggctgctacgaggccgtgtgctgcctgagcgaacggtccctagctatagccaggggaaggggaaagggcccagctgctgaggaacctctctctctgctggacgatatgaatcactgttactctaggctgcgcgagctggtgcctggcgtgcctagaggcacccagctctctcaggttgaaattctgcagcgagttatagactacatactagatttacaagtggtgctcgcggagccagcgcccggaccccccgacgggccgcacttgccaattcagaccgcagagctgactccagaactggtcattagtaacgacaagcgctccttctgccattag

SEQ ID NO: 191348 - DNA, 486 bp, synthetic construct
  misc_feature 1..486: note = Description of Artificial Sequence: Synthetic coding sequence
  source 1..486: mol_type = other DNA
atgaaggccgtgagccccgtgcggcccagcggccggaaggcccccagcggctgcggaggcggggagctcgctttaagatgtctagctgaacacggacatagcctggggggctccgccgcagcagccgccgccgcggccgcagcgagatgtaaggccgccgaggccgcagctgacgagccagctctttgtctccagtgcgacatgaacgattgctacagccgactgcgtaggctcgtacctactattcctcctaataaaaaggtcagcaaggtggagatcctccagcacgtgatcgattatattttggatcttcaattggcgcttgagacccaccccgcgctgctgagacagcctcccccccctgctccgcctcaccacccggcaggaacttgccccgccgcaccacctcgaacacccctcacagcgctgaacacagatccggccggggctgttaacaaacagggcgactcaattctttgcagatag

SEQ ID NO: 191349 - DNA, 843 bp, synthetic construct
  misc_feature 1..843: note = Description of Artificial Sequence: Synthetic coding sequence
  source 1..843: mol_type = other DNA
atgctgggccagcagcagcagcagctgtacagcagcgccgccctgctgactggggagcgcagcagacttcttacctgttacgtgcaggactacctcgagtgcgtcgagagtctcccccatgatatgcagcggaatgtctctgtcctacgagaactagacaataagtatcaagagacattaaaagagattgacgacgtgtacgagaaatacaagaaggaggacgacctcaatcaaaagaagcggttgcagcagcttctgcaaagagctttgatcaactcgcaagaactgggagacgaaaagattcagatcgttacccagatgttagagctggtggagaacagggcccggcagatggaactgcatagtcagtgctttcaagaccctgccgaatctgagcgcgcatcagataaagctaaaatggattcgagccagccagaacgaagctccaggcgccctaggagacagcggacttctgagagccgcgacctgtgtcatatggctaatggcatcgaagactgcgatgaccagccccctaaagaaaagaagtccaagtccgcaaagaaaaagaaaagatcaaaggccaagcaagaacgcgaggcgtcacctgttgagttcgctatcgaccccaacgagccaacctactgtctttgcaaccaggtaagttacggggaaatgatcggatgtgacaatgaacagtgtcccatcgaatggttccactttagctgcgtaagcctgacgtataagccaaaagggaagtggtattgtcctaaatgcaggggcgacaatgagaaaaccatggacaaaagtactgagaaaaccaagaaggatcggcgatccagatag

SEQ ID NO: 191350 - DNA, 723 bp, synthetic construct
  misc_feature 1..723: note = Description of Artificial Sequence: Synthetic coding sequence
  source 1..723: mol_type = other DNA
atggaccaggacggcgaccagcagctgggccccagccggatcctggcaccccagaccctgaaagaaattgacgacgtgtacgaaaagtacaagaaagaggatgacttgaatcagaagaagcgcttgcagcagttgcttcaacgggctttgatcaattctcaggaacttggcgatgagaaaatccagattgttactcagatgttagagctggtggaaaatcgtgctcggcagatggaacttcatagccagtgcttccaggatcctgctgagtcagaacgggcctctgataaagcgaagatggactcttcacagcccgaacgctcttcacgaagacctcgcagacaacgcacttccgaaagtcgcgatctatgccacatggctaatggaattgaagattgtgatgaccaacccccaaaagagaaaaaatccaagtcggcaaaaaaaaagaagcggtctaaggccaaacaagaacgcgaagcctcccccgtggagttcgcaattgaccctaatgagcccacatattgtctatgtaaccaggtgtcctatggcgagatgattggctgcgacaacgagcagtgccctatcgaatggttccatttttcctgcgtttctctaacatacaagcccaagggcaaatggtactgccctaaatgcagaggggataacgaaaaaaccatggacaaaagcactgaaaagacgaagaaagaccggcgctctcggtag

SEQ ID NO: 191351 - DNA, 1257 bp, synthetic construct
  misc_feature 1..1257: note = Description of Artificial Sequence: Synthetic coding sequence
  source 1..1257: mol_type = other DNA
atgctgtacctggaggactacctggagatgatcgagcagctgcccatggatctccgcgatcgcttcaccgagatgcgagaaatggatctccaagttcaaaacgccatggaccagttggagcagcgcgtgagcgagttttttatgaatgctaaaaaaaacaagcccgagtggcgtgaggaacaaatggctagtattaaaaaggactattataaggcactcgaagatgccgatgaaaaggtccaactcgctaatcagatatacgacctggtggatcgccatctgagaaaactggaccaggaattggcgaaattcaagatggaacttgaagcagacaatgcaggcatcacggaaattctcgaaagaagaagcttagaactggacacccctagccagcccgtcaacaaccaccacgcgcattcacacactccagtggaaaaacgcaagtacaatcccacttcccaccatactactacagatcatatcccagagaagaaattcaagtctgaggcgttgctgagtactcttactagcgacgcctccaaagaaaataccctggggtgtcggaataataactcaaccgccagcagcaataacgcttataatgttaactcgtcccaaccgctggggagctataacatcggctcactcagcagcggcacgggagccggtgcaatcaccatggcagccgcacaggcagtccaggctacagctcaaatgaaggagggtaggcggaccagctccctgaaagcatcttacgaagctttcaaaaataatgatttccagctaggcaaagaattctccatggctcgtgaaacagtcgggtacagctcctccagtgcactgatgacaactctgacgcaaaatgcctcctcgtctgccgcagattccagatctggtagaaagtctaaaaacaataacaaaagttcttcgcaacaaagcagctcctcttctagcagttcctccttgagtagctgtagcagctcttccacagtcgtgcaggaaatctcccagcaaaccaccgtggtccctgagagcgattccaattcgcaggtggactggacatacgaccccaatgagccccgatactgcatttgcaaccaggtctcttatggcgaaatggtgggctgcgataaccaggattgccccatcgagtggtttcactatgggtgcgtcggtctgacagaggctcccaaaggcaagtggtactgtcctcagtgtaccgctgctatgaagaggagaggctcaaggcacaaatag

SEQ ID NO: 191352 - DNA, 279 bp, synthetic construct
  misc_feature 1..279: note = Description of Artificial Sequence: Synthetic coding sequence
  source 1..279: mol_type = other DNA
atgctgtacctggaggactacctggagatgatcgagcagctgcccatggacctcagggatagattcacggagatgcgggaaatggacctgcaggtgcagaacgctatggaccaacttgagcagcgggtttccgaattttttatgaatgcaaaaaagaacaagcccgaatggagggaagagcagatggcatcaatcaaaaaggattactacaaggccttggaagacgccgatgagaaagtgcagcttgccaaccagatttatgatctgcaacacttctag

SEQ ID NO: 191353 - DNA, 723 bp, synthetic construct
  misc_feature 1..723: note = Description of Artificial Sequence: Synthetic coding sequence
  source 1..723: mol_type = other DNA
atggccaccgccatgtacctggagcactacctggacagcatcgagaacctgccctgcgaactacaacgcaacttccaactgatgcgagaattggaccagcgtaccgaggataagaaggcggaaatcgacattctcgccgcagagtacatctcaacagtgaagactctgagtccagatcagcgggtggaacggttgcaaaagatccaaaatgcttattctaagtgtaaagaatactcagacgacaaggtgcaactcgctatgcagacgtatgaaatggtagataagcacattagacggctcgacgctgacctcgcccggttcgaagccgacttgaaagacaagatggagggaagcgacttcgagtccagcggagggagggggctcaaaaaaggaagaggtcaaaaggaaaaacgagggtcaagaggtaggggacggagaacttccgaggaagacacaccaaaaaagaaaaaacacaaggggggttcagagtttacagataccatcttgagcgtgcacccttcagatgtactggacatgcctgtggatcccaacgagccaacatactgcctgtgccaccaagtgtcgtacggcgaaatgatagggtgtgacaacccggattgtcccattgagtggtttcactttgcgtgcgtcgacctgaccacgaagccaaagggaaagtggttttgccctagatgcgtgcaggagaaacgcaagaaaaaatag

SEQ ID NO: 191354 - DNA, 681 bp, synthetic construct
  misc_feature 1..681: note = Description of Artificial Sequence: Synthetic coding sequence
  source 1..681: mol_type = other DNA
atggccaccgccatgtacctggagcactacctggacagcatcgagaacctcccttgcgaactccagagaaatttccaactcatgagagagctggaccaaagaaccgaggataaaaaagcggaaatcgatatcttggccgccgagtatatatcaaccgtgaaaacactgagtcccgatcagagagtggagagattacagaaaatccagaacgcctattcaaaatgtaaagaatactcagatgataaggtgcagctcgcgatgcaaacttatgaaatggtggataagcatatccggcgccttgacgccgatctagctcgctttgaggcggacctgaaagataagatggagggtagcgattttgagtcatccggaggaaggggacttaagaagggaagaggacaaaaagagaagcgaggctcccggggcaggggacgaagaaccagcgaagaggacactccaaagaagaagaaacacaagggcgggtcggagttcacggacactattctttccgttcaccccagtgatgtgttagacatgcctgtagaccccaacgagccaacctactgcctctgtcaccaggtgagctacggtgaaatgattggttgcgacaatccagactgtcccatagaatggttccatttcgcatgtgtcgacctcacaactaaacctaagggcaaatag

SEQ ID NO: 191355 - DNA, 2265 bp, synthetic construct
  misc_feature 1..2265: note = Description of Artificial Sequence: Synthetic coding sequence
  source 1..2265: mol_type = other DNA
atgttcagcggcggctgccacagccccggcttcggccggcccagccccgcattcccagccccagggtcacccccccccgccccaagaccctgccgccaggagactggagagcagatcgccatcaagcagtgccgtcaagagttgtctcctcggaacagggagcgttggtgcttggaaatccagattatgcggagactcactcaccccaatgtcgtcgctgcccgagacgtgccggaaggaatgcagaacttggctcctaacgacctccccttattggcgatggaatattgccaaggtggagacctcagaaaatatttaaatcagtttgaaaattgctgtgggttacgggagggcgcaatcctgacacttttgagcgacatagcgagcgccctgcgttatctgcacgagaaccgcattatccaccgagatctcaagccagagaacattgtgctgcagcagggagaacaaaggcttatccacaagatcatcgatttaggctatgccaaggagctagaccagggcagtctttgtacttcttttgtcggtacactacagtatttggctcccgagttgctcgagcagcagaagtacactgttaccgtagactattggtcatttgggacgctggcatttgaatgtattactgggttcagaccttttctcccaaactggcagcccgtgcaatggcacagcaaggtgcggcaaaagtccgaggtggatattgtggtgtcagaggacctgaatggcactgttaagttttcctccagtctaccctaccctaataatttaaacagcgtcctggccgagagactggagaaatggctgcaattgatgctgatgtggcacccgcgacagagggggaccgacccaacgtacggtcccaacgggtgctttaaggccctcgacgacattctaaatttgaaattagtgcatattctcaacatggtcactgggactatacacacctaccccgtgacagaggacgaatcactgcagtccctgaaggcccggatccagcaagacacgggaattcctgaggaagaccaggaactcctgcaagaggccggcttagctctgattccagacaagcccgccacgcagtgtatcagtgacggtaaactcaatgaaggtcacaccctggacatggatctggtgtttctgttcgacaactccaaaattacctatgagacgcaaatatccccaaggccgcagcctgaaagcgtgtcttgcattctccaggaaccgaagcgcaacctggccttttttcagttaaggaaggtgtggggtcaagtatggcacagtatccaaacgttgaaagaggattgtaaccgactgcagcagggccagagggcggccatgatgaatttgctgcggaacaattcatgtttatctaagatgaaaaactccatggccagcatgagccagcagctcaaggccaaactggatttcttcaaaacctccatacagatcgaccttgaaaagtactcggagcagaccgagtttggcatcactagcgataagcttttgcttgcatggagggagatggaacaagcggtcgagctatgcggcagggagaatgaggtcaaactcctggtggagcgaatgatggccttgcagacagatattgtcgacctacaacggtctcctatgggcaggaagcagggcggaacattggatgaccttgaggagcaggcgagagaattgtatcggaggctgcgggagaaaccacgggatcaacgcacagaaggagactcacaggagatggtgagattgttactccaagccatccagagtttcgagaagaaggttcgagttatatacacacagctatctaagactgtggtgtgcaagcagaaggccctggagctgttaccaaaagtggaggaggtcgtttccctcatgaacgaagatgaaaagacggtggtgagactgcaggaaaagaggcagaaagagttatggaacctgcttaagatcgcctgctcaaaggtgcggggcccagtgtccggctccccagatagcatgaacgcctctcggctgagtcagcctgggcagctgatgtcacaaccttccactgcttctaatagcctccccgagccggccaagaaatcggaggagctggtggccgaggctcataatctgtgtactctgcttgaaaatgcgattcaagatacggtgcgcgaacaggaccagagtttcactgccctggactggagctggttacaaactgaggaggaggaacactcttgtctagagcaagccagttag

SEQ ID NO: 191356 - DNA, 963 bp, synthetic construct
  misc_feature 1..963: note = Description of Artificial Sequence: Synthetic coding sequence
  source 1..963: mol_type = other DNA
atgaaccggcacctgtggaagagccagctgtgcgagatggtgcagccatcaggcggtcccgccgccgatcaagatgtgttaggtgaggagagccccctcggaaaaccggccatgctccacctaccgagtgagcagggggctcccgaaaccctgcaacggtgcctggaagagaatcaggagttgcgcgatgcaatccgccagtccaaccaaattcttagagaacggtgtgaagaactcctgcatttccaagcgagtcagagggaggagaaagagtttctaatgtgcaagtttcaggaggctagaaagctggtcgagagacttggtctggaaaagctcgatctcaaacggcaaaaggagcaagccctgagggaggttgagcacctcaaacggtgccaacagcaaatggccgaagacaaagcctcagtgaaagcccaggtgacctccctcctgggagaactgcaggaatcccagagcagactggaggccgcgaccaaggagtgccaggcactggaaggtcgccggaagctcgcccaactgcaagtcgcctaccatcagttgttccaagagtacgacaaccatatcaagtcaagcgttgtgggctcggaaagaaagagagctgacatatacaaggccgatttccaagcagagaggcaggcacgtgagaagctcgctgaaaaaaaagagctactgcaggagcagttagagcaactccagcgcgagtattctaagcttaaagctagctgtcaggagagcgctcgcatcgaggacatgaggaaacgacacgttgaggtctcacaggcacctctaccacccgcgcccgcatatttgagtagccccctggctttgccttcgcagcggagaagtcctccagaggaaccccctgacttttgctgtcctaagtgccaataccaggcccctgacatggatacactccagatccacgtgatggagtgcatagaatag

SEQ ID NO: 191357 - DNA, 1602 bp, synthetic construct
  misc_feature 1..1602: note = Description of Artificial Sequence: Synthetic coding sequence
  source 1..1602: mol_type = other DNA
atgagcagcgacggcaccatccggcacagcaaggtgcggcagaagtccgaagtcgacattgtagtgagcgaggatctcaatggtacagtaaagttctcctcaagcctgccctatcccaacaacttgaacagtgtactggcagagcggctggagaagtggcttcagctgatgctaatgtggcaccctagacagcgcggtaccgaccccacatacggacctaatggctgcttcaaggccctggatgacatcttaaatcttaaactggtccacatcctgaatatggtcaccggcacaatccacacataccccgtgactgaggatgagtcgctgcagagtttgaaggctcgcatccagcaggataccggaatcccagaggaggaccaggaactgctgcaagaagctggcttagccctgatccctgacaaacctgcaacccagtgtatctccgatggcaagctgaatgaggggcataccctcgacatggacttagtgttcctgttcgacaattccaagatcacttatgagacgcagattagcccacgtccgcagcccgagagcgtgtcctgtattctacaggaacctaagcgtaacttagcattttttcagctccgcaaggtctggggccaggtttggcattcaattcagacactcaaggaggactgtaatcggttacagcaggggcagcgcgccgccatgatgaacctcctgaggaacaatagctgtttatctaaaatgaaaaacagtatggcatccatgagtcaacagctgaaagcaaaactggatttcttcaaaacaagcattcagatcgatctggaaaagtattccgagcaaacagaatttggcataacaagtgacaagctcctgctggcttggagagagatggagcaagcagtggagctgtgtgggcgcgagaacgaggtcaagctcctggtggaaaggatgatggctttgcagacagatattgtagaccttcagcgcagccctatggggagaaaacagggcggaacattggacgacctggaggagcaggcacgcgaattgtataggagattgagggagaagccaagagatcaacgaaccgagggtgacagtcaggaaatggtccgtctgctcctgcaagccatccagagtttcgagaagaaggtgcgcgtgatttacactcagctgagcaagacagtggtatgcaagcagaaggccctagaacttctgccaaaggtagaagaggtagtcagtctgatgaatgaagatgaaaaaacagtcgtacggctgcaggagaaaagacaaaaagagctttggaatctacttaagattgcctgttccaaggtccgcggccccgtcagcggaagccccgactccatgaacgcatcccgtctgtctcagcctgggcaattgatgagccagccctctactgcgtctaacagcctgcccgaaccggctaagaagtctgaagaattggttgccgaggctcataacctttgcaccttgctcgaaaacgctatccaggacaccgtccgtgaacaagaccagtcttttacagcgctcgactggtcatggcttcagactgaggaagaagagcacagctgtctggaacaagcctcttag

SEQ ID NO: 191358 - DNA, 2094 bp, synthetic construct
  misc_feature 1..2094: note = Description of Artificial Sequence: Synthetic coding sequence
  source 1..2094: mol_type = other DNA
atgagcagcgacggcaccatccggctgacccaccccaacgtggtggccgctagggacgtacccgagggtatgcaaaacctagcacccaacgacctccctctgcttgcaatggagtactgccaggggggcgacctgcggaagtatctaaaccaattcgagaactgttgcgggctgagggaaggtgctattctgaccttgctgagcgacatcgcctccgcgttgcgatatctgcacgaaaaccgtatcatccatcgcgatctgaaacctgaaaatatcgtcctccaacagggggaacagcgcctgatacacaagataattgatttaggttacgccaaggaactggatcagggatcactctgcacctcatttgtgggcacgttgcaatatcttgcccctgagctcctggagcagcagaagtatactgtgacagtagactattggtcttttgggactctggcatttgagtgtataaccggcttcagaccattcctgccaaactggcaacctgtccaatggcactctaaggtgaggcagaagtctgaagtggatatcgtggtgagcgaggatttaaacggcaccgtcaaattctcctcttcgctgccttaccctaacaatctaaattcagtccttgccgagcgacttgaaaagtggctgcaattaatgctgatgtggcacccccgacagcgcgggacagatcccacatatgggccaaacggttgcttcaaggccctggacgacatcctgaatctgaaactcgttcatatcctaaacatggtgactggtactatccacacgtaccctgtcaccgaagacgaaagtctgcagtctcttaaagctcgcatacagcaggatacaggtattccagaggaagaccaagaacttctacaggaagctggccttgctttaatacccgacaaacctgctacacagtgtatctcggacgggaaattaaatgaagggcacaccctggatatggatctagttttcctctttgacaattccaagataacctatgagactcagattagcccaagaccccaaccagaatccgtcagttgtatcctgcaggagcctaaaaggaatttggcattcttccagctgcgcaaggtctggggacaagtgtggcacagtatccagactctcaaggaggattgcaatagacttcagcaaggccaacgggccgctatgatgaatcttcttcgcaacaattcctgtctgagcaaaatgaaaaacagtatggcctctatgtctcaacagctaaaggccaaacttgatttctttaagacaagtattcagattgatctggaaaaatattctgagcagactgagtttgggatcaccagtgataaactactcctggcgtggcgagagatggagcaggcagtggagttatgcggccgggagaacgaggttaagcttcttgtggaacgaatgatggccctgcagaccgatatcgtcgacctacagcggtcccccatggggaggaagcagggagggacacttgacgatcttgaagagcaggcacgcgagctgtataggcgtctgcgggaaaagcccagagaccaaaggaccgagggagatagtcaggagatggtgagattgctgttacaggctatccaaagttttgagaagaaggtgagggtgatttatacccagcttagcaagactgtcgtatgtaagcaaaaggcactggagttattacccaaggtggaagaggttgtgagtttgatgaacgaagatgagaagacagtggtgagactgcaggagaagcggcagaaggaactctggaacctgctcaaaattgcctgctccaaggtgcggggtcctgttagtggcagtccagacagtatgaacgcttctagacttagtcaaccagggcagttgatgagccagccttcaacagcaagtaattccctcccagaacccgccaaaaaatctgaggaactggttgccgaggctcacaacctgtgcaccctgctggagaacgccatccaggacacagttagagagcaagatcaaagttttaccgctcttgattggagttggctgcagaccgaagaggaggaacacagctgtctggagcaggcgtcttag

SEQ ID NO: 191359 - DNA, 2271 bp, synthetic construct
  misc_feature 1..2271: note = Description of Artificial Sequence: Synthetic coding sequence
  source 1..2271: mol_type = other DNA
atgagctggagccccagcctgaccacccagacctgcggcgcctgggaaatgaaggagaggctcggtacaggtggatttggcaatgtgatccggtggcacaatcaggaaacaggtgaacagattgctatcaaacagtgccgtcaagagctgagcccacgcaaccgagaaaggtggtgtctggagattcagattatgaggagactgactcaccccaacgtggtggccgccagagacgtgcctgaagggatgcagaacctggcccctaacgatcttcccttacttgcgatggaatactgtcagggaggagacctgcgcaagtaccttaaccagttcgagaattgctgtggtttaagggagggcgcaatcttgactctcctgtctgacatagcttcagcattacggtacttacacgagaatcggataatacatcgcgacctgaaacccgagaatatcgtcctccagcaaggagaacagcgcctgattcacaaaattattgacctcggatacgcaaaggaactggatcaaggtagcttatgtacttctttcgtgggcacactgcagtaccttgcccctgaactgctggagcagcagaagtatactgtgactgtggattattggagttttggcacgctagccttcgaatgtattacagggttcagaccttttctccccaattggcagcccgtgcaatggcattccaaagttcgccagaaatccgaggttgacattgtagtttcggaggatctgaacggtacagtgaagttctctagtagtctgccgtatccgaataaccttaactccgtgcttgctgaaagattagaaaagtggctccagctgatgttaatgtggcaccccagacaacgcggaacagaccccacctatgggccaaacgggtgttttaaggctttggatgatattctcaacctgaagctagtgcacatcctgaatatggtgacaggtaccatacatacataccctgtaacagaggatgaatcgttgcagtctctaaaagcacggattcagcaagacacgggcatccctgaagaggatcaagagctgctccaggaagcaggcctcgcactgatccctgacaagcccgccacccagtgtatctctgatggtaaattgaacgaaggtcacacattggacatggacctcgtcttcctcttcgataattcgaagatcacctacgaaactcaaataagccctcgccctcagcccgaaagtgtgtcatgcatcctgcaggaacctaaaagaaacctcgcgtttttccagttacggaaggtatgggggcaggtgtggcactccatccagacgctcaaagaggattgcaatcggcttcagcaaggccagagggctgctatgatgaatctcctcagaaataacagctgtctgtctaagatgaagaattccatggcctctatgtcacaacaactaaaagcgaaactagacttttttaaaaccagcatccagattgacttggagaaatactccgagcagaccgagttcgggattactagcgacaaactgctgctcgcctggagggaaatggaacaggccgtggagctttgcggaagggagaacgaagtgaaactgttggttgaacgaatgatggccctgcaaacagacatcgtggacttgcagaggtcacccatgggccggaaacagggcggcacattagatgatctggaagagcaggctagggagctttaccgacgcctccgggagaaacctagagatcagcgaactgagggagattctcaagagatggttaggctgctgttgcaggctattcagtctttcgagaagaaagtgagagtcatctacacccagcttagcaaaaccgtggtttgtaaacagaaggccttagaactgctccctaaggtcgaagaggtcgtgagtctcatgaacgaagacgaaaagacggtcgttcgcctgcaggagaagagacaaaaggagctctggaatcttcttaaaattgcatgctcgaaagtgagaggcccggtctcaggtagtccggattctatgaatgcaagccgactgtctcagccgggccagctcatgtctcagcctagcaccgcgtcaaacagcctgccagagccggccaagaaatcagaggaactcgtggcagaggcacataatctgtgcacactgctcgagaatgccattcaggacacagtgcgggaacaggaccaatccttcacggccctcgactggagttggctgcaaactgaggaggaggagcattcctgccttgaacaagcatcttag

SEQ ID NO: 191360 - DNA, 3999 bp, synthetic construct
  misc_feature 1..3999: note = Description of Artificial Sequence: Synthetic coding sequence
  source 1..3999: mol_type = other DNA
atgcggaacctgaagctgttccggaccctggagttccgggacatccagggcccgggaaatccccagtgtttcagcctccgaacggagcaggggaccgtgctgatcggctcagaacatggactgatcgaagtggatccagtgtcccgcgaagttaagaacgaggtgtcactggtagccgagggctttctgccagaggatggcagcggccgaatcgtcggggttcaggacctcctggaccaggagagtgtgtgcgttgccaccgcctcgggagacgttatcctctgtagcttgagcacccagcagttggaatgtgtgggttctgtcgcatccggaattagcgtcatgtcttggagcccggaccaggagctcgtcctgcttgcaactgggcagcagaccctgatcatgatgacaaaagactttgaacctattctggagcaacaaattcatcaggacgatttcggtgagtccaagtttataaccgtcgggtggggaagaaaagaaacccagttccatggatcggaggggagacaagccgcgttccaaatgcagatgcatgagagcgcacttccgtgggacgatcacagacctcaggtgacttggcgtggtgatggccagttttttgccgtgtctgtcgtttgccccgagacaggtgcccggaaggttagggtctggaatagggagtttgccttgcagtcaaccagcgagccagttgccggcctcggaccagccctggcctggaagcccagcggctctcttatagcaagcactcaggacaaaccaaaccaacaagacatcgtgttttttgaaaagaatggtctcttgcacgggcactttacactaccatttcttaaagacgaggtgaaagtgaacgatctgctgtggaatgctgactcaagcgttctggcagtgtggctggaagatctacagagagaagagtctagcatcccgaaaacttgcgtgcagctgtggaccgtaggtaactaccactggtacctgaaacagtcgctgagcttctctacctgtgggaagtctaaaattgttagtttgatgtgggaccctgtcacaccctatcggttacacgtcctctgccagggatggcactaccttgcttacgattggcactggactaccgatcggtcagttggggacaacagtagtgacctgtctaatgtcgcagtgattgacggcaatcgtgttctggtgaccgtgttcaggcagactgtggtccctcccccgatgtgcacgtaccagctgctcttccctcacccagttaatcaggtcacttttctcgcgcatccccagaaatctaacgatcttgcagtgctggacgcaagtaatcaaatttccgtgtataagtgtggcgattgtccttccgctgaccccacggtcaagctgggagcagtgggaggcagcggctttaaggtgtgtctgcgcaccccacatctggagaagaggtataagattcagttcgagaataatgaggatcaagatgtgaacccgctcaagctgggtttattaacttggatcgaggaggatgtcttcctggccgtatctcacagcgaattctcgcccagatctgtgatccaccatctgaccgccgcctcttccgaaatggacgaagaacacggtcagctaaacgtctcatcatctgcggcagtggacggtgtgattatcagcctgtgctgcaactcgaaaacaaaaagcgtggtcctgcagttggccgatgggcaaatctttaagtatctgtgggagtcacccagcttagccattaagccctggaaaaattccggtggtttccctgtacgattcccctacccatgcactcagacagaactcgctatgattggggaggaggagtgtgttcttggcctgaccgacaggtgcagatttttcattaatgatattgaggtggctagcaacattaccagctttgcagtgtacgatgaattcctcctgctaaccactcacagccatacctgccagtgcttctgtttgagggacgcctctttcaagacactgcaggccggccttagctctaaccacgtgtcacacggcgaggtgctcagaaaggtcgagcgagggagtcgcattgtcacggtggtcccccaggacacgaagctggtgttacagatgccacgcggtaatctagaagtagtacaccatcgggcgctagtgctcgcccagatcaggaagtggctcgacaagttaatgtttaaggaggcttttgagtgtatgcggaagctgagaattaatctaaatctgatttacgaccacaaccccaaagtctttctcgggaatgtagaaacattcatcaagcagatcgactccgttaaccatatcaaccttttcttcaccgaactcaaggaagaggacgtcacaaagacaatgtatcccgcgccggtcactagctccgtctatctttcaagggatccggacgggaacaagattgatctggtctgcgatgcaatgagggctgtgatggaaagtattaaccctcataagtactgtctctctatcctgactagtcatgtaaagaagaccacacctgaactcgaaatcgtgctccaaaaagtgcacgagctgcaggggaacgcgccttctgaccccgatgccgtatctgctgaagaggcactgaagtacctgttgcacctcgttgatgttaatgagttatacgatcactcattgggcacctatgactttgacttggtcttgatggtcgccgagaaatctcaaaaggacccaaaggagtatctgccgtttttaaacaccttgaaaaaaatggagaccaactatcagcggttcaccattgataaatatctaaagcggtatgaaaaagctatcggtcacctgtctaaatgtgggcccgaatattttcccgaatgcctgaacctgataaaagataagaatctctacaacgaagcgttaaaactgtacagtcctagcagtcagcagtaccaggatatcagcatcgcctacggtgaacacctgatgcaagaacacatgtatgaaccagctggcctgatgttcgcccgatgcggggcccacgagaaagcattaagcgcatttctgacatgcggcaattggaaacaggctctctgcgttgccgcccagttgaatttcaccaaggatcagctggtcggcttgggaagaactctggccgggaaactggtcgaacaacggaaacacattgacgccgccatggtgttggaggagtgcgcccaagactacgaagaagccgtgcttctgctgttggagggcgcagcttgggaggaggcactgagactcgtctacaaatacaaccgactggacatcatcgagactaatgtcaagccaagtattctagaggcacaaaagaattacatggcttttctcgatagccagacagccactttcagccggcacaaaaaacgcctgctggtggtgcgtgaactgaaagagcaggcacagcaggcaggcctggacgacgaggtaccgcacggacaggagtcagacctgttcagcgagacatcaagtgttgtatctggaagcgagatgtctggcaagtatagtcatagtaacagcaggatttccgctaggtcaagcaaaaatagacgcaaagcagagagaaagaagcacagcctaaaagaaggcagtccactagaagatctggccctgctggaggcactctccgaggtcgtgcagaacaccgaaaaccttaaggacgaggtctaccacattcttaaagtgctatttttgttcgaattcgatgaacaggggcgggaattacagaaggccttcgaagacaccttgcagcttatggagcggagcctgcccgaaatttggactcttacatatcaacagaacagcgccacccccgtactgggccctaattccactgccaatagcatcatggctagctatcagcaacagaagacttccgtgccggttctggacgctgagttgttcatcccgccaaagatcaatcgtagaactcagtggaagctctccctgctggactag

SEQ ID NO: 191361 - DNA, 2952 bp, synthetic construct
  misc_feature 1..2952: note = Description of Artificial Sequence: Synthetic coding sequence
  source 1..2952: mol_type = other DNA
atgtgggaccccgtgaccccctaccggctgcacgtgctgtgccagggatggcactacctagcttatgactggcactggaccactgacagaagcgtgggagacaactcaagtgacctcagtaatgttgcagtaattgatggcaaccgagtccttgtcaccgtcttccgccagacagtggtgcctcccccgatgtgcacgtatcagctgctgttcccccacccagttaatcaagtaacattcttagctcacccccaaaaatctaacgacctggccgtcctcgatgcttccaatcagatttccgtttacaagtgtggcgactgtccgagcgctgacccgaccgtgaagctgggtgccgtgggaggatccggattcaaagtttgtctgcgtactcctcaccttgagaaacgatataagatccagttcgagaacaacgaagatcaggacgtgaatcctcttaaactcggcctgctgacctggatcgaagaagatgtctttttggccgtgagtcactcagagtttagcccaaggtccgttattcaccatctgactgcagccagctccgagatggatgaggagcacggacagttgaacgtcagtagtagtgccgcagtggacggcgtgatcattagtctgtgttgtaatagtaagaccaaatccgtagtcctgcagctcgctgacggccaaatttttaagtacctctgggagagtccttctctggctattaagccttggaagaatagcggcggctttcccgtgcggttcccttacccatgtactcagaccgagctcgccatgatcggggaagaagagtgtgtactggggctcaccgaccgatgtagattcttcataaacgacatcgaagtggccagtaacataactagtttcgccgtgtacgacgaatttctgttgctgaccacacattcacatacatgccagtgtttctgtctccgagatgcatcattcaagaccctccaggcaggcttaagttccaaccacgtcagtcatggcgaggtcctgaggaaagttgagagaggatcaagaattgtaaccgtggttcctcaggataccaaactggttctgcagatgccacggggcaacctggaggtcgtacaccacagagccctcgttctggcccagatccgcaagtggttggacaagctgatgttcaaggaggccttcgaatgtatgcgcaagctaagaattaacctgaaccttatttacgaccacaaccctaaggttttcctcggaaatgttgagactttcatcaagcagatcgactcggttaatcatattaacctttttttcacagaacttaaggaggaggatgtcacaaagaccatgtacccggcacccgtgacctccagcgtctacctatctagggatccagacggcaataagatcgatctcgtttgtgacgcgatgagggctgtaatggaatcaataaacccacacaagtactgtttatcaatcttaacttctcacgttaaaaaaaccaccccagagcttgaaattgtactgcaaaaggttcacgagttacaggggaacgcgccaagcgacccagatgccgtctccgcagaagaggccttgaagtacctgcttcacttggtcgatgtcaatgaactgtatgaccactccctgggaacgtatgactttgacctcgtgctcatggtagcagaaaaaagccagaaggatcccaaagaatatctccccttcctcaatacattgaaaaagatggagaccaactatcagcgcttcacaatagacaagtatctcaagagatatgaaaaagccatcggccacctcagcaaatgcggccctgaatatttccccgagtgtcttaatcttatcaaggataagaatctgtacaatgaagcattaaaactgtattctccgagctcacagcagtaccaagacatcagtatagcttatggagagcatctgatgcaggaacacatgtatgaacctgctggtctgatgtttgcccggtgcggcgcacacgagaaagcactgtcagcattcttgacctgtggcaattggaaacaagccctgtgcgttgccgcccaattgaacttcaccaaggatcagctggttggactagggcggaccctggccggcaaactcgtggaacagagaaaacacattgatgcggcaatggtgttagaggaatgtgcccaggattatgaggaagcagtcctgttgctgttggagggggcagcctgggaagaagctttgcggctggtctacaaatacaaccgattggacatcatcgagaccaacgtgaagccttccatcctggaggcccagaaaaattatatggctttcttggacagccagacagctactttttccagacataagaagcgcctgcttgtggtcagggaactgaaagagcaggctcagcaagcagggctggacgatgaagtgcctcatggccaagagagcgacctgttttccgaaacatcatccgtcgtctcgggatcagagatgtccgggaagtactctcattccaattccagaatctccgcccgcagctctaagaatcggaggaaagcggagaggaagaagcactcccttaaagagggttctccattagaagatctagcgctgctcgaggctctctccgaagtcgtgcagaatactgagaatctgaaagacgaagtgtaccacatcctaaaggtgctgttcctgtttgagttcgacgaacaggggagggaactgcagaaggcttttgaggatacacttcagctcatggaaaggtccctacccgagatatggaccctgacctaccagcagaacagcgccactccggttctggggcctaactccactgccaattccatcatggcgtcctatcaacagcagaagaccagcgtgcccgtactggacgccgagctgtttattcctcccaaaatcaacagaagaacccaatggaagctcagcctgctggattag

SEQ ID NO: 191362 - DNA, 2151 bp, synthetic construct
  misc_feature 1..2151: note = Description of Artificial Sequence: Synthetic coding sequence
  source 1..2151: mol_type = other DNA
atgcagagcaccgccaactacctgtggcacaccgacgacctgctggggcagggtgccactgcttctgtgtataaagcccgcaataagaagtccggcgaacttgtggcagtaaaggtcttcaacacgacttcttacctaaggccgcgcgaggtgcaggtccgagagttcgaggtgctgcgtaagctgaaccaccaaaatatagttaagttgttcgcagtggaagagacaggggggagccgccagaaagtgctggtcatggagtattgcagtagtgggtctctcctgagtgtcctggagagcccagaaaatgcattcggcttacctgaggacgagttcctggttgtgttaagatgtgtagttgctggcatgaaccacttgcgtgaaaatggaattgttcatagggacattaagcccggaaacatcatgagacttgtgggtgaggagggccaaagcatttataaattaaccgacttcggggcagcgcgcgaactggatgatgatgagaagttcgtttcagtctacggaaccgaagagtatctgcatcctgacatgtacgagcgtgcagtgctgcggaagccccaacaaaaagcttttggagtaactgtggatctatggagtattggtgtcactttgtaccatgcggcaaccggtagtctccctttcatcccattcgggggaccgcgccgaaacaaggaaataatgtatcgaatcactactgagaaacccgccggtgcgatagctggcgcacaaagacgagagaacggtcctttagagtggtcttatacactccccatcacctgccagcttagcctcggtttacagtctcagctcgttcctattttagcgaacatcctggaggtggaacaggcaaagtgctggggctttgaccaatttttcgctgaaacatctgatattctgcagagggtggtggttcatgtgttcagcttgagccaggcagtgctacatcacatttacattcacgctcacaacaccattgcaatttttcaggaagcagtacacaaacagacgtctgtggctccccggcaccaggagtacctcttcgagggtcatttgtgtgtcttggagccgagtgtatctgcacagcacatcgcccataccactgcgagttcaccgttaacccttttctcgacagccattccgaagggacttgcgtttcgggaccccgccctggatgttccaaagtttgtgcccaaggtcgaccttcaggcagattataacaccgcgaagggagtgttgggggcaggctatcaggccctgaggctggcccgggcgctgttagacggtcaggaactgatgttcaggggactgcattgggtgatggaggtgctccaggccacctgccgccgcactctagaagttgcacgaacttctctcctatatctgagttcatccctcggcactgagaggttcagcagcgtggccgggacaccagagatccaggaactgaaggcagccgcggagctaagaagcaggctgagaacacttgcagaggttttatcccgctgctctcagaacataacagaaacccaagaatcattatcatcactgaatcgtgagctcgttaaatcacgcgatcaggttcacgaggatcgctccatccagcagatccaatgctgccttgataaaatgaacttcatatacaagcagttcaagaaatcgcgcatgcgcccggggctggggtataacgaagaacagattcacaaactggacaaggtgaatttctcgcacttggccaaacgactgctgcaggttttccaggaggaatgcgttcagaaataccaagctagccttgttactcacggtaaacgcatgagagtggtgcacgaaaccaggaaccacttgagacttgtgggatgtagcgtcgcagcttgtaatactgaggcacagggagttcaggaaagcctctctaaactgcttgaggagctctcacaccagctgctacaggaccgagcaaagggcgcacaagctagcccgcctcctatagcaccatatccatcccccacccgtaaagacttgttgctgcacatgcaggaactgtgcgaggggatgaagcttctggcgagtgacctgctagataacaaccgtatcatcgaacgcttgaatagagtgcctgcaccacccgatgtctag

SEQ ID NO: 191363 - DNA, 1896 bp, synthetic construct
  misc_feature 1..1896: note = Description of Artificial Sequence: Synthetic coding sequence
  source 1..1896: mol_type = other DNA
atggagtactgcagcagcggcagcctgctgagcgtgctggagagcccagagaatgccttcggactgcccgaagacgagttccttgtcgtactgaggtgcgtcgttgcgggtatgaatcatttacgagaaaatggaatcgtgcaccgcgatataaagccagggaacatcatgcgcctcgtaggggaagagggccaaagcatctataagctgacagacttcggtgcagcccgggaactggatgatgacgaaaagtttgtttccgtgtatggcacagaagaatacctacaccccgacatgtatgagagagcagtcctacggaagcctcagcaaaaagccttcggggtcactgtcgacctttggtcgatcggagtgaccctttatcacgcggctaccggttccttacccttcatcccatttgggggaccacgcagaaacaaagagatcatgtacaggattacaaccgagaaaccagctggggctattgcaggagcccaaagacgtgagaacggtccactggaatggtcttatactctgcctatcacctgccaacttagcctcggcctccagtcccaacttgtgcccatcttggccaacatcctcgaagtggagcaggctaaatgttggggtttcgaccaattctttgctgaaactagcgatattttgcagagagtcgtggtgcatgttttttccttgtcccaggccgttctccatcatatttacatccatgctcataatacgattgccatcttccaggaagccgtccacaagcaaacttcagtagcccccaggcatcaggaatatctgtttgaaggccacctgtgcgtgctggaacctagtgtgtcagcacagcacatcgctcacacaacggcaagtagcccattaacactcttttccacagctatacccaaggggctggcattccgggaccccgctctggacgtgcctaaatttgttccaaaagtggatctgcaggccgactacaatactgccaaaggggttctgggtgcaggatatcaagccctgcgcttagctagagctttgctggatgggcaagaactaatgtttcgaggcttgcattgggtcatggaggtgctgcaggccacttgccgccgcaccctggaggtcgctagaaccagtcttctgtatctcagctcctctctaggaaccgaacgattttccagcgtggccggcacccccgagattcaagagctcaaggccgccgccgaacttcgaagtcgactgaggacactggctgaagttctcagtcggtgttcccaaaacattactgagacacaggagtccttaagcagcctcaaccgggaactggtcaagagtcgcgaccaggtacatgaggataggagcatccagcagattcaatgttgtctggacaaaatgaactttatttataagcagtttaagaaaagcaggatgaggccaggactgggttataacgaagaacagattcacaagcttgataaagtcaacttttctcacctcgccaaacggctcctgcaagtgttccaggaggagtgcgtccagaagtaccaagcctccctggtgacacacggtaaacgcatgagagtggtacacgagacgcgcaaccatctgcgcctcgtgggctgcagtgttgcagcatgtaacaccgaggcccagggggtgcaggagtcactctcaaagctactggaggaactctctcaccagctgctgcaggacagagcaaagggcgcccaggcttcgcccccccctatcgctccatatcccagccccacccgcaaggatctgctgctgcacatgcaagagttgtgcgagggaatgaagctactagcttctgatttgctcgacaataataggattattgagagattgaatcgagtgccggccccacctgacgtgtag

SEQ ID NO: 191364 - DNA, 1107 bp, synthetic construct
  misc_feature 1..1107: note = Description of Artificial Sequence: Synthetic coding sequence
  source 1..1107: mol_type = other DNA
atgaaccggcacctgtggaagagccagctgtgcgagatggtgcagcccagcggcggacctgcggccgatcaagacgtgcttggagaagagtccccactgggaaagcctgcaatgctgcacctgcctagcgaacagggggccccagaaactctacaaagatgtctggaagagaaccaggagctcagagatgccatccggcagtctaaccagatcctcagggaaagatgcgaggaattgctccactttcaagcctcgcagcgggaggagaaagagttcctgatgtgtaagtttcaggaagccagaaagttggtagagcgcctaggactggagaaactggacctcaagcgccaaaaagagcaggcgctgagagaagtggagcacctcaagcggtgccaacagcagatggccgaggacaaggcatcggtgaaggctcaggtgaccagtctgctgggggagctgcaggagtcccagagccgcctagaagctgcaaccaaggagtgccaggctctggaaggccgcagaaaactggcacagctgcaggtcgcctaccatcagctctttcaagagtacgataaccacattaaatccagcgtggtcggatcagagagaaagcggggcatgcagctcgaagacctgaaacaacagctccagcaggcagaggaggccctggtggcgaagcaggaggtaattgataaattgaaagaagaggccgagcagcataaaattgtgatggaaaccgtgcccgttctcaaagctcaggcagacatctacaaagccgattttcaggccgaacgacaagctagagagaagcttgcggagaagaaagaactcttgcaggaacagttggaacagctacagagggagtactctaagctgaaggcctcttgccaggagagcgctagaatcgaggatatgcgaaagcgtcatgtcgaggtttcccaggcccctctgcctcccgctcctgcatatctctcttcccccttggccttaccatcccagcgccggagccccccagaagagccacctgacttctgttgtcctaaatgccaataccaggccccggatatggataccctccagatacatgtgatggaatgtatagagtag

SEQ ID NO: 191365 - DNA, 1260 bp, synthetic construct
  misc_feature 1..1260: note = Description of Artificial Sequence: Synthetic coding sequence
  source 1..1260: mol_type = other DNA
atgaaccggcacctgtggaagagccagctgtgcgagatggtgcagccctcaggcgggcccgctgccgatcaggacgtcctgggcgaggagtcaccactggggaaacctgccatgctgcatctgccttctgaacaaggggcccccgaaaccctacagcggtgcctggaagagaatcaggagctccgggacgccattcggcagagtaaccagatcctgagagaaagatgtgaggagctcctgcatttccaggccagtcagcgcgaggagaaagaattcctaatgtgcaagtttcaggaagccagaaaattagtggagcggctcggactggaaaagctcgacctcaagaggcaaaaagagcaggccctgcgcgaggttgaacatctgaaacgatgtcagcaacagatggctgaggacaaggctagtgtgaaggcgcaggtgacctcccttctgggagagttgcaggagtcacaatcaaggctcgaggccgccacaaaggaatgccaggctctcgagggcagggcacgggctgctagcgagcaggcccggcagctggaatcggaaagagaggctcttcaacagcagcactcggtgcaggtagatcagttacgaatgcagggacagtccgtggaggccgctctgaggatggaacgtcaggctgcatcagaggaaaagcggaagctggcccaactgcaggtagcttaccaccagttgttccaagagtacgataatcatatcaaatcatccgtggtggggtctgaacgaaaaaggggaatgcagctggaagatctgaaacaacagctacaacaggcagaggaggctctggtggcaaagcaggaggtcattgacaagcttaaggaggaagcagaacaacataagatcgtcatggaaaccgtgcctgtgcttaaggctcaggcagatatctacaaggccgattttcaagccgagaggcaggcacgcgaaaaattagcggagaagaaagagttactccaagagcagctggagcagctgcagcgcgaatactcgaaattgaaggcctcctgtcaagaatctgctagaatagaggacatgaggaagcggcacgttgaagtgtctcaggcccccttacctcctgcccccgcctaccttagttcacctctcgcactaccttctcagcgccgatcgccgcctgaggaaccaccggatttttgctgccctaagtgccagtatcaagctcctgacatggacaccctccagatacacgtgatggaatgtatcgagtag

SEQ ID NO: 191366 - DNA, 1260 bp, synthetic construct
  misc_feature 1..1260: note = Description of Artificial Sequence: Synthetic coding sequence
  source 1..1260: mol_type = other DNA
atgaaccggcacctgtggaagagccagctgtgcgagatggtgcagccatccggcggcccggcagccgaccaggacgttctcggcgaggaaagcccccttggcaagcccgccatgctccatctgccctctgaacagggagccccggaaactttgcagaggtgtctggaggaaaatcaggaacttcgggacgctatacgccaatccaatcagatactgcgagaaaggtgcgaggagctgcttcactttcaagccagccagcgggaggagaaagaatttttgatgtgtaaattccaggaggccaggaaactagtggagcggctggggcttgagaaactagatctgaaaaggcagaaggagcaggctctccgggaagtggaacaccttaaaagatgtcagcagcagatggcagaggacaaagctagtgtcaaggctcaagtgacaagccttctcggggagctgcaggaaagtcagagcagattggaagcagccacaaaggaatgccaggcactggaagggcgggcaagggcggcatccgaacaggcaagacagctggaaagcgagagagaggccttgcaacaacagcattccgttcaggtggaccagctccgcatgcaagggcagagcgtggaggccgctctccgcatggagcggcaagcagccagcgaggagaagcgaaagctggcccagctgcaggtcgcttaccaccagttattccaggagtatgataaccatattaaatcctccgtagtgggatcagagcgcaaacgagggatgcaactggaggacctcaagcagcagctgcagcaggccgaggaggcgctggtcgccaagcaggaagtgatagataagctcaaagaggaagcagagcagcacaagattgtgatggagactgttcctgttcttaaggcacaggctgacatatataaggcggacttccaagccgaacggcaagcgcgggagaagctggcagaaaaaaaggagttgctgcaggagcaactcgagcagctgcagagggaatattcgaagctcaaagcctcttgccaggagtcagcacgaattgaagacatgcgcaagcgacacgtggaggtttcccaagcaccccttcctcctgcacccgcctatctttcatccccactggccctaccgtcccagagacgttcaccccccgaagagccaccagacttttgctgcccaaagtgtcaatatcaggcgccagatatggatactcttcagatccatgtcatggagtgtatcgagtag

SEQ ID NO: 191367 - DNA, 1260 bp, synthetic construct
  misc_feature 1..1260: note = Description of Artificial Sequence: Synthetic coding sequence
  source 1..1260: mol_type = other DNA
atgaaccggcacctgtggaagagccagctgtgcgagatggtgcagccatcaggcgggcctgctgccgatcaggatgtgctcggagaggagtctcccctgggcaagcctgcgatgctgcacctgccatccgaacagggagcccccgagacattgcagcggtgtctcgaagaaaatcaggagcttagggatgcaatacgccagtccaatcagatcctgagggaacgatgtgaggagctcttacactttcaggctagtcagcgcgaagaaaaggaatttctcatgtgtaagtttcaagaggcgagaaagctagtcgagcgccttgggctggaaaaactcgatctcaagagacagaaggagcaggctctccgcgaggtggaacatctgaaacgctgccagcagcagatggccgaggataaggccagcgtgaaggcccaggtgacctccttgctaggggagttgcaggaatcacagtctaggttggaagccgcgaccaaggaatgtcaagccctggaaggacgggctcgtgctgcgtctgagcaggctcggcagttggaaagcgaaagggaggccctccaacaacaacactccgtccaggtggatcagctgagaatgcaggggcaatctgtcgaggcagcactccgcatggaacgccaggcagcttctgaagagaaacgcaagctggcacagctccaggtcgcctaccatcaactcttccaggagtacgacaaccacattaaatcttcggtcgtgggtagcgaacggaaacggggaatgcagttggaagacctgaaacagcagttacagcaagctgaagaggctttggtggccaagcaggaagttatcgacaaattgaaggaagaggcagaacagcataagatcgtaatggagaccgtcccagtgttgaaagcgcaggccgatatctataaggctgatttccaggcggaaagacaagcccgagaaaagctcgccgaaaagaaagaactgctgcaggagcagctggaacagctgcaaagggaatacagcaagctcaaggcttcatgccaggaatctgctcgcattgaagatatgagaaagagacatgtggaggtgagccaggccccactccctccagcacctgcgtatctgagcagccctttagctctaccaagccagcgtaggtccccccccgaggaaccacctgatttttgttgtcccaagtgccaataccaggcacccgacatggatacactgcagattcacgtgatggagtgtatcgaatag

SEQ ID NO: 191368 - DNA, 1464 bp, synthetic construct
  misc_feature 1..1464: note = Description of Artificial Sequence: Synthetic coding sequence
  source 1..1464: mol_type = other DNA
atggccctggtgatccaggtgggcaagctgcggccccgggaggtgcggacgcctcaaaccattaacccctcgctgtttccaagcctgcctgtgaaactttcctctatcatagaggttccgtctggtggcgaaagatgttgctcgagacggaccctggtgtacaaagcccgcgctttctggaagggggcgcctctgccatgttggatgaacaggcatctgtggaaaagtcagctgtgtgagatggtccagccgagtgggggacctgcagctgaccaagacgtcctgggagaagagtcaccactcggtaagcccgctatgctccacctgcctagtgaacagggcgctccagagactctgcaacggtgcctggaggaaaatcaagagttgcgtgatgccataagacagtccaatcagattttgcgagagagatgtgaagagctgctgcacttccaggcgagtcaaagggaggagaaggagttcctgatgtgtaagtttcaagaagccaggaagcttgtggagcgcctaggcctggaaaagctggatctgaaacggcagaaagaacaggcgctgagagaggttgaacacctgaagcgatgtcagcagcagatggccgaggataaggcatccgtgaaggcccaggtaacatcacttcttggtgagttgcaggaatcccaatcccgcctggaagctgcgacaaaggagtgccaggccttggagggccgtgctagagccgcatccgagcaggcaagacaactggagtcggagagggaggcattgcagcaacagcactccgtccaggtcgatcagttgcggatgcagggacaaagtgtggaggccgcgctgaggatggagaggcaggcagcgagtgaagaaaagcgcaagcttgctcagctacaggttgcttaccaccagctgtttcaggaatatgataaccacattaaaagcagtgtggtcgggagcgagcgtaagcgcggtatgcaactggaagacctgaaacagcaacttcagcaggccgaagaagcactagttgccaagcaggaggtgatcgacaaactgaaagaagaggcagaacagcataaaatcgtgatggagacagtacccgtgctgaaagcacaagcagatatctataaagccgacttccaggctgagaggcaagctcgtgagaaactggctgaaaagaaagaactgctacaggagcagcttgagcagttgcaacgcgagtactcaaaactcaaagctagctgtcaagaatcagcccggatcgaagatatgcgcaagcggcacgttgaggtatcacaggctccactgccacccgctcccgcgtacctcagttcccccctggccctgccttcacaacgacggagcccccctgaagagcccccagatttctgctgccccaaatgccagtaccaagcccctgatatggacacccttcagatacacgtcatggaatgcatcgaatag

SEQ ID NO: 191369 - DNA, 621 bp, synthetic construct
  misc_feature 1..621: note = Description of Artificial Sequence: Synthetic coding sequence
  source 1..621: mol_type = other DNA
atgaaccggcacctgtggaagagccagctgtgcgagatggtgcagcccagtggagggccagctgctgatcaagatgttctcggtgaggaatccccactcggcaaacccgcaatgctccacttacctagcgagcagggggctccagagactttgcagcgctgcctcgaagagaatcaggagttgagggatgccatacggcaaagcaaccagatacttcgcgagaggtgtgaagagttgctccatttccaagcttctcagagggaagaaaaggaattcttgatgtgcaaatttcaggaggccagaaagttggtggagaggctcgggctagagaaactcgatctgaagcgacagaaggaacaggcactgcgggaagttgaacatctgaagcgttgtcagcagcagatggccgaggacaaagcctcagtaaaggctcaggtaacctctctcttaggagagttacaagagtctcagagccgcctcgaggcagctacaaaagagtgtcaggctctcgaaggtcgggcacgggccgccagcgaacaggcaagacaactagaatccgagcgtgaagcgttgcagcaacaacacagcgtgcaggtggaccagctccggatgcagggatag

SEQ ID NO: 191370 - DNA, 756 bp, synthetic construct
  misc_feature 1..756: note = Description of Artificial Sequence: Synthetic coding sequence
  source 1..756: mol_type = other DNA
atgaaccggcacctgtggaagagccagctgtgcgagatggtgcagccttccgggggtcccgctgcagaccaggatgtcctcggcgaagagtcccctcttggcaagcctgcgatgcttcacttgccgagcgagcagggggctcccgagacactgcagcgatgcttagaggagaatcaggaactgagagacgctatacggcaaagcaaccaaatcctgcgtgaacgctgtgaagagttactacacttccaggctagtcagagggaggaaaaggaattcctgatgtgcaagtttcaagaagcacgcaaactggtggaaaggctaggcttggaaaagctggaccttaagagacagaaggagcaggctctcagagaagtggagcaccttaaacgatgccagcagcagatggcagaagataaagcctccgtgaaggcgcaagtgacatccttattgggggagttgcaggagagtcagtctcggctggaagccgccaccaaggaatgtcaagccttggaaggcagggcgcgagccgcgtcggagcaggcccgccagttggagtcagagcgggaagcactgcagcagcaacatagtgtacaagtggatcagcttcggatgcaggggcaatcggtagaggcggccctgagaatggagcggcaggcagctagtgaagagaagcggaagctggcccagctccaggttgcctatcaccagctcttccaagagtatgacaaccatattaagtcctccgtagtgggctag

SEQ ID NO: 191371 - DNA, 417 bp, synthetic construct
  misc_feature 1..417: note = Description of Artificial Sequence: Synthetic coding sequence
  source 1..417: mol_type = other DNA
atgaaccggcacctgtggaagagccagctgtgcgagatggtgcagccatcgggcggccccgccgccgatcaggacgttcttggggaagagtcccccttggggaaaccagccatgctgcacctgcctagcgagcagggcgcccctgaaacattgcagaggtgcctcgaagaaaatcaagagctcagggatgccatccgacaatcaaaccagatcctgagagagcggtgtgaggaactcctgcatttccaagcaagtcagagagaagagaaagaatttctgatgtgtaagttccaagaagctcggaagctcgttgaacgacttggtctggagaagctggatctgaagaggcagaaggaacaagctctgcgggaggttgagcatctcaaaaggtgccagcagcagatggctgaggattag

SEQ ID NO: 191372 - DNA, 1257 bp, synthetic construct
  misc_feature 1..1257: note = Description of Artificial Sequence: Synthetic coding sequence
  source 1..1257: mol_type = other DNA
atgaaccggcacctgtggaagagccagctgtgcgagatggtgcagcctagcgggggacctgccgctgatcaggatgtgctgggtgaggagtcacctctaggcaagccagccatgctgcacttaccctcagagcagggtgccccggagacacttcagcggtgcctcgaagagaatcaggaactcagagacgccataagacagtctaaccagatccttagagaaagatgtgaggaattactgcacttccaggccagtcaaagagaggagaaagagttcctgatgtgtaaatttcaggaagcccgtaaattagttgagaggctgggcctcgaaaagcttgatctgaaacgtcagaaagagcaggccctgcgggaagtggaacacttaaagcgttgtcaacaaatggccgaggacaaagcctccgtaaaagctcaggtgactagcttgctgggtgaactccaggagagtcagagccggctggaagctgccactaaagaatgccaggctctggagggaagggcccgggccgcgagtgagcaggccaggcaactagagagcgagagggaggctctgcaacagcaacattctgttcaggtggaccagctacggatgcagggacaatcggtggaggctgcattgaggatggagcgccaggccgcttctgaagaaaaacggaaactcgcacagctccaggtggcctatcaccagttgtttcaggagtatgataaccacatcaagtccagcgtagtggggtcggagagaaaacgagggatgcagttggaagatctgaaacagcagctgcagcaggccgaagaagccctggtggctaaacaggaagtgatcgacaaattgaaggaggaggccgagcagcacaaaatcgttatggaaacagtgccagtgctgaaggcccaggcggatatttacaaggctgattttcaagctgaaaggcaggcgcgtgagaagcttgccgaaaaaaaagagctgctgcaggaacagctcgagcagctccagagagagtactcgaagttaaaagcctcatgccaggagtcggcacggattgaagatatgcgaaagcgccacgtggaggtgtcccaggcccccctacctcctgccccggcctatctctcaagcccgctggcgctgccttcccagagacgcagccccccggaagagcccccagatttttgctgccctaaatgccaatatcaggccccagacatggataccctgcaaattcacgttatggagtgcatcgagtag

SEQ ID NO: 191373 - DNA, 2181 bp, synthetic construct
  misc_feature 1..2181: note = Description of Artificial Sequence: Synthetic coding sequence
  source 1..2181: mol_type = other DNA
atgctgcgggcctgccagctgagcggcgtgaccgccgccgcccagtcctgtctttgcggtaagttcgttctacgtcccctgagaccgtgtaggcggtacagcaccagcggatccagcggcctgacaacaggaaagattgcaggagcgggcctactattcgttggaggaggaatcggaggaaccattctctacgccaagtgggactcacatttccgggaaagtgtcgagaaaaccataccctacagcgacaagctgtttgagatggtgctcggccctgccgcatacaacgtgcccctaccaaagaagagtatccagtctggccctttgaaaatctccagcgtttccgaggtgatgaaggagtcaaagcaacctgcctcacagcttcaaaagcagaaaggggacactccagcaagtgctactgcccctaccgaggccgcccagatcatttctgcagcgggcgatacattgagtgtgcccgctccagccgtgcagcctgaggagagtttgaaaaccgaccatcccgaaataggcgaggggaagcccacccccgccttgagcgctctggctaagtcccttgaggacgcgctgagacagactgcctcggtcacgttgcaagccatcgccgcccagaacgcagccgttcaagctgtgaatgctcatagcaatatactgaaagccgccatggacaattcagagattgctggcgaaaaaaagagtgctcagtggcggactgtggagggggctctaaaagagcgtaggaaagctgtcgacgaagcagcagacgctttactgaaagccaaggaagagctcgaaaaaatgaagtcggtgatcgaaaatgcgaaaaaaaaggaagttgccggggccaagcctcacataacggccgcagagggaaaactccacaatatgattgtggacctggacaatgtggtgaagaaggtccaagctgcccagtcggaggccaaggtggtgtcacagtaccacgagttggtggttcaggctcgggatgatttcaagagagagctggattcgatcactcccgaggtgctgccagggtggaagggcatgtctgagtacaatttggccgataaactgtcaaccgatgacctcaacagcctgatcgcccatgcgcataggcggatcgaccagctcaacagggagcttgccgaacagaaggccacagagaaacaacacataacactcgctctggaaaaacagaagcttgaagaaaagcgtgcttttgacagtgccgtggccaaggccttggaacatcatcgaagtgagattcaggcggagcaggatcggaagatagaggaagtgcgagatgccatggagaacgaaatgagaacgcaactacggcgacaagctgccgctcacaccgaccacctgcgagatgtcctccgggttcaagagcaggaacttaaatccgaattcgaacagaacttatcggaaaagctgtcggaacaggaactccagtttcgacgcttgtcccaggaacaggtcgataatttcaccctagatattaacacagcttacgctcggttgaggggaatagagcaggccgtacaatcgcatgctgtggcggaagaagaggcacgcaaggcacatcagctgtggctgagtgtggaggctttgaagtacagtatgaagacaagcagcgctgaaaccccaactatccctctgggtagtgccgttgaggcaattaaggccaattgcagtgataatgagtttacacaggctctgacagccgccatcccaccggaatccctcaccagaggggtgtactcggaagagaccctccgtgcaaggttttacgcagtacagaaactagccaggagagtggccatgattgatgaaactagaaactcgctctaccagtatttcctttcatatttacagtctctccttctgttccctccgcagcagttgaagccacctccagagctctgccctgaagatatcaatacgttcaagttactgagctacgcgtcctattgtatcgagcatggagatctggagctggccgccaagtttgtgaaccaattgaagggtgagtcacgccgagtcgcccaggactggctcaaggaagcccgcatgaccctagagactaagcagattgtggaaatcctgacggcctatgccagtgccgtggggatcggaacaacacaagtgcagcctgagtag

SEQ ID NO: 191374 - DNA, 1119 bp, synthetic construct
  misc_feature 1..1119: note = Description of Artificial Sequence: Synthetic coding sequence
  source 1..1119: mol_type = other DNA
atgctgcgggcctgccagctgagcggcgtgaccgccgccgcccagtcttgcctctgtggaaaattcgtcctgaggccactcaggccttgccgcaggtattcaacctcagggagttcggggctcactactggcaagatagccggagcaggcttgctgtttgtgggcgggggcatcggcggaaccattctgtacgccaagtgggacagtcacttccgggaatcagtggaaaaaactatcccttattcagataagttatttgaaatggtgctaggtcctgccgcttacaatgtcccgctccccaagaagtctattcagtcaggaccattaaaaatatcgtctgtgtccgaagtgatgaaagagtccaaacagcccgcctcgcaattacaaaagcagaaaggggatacacccgcatccgccaccgctggcgatactcttagcgtacccgcccctgccgtgcagccagaggaatctttgaaaactgaccaccctgagatcggagagggaaagcccaccccagccctgtcagaagcaagcagctcttcaattcgcgagaggccgccagaggaggtcgccgctcgccttgctcaacaggagaagcaggagcaagtgaagattgagtcacttgctaaaagcctagaggatgcgcttaggcaaactgcttctgtcacactccaagccattgccgccataccgcctgagagcctgacccgcggagtttatagcgaagagactcttcgtgccaggttttacgctgtccaaaagctcgccaggagagtagctatgattgacgagacacgtaattctctgtatcaatactttctgtcttatctccagtctctgctgttgttccctccccagcaactaaagccacctcctgaactctgtccggaagatataaacaccttcaagttgttatcctatgctagctactgtattgaacatggcgacctcgagcttgctgcaaagttcgtcaaccagctcaaaggcgagagccgccgagtggcccaggactggttgaaagaggcaagaatgacgctggagaccaagcaaattgttgagatccttacagcctacgcgtctgccgtcgggatcggcaccacacaggtgcagccagagtag

SEQ ID NO: 191375 - DNA, 1980 bp, synthetic construct
  misc_feature 1..1980: note = Description of Artificial Sequence: Synthetic coding sequence
  source 1..1980: mol_type = other DNA
atgctgcgggcctgccagctgagcggcgtgaccgccgccgcccagtcctgtctctgtgggaaattcgttttgagacccctccggccatgtcgcagatacagcacttccggaagtagcgggcttacgaccggtaagatagctggcgctggactcttatttgtcggtggggggatcggcggcaccattctgtatgcaaagtgggactcccatttcagagagtccgtggaaaagacgattccatacagtgataagctattcgaaatggtactgggacctgcagcatataatgtccccctcccgaaaaaatcaatacaaagcggtccactgaaaatctcttccgtgagcgaagtgatgaaggagtccaagcagcctgcttcacagctccagaagcaaaagggagatactcccgcgtccgctacagcactggccaaaagtcttgaggacgcccttaggcaaacagcaagcgtaacacttcaggccattgctgcacagaacgccgcagttcaggccgtcaatgcgcatagtaacatccttaaggctgctatggacaactccgaaattgccggcgaaaaaaagagcgcacagtggagaaccgtcgaaggggccctgaaggagaggcgtaaggccgtggacgaggcggctgatgctttgttaaaagcgaaggaggagctggaaaagatgaagagtgtcatcgaaaatgctaagaagaaggaggtggcaggcgccaaaccccatattaccgcggccgaggggaagctgcacaatatgatcgtcgacctggacaacgtagtgcaggccagggatgactttaaaagggagctggattctataacaccagaggtgcttcccggatggaagggaatgagcgtttccgatctggccgataaactatccaccgacgacctgaacagtctgatcgcccatgcccacagacgcatcgatcagctgaacagagaactggctgaacagaaggcaactgaaaaacaacatataactttggccctggaaaaacagaaactcgaagagaagagagctttcgacagcgctgtggccaaggcactggaacaccacagaagcgaaatccaagctgagcaggatagaaaaatcgaagaggtgcgcgacgctatggaaaatgaaatgagaacccaacttcgacgccaagccgccgcacacaccgatcatctgagagatgtgcttcgggtgcaagagcaggagttgaaatcggagtttgaacaaaatctgtccgagaagcttagtgaacaggaacttcagttccggaggctcagccaggagcaggtcgataacttcacgctcgacattaacacagcgtatgcccgcttaaggggaatcgagcaggcagtccaaagccatgccgtcgctgaagaggaagctcgcaaggcgcatcagctgtggctttccgtggaggccctaaaatattctatgaagacatcctccgctgagaccccgactatcccactgggctccgcggtcgaggccatcaaggccaactgctccgataatgaattcactcaggcactgactgccgctattccaccagagagcctgactcgcggagtgtactcagaagagacccttcgcgcccgcttttacgccgtccaaaaactggcaaggagggtggccatgatagacgaaaccaggaactccctctatcaatatttcctgtcatacctgcagagtcttcttctgtttcccccgcagcagttgaaacctcctcccgaactttgccctgaggacattaacacattcaaactgctaagttatgcctcctactgtatagagcacggagacttggaactggccgctaagtttgttaaccagcttaagggtgaaagtaggagggtcgcacaagactggctgaaagaggcgcgtatgaccttggagacaaaacagatcgtcgaaatacttaccgcttatgcaagtgctgtgggtattggcacaacacaagtgcagcccgaatag

SEQ ID NO: 191376 - DNA, 2277 bp, synthetic construct
  misc_feature 1..2277: note = Description of Artificial Sequence: Synthetic coding sequence
  source 1..2277: mol_type = other DNA
atgctgcgggcctgccagctgagcggcgtgaccgccgccgcccagtcctgcctgtgtggaaaattcgttctgcgtcctcttaggccgtgcaggcgctattctacttccggctcatctggattaacgactgggaagatcgccggagctggccttcttttcgtcggtggaggtattggcggcactatactgtatgcaaagtgggactcccattttagggaaagcgtggagaaaactattccctactcagacaagctttttgagatggtgctcgggccggctgcttataatgtgcctctgccaaagaaatcaattcagtccgggccgctaaagattagctccgtgagtgaagttatgaaagagagtaagcagcccgccagtcagctacaaaagcagaaaggggatactcccgcaagcgctaccgcgccgactgaagcagctcaaatcattagcgcggcaggtgacaccctgtcagtcccagctcccgccgttcagccggaggagtccctaaaaacggatcaccccgagatcggagagggcaagcctacacctgcgctgtccgaggaagcctcatcctcatcgattcgtgagcgcccccccgaggaagtggctgcacgactggcacagcaagaaaagcaagagcaggtaaagatcgagtcccttgctaaaagcctcgaagatgcattgcgacagacagcttctgtgacccttcaggcaatcgctgcccagaacgctgcagtgcaagccgtgaatgcccatagtaacatcttgaaagcggcaatggataactccgaaatcgccggcgaaaagaagtctgcccagtggagaacagttgagggtgcactcaaggagcgcaggaaagccgttgacgaggcagctgacgcgctgctgaaggcaaaggaggaattggagaaaatgaagtcggtgatcgaaaatgcaaaaaagaaagaagtagcaggagcaaagccccatatcactgccgcagagggaaagttacataacatgatagtagatctcgataatgtggtgaagaaggtccaagccgcacaatctgaggcgaaagtcgtcagtcagtatcatgagcttgtggtgcaggccagagatgatttcaagcgggaactggactccattacaccagaagtgctgccaggctggaagggcatgtccgtatctgacttggccgacaagctgtcaactgatgacctcaattccttgatcgcccatgctcaccgtcgcatagaccagctgaaccgggaactagccgagcagaaggctacagagaagcaacacatcaccctggccctggagaagcagaagttagaggagaagagagcgtttgactccgcagtggccaaagcgttagagcatcaccggtccgagatccaggctgaacaggatcggaagatcgaagaagtgagggacgccatggagaatgaaatgagaacccaactccggcgccaggctgccgcccacactgaccacttgcgcgatgtcctgagggtgcaggagcaggagttaaagagtgagtttgaacagaacctaagcgagaaattgtctgagcaagagctgcagtttaggagactctctcaagaacaggtggacaattttaccttggacataaatacagcttacgcacgattgcgaggaatcgagcaggctgtccagtcccacgctgtcgccgaggaggaggctcgcaaggcacaccagttatggctcagtgtggaagccctgaagtactccatgaagacgtcgtctgctgagaccccaacgatccctctgggctcagctgtggaggctattaaggcaaactgttcagataacgagtttacacaggccttaacagctgctattccacccgagtccctcacccgcggagtttactctgaagaaacattgagggcccgtttttatgccgtgcagaagctggcaaggcgcgtggccatgatcgacgaaacaagaaactctctgtaccagtacttcctttcttatctgcagtcactcttactatttccaccacagcagcttaagccaccacccgaactgtgcccagaagacatcaatacatttaaacttctaagctacgcgtcctattgcatcgagcatggagacctggagctggccgccaaatttgtaaaccagctgaaaggcgaatccaggagagtggcacaagattggctgaaggaagcccgaatgaccctagagaccaagcagattgtcgagattctcactgcatatgcaagtgctgtgggtataggaaccacgcaggtacaacctgagtag

SEQ ID NO: 191377 - DNA, 2274 bp, synthetic construct
  misc_feature 1..2274: note = Description of Artificial Sequence: Synthetic coding sequence
  source 1..2274: mol_type = other DNA
atgctgcgggcctgccagctgagcggcgtgaccgccgccgcccagtcttgcctgtgtggtaagtttgtccttcgtcccctccgcccctgtagacggtattccacttccgggtcctccgggctgacaaccggaaagattgcgggagccggactgctcttcgtcggaggagggattgggggaaccatcctctatgcaaaatgggatagtcactttcgggaatccgtggagaaaactattccctatagtgacaagctgttcgaaatggtgttaggtcctgccgcctacaacgtaccactgcccaagaagagtatccaaagtggaccacttaaaataagcagcgtcagcgaagttatgaaagagtctaaacagccagccagtcaattgcagaaacagaagggcgatacacccgcgtctgcgacggctcctacagaagctgcccagatcatttctgccgccggagacaccctcagtgttcccgcccctgcggtacagccagaagagtctctaaagacagatcacccagaaatcggggagggcaagccaacaccagcgctgagcgaggcctcctctagcagcatccgagaacggccacctgaggaggtggcagcaagactggcccagcaagagaaacaggaacaagtgaaaatcgagtccctggccaagtccctggaggacgcactgcggcaaactgcaagcgtaacactgcaggccatcgcggcccaaaacgccgccgtgcaggctgtgaacgcccactccaatatcctaaaggctgccatggataatagtgaaatagccggagagaagaagtccgcccagtggaggacagttgagggggctttaaaggagagacgcaaggcggtggacgaagcggctgacgcacttttgaaggccaaggaagagctggagaagatgaaatcagtgatcgagaatgcaaaaaaaaaagaagtcgccggggccaaaccccacattaccgccgccgaaggtaaactgcacaacatgatcgtcgatctcgacaatgtggtgaaaaaagttcaggccgctcagagcgaagccaaggtggtaagtcagtaccatgagcttgtggtccaagcccgcgatgatttcaagcgtgagctggactctatcactcccgaggtgcttccaggctggaaaggaatgtcagtgtctgacctggcagacaaactgagcacggatgatcttaacagcctgatcgctcatgctcatagacgcatcgatcagctgaaccgcgagctggctgaacagaaggctactgaaaaacagcacatcacactggccctggagaagcaaaagcttgaagagaaaagagcgttcgatagcgccgtagctaaggctctcgagcaccataggagtgaaatacaggcagaacaggatcgcaaaattgaagaggtgagagacgccatggaaaacgaaatgaggacccagctgcgcaggcaggccgcagcccatactgaccacctgcgagatgtactgcgcgtccaagaacaagagctgaaatccgaatttgagcagaacctctcggaaaagcttagtgaacaggagctgcagttccgtcggctgagccaggagcaagtcgataacttcactctggacatcaataccgcgtacgctcgactccgcggtatcgagcaggcagtgcagagccacgcagttgctgaggaagaagccaggaaagctcaccaactatggctgtccgtcgaggcccttaagtacagcatgaagactagtagcgcagaaacaccgaccatcccattggggtctgccgttgaagcgattaaggccaattgcagcgacaatgagttcacccaagccttaactgccgccattcctcccgagagcctgacccggggagtctatagcgaagaaacactcagggcacggttttacgccgttcagaaactggcgaggcgtgtggccatgattgatgagacccgcaacagcttataccagtatttcctgtcatacctgcagtcgctactgctattcccccctcagcagttaaagcccccccccgagttgtgtccagaagatatcaacaccttcaaactactgagctacgcgtcctactgtatcgaacacggtgacctcgaactggctgccaagttcgttaaccagttgaagggagagtccaggcgcgtcgcacaggactggctcaaggaggctaggatgaccctcgagaccaaacagatcgtagaaattctcacggcatacgcctccgcagtcggaatcggcacaactcaagtgcaaccagagtag

SEQ ID NO: 191378 - DNA, 2244 bp, synthetic construct
  misc_feature 1..2244: note = Description of Artificial Sequence: Synthetic coding sequence
  source 1..2244: mol_type = other DNA
atgctgcgggcctgccagctgagcggcgtgaccgccgccgcccagagctgcttatgcggaaaattcgtgctacggccactgcgcccctgcagacgatacagcactagcggttcatctggcctcacaaccggcaagatcgctggcgccggactgcttttcgtggggggcggaatcggaggtaccattttatacgcaaaatgggatagtcatttcagagaaagcgtggaaaagaccatcccctacagcgataaactgttcgaaatggttctgggacctgctgcttacaacgttcccctgccaaaaaaatccatccagagcggacctctgaaaatctcatcagtgtcagaagtgatgaaggaatccaaacagcccgcctcccagctacaaaagcagaagggggatacacctgctagcgccactgcgggcgacaccttaagcgtgccggctccggctgttcaaccagaggagtcacttaaaacagaccaccctgaaatcggggagggcaaacctacgcccgctctttcggaggaagctagttcatcttccattagagagcgaccccctgaagaggtggcggcgcgattggctcaacaggagaagcaggagcaagtgaagattgagtccctggccaagagtctcgaagacgctttgcggcagactgcctccgtgacgcttcaagccatcgctgcacagaacgctgcggtgcaggcggtgaacgcacatagcaatattctgaaggccgctatggataactccgagatcgccggcgaaaagaagagcgcccagtggagaaccgtggaaggcgctctaaaagaaaggcgcaaggccgttgatgaggcggctgacgccctccttaaagccaaggaagagctagaaaagatgaagtctgtaatagaaaatgcaaagaagaaagaggttgctggggctaagccacacattacagctgctgagggtaaattgcacaacatgatcgtggacttggataatgtggtcaagaaggttcaggccgcacagtcggaggccaaggtcgtttcccaataccacgagctggtcgtccaggccagagatgactttaaacgagagctggactctattaccccggaggtgctgccagggtggaaaggaatgtctgtatccgacctcgccgataagctgtctaccgacgatttgaatagcttgattgcacacgcccacagaaggattgatcaacttaacagggaactagcggagcagaaggcaacagagaagcagcacattactctggcactggagaagcagaaactcgaagagaagcgggcgtttgattcagctgttgccaaagctctggagcaccaccgcagtgagatccaggctgagcaggataggaagatcgaggaggtcagggatgcaatggagaacgagatgaggacccaactgcgccgccaggcagctgctcatacagaccacctgcgggacgtcctgcgggtacaagaacaggagctgaagagcgagtttgaacaaaacttgagtgagaagctgagtgagcaggagttacaattccgacgcctgagtcaagagcaggtggataacttcactctggatatcaatacagcctacgccaggctccggggtatcgagcaggcggtacaaagccacgccgttgctgaggaagaagcccgcaaggcacatcagctatggctaagcgtggaagcacttaagtacagcatgaagacatcttctgccgagacacctaccatcccattaggttcggctgttgaagctatcaaagccaactgcagcgataacgaattcacccaggctctgacagcagccatccctcccgagtccctcacaagaggagtgtatagcgaggaaaccctgcgcgcacgcttctacgccgtacaaaagttagctagaagggtagcaatgattgatgagaccagaaattctctgtaccagtactttctcagttacctccagagtttactgctgttcccccctcagcagctgaaaccgccccccgagctgtgtcctgaggacataaataccttcaagctgctgagctacgccagctattgtatcgagcacggggatctggagctggctgccaagtttgtgaaccaactgaagggagagtcaagacgtgttgctcaggattggttgaaagaggcaagaatgacactggaaaccaaacagatcgtggagatactgaccgcctacgcctcagctgtcggtatcggaactacgcaggtgcagccagagtag

SEQ ID NO: 191379 - DNA, 2244 bp, synthetic construct
  misc_feature 1..2244: note = Description of Artificial Sequence: Synthetic coding sequence
  source 1..2244: mol_type = other DNA
atgctgcgggcctgccagctgagcggcgtgaccgccgccgcccagagctgcttatgtggcaagttcgttcttcgtcccctccgcccctgtagacgatattccactagcggctcctccggcttgacaaccggcaagattgccggtgctgggttgttgttcgtggggggcggcattggtgggacgattctctatgctaagtgggactcacacttcagggaatcggtagaaaagactattccgtatagtgataaactgtttgagatggttctggggcctgctgcgtacaatgtgccactgcccaaaaagtccattcagtccgggcccctcaagataagctccgtatccgaggtgatgaaagagtctaagcaaccggcctctcagttacaaaagcagaaaggtgacacaccagccagcgcgacggcaggggatacactgtccgttcccgcaccagcagttcagcctgaggagagtctgaagactgatcatccagagataggggaaggcaagcccacccctgccctgtccgaagaagcaagtagctcgagcatccgcgagcggccccctgaggaagttgcagccagactggcccagcaagaaaaacaggaacaggtcaagatagagagtcttgccaaatctctagaggatgccttacgacagactgcaagcgtgaccctgcaggctattgcagctcagaacgccgccgtccaagcggttaatgcacactctaacattctcaaagccgccatggacaacagcgagatagctggggaaaagaaatccgcacagtggcggactgtggagggggccctcaaagaacgccgtaaggctgtcgacgaagctgctgacgcgctccttaaagctaaggaggagcttgagaaaatgaaaagcgtgattgaaaacgcgaaaaagaaagaggtggctggcgccaaaccgcatataaccgcggccgaaggaaaactccacaacatgatcgtggatctggataacgtggtgaaaaaggttcaggctgcccagagcgaagcgaaagtagtgtcacagtatcatgagcttgtagtccaggctcgtgacgacttcaagagagaactggacagcatcacacccgaggtcttacctgggtggaagggaatgagcgagtataatttagcagataaactctccaccgatgacttgaattccttgatagcccatgcccaccgccggatcgaccagctgaatagagaactcgcagagcaaaaagcgaccgagaaacagcacattaccctagccctcgagaagcagaagctcgaagaaaaaagagcttttgactctgccgtcgccaaggcattggagcaccaccgcagcgagatacaggccgagcaggatcgaaaaattgaggaggtcagggatgccatggaaaacgaaatgcgtactcagctgcggaggcaggctgcggctcatactgatcatctccgtgatgttctgagagtgcaggagcaggagctgaaaagcgagtttgagcagaatctgtcagaaaagttgtctgagcaggaacttcagttcaggagactgtcccaggagcaggtcgacaacttcaccctggatattaatacagcctatgcccggctgaggggcattgagcaggcggttcaaagccatgcagtggcggaggaagaggctcgcaaggcacatcaactctggctctctgtggaggctcttaaatatagcatgaagacatcctcggctgagacgcctacgatcccgctcggctccgctgtggaggctatcaaagctaattgtagcgacaatgaatttacccaggcactcacagccgctatccctccggaatcgcttacccgcggtgtatactctgaggagaccctgagggccaggttctatgcagtgcagaagctggcccggcgtgtcgcaatgatcgatgagactaggaactcgctataccaatactttttgtcgtacctgcagtcactcctgttgttccctccgcagcagctgaagccacctcccgagctgtgcccagaggatatcaatacattcaagctcctgagttacgcgagttactgtatagagcatggtgatctggagctggcggcgaaatttgtcaatcagctgaagggcgagagcaggcgggtcgcccaggactggcttaaggaagctcgaatgaccctggagactaaacagattgtggagattctgacggcctacgcttcggcggtcggaataggaaccacacaggtacaaccagaatag

SEQ ID NO: 191380 - DNA, 579 bp, synthetic construct
  misc_feature 1..579: note = Description of Artificial Sequence: Synthetic coding sequence
  source 1..579: mol_type = other DNA
atggaccgggcccaccggctgggccagaccaagcaggtgaccgtgtaccgcctgatatgtaaaggaaccattgaggaacgcattttgcaaagagctaaggaaaagtctgaaattcaacggatggtgatctcaggtgggaactttaaacctgataccctcaagcccaaggaggttgtctcattgcttctcgatgatgaggaactggaaaagaagctgcggcttagacaggaagagaaaaggcagcaggaggaaacgaacagggttaaagaaagaaagagaaaacgggagaagtatgccgaaaaaaagaaaaaagaggacgagctcgatgggaagcggaggaaggaaggcgtgaacctcgttatccctttcgtcccatcggcagacaactccaatctctccgcagatggggacgattcattcatcagtgtggactccgccatgccttccccattctcagagataagcatttcttccgagctgcacacaggtagcatccccctggacgaaagctcatctctcgccccagactccttggtgcgcaaacagggcaagggcacaaacccatcggggggccgctag

SEQ ID NO: 191381 - DNA, 4671 bp, synthetic construct
  misc_feature 1..4671: note = Description of Artificial Sequence: Synthetic coding sequence
  source 1..4671: mol_type = other DNA
atggccagcgagctgggcgcccgggacgacggcggctgcaccgagctggccaagccgctgtacctgcaatacctggagcgcgccttacggttggatcatttccttcgtcagacaagtgccattttcaaccgaaatatctccagcgacgactccgaagatggtcttgatgatagtaatccactgctgccacaatccggcgatccacttatccaagtgaaggaggagccaccaaattcccttctgggggaaacctccggtgccggctccagtggcatgctcaatacatattccctgaacggagttctacagtccgaatccaagtgcgataagggcaatctgtacaacttctcgaaactcaaaaagagtaggaaatggttgaagtcaatcctcttgtctgatgagagctccgaagcagattcacagagcgaagatgacgacgaggaggagctcaacctgagccgggaggagcttcataatatgctccgactgcacaagtacaaaaagctccaccagaacaaatactcaaaggataaagaacttcagcagtaccagtattacagcgctggtttgctgagtacttatgaccctttctacgaacagcagaggcacctgctgggacctaaaaagaaaaagttcaaagaggaaaagaaactgaaggccaaattgaaaaaagtgaaaaaaaaaagacgccgagatgaggagctttcctctgaagaaagtccgagaagacatcatcatcagacaaaggttttcgccaagttttctcatgacgcaccgccccctggaacaaaaaagaagcatctgagcatcgagcagttaaacgcgagacggaggaaggtgtggctaagcatcgttaaaaaagagctcccaaaggcaaacaagcaaaaagcatcagcgcggaatttgtttctgactaactctaggaaactggcccaccagtgcatgaaggaagtgagaagggctgctttacaggcacagaagaactgcaaagagaccttgcctagagcccggcggcttactaaagaaatgttattgtattggaagaaatacgagaaagtggaaaaagaacaccggaaaagagctgaaaaggaagctctggagcaacgcaagcttgatgaagagatgagggaagccaagagacagcaacggaaattgaacttcctcataactcaaacggaattatacgcacactttatgtctcggaagagagatatgggccacgatgggatccaggaagagattctgaggaaactcgaagactctagcacacagcgccagattgacataggcggcggagtcgtggttaatataacgcaagaggactatgatagcaaccactttaaggcccaggccctgaaaaacgcagaaaatgcttaccacattcaccaggcccgcactcgatccttcgatgaggatgcaaaagagtctagggcagccgccctgagggctgccaataagtctggcaccgggtttggcgagagctacagtctcgcaaatccaagcatccgggccggtgaagacatcccccaacccacgatttttaacgggaagctgaagggataccagctcaagggcatgaactggctcgctaatctctatgaacagggaatcaatggtatacttgctgacgagatgggcctgggcaagaccgtccagtccatcgcactccttgcccacctggccgaaagggagaatatctgggggccctttctgattatcagtccagcgagcacccttaacaattggcaccaagagttcacccgctttgttcccaagtttaaagttctgccctactgggggaacccacacgaccgcaaggttatacggcggttctggtcccagaagaccctctatactcaggatgcccccttccatgtagtcatcacctcataccagctcgttgtccaggacgtaaagtatttccaacgagtaaagtggcaatacatggtgctggatgaagctcaggctcttaaatcatccagttcggtaagatggaaaatcctcctgcaatttcagtgccggaaccggctcctactgactggtactccaatccaaaataccatggccgaactgtgggccctcctacattttatcatgccaacactgtttgacagccatgaagagtttaacgagtggttctcgaaggacatcgaaagccacgccgagaacaaaagcgcaatcgacgagaatcagttgagtaggctccatatgattttgaagccttttatgctgaggaggatcaagaaggatgtggagaacgagctgagcgacaaaatcgagatcctcatgtactgtcagttgacctccagacagaaactcttgtatcaggcgttgaagaataaaatcagcatcgaggacttactccaaagcagcatggggagcacccagcaggctcagaacaccacatcatcactcatgaatttggtgatgcagttccggaaggtgtgcaatcaccccgaattgtttgaaagacaggagacatggtctccgtttcatatttcgcttaagccgtatcatatatctaagttcatttacagacacggccagatcagggtgttcaatcattcccgcgacaggtggctgcgagtccttagcccattcgccccagactacattcagaggtctctgttccatagaaaaggtataaatgaggagagttgcttcagctttctgaggtttatagacattagtccggccgaaatggctaacttgatgcttcaaggcttgcttgcccggtggctcgcacttttcctgtccctgaaggccagctaccggttacaccaactgcgaagctggggagcccccgagggtgagtcccaccaacgttatctgcgaaataaagattttcttctgggtgtgaattttcccctgagctttccaaacctatgcagctgcccactgctgaaatctctggtatttagtagccactgtaaggctgtcagcggctatagcgatcaggtcgtccatcaaaggcgatcagctactagctcactcaggaggtgcctgcttacagaactgccctccttcctgtgtgtggccagcccacgcgtgaccgcggtcccgctcgacagctactgcaatgaccgttcagctgagtacgaacgccgtgtgctgaaagaaggcgggagtctggccgccaaacagtgtctgctgaatggagcgcccgagctcgccgcggactggcttaatcggcggagtcagttttttcccgagccagctggcggactatggagcatcagaccacagaatggttggagtttcattcgcattcccggaaaggagtcacttatcaccgactccggcaagctgtatgcactggatgtgttgctcaccagactgaaatctcagggccacagggtgttaatctacagccagatgaccagaatgattgatttactggaagaatatatggtttatcggaagcatacttacatgagactggatggttctagcaagatttcggagcggcgcgatatggtcgcagacttccagaatcggaatgacatcttcgtatttctcctcagcactagggctggcggtttagggatcaacctgacggccgccgatacagtcattttttacgattcagactggaaccccacagtggaccagcaggctatggatcgggctcatcgcctgggccagaccaagcaggtgactgtgtaccgcctgatctgtaaaggtacgatcgaagaacggatccttcaacgagccaaggaaaagtccgaaattcagcgaatggtgatctcgggaggtaactttaaacctgacaccctcaagccaaaggaagtcgtctctctcctgcttgatgatgaagaattggagaaaaagctgcgcttgaggcaggaggagaagcggcagcaggaagagaccaatcgggttaaggaacggaaacggaagagggagaaatatgccgaaaagaaaaaaaaagaggatgaattggatggcaaaaggagaaaagaaggcgttaatcttgtcattcccttcgtaccaagtgccgataactctaacttatccgccgacggagacgactccttcatcagcgttgattccgctatgcctagtcccttctcggaaatttccatatcaagcgaactgcacaccggcagcatccccctcgatgagagctcatcagacatgctcgtgatcgtcgacgatcctgcctccagcgcaccacagtccagggcgactaacagccccgcctcaatcactgggagcgtgtccgacactgtgaatggaatctcaattcaggaaatgcccgccgcaggacgcggccacagtgcaaggtctcgcggacgcccaaagggtagcggctccacagccaaaggcgccggaaagggccgatcccggaagagcactgcaggatcagctgctgccatggctggggccaaagcaggagctgctgccgctagtgcagcggcgtacgccgcttatgggtacaatgtgtctaagggaatcagtgcaagttcacctttgcagacctcactggtcaggccagcaggcctggccgactttgggccttcgtctgcctcttccccactaagtagtccactgagcaagggcaataatgttcctggaaacccaaaaaatttacatatgacatcttcactcgctcccgattcacttgttagaaaacaggggaaaggaaccaaccccagcggggggagatag

SEQ ID NO: 191382 - DNA, 4671 bp, synthetic construct
  misc_feature 1..4671: note = Description of Artificial Sequence: Synthetic coding sequence
  source 1..4671: mol_type = other DNA
atggccagcgagctgggcgcccgggacgacggcggctgcaccgagctggcaaagcccctctaccttcaatatcttgaacgcgcgttgcgactcgatcactttcttaggcaaacgtccgccatcttcaaccgcaatatcagcagcgatgactctgaagatggcctagatgactcaaatcctctgctgccacaatcaggagatcctctcatacaggtcaaagaagaaccacccaactctctgctcggagagacaagcggagccggatctagcggcatgctaaatacctactcactgaacggcgtgctccaatctgaatccaaatgcgacaaggggaacctgtataacttttctaaacttaaaaagagccggaaatggctgaagtctatactgctgagcgatgaatccagcgaggctgattcacagagcgaagatgatgatgaagaggaactgaaccttagtcgagaggagttgcacaacatgctacggctgcacaagtataagaagctccatcagaacaaatacagtaaagacaaagaactccagcagtaccagtattactcggccggcctcttaagtacatatgatcccttttatgagcagcagaggcatcttctgggccccaagaagaagaagtttaaagaggagaaaaaactaaaggcaaagctcaagaaagttaagaagaagcgccggagggacgaagaattgtccagcgaagagtcaccccggcgacatcaccaccaaacaaaggtgttcgctaaattttcccacgacgctccccctccgggcaccaaaaagaaacacctttccatagaacagctgaatgctaggagaagaaaagtttggctgtccatcgtcaaaaaagaactgcccaaagccaataagcaaaaggcaagtgcccggaacctctttttaacgaacagtaggaagctggcacatcagtgtatgaaggaggtgcggagggccgcactccaggctcagaaaaactgcaaggagacgctgcccagggctcggagattgactaaagaaatgctactttactggaagaaatacgagaaggttgagaaggaacatagaaagagagctgaaaaggaagccctcgagcagcggaagctggatgaggagatgcgggaggcaaagaggcagcagaggaagctgaacttcctgataacccagaccgagctctatgcacatttcatgtcacgcaaacgggacatgggacacgatgggatccaggaggaaattttgcggaaactggaggattcatctacacagaggcagatcgatatcggcggcggtgtggtggtcaacattacacaggaagactacgactccaatcattttaaggctcaagccctaaagaacgcagaaaacgcttaccatattcatcaggcacgcacaagatcttttgacgaagatgcaaaagagtcacgagccgccgctctgagggccgccaataagtcgggtactggattcggtgaatcatacagtctggcaaatccgtctatccgggcaggggaggatattcctcagcctactatcttcaatggaaagctcaaagggtatcagctgaaggggatgaattggttggctaacctgtacgagcaagggataaatggaatcctcgccgacgaaatgggtctggggaagacggtacagtccattgctctgctcgcccacctggccgaaagggagaacatctggggccctttcctgatcatatcgcccgcctccaccctcaataattggcaccaggagttcacaaggtttgtaccaaaatttaaggtgctgccttattggggtaaccctcacgatagaaaagtgattcgaaggttctggagccagaaaacactctatactcaggatgctccttttcacgttgtgatcaccagttatcagctggtggtacaagacgtaaaatacttccagagagtaaagtggcaatatatggttctggacgaggcccaggccttaaaatcttcttctagcgtgagatggaagatcctactgcaatttcagtgcaggaatcggctcctgctgaccggaacccccatacaaaacactatggcggaactatgggcattattgcactttattatgccaacactgttcgattcccacgaggagttcaacgagtggtttagtaaagatatcgagtcacatgccgagaacaaatccgcaattgacgagaaccagctgtctcgcctccacatgattctgaagcctttcatgcttcggcgcattaagaaggatgtggagaacgaactgtcagataaaatcgagattttgatgtattgccagcttacttcacggcagaagctgctgtaccaagcgctaaagaataagatttctatagaggatctcttacagtctagcatgggctccactcagcaggcccagaacaccacttcctcactcatgaatctggtcatgcaattccgcaaagtctgtaatcatccagaattgttcgagagacaggagacgtggtccccatttcatatctcactcaaaccataccacatttccaagtttatataccggcatgggcaaatccgtgtgtttaaccacagtcgtgaccggtggttgagagtcctgtcacccttcgcccccgactatatccaacgctctttgtttcatcgaaaagggatcaatgaagaatcttgcttttcttttctgcggtttatagatatcagcccggccgaaatggcgaatttaatgctgcagggcctgcttgccagatggcttgctctcttcttgtcgctgaaggcaagctacagattgcaccaattgcgtagctggggagctcccgagggagagtctcatcagaggtacctgagaaacaaggactttcttctgggtgtcaacttccctcttagtttccccaatctttgctcgtgccctctgcttaagtccctggttttttcctctcactgtaaggcagtttcagggtattccgatcaggtcgtacaccagcggcggagtgctacgagctccctgcgcaggtgtctgctcacagaactaccgtcttttctgtgtgtggcatccccacgagtcacggcggtaccccttgactcatactgtaatgacaggagtgcagaatacgagcgaagggtcttgaaggagggaggttcgctcgctgcaaaacagtgcctcctcaacggcgcgccggagctggcagcagattggctgaatcgcagaagccagtttttcccagagcccgctgggggactctggagtattagacctcagaacggctggagctttatcaggatacctggtaaggaatccctcatcaccgacagtggtaagctctatgcgctggacgtgcttctgacccggttgaaatctcagggtcatcgagtactgatatatagtcagatgactagaatgatcgatctcctggaagagtatatggtgtatcggaaacacacttatatgaggctcgatggcagctcaaagatcagcgagcgcagagacatggtcgccgatttccaaaaccgtaacgatatcttcgtgtttcttctgagcacgcgtgccggtggccttggcataaatcttacggccgccgataccgtgattttctacgactcggactggaacccaaccgtggaccagcaagccatggacagagctcacagacttggccagactaagcaggtgacagtctataggttaatctgcaagggcactatcgaagaaagaatccttcagagagcaaaagagaagagcgaaattcaaaggatggttatctccgggggaaatttcaagccagataccctaaagccgaaggaggtcgtgtcactgctactggatgacgaggagctggagaagaagcttagactgaggcaagaagaaaagcgccaacaggaggagactaacagagtcaaagaacggaagcgtaagcgcgagaagtatgccgagaaaaaaaaaaaagaggatgaattagacggcaaacggcgaaaggaaggagtgaaccttgtcatacccttcgttcccagcgccgacaatagtaatctgagtgctgacggagacgacagctttatatccgtcgactccgcgatgccgtccccattctcagagatctccatcagttctgaacttcacactggttctattcccctggatgagtcctcttccgacatgcttgtgattgtagatgacccagcatcctctgcccctcaatcacgagcgactaactctccagcctctataacagggagtgtcagtgatacagtaaatggaatttcgatccaggagatgccagctgccggaaggggacacagcgctcgctcgagggggcgccccaaaggaagcgggagtaccgctaaaggtgctgggaagggacgcagccggaaaagtacggctggatccgccgcagccatggctggggccaaagccggagctgccgctgcctctgccgccgcctatgctgcctatgggtacaatgttagtaaaggcatttctgcttcaagcccgctacagaccagcttggtcagaccggccgggcttgccgacttcgggcctagcagcgcctcaagcccccttagctctcccctgagcaagggtaacaacgtccctgggaaccccaaaaacctacatatgacttcatcactagcccctgatagtctggtgagaaaacagggaaaaggaactaatccaagcggcggcagatag

SEQ ID NO: 191383 - DNA, 585 bp, synthetic construct
  misc_feature 1..585: note = Description of Artificial Sequence: Synthetic coding sequence
  source 1..585: mol_type = other DNA
atggccgccagcctggtgggcaagaagatcgtgttcgtgaccggcaatgctaagaagttagaggaagtagtgcaaatcctgggcgacaaattcccttgcactctggttgcacagaagatcgatctgcccgagtaccagggcgaacctgacgaaattagtatccagaagtgtcaggaggccgttcggcaggtacaggggccggttctggtggaagacacctgcctctgtttcaacgcccttggtggccttcccggaccatacattaagtggtttctggaaaaattgaagccagaggggctgcaccagctgctggccggcttcgaagataaatcggcatacgcactgtgtacgttcgccctttccactggcgatccctcacagccggtaaggctatttagggggcggacttcaggcaggatcgtcgcacctcgtggctgccaggatttcgggtgggacccctgcttccaaccggatggatacgagcagacttatgccgagatgcccaaggcggagaagaacgctgtgtcccaccggttcagggcactgctggagctgcaagaatactttggaagcctcgccgcatag

SEQ ID NO: 191384 - DNA, 462 bp, synthetic construct
  misc_feature 1..462: note = Description of Artificial Sequence: Synthetic coding sequence
  source 1..462: mol_type = other DNA
atggccgccagcctggtgggcaagaagatcgtgttcgtgaccggcaacgccaagaagttagaagaggtgcagggccctgtgttagtcgaagatacctgtctgtgtttcaatgctctcggaggcctacctggcccatacattaaatggttcctcgaaaagctcaaacccgaggggctgcatcagctcttggcagggtttgaggataaatcggcatatgccctatgcaccttcgccctgagtacgggcgatccaagccagccagttcggttatttagagggaggacttccggacgcatcgtagctcccaggggctgccaggacttcggctgggatccatgctttcagccagacggctacgaacagacttacgccgaaatgccgaaagctgagaagaatgccgtgagccatcgattccgtgccctcttagaactacaagagtactttgggtcactagccgcctag

SEQ ID NO: 191385 - DNA, 534 bp, synthetic construct
  misc_feature 1..534: note = Description of Artificial Sequence: Synthetic coding sequence
  source 1..534: mol_type = other DNA
atggccgccagcctggtggtgcagatcctgggcgacaagttcccctgtacccttgttgcccagaaaattgacctgcccgagtaccagggagaacccgacgaaattagcatccaaaagtgtcaggaagcggtcaggcaggtgcagggacctgttctcgtcgaagacacatgcctgtgcttcaatgctctcggaggactcccgggcccatacatcaaatggtttttggagaaacttaagcctgagggcctgcaccagttgcttgcaggatttgaggacaaatcggcctacgctctctgcacatttgccttgtccacaggcgatcctagtcaacccgtgagactcttcagaggtcgcacaagtggccgcatagtggccccacgcggatgccaagactttggttgggatccttgtttccagcctgacggctacgaacaaacatacgctgagatgccaaaggccgaaaagaatgcagtcagtcacagatttagagccctgctggagttgcaggaatactttggaagcttggccgcctag

SEQ ID NO: 191386 - DNA, 8232 bp, synthetic construct
  misc_feature 1..8232: note = Description of Artificial Sequence: Synthetic coding sequence
  source 1..8232: mol_type = other DNA
atgagcgacaagatgagcagcttcctgcacatcggcgacatctgcagcctctacgccgaaggatccactaacggatttatctctacattgggcctggttgacgacagatgcgttgtccagccagaaaccggcgacctaaataatcctccaaagaagttccgtgattgtcttttcaagctgtgtccaatgaacagatattcagctcagaaacaattctggaaggctgccaagccaggcgccaattcaaccaccgatgcggttctcctgaacaaacttcaccatgccgccgacctggagaagaagcagaatgaaaccgaaaaccgcaagctactgggtaccgtgatccagtacggaaatgtaatccagttgctgcacttgaagtctaacaagtatctgaccgtcaacaaaagactccctgcgttgttggagaagaacgccatgagagtgactttagatgaagcaggcaatgagggctcctggttctacatccagcctttctacaagctcaggagtattggtgacagcgtggtgatcggggacaaggtcgtcttgaacccggtgaacgccgggcaaccactgcacgcttcttcccaccagcttgtcgataaccccgggtgcaacgaggtcaattccgtgaactgtaatacgtcgtggaaaatcgtgctatttatgaagtggtccgataataaagatgacatccttaaaggaggcgacgtggtgagactatttcacgctgagcaagagaaatttcttacttgtgacgagcatcggaaaaaacagcacgtgttcctaaggacaaccgggaggcagtcagcaacatccgccacgagctctaaggcactgtgggaggtcgaggtggttcagcatgacccttgcaggggtggcgcagggtattggaattcactctttcgctttaaacatttggccactggccattacttggccgctgaagtcgaccctgaccaggacgcttctagatcccgtcttcgaaacgcacaggaaaaaatggtttatagtctcgtgtcggtccctgagggcaacgatatcagtagcatcttcgagcttgaccccaccaccctgagggggggcgatagtcttgttccacggaattcatatgtcaggcttcgacatctgtgtactaatacctgggtccacagtacgaatattcccattgataaggaggaggagaaaccagttatgctaaagattggcacatccccagtgaaagaggataaagaggcgtttgctatcgtcccagtgtcacccgcggaggtccgggatctggatttcgctaacgacgcgtctaaggtcctaggatcaatcgctggcaaactggaaaaaggaactataactcagaacgaaaggcggtcagtcacaaaactcctggaagaccttgtctatttcgtgacaggcggtacgaactcagggcaagacgtgttagaagtggtattttcaaagcccaaccgcgagcggcagaaactgatgcgggaacagaatattctgaagcaaatatttaagcttctacaggccccttttacagattgcggtgacggcccaatgctgagactggaagagctgggcgaccagagacacgccccatttaggcacatctgcaggttgtgttaccgcgttctgagacactcacagcaggattaccgtaagaatcaggaatacatagcaaaacagttcggcttcatgcaaaagcagattggatatgatgtgctggccgaagacactatcacagctctgctgcacaacaacagaaaactgctcgagaagcacatcaccgctgccgaaattgacaccttcgtttcactagtccgcaaaaatagggagccacggtttctagactacctgagtgacttgtgtgttagtatgaataaaagtatcccagttacccaggagctaatatgtaaggccgttctgaacccgactaacgccgacatcctaattgagacaaagctagtgttgtcacggtttgagtttgaaggcgtgtcatccaccggcgagaatgcactcgaagccggtgaagacgaggaggaggtgtggctgttttggagggattccaataaggaaataaggtccaagagtgttagggaactggcacaagacgctaaagagggccagaaggaagatcgggacgtactctcctattatcgttatcagttgaacctgttcgcgagaatgtgtttggataggcaatacctggctattaatgaaatcagcggacaactcgacgtggacttgattttgcgctgcatgagcgacgagaacctgccttacgacctgcgagctagtttctgtcgcctgatgcttcatatgcatgtggacagagacccccaagaacaagtgacccccgtaaagtatgccaggctgtggtctgagatcccatctgaaatcgccattgatgattatgattccagtggcgccagcaaggatgaaataaaagagaggttcgctcagactatggagttcgtggaagagtacctgcgtgacgttgtatgccagcgatttccctttagcgataaggaaaagaataaactgacatttgaggtggtaaacctggccaggaatttaatctactttggtttctataatttctctgatctgctccgtctgactaaaatcctcctggccatcctggattgtgtccatgttaccaccatttttcccatttccaagatggccaagggagaagaaaataaaggcaataacgatgtggaaaagttgaagtcctccaatgtcatgcgcagcatacatggagttggcgaactaatgactcaggtggtgctgcgcggtggtggcttcttacccatgaccccgatggcagctgcgccggagggaaacgtgaaacaggctgagcccgaaaaggaagacattatggttatggacacgaagctcaaaatcattgagatcctgcagttcattttgaatgttcgcctcgactaccgcatcagctgccttttgtgcatcttcaaacgtgagttcgatgaatctaacagccaaacgagtgaaacctccagcggaaattccagccaggaggggccatccaacgtcccaggtgcactggactttgagcatatcgaagagcaggctgaagggatcttcggcggatctgaagagaatacacccttagacctagatgaccacggaggccgtacgttcctgagagtgctgctgcatctgactatgcatgactatcctcccctggttagcggcgctctacagctgctgtttcgtcatttctcgcagcggcaggaggtcctccaagctttcaagcaggtgcagctcctggtcacgagccaagacgttgacaattataagcagatcaaacaagacttggaccagttgcgttcgattgtggaaaagtctgagttgtgggtgtacaagggtcagggacccgatgagacaatggatggggccagcggtgaaaatgagcataaaaagactgaagaagggaataacaaacctcagaaacacgaatccacgtcatcttacaattatcgcgtcgtgaaggaaatactaatcaggctgtcaaagctgtgcgttcaggaaagcgcttcagtgcggaaatcgagaaagcagcagcaacgcctactgcggaatatgggtgctcacgctgttgtcctcgaactcctccagatcccgtatgagaaagccgaagacacaaagatgcaagaaataatgcgcctcgctcacgaattcctccagaacttttgcgccggcaatcagcagaatcaggcacttctccacaagcatatcaatctgttcctgaaccctggaatcctcgaggcggtcacgatgcaacatatcttcatgaacaattttcagctgtgctcagagatcaacgagagggtggtgcagcattttgttcactgcattgaaacccatggaaggaacgtacagtatataaagttccttcagacaatcgtgaaggcagagggaaaattcattaagaagtgtcaggatatggtaatggctgagctagttaactcgggcgaggatgtcttggtcttctataatgatcgagcatcattccagacgcttatccaaatgatgcgatccgaacgagaccgcatggacgagaattctcccctcatgtatcatattcacttggtggagttgctcgctgtctgcaccgagggcaagaatgtctacaccgaaatcaaatgcaattctttgctgcccttggatgatattgtcagagttgtcacgcacgaagactgtattcccgaggtgaagatcgcatacattaattttctcaatcattgttacgtggataccgaagttgagatgaaagagatctatacaagcaaccatatgtggaaactgtttgagaacttccttgtcgacatttgccgtgcttgtaataacacaagtgacagaaaacacgcagactctattctggagaaatacgtaacagagattgttatgtccattgttacaaccttctttagctcgccattcagcgaccaatccaccactctccaaaccagacaacctgtcttcgttcagctgctccagggtgttttcagggtctaccattgcaactggctgatgcccagccagaaagccagcgtagaatcctgcattagggtactgtctgatgttgcgaagtctagggccatcgccatccctgtagatctggattctcaggttaacaacctgttcttgaagtcccactctatagtccagaagactgccatgaattggaggctgagcgcgaggaacgcagcacgtcgggatagcgtcctggcagcgtctcgcgactaccggaatattattgagaggctgcaggatatcgtctcggctcttgaagacaggctcaggcccctcgtccaggccgaactgtcagtgcttgtggacgtgctccataggccagaattgctcttccccgaaaataccgatgcccggcggaagtgtgagtctgggggcttcatatgcaaacttataaaacacaccaaacaactgcttgaagagaacgaggagaagctgtgcatcaaggtgctgcagactctcagggagatgatgacaaaggataggggctacggcgaaaaattaatctctatcgatgagctggacaacgcggagttgcctcctgctcctgactcagaaaacgccactgaggagctggagccatccccacccctccgtcaactggaggaccataagaggggagaggccctccggcaggtactcgttaatcggtactacggtaatgtgcgcccatccgggcgccgggagagcttgacctctttcggcaatggccccttgagcgctggcggccccggcaagccggggggcggcggcggaggttctggatcaagcagcatgagtcggggagaaatgtccctggccgaagtgcagtgtcacctcgataaggagggtgcttctaacctggtgattgatttgattatgaacgcctcctcagaccgtgtttttcacgagagcattttgttagccattgccctcttagagggaggtaacaccacaatccagcactcttttttctgcaggcttactgaagataaaaaaagtgaaaaattcttcaaggttttttacgataggatgaaagtggcgcagcaagaaatcaaggcaaccgtcacagtgaatactagcgaccttggtaacaagaagaaggacgacgaagtcgatagggacgctccctcaagaaagaaggccaaggagccaaccacccaaattacagaggaagttcgcgaccaattgctcgaggcctctgcagccaccagaaaggctttcacgaccttccggagggaggccgacccggacgatcactatcagcccggagaaggaacccaagcgacagccgataaggccaaagatgacctagaaatgtctgccgtgatcacaattatgcaacctattctgcgcttcttgcagctactttgtgaaaatcacaatagagacctgcaaaatttcctgagatgccagaacaataaaacgaactacaatctggtctgcgaaaccctgcaatttctggattgcatctgcggctctacaacagggggactgggtctcctcggtctgtacattaacgagaagaacgtcgcactgattaatcagactttggagtcccttacagagtattgccagggtccgtgtcacgaaaaccagaactgtatcgccacacacgagagcaatggcatcgacatcattaccgctctcattctgaacgacatcaaccctttaggcaaaaagcggatggacctggttctggaattgaagaacaatgcttctaaactcctgctcgctatcatggagtctaggcacgactctgagaatgctgaaaggatcctgtacaacatgcgaccaaaggaactggtagaggtaattaagaaagcatacatgcagggcgaggtagagttcgaagacggagaaaatggcgaggatggtgccgcttcgcctcgtaacgtgggccacaacatatatattctcgctcatcagttggcaagacataataaggagctgcagagtatgttgaagccaggaggtcaggtcgatggggatgaagctctggaattttatgctaaacatactgcacagattgaaatcgtcagacttgaccgcacaatggaacagattgtcttccctgtgcctagcatctgtgagtttctcactaaagaatccaaattgcggatttactacactacagagcgcgacgaacaagggtcgaagataaatgatttctttctcagatctgaagacttgtttaacgagatgaattggcaaaagaagctgagggcccagcctgtgctctattggtgtgctaggaacatgtccttctggtcatcaattagtttcaatttggctgtgctcatgaatctcctcgtcgcattcttctatcctttcaagggcgtccgcggagggactttagaacctcactggtctggactgctttggactgccatgctgatatccctggcaatcgtgattgcccttcctaaaccacacggcattcgtgcactgatcgcatccacgatacttcggttgatttttagcgttggcctgcagcccaccctgttcctgctgggcgctttcaatgtttgcaataagatcattttcctgatgtcttttgtgggaaactgtggtacattcaccaggggctacagggctatggtgctggacgtggagtttctgtaccacctactgtacctggttatttgcgctatgggcctcttcgtgcatgaattcttttacagtttgctgctcttcgacttagtttacagggaggagactttattaaacgtgataaaaagcgtaacgcggaacgggcgcagtatcatactcaccgcagtgctggcactaattctcgtctatctcttctcaatcgtgggatacctgttcttcaaggatgacttcatcctcgaagtcgacagacttcctaacgaaaccgcggttcccgaaacaggggagtcgctggcctcagagtttttgttttcagatgtgtgtcgggtcgagtctggagaaaattgcagtagtcctgcaccaagggaagaattggtcccagctgaagaaacagaacaggataaggagcatacatgtgaaaccctgctgatgtgcattgtgactgtgctgtctcacgggctccggtcaggtggtggggtaggtgacgtgctgagaaagccgtcaaaagaagagcccctgtttgctgcgagagtcatctacgatctgctgtttttttttatggtaattatcatcgtcttgaatctgatctttggcgtgatcatagatacatttgccgatcttaggtccgagaagcaaaaaaaagaggaaattctaaagacaacatgttttatatgcggcctggagcgcgacaaatttgacaacaagaccgtcaccttcgaagaacatatcaaggaagaacacaacatgtggcactatctgtgttttatcgtactagtcaaagtcaaggactccaccgagtataccggccctgagagctatgtggcagaaatgatcaaggagcgtaatctagactggtttcctaggatgagggccatgagcttggtaagctctgattccgagggcgaacagaatgaactcaggaacctgcaagagaaactagaatccacaatgaaactggtgacaaacttgtccggtcaactgagcgaactaaaggaccagatgacagagcagaggaagcaaaagcaaaggattgggctgctggggcaccctcctcacatgaacgtgaatccgcagcagccagcctag

SEQ ID NO: 191387 - DNA, 8232 bp, synthetic construct
  misc_feature 1..8232: note = Description of Artificial Sequence: Synthetic coding sequence
  source 1..8232: mol_type = other DNA
atgagcgacaagatgagcagcttcctgcacatcggcgacatctgctccctatacgccgaaggttccaccaacggcttcatctccacactgggattagtggacgaccgctgcgtggtgcagcctgagacaggcgatctgaataaccccccaaagaaattcagagactgtctttttaaactgtgcccaatgaatcggtatagcgcgcagaagcagttttggaaggcagccaaaccaggcgcaaatagcacaaccgatgcagtgttactcaataaattgcaccatgccgccgacttagaaaagaaacagaacgagaccgagaaccgcaaactcctcgggacggtcatccaatacggcaatgtgatacaattattacacctcaagagcaacaagtacctgaccgtcaataaaaggcttcccgccctgctagaaaaaaatgcgatgcgagttacattggatgaggctgggaatgaaggcagctggttttacatacagccgttttacaaacttagatccatcggagattctgtggtgatcggcgataaggtcgtgctgaaccccgttaacgccgggcagcctctccatgccagcagtcaccagttagttgataaccccggatgcaatgaggtgaactctgtaaattgtaatacgtcgtggaagatcgttctattcatgaaatggtctgacaataaggacgacattttgaagggcggggacgtcgtgaggctctttcatgccgaacaagagaagttcttaacatgcgatgagcatcggaagaaacagcacgtgtttctgagaacgacaggtaggcaaagcgcgacttccgcaaccagtagcaaggctctgtgggaggtggaagtagtccagcatgacccatgtagaggaggagcgggctactggaactccctgttccggtttaagcacttagccaccgggcactatttggccgcagaggttgatcctgacttcgaggaggagtgtctggaatttcagcctagcgtggatcctgatcaggatgccagcaggagtcggctccgcaatgcccaggagaaaatggtgtattctttggtcagcgtaccagagggaaacgatatatcttctatctttgaactcgaccctaccaccttaagagggggtgattccctcgtacctcgtaatagctatgttcgtctgagacacctgtgtaccaacacttgggtgcattcaactaatattcctattgacaaagaagaagagaagcccgtaatgttgaaaatcggcacctcccctgtgaaggaggacaaggaggcctttgccattgtcccagtgtcaccagccgaagttcgagatctagatttcgcgaatgacgctagtaaggtgctcggatctattgctggcaagctggagaagggaacaatcacgcagaacgagcgccgctccgtgacaaaattactcgaggacttagtgtacttcgtgacaggaggaacgaatagtggtcaagacgtgcttgaggtcgtcttctctaagcctaaccgagagcgacaaaagcttatgagagagcaaaacattcttaaacagatttttaagttattgcaggccccctttacggattgcggagacgggcccatgttaaggcttgaggagctgggggaccagcgccacgctccgttcaggcacatatgcaggctgtgctatagggtgttgaggcactctcagcaggattaccggaagaatcaggaatacattgctaaacagttcgggtttatgcagaagcagattggttacgacgtcttggccgaggatacaataactgccctgctgcacaacaatcgaaagctgctggaaaagcacattaccgccgcagagatcgatacctttgtaagcctggtgagaaagaatagggaacccagattcctggactacttgtcggatctgtgtgtgagtatgaataaatctatccccgtgacccaggagctcatttgtaaagccgtcctaaatcctactaacgctgacatactgattgagaccaaactggttctgtcaagattcgaattcgagggcgtgtcatcgacaggcgagaatgcgcttgaggccggcgaagatgaagaagaagtgtggctgttttggagggacagcaataaagaaatccgttccaaaagtgtccgtgagctggctcaagatgcaaaagaggggcagaaggaggaccgcgatgtgctaagctactaccgctaccagctgaacctgttcgctagaatgtgcttggacaggcaatatctggccataaacgaaatctcagggcagttggatgtggatctcatcctgcgatgcatgtcagacgaaaaccttccctacgaccttagggccagtttctgccggctaatgttgcatatgcatgtggatagggatccccaagaacaggtcaccccagtcaaatatgctagactgtggtccgaaatccccagtgagatcgcgattgacgattacgattcatcaggagcctctaaggatgagattaaagaaagattcgctcagaccatggaatttgtcgaggagtatctgcgtgacgttgtgtgccaaaggtttcctttcagcgacaaagagaaaaataagctgacctttgaagtcgtgaacctggcccgcaacctgatttacttcggattctacaacttctcagaccttttgcggctgactaaaatcctgctggctattctcgattgcgttcacgtgacgactatattccctatctccaaaatggctaagggtgaagagaataaaggcaacaacgatgtggagaagctcaagagttctaacgtgatgaggagtatccacggtgtcggagaactcatgactcaggtggttctcagaggaggagggtttctacctatgacacccatggctgcagcccccgaaggaaacgttaaacaggccgagccggagaaagaggacatcatggtgatggacactaagttgaaaataatagaaatcttgcaattcatactgaatgttagactcgattatcgcataagctgcctgctgtgtatatttaaacgggagttcgacgaatcaaactcccaaacatcagaaacgagttctggcaattccagtcaagaaggaccatcgaacgtgcccggcgcactagacttcgagcacatcgaggagcaggccgaaggaattttcggtggctccgaggaaaacacgcctctcgacctcgatgaccacggagggaggacctttctgcgggtgctcctgcacctcaccatgcacgattacccacccctagtttctggcgctctgcaactcctcttcagacacttttctcaacgtcaagaggtgcttcaggcctttaagcaagtacagctgctggtcacttcgcaagatgtggataactataaacaaatcaaacaggatttagatcaacttcgcagtatagtggaaaaatccgagctctgggtgtacaaaggtcaggggccagatgaaacaatggacggcgccagcggcgagaacgaacataaaaagacagaggaaggtaacaacaaaccccagaagcacgagagcacatcctcctataactaccgtgtagtcaaggaaattctcattcgactttctaaattgtgcgtgcaagagtccgcatctgtgcggaaaagcagaaagcaacagcaacggctcttgcgcaatatgggtgcccatgcggttgtactcgagctgctgcagattccatacgagaaggccgaagacacaaagatgcaagaaattatgcgccttgcccacgaatttctccagaatttctgcgcaggcaatcagcagaaccaggcattgcttcacaaacacataaatctgtttctgaacccgggcattctggaggcagtgacaatgcaacacattttcatgaataattttcagctctgctcagagattaatgagcgggtggtgcaacactttgttcattgcattgaaacccatgggaggaatgttcagtacattaagttcctccaaaccatcgttaaagcagagggcaaatttatcaaaaagtgtcaggatatggtcatggctgagctcgttaactcaggagaggacgtgttagtattctacaacgaccgggcatccttccagacgctaatccagatgatgaggagtgagagggatcgcatggacgagaatagccctctgatgtaccatattcacctagttgagctcctggccgtgtgtacagagggaaagaatgtgtacaccgagataaagtgcaattcactcctgcccctagacgacatcgtgcgggtggtaacccacgaggattgtattccagaggttaaaattgcctacatcaacttcctcaaccactgctacgtggacactgaggtagaaatgaaggagatatacacctcaaaccatatgtggaaactgttcgagaatttcttggtggatatttgtagagcttgcaacaatacttcagatagaaagcacgctgactcaattctcgaaaagtacgtgacagagattgtgatgtccatagttaccacgttcttttcatcaccattctctgatcagtctactactctgcagacgcggcagccagtcttcgtgcagcttttgcagggggtgtttagggtctatcattgcaactggctaatgccatcccagaaggcctccgtggaatcttgtatcagagttctgtccgatgtggctaaatctagggctattgctatcccagtggacctggattcacaggtgaataacctattcctcaagtctcactcaattgtgcagaagaccgctatgaattggcgtttgtctgccaggaacgcggctaggcgcgacagtgttctggctgcctctagagattatcgaaacattatcgagcgattacaagatatcgtgtcagcattggaggatcggctgcgtcctctagtccaggccgaactcagcgtcctcgtcgacgttttgcatcgtcccgagttattgttcccagaaaatactgatgctcggagaaagtgtgagtctggtgggtttatatgtaagcttatcaaacatacaaaacaactgctcgaggagaatgaggaaaagttgtgtattaaagtgctccagacactcagggaaatgatgaccaaggaccggggctatggagagaagctaatttctattgacgaactcgacaacgctgagttaccgccagcccctgacagtgaaaacgctacagagaagggcgaagcattgcgacaggtgctggtaaaccggtactatgggaatgtgcgaccatcaggtaggcgtgagtctctgacaagttttggcaacggaccattgtcagccggaggtccagggaagccaggtggagggggtggaggttctggctcctcttccatgagtaggggtgaaatgtctttagccgaggtgcagtgccacctggacaaggaaggagccagcaacctggtgatagacctcatcatgaatgcaagctctgacagggtgtttcatgagtcaatcctgctcgctatagctctgttagagggggggaacaccactatccaacacagctttttctgtcgtctaacagaggataagaagagtgagaagttttttaaagttttctacgatcggatgaaggttgctcagcaggagattaaggcaactgtgaccgtgaatacatcggacctgggaaacaaaaaaaaagacgatgaggtggatcgggacgctccttctagaaagaaggcgaaggaacccaccacgcagatcacggaggaagttcgtgaccagctgctggaggcctccgccgcaaccaggaaggccttcacgacattccggagagaggctgaccccgacgaccattaccaacctggcgagggcactcaagccacagccgataaggcaaaggatgacttggaaatgagcgccgtcatcacgatcatgcagcccattttgcggttcctgcaacttctgtgcgagaaccataatcgcgatcttcaaaacttccttcggtgccagaacaataagacaaactataacttagtgtgtgaaacattgcagttccttgactgtatttgtggctcaacaaccggagggctgggcctgctcggcctctacattaatgaaaaaaacgtggctctgattaatcagacattggagtcactcacagagtattgccaggggccttgtcacgaaaaccaaaactgcatagcaactcacgagagcaatggcatcgacatcatcaccgctctgatattgaatgatattaaccccctgggcaagaaaaggatggacttggtactcgaactcaagaacaatgcctcgaaactccttctcgcaatcatggagtctcgccacgactcagagaatgcagaaagaattctgtacaatatgcggcctaaagaacttgttgaagttatcaagaaagcctatatgcagggagaggtcgagtttgaagacggggagaacggcgaagatggcgctgccagtccacggaatgtcggacataacatttacatcctcgctcatcaactcgcccgccacaataaggagctgcagtctatgctaaagcccggcggacaggtggacggagatgaagcgctggaattttatgcgaagcatacagctcagatcgagattgttcggttggaccgcacaatggaacagatcgtgttccccgtgccctcaatctgcgaattcttgactaaagagtccaaattgagaatttactatacaactgagcgggacgaacaaggtagtaaaattaacgatttctttttgcgcagcgaggatttatttaatgaaatgaactggcaaaaaaaacttcgtgcccagccagtgttgtattggtgtgccaggaatatgtctttctggtccagcatcagtttcaacctcgcggtgttgatgaatctgctggtggccttcttttatccatttaagggcgtgcgtggcggcaccctggaaccgcattggagcgggcttctgtggacggccatgttaatatctctggcgatcgtgatcgcactgccgaaaccccacggcatccgtgccctgatcgcttccacgatcctgcgcctgattttctccgtgggtcttcagccaaccttattcctgttaggagctttcaacgtgtgcaataaaatcatttttctgatgtctttcgtcggaaattgcggcactttcactcgagggtatagggcaatggtgttagacgtcgaatttctataccatctcctctacctggtcatatgcgccatgggactgttcgtgcacgagtttttctactccctcctcctgttcgacttggtctacagggaggagactctgcttaacgtcatcaaatccgtgacacggaacggccgcagcatcattcttacggccgtgctagcgctgattttagtttatctattttctatcgtgggatatttattcttcaaggatgatttcatcctggaggtcgaccggcttcctaatgaaactgctgtgcctgagacaggcgaaagtcttgcatccgagtttctgttctcagacgtgtgcagagtcgaatcaggcgaaaattgctcaagtccagcacccagagaagagttggttcccgccgaagagaccgagcaggacaaagagcacacatgtgagacactgttgatgtgtattgtgactgttttgagccacggtctgcgaagcggcggcggggtgggcgatgtgctccggaagccgagtaaagaagaacctctgttcgcagcgagagtgatctacgacttgctattttttttcatggtaatcatcattgtgctcaatctgattttcggcgtaattattgataccttcgcagatctccgctccgaaaaacagaaaaaagaggaaattctaaagactacgtgctttatatgcggcctcgagagggacaaattcgataacaaaaccgtcacgtttgaagagcacatcaaagaggagcataatatgtggcactacctctgctttatagtgctggtgaaagtaaaggatagcactgagtatacaggccccgagagctacgtagcagaaatgatcaaggagagaaacttagactggtttcctcgcatgagggctatgtccctcgtgagtagcgattcagagggggagcaaaatgagctgagaaaccttcaggagaagcttgaatccacaatgaagctcgtcaccaatctatccggccagttgtcagaattaaaagaccagatgactgaacagcggaaacagaagcagcggattggcttgctaggccaccctcctcacatgaacgttaatccgcagcagcccgcctag

SEQ ID NO: 191388 - DNA, 8277 bp, synthetic construct
  misc_feature 1..8277: note = Description of Artificial Sequence: Synthetic coding sequence
  source 1..8277: mol_type = other DNA
atgagcgacaagatgagcagcttcctgcacatcggcgacatctgcagtctctacgcagaagggtccaccaacggatttataagcacgctgggactggtggacgatcgatgcgtagtacaaccggagacaggagacttgaacaatcctccaaagaaatttagagactgtctgttcaaactctgccctatgaacagatactcagcacagaagcagttctggaaggccgcgaagccaggggctaattcgaccaccgacgcagttctcttgaacaaactccaccacgccgcggatcttgagaaaaaacaaaacgagactgaaaatcgaaagctcctcggtacagtgattcagtacgggaatgtaatccagttactacatctgaagagtaataaatatctgaccgtgaacaagaggctgccagcccttctggagaagaacgcgatgcgggtcacgctcgatgaggcaggcaacgaaggatcctggttctatatccagcctttctataaactgcggtccatcggcgactccgttgtgatcggcgacaaggtcgtgttaaatccagtcaacgcaggacagccattgcatgccagtagccaccagctggttgataatcccggctgtaacgaagtgaactccgtgaactgtaacacctcctggaagattgtcctgttcatgaaatggtcagacaacaaggacgacatcttaaaaggcggcgacgttgtgcgtttgttccacgctgagcaggaaaaattcctgacttgtgacgagcacagaaaaaaacaacacgtcttcctgcggacaacaggaaggcagagtgccacctctgctacctcttccaaagccctgtgggaggtggaggtggtgcagcatgatccatgcaggggcggagctggatactggaatagcctctttcggtttaagcaccttgctacaggccactacctcgccgcagaggtggaccccgatttcgaagaggagtgcttggagttccagccttctgtggacccagaccaggatgcctcgcgatccagattacgcaacgcgcaggagaagatggtgtacagcctggtgagtgtaccagagggcaacgatatcagttccattttcgagctcgaccccacaacactgaggggcggggacagccttgttccgcgaaactcgtacgtgcgtctccggcatctgtgcacaaacacttgggtccatagcacaaacattccgatagacaaggaggaagagaagccagtgatgctaaagatcggcacatctccagtcaaggaggacaaggaagcgttcgcaattgtccctgtgagcccagcagaagtgcgcgacctcgactttgcaaatgatgccagcaaagttttgggtagtattgctggaaaactggagaagggtaccatcacacagaacgagaggaggagtgtcacaaagctgcttgaggacctggtctatttcgtgaccggcggtacaaactcaggtcaggacgtgcttgaggtggtcttttccaagccgaaccgagagcggcagaaactcatgcgcgaacaaaacatactgaaacagatttttaagctgcttcaggcacccttcactgactgcggcgatggcccgatgctccggctggaagagctcggggaccagcgacatgcccctttcaggcacatatgccgtctgtgttaccgggtgttacgacactcacagcaagactaccgaaagaaccaggaatacatcgcaaaacagtttgggtttatgcagaaacagattgggtacgacgttctggcggaggacacgataaccgctcttctccacaataaccgcaagcttctagagaaacatattaccgcagcggagattgacacattcgtctcccttgtgaggaagaaccgagagcctagattcttggactatctttctgacttgtgtgtgtcgatgaataaaagcatcccagtgactcaggaactaatctgtaaagcagtgctcaacccgaccaacgcagacatccttatcgagactaagctcgtgctgtctagattcgagttcgagggagtgtcaagtaccggggaaaatgccctcgaagcaggcgaagatgaggaagaggtatggcttttttggcgtgatagcaacaaggaaatcagaagtaagtccgtgagggagctggcccaggacgctaaagagggacagaaggaggaccgagacgtgttgtcatattacagataccagttaaacctatttgctcggatgtgtcttgatagacagtacctagccatcaatgagatatccgggcagttggacgtcgatctcatcttacgttgtatgtcagacgaaaatttgccctatgacttgagggcttcgttttgcaggttgatgctacacatgcacgtggatagggatccccaggagcaagtgacccccgtgaagtacgctcgcctgtggagcgagattccatccgagatcgctatcgatgactacgatagctctggcgcttctaaggacgagattaaggaacgatttgcccagactatggagttcgtagaggagtatttgcgcgatgttgtctgccagaggttccctttctccgataaggagaagaataagctgacctttgaggtggttaacctggcaaggaacttgatctacttcggcttttataacttttcggacctgctgaggctgacaaagatcctgctggccatcctcgactgcgttcatgtgactactattttcccaatcagtaagatggcaaaaggcgaagagaataagggaaataatgacgtagaaaaacttaagtcgagtaacgtcatgcggagtatccatggcgttggtgagctgatgactcaggtcgtgcttcgtggcggaggctttctgcctatgacgcccatggccgcagcccctgagggcaacgttaagcaggccgaaccagagaaggaggacattatggtgatggacactaagttgaaaattatcgaaatcctgcagtttatcctgaatgtgcgcctcgactatagaatatcctgcctgctgtgcatcttcaagagggaatttgacgagtccaatagtcagacctccgagacaagcagcggcaattcttcccaggaaggcccctccaatgtcccgggggctctggatttcgaacacatagaggagcaagctgaggggattttcggagggtctgaagagaatacacccctcgatctcgatgatcacggcgggcgaacattcctgcgggtgctcttacacctgacaatgcacgactacccgcccttggtcagcggcgcactgcagctgctttttcgtcacttctcacagcgccaggaagtgctacaggctttcaagcaggttcagttgcttgtcacaagccaagacgtagacaattacaaacagattaaacaggacctagaccagctgaggtctatcgtggagaaaagtgaactgtgggtctataaggggcaaggacctgacgaaaccatggatggagcctccggagagaacgaacacaagaagaccgaagagggcaacaacaaaccccagaagcacgagtcgacctcctcctataattatagagttgtcaaagagatcttaatccgcctgagcaagctctgtgtgcaagagtcagccagcgttaggaaatcccgaaagcagcagcagaggttgctgcggaatatgggagcgcatgccgtcgtgctggagctactgcaaatcccctacgagaaggctgaagataccaagatgcaggagattatgcggctcgcccatgaattcctacagaatttctgcgccggcaatcagcaaaatcaggcccttctacacaagcacataaacttgttcctgaatcccggcatattagaagcagtgaccatgcaacacatcttcatgaataattttcaactatgttctgagattaacgaacgcgttgtacagcatttcgtgcactgcatcgaaacacatggtcgtaatgttcagtatatcaagttcttgcagaccatagtgaaggccgaggggaaattcatcaaaaagtgtcaggacatggtaatggctgaattggtgaactcaggggaggatgtgcttgtgttctacaatgatagggcttctttccaaacacttatccagatgatgagaagcgaacgcgatagaatggatgagaacagtccccttatgtatcatatccatttggtcgagcttcttgcggtttgcaccgagggaaagaatgtttacacggagatcaaatgtaattccctgctcccactagacgatattgtgcgcgtggtcacccacgaggattgtatcccggaggtgaagatcgcgtatattaacttcctcaatcactgctatgtggacaccgaggtagaaatgaaggagatctatacctcgaatcacatgtggaaactttttgaaaactttcttgtggatatttgccgcgcatgcaataatactagtgaccggaaacatgccgatagtatactggagaaatatgtcactgaaatcgttatgagcatcgtgaccacatttttctcaagccctttttctgaccaaagcacaacactgcaaacgcgccaacctgtgttcgtgcagcttctccaaggcgtctttcgagtgtatcactgcaattggctgatgcctagtcagaaggccagcgtcgagtcctgcattcgcgtcttgtccgatgtggctaagtcacgcgccattgccatcccagtggacctggatagccaggttaacaatttatttctgaaaagtcatagcatcgtgcagaagacagctatgaattggaggctgtccgcgaggaacgccgcacggcgggactcggtattggcagcgagtcgcgactatcgaaacatcatcgagaggctgcaagacattgtttctgccttagaggacaggctgaggcctctcgtccaagcggaactaagcgtcctggtcgatgtgttacatagacccgaattactgtttcctgaaaatactgacgcgcggaggaaatgcgagtccggcggcttcatatgtaaactgatcaagcacaccaagcaattactggaggaaaatgaggagaaactgtgcataaaagtcttgcaaaccttacgagaaatgatgaccaaagaccgaggctacggggagaagctgatctctatcgacgagctggacaatgctgaacttccccctgcacctgattctgagaacgctacagaagagttagaaccatcaccgccactgcgccagttggaagaccacaagaggggggaagccctgcgacaggtcctggtgaatagatattacggaaatgtccggccatctggcagacgggaatccctgacatcattcggtaacggcccactgtccgcaggaggtccaggcaagcccgggggtggggggggaggcagcgggtcctcaagcatgtctcgaggagaaatgagcctggctgaagtgcagtgtcacttggataaagagggtgcctcaaatttggtaatcgacctgatcatgaatgcctctagcgatagggtttttcacgaatccatactcctggctattgccctgttggaagggggtaacaccacaatacagcactcgttcttctgccggttgacagaggataaaaagagcgagaagttctttaaagtattctatgatagaatgaaggtcgcacaacaggagattaaggctaccgtaaccgtgaatacttccgaccttggcaataaaaagaaggacgatgaagtagaccgcgatgctccgtcaagaaagaaagctaaggaaccaaccacccagattacagaggaagttcgcgaccaactccttgaggcatccgccgctaccagaaaggcctttacaactttcaggagggaggctgaccctgatgaccactatcagccaggcgagggcacacaggcaactgctgacaaggcgaaggacgacctggaaatgagcgccgtcattaccattatgcagccaatcctgcgcttcttacagttgctttgtgagaaccataatagagacttacagaatttccttagatgccagaacaataagacgaactacaatctggtctgcgagaccctccaatttctcgactgcatttgcggatccaccacggggggcctcggactcctggggctgtatattaacgaaaaaaatgtggccctgattaatcagacactggaaagcttgaccgagtactgccagggaccatgtcatgagaatcagaattgcatcgccacccacgagtctaacggcattgacattatcacagcactgattctgaatgacatcaaccccctaggaaagaaacgcatggatctcgtgctagaactcaaaaacaatgcctcaaaactattgctggcgataatggagagtcgtcatgactcggagaatgcagagaggatcctgtacaatatgaggcccaaagagctggtcgaagtgatcaagaaggcttatatgcagggtgaagtcgagttcgaggacggggagaacggtgaggacggggcagcttccccacggaacgtcggtcataatatctacattttggcccaccagttagcgaggcataataaggagttgcagtccatgctgaagccagggggacaggtcgatggtgatgaagcccttgaattttacgccaaacacactgcccagatcgagattgtaagactggaccggactatggaacagatcgtgtttccggtgccaagcatttgcgaattccttaccaaggagtcaaagctgcgcatttattacacaacagagcgtgacgagcaagggtccaaaatcaatgattttttcctgagatccgaagacctgttcaatgagatgaactggcaaaagaagctgcgcgcacagccggtcctctactggtgcgctagaaacatgagtttctggagctctatctccttcaatctggccgtgctgatgaacctgttagtagccttcttctacccttttaagggggttagagggggcaccttggagcctcactggagtggacttctctggacggcaatgctgatttcactcgctattgtaatagctctgccaaagccacatggaattcgggccttgatcgcttccacaatcctgagattaattttcagcgtcggccttcagccaacactcttccttctcggtgcatttaacgtgtgtaataaaataatttttttgatgtcatttgtcggcaattgtggcactttcacccgaggctatcgcgccatggtgcttgatgtggagttcttgtaccacctgctttatctggtgatctgcgctatgggcctgtttgtgcacgaatttttttatagcttgctgttgtttgatctggtgtaccgtgaggaaacccttctgaatgtgataaagagcgttaccaggaacggaaggtccattatcctgacagctgtcctcgctctcatcctggtgtacctgttctccatagtcggatacctgttcttcaaggatgacttcatcctcgaggtggatcggctccccaatgagacagctgtcccggaaacaggagaaagtttggcgagcgaatttctgttctctgatgtatgccgagtggagagcggggagaattgttctagccctgctcccagggaggagctcgtgcctgcagaggagacagaacaggataaagaacatacctgcgagaccctgctgatgtgtatagtgactgtgctaagtcatggcctgaggtcaggtggaggcgttggcgatgtcttgcgtaagccatctaaggaagagccactgtttgctgctcgcgtcatttacgacctccttttttttttcatggtgattattattgtgctgaaccttatcttcggggtgatcatagacacatttgctgatctgaggtccgaaaagcagaagaaagaggaaattctcaagacaacatgctttatctgcggactggaaagagacaagtttgacaacaagactgtaacgttcgaagaacacatcaaagaggagcacaatatgtggcactacctttgcttcatagtgcttgtgaaggtgaaggattcgaccgaatataccgggcctgagagttacgtcgcagaaatgatcaaggaacgtaacttggattggtttccacgtatgagagccatgtccttggtatcctctgattctgagggcgaacagaatgaactgcgtaacctgcaggaaaagcttgaatctacgatgaagcttgtgacaaatctttccgggcagctgtccgaattgaaagaccagatgaccgagcagaggaagcagaaacaaagaataggtcttctgggacatccaccccatatgaacgttaacccacaacagccggcatag

SEQ ID NO: 191389 - DNA, 8133 bp, synthetic construct
  misc_feature 1..8133: note = Description of Artificial Sequence: Synthetic coding sequence
  source 1..8133: mol_type = other DNA
atgagcgacaagatgagcagcttcctgcacatcggcgacatctgcagcctgtacgccgaggggtctaccaatggttttatctcaacccttggattggtggatgaccgatgtgttgtgcaaccagagacgggcgacctcaataatccccctaaaaagttccgcgattgcctgttcaaactttgtcctatgaatcgctactctgcacagaaacagttctggaaggcagcaaagcctggcgcgaattcaacaaccgacgcagtccttttgaataaactacaccacgccgcagacttagaaaaaaaacagaacgagacagaaaaccgaaagctgcttggcactgtcatccagtacggtaatgttattcagctgttgcatctaaagagcaataagtatttgactgttaacaaaagactgcccgctcttttggagaagaacgcaatgagggttacactcgacgaggcaggtaacgagggctcttggttctacattcagcctttttataagctacggagcattggagattccgttgttattggggacaaggttgtgttaaatccagtgaacgccggccagcccctccacgcctcatcacaccagctggtggacaatccaggttgtaacgaggttaactccgtgaactgcaacactagttggaagatagttctgtttatgaagtggtctgataacaaggatgatattctaaagggcggcgatgtggtgcgactgttccacgctgaacaagaaaagttcctgacttgcgatgagcaccggaagaaacaacacgtgtttctgcgaactaccggccgacagtctgctacatcagctacgtccagcaaggccttatgggaagtggaggtggtacagcatgatccttgtagaggtggggctggttactggaactctctgtttcggtttaaacatttggccaccggccattaccttgcagccgaagtggaccccgatttcgaagaagagtgcctggagtttcaaccatctgtcgatccagaccaggacgccagccggtccagattacgtaatgcccaggaaaagatggtctattcactcgtgtctgtccccgaaggtaatgacatctcttcaattttcgaactcgatccaactactttgagagggggagatagtctcgtccctagaaattcctatgtgagactgcggcacctatgcaccaatacatgggtgcactcgacaaacataccaattgataaagaagaggaaaagcccgtgatgttgaaaatcggcacgagccctgtgaaagaggataaggaagcattcgctatagtcccggtctctcctgccgaggtaagagacctcgattttgccaatgacgctagtaaagtgctgggaagtatcgctgggaagctggagaagggaacaattactcagaatgagagacggtctgttacaaaacttctagaggaccttgtttacttcgtcaccggggggaccaacagcggtcaggacgtcctcgaagtagtcttctccaagcctaatagggaaagacaaaaactcatgagagagcagaacatcttgaagcagatattcaagctgttgcaggcgccttttaccgactgtggagacggcccgatgctccgcctggaggaactgggagatcagaggcatgcaccctttaggcatatttgcaggctgtgctaccgggtcctccgacattcacagcaagattatcgtaagaatcaagagtacattgcaaaacagttcggattcatgcagaaacagatcggctacgacgtgctggcagaagataccatcaccgcccttctccataataaccggaagctgctggagaagcatattaccgcggccgagattgatacatttgtaagtctcgttcggaaaaatcgagaacccagattcctagactatctctctgatctgtgcgtgagcatgaataagtcaattcctgtgacccaggagttaatttgtaaggcggtgctgaaccctactaacgccgatattcttatcgaaactaagctagtactctcccgattcgagtttgagggagtgtcatctacgggcgaaaatgcactggaggcaggggaggatgaggaagaggtctggctgttttggcgggactccaacaaggaaatccggtcaaaatcagtgcgggaactcgcccaagatgcaaaagagggacaaaaagaggaccgtgatgttctgagctattaccgctaccagctaaatttgttcgcccggatgtgcctggacagacaatacttagcgataaacgagattagtggccagctcgacgtcgatctcattctgagatgcatgagcgatgagaacctcccctacgatctccgggcaagcttttgcagactgatgctgcacatgcatgtggaccgtgacccacaggagcaagtgacacccgtgaagtacgcacggttgtggagtgagattccttccgaaattgccatcgacgattacgacagctcaggagcatccaaagatgaaataaaagaacgatttgcacagaccatggagtttgtagaagagtacctgagggatgtcgtctgtcagagattccccttttctgacaaggaaaagaataagctcacttttgaggtggtgaatttggcccgaaatctgatctattttggattctataacttctctgacctgctgcgccttactaagatacttctggctattctcgactgtgtacacgtaaccacaattttccctatctctaaaatggccaagggggaagaaaataagggcagcaacgtaatgcgttctatccacggagttggcgaattaatgacccaagttgtactccgcgggggagggtttctccctatgacccctatggcagcagcgcctgaagggaatgtaaagcaggccgagcccgaaaaagaagatatcatggtcatggacaccaagctaaagatcattgagatcctgcagttcattctcaacgtccgcttggactataggattagctgtctgctttgtattttcaaacgcgaatttgacgaaagtaattctcaaacctctgaaacatccagcgggaactcgagtcaggagggaccttcaaatgtcccgggcgccctggattttgagcatattgaggaacaagctgaagggatatttggcggatcagaggagaacacacccttagatctcgatgatcatggtggcaggaccttcttacgggtgttactgcacttgaccatgcatgattacccacctctggttagtggggctttgcagctcctcttccgtcatttcagtcaaagacaggaagtattgcaggccttcaagcaggttcagcttctcgttacttctcaggacgttgacaactacaaacaaataaagcaagatctggatcagctgagatcaatcgtggagaagagcgagttgtgggtgtataagggccaagggcccgatgagactatggacggcgcctccggagagaatgaacataagaagacagaagagggtaacaacaagccacaaaagcatgagtccaccagtagttataattaccgtgtggtcaaggaaatcttgattaggctgtcaaagctctgcgtgcaggagagcgcaagtgttagaaagagcaggaagcagcagcagagactcctgcgcaatatgggcgcacatgcggttgttctggagctgctgcagataccctatgagaaagctgaagatacaaagatgcaggagattatgaggttggcacacgaatttctccaaaatttctgtgcagggaaccaacagaaccaggcgcttctgcacaaacatatcaacttatttctcaaccccggcatcctggaagcggtcaccatgcagcatatttttatgaacaactttcaactttgctcagaaatcaatgaaagggtcgttcagcacttcgtgcattgcattgaaacccatggccgaaatgtgcaatacatcaaatttctccagacaatcgttaaagccgaggggaagttcatcaagaagtgccaagatatggtcatggcagagctggtcaactcaggagaggacgttctcgttttttataacgatcgggcttcatttcagaccctgattcagatgatgcgcagcgaacgcgatagaatggatgaaaattccccgctcatgtaccatatccatctggtggagctgctggccgtctgcacggagggcaagaacgtgtacactgaaatcaagtgtaactctctcttaccgctggatgacatcgtgagggtggtgacccacgaggattgcattccagaggtgaagattgcatatatcaattttctgaatcactgttacgtggacactgaggttgaaatgaaggaaatctataccagcaatcacatgtggaaattgttcgaaaactttttagtggatatatgtcgcgcctgcaacaacacatctgatcgcaagcacgcggattccatactggagaagtatgtcacggagatagttatgtcaatagtgaccacgttcttctcatcgccattttctgatcagtcgacaactctgcaaactcgccaaccagtgtttgtccaactgctccaaggggtgttcagagtctatcactgtaattggctaatgccctctcagaaggcctcggtggagtcctgcatcagagtgctaagcgacgtggctaagtccagggcaattgctattccagttgacctcgactcacaggttaataatttgtttctgaagtcccattctatcgttcagaaaacggctatgaattggcggctctctgcgcggaacgctgccagaagagacagtgttctggctgcaagtcgcgattatagaaacattattgagaggctacaggacatcgtttcagccttagaggatcggctgcgcccgctggtgcaggccgaactgtccgtgcttgttgacgtgctgcaccggccagaactcttattcccagagaacacggatgcgcggagaaaatgcgagagcggcggtttcatttgtaagctgattaaacatacaaagcagctcctggaggagaatgaggagaaactgtgtatcaaggtgcttcagacactcagagaaatgatgactaaggaccgcggatacggcgaaaagggcgaggcattaagacaggtcctggttaacaggtactacggaaatgtccggccttccggccgccgggagtccctaacttcctttggaaatgggcccctgtctgccggcggaccaggaaagccaggtggagggggtggtggatcgggatcatccagtatgagccgcggtgaaatgtcactggcggaggtgcagtgtcacttggacaaggagggcgctagcaatctggtcatcgatctgattatgaacgcctctagtgacagggtattccacgagtctatcctgctcgccatcgcgcttttggaaggcggcaatacaactatccagcactctttcttctgccgactgaccgaagacaagaagtccgaaaagtttttcaaagttttctatgaccgaatgaaggtggctcagcaggagatcaaggcaacggtgactgtaaataccagtgacttgggaaataaaaaaaaagacgacgaggtggatcgggacgctccaagccggaagaaggccaaggagccgactactcagataacagaagaagtcagggaccagctgctggaggcctccgctgccacccgcaaggctttcactaccttccggagagaggccgatcccgatgatcattaccagccaggcgagggaacacaggctaccgcagacaaggcaaaggatgacctagaaatgtctgccgtgatcaccattatgcaaccgatcttaaggttcctgcagctactttgtgagaatcacaacagagatctccagaatttcttgcggtgtcagaataataagaccaactacaaccttgtctgtgaaacactccagtttctagattgtatttgtggctccacgacaggggggctgggccttctcgggctgtacatcaatgagaagaatgttgctctcataaaccaaactcttgaaagtctgaccgaatattgccaggggccctgtcatgagaaccaaaattgcatcgctactcatgagtccaacggtattgacattataactgccttaattcttaatgacattaacccattagggaaaaagcgtatggatttagtccttgaactgaagaataacgccagtaaactactactggcaatcatggaatcacggcacgattctgagaacgccgaacgtatcttgtacaatatgcgccccaaagagcttgtcgaggtcatcaaaaaggcatacatgcagggggaggtggagttcgaagacggcgaaaacggcgaagatggggctgcttctcccaggaacgtgggtcacaatatttacatcctagcccaccagttagcccgtcacaacaaagaactgcagagcatgctcaagccgggaggacaagtggatggagatgaggcgctcgaattttatgccaagcataccgcccagatagaaattgtccggttggatcgaacaatggagcagatcgtctttccagtcccctccatctgtgaatttttaaccaaggagagcaagcttcgaatatactatactactgagagagatgagcaaggctctaagatcaacgactttttcctgcgaagcgaagatttatttaatgagatgaattggcaaaaaaaattacgggctcagccagtcctgtactggtgcgctcgcaacatgtccttttggagcagtatttctttcaacttggcagtgcttatgaacttgctggtggcgttcttttatcctttcaagggcgttcgaggaggaacactcgagccccattggtctggtttattgtggactgctatgctcataagtctggccatcgttattgccctgcccaagcctcacggaatccgcgcgctgattgcctcaacaatccttcgactcattttttccgttggactgcaaccgacattattcctgcttggagccttcaacgtgtgcaacaagatcattttcctgatgtctttcgtggggaattgcggcacattcacaagaggataccgtgcaatggtgttggacgtcgagtttctgtatcacctactctatttggtgatctgtgccatgggattgttcgtccacgagttcttctattctcttctgctcttcgatctggtgtatagggaagaaactcttctgaatgtgattaagtccgtcaccagaaatggccgtagcatcatactcaccgctgtgctggctctgattctggtgtacttattctcgatcgtggggtacctgttttttaaggacgatttcattctggaagtcgatagactgcccaacgaaaccgcagtgccagagaccggggaatctctagccagcgagtttctgttttcagacgtgtgtagagtggagagcggtgagaactgtagctctccggcaccacgcgaggagttagtgccggcagaagagaccgaacaggataaggagcatacatgtgaaacattgttaatgtgcatagtcactgtgctgagccacgggctgaggagcggcgggggagtgggtgacgttttacgaaagcctagcaaggaagaacctctgttcgcagcccgcgtgatttatgaccttctgttcttcttcatggttataatcatcgtgctgaatctcatctttggcgtcatcatagacacctttgcagatctccgctcagaaaagcagaagaaggaggaaattcttaaaaccacttgttttatatgtggactcgagcgcgacaagttcgataacaagacagtgaccttcgaagagcacattaaggaagagcacaatatgtggcattatttatgctttatcgtgctggtgaaggtgaaagacagtaccgagtataccggcccggaatcctacgttgctgagatgattaaagagcggaatctcgattggtttccaaggatgagagcaatgagtcttgtctcatccgattctgagggagaacagaacgaattgcgaaatctccaagagaagctggagtcaacgatgaaactcgtgactaacttgtcagggcagctgagcgagttgaaagaccagatgactgagcaacggaaacagaaacagcgcattggtctgcttggtcaccctccccacatgaatgtgaacccacagcaaccagcctag

SEQ ID NO: 191390 - DNA, 8133 bp, synthetic construct
  misc_feature 1..8133: note = Description of Artificial Sequence: Synthetic coding sequence
  source 1..8133: mol_type = other DNA
atgagcgacaagatgagcagcttcctgcacatcggcgacatctgcagcctgtatgcagagggatctaccaacgggtttatcagcacgctgggtcttgtggacgaccgctgcgtggtgcagcccgagacaggcgatctgaataacccgccgaagaagtttcgggattgcctgtttaaattatgtcctatgaacagatatagcgcccagaagcagttctggaaagcagccaagccaggcgcgaatagcaccaccgacgcagtccttctgaacaagctacatcatgccgccgatcttgaaaagaagcagaatgaaaccgagaatcggaagcttctcggaaccgtgatccagtacgggaatgtcatccagctgctgcatctgaaaagtaataagtatctgactgtcaacaagaggctgcctgcccttctcgagaagaacgctatgagggtgacccttgacgaagccggcaacgaagggagctggttctacatccagccgttttacaaattgcggagtattggtgattctgtggtgattggggataaggtggtgctgaatcccgtaaacgccggccagcccctgcacgcgtcctcacaccagctcgtggacaacccgggctgcaacgaagttaactccgtaaattgcaatacatcttggaaaatagtcctgtttatgaaatggagcgataataaggatgacatcttgaagggcggtgacgttgtgagacttttccatgctgaacaggagaagttcctgacgtgcgacgagcatagaaagaagcagcacgtgtttctgaggactacaggtaggcagtccgctactagcgccacgtccagtaaagctctttgggaagtggaagtggtccagcatgacccttgccggggtggtgccggttactggaactccctgtttcgtttcaaacacctcgctacagggcactatctagcagccgaggtcgaccccgacttcgaggaagagtgcctggagtttcagccatccgtggatccagaccaggacgcctctagaagccggctgagaaatgcccaagaaaagatggtctatagccttgtctctgtccccgaggggaacgatatttcctctatattcgagctggacccgacgactctccgtggcggagactccctggtgcctcgaaattcatacgtgagactgcgtcacctgtgtactaatacctgggtccactctacgaatatcccgatagacaaagaggaggagaagcccgtgatgctgaaaataggcaccagcccagtcaaggaggacaaggaggcattcgccattgtgcctgtcagcccagctgaggttcgtgacctggactttgcaaacgacgctagtaaagtcctgggatccatcgctgggaagcttgagaaggggaccatcacccagaacgagcgccggagcgtgactaaactgctggaggatctagtctactttgtcacagggggcaccaactctggacaggatgtcctcgaagtggtgttcagtaaacctaatagagagcggcagaagcttatgcgggagcagaacattcttaagcagatatttaagctgctgcaggcaccatttactgactgcggcgatggacccatgttgaggttagaagagctcggggaccagcgccacgccccgttcagacacatttgcagattgtgctatcgagtactgagacacagtcagcaggattaccgtaagaatcaagagtacatcgccaaacagtttggttttatgcaaaaacagattggatatgatgtcctggccgaagacaccataacagctttgttacacaataatcggaagctgttggaaaagcacatcaccgccgctgagattgataccttcgttagtttggtccgtaagaatcgggagcctaggttcttagactatctttcagacctatgtgtgagtatgaataaaagcatcccagttacccaggagcttatctgcaaggccgtgctaaatcctacaaacgctgacatcctgattgaaacaaagctggtcttgagcaggtttgaatttgaaggggtgtcgtctactggggaaaatgccttggaggccggagaagacgaggaggaagtgtggctcttttggcgggattcaaacaaagagattcgctcaaagagcgtccgggagctggcacaagacgcaaaagaaggccagaaagaagaccgcgacgtgctcagctattatagataccagctcaacctgttcgcgcggatgtgtctggacaggcaatatctggccatcaacgagatttcaggacagctcgatgtcgatctcatcctgaggtgtatgtccgatgaaaatctcccatacgatctgcgcgcatctttctgccggctgatgctacatatgcacgttgaccgggatccccaagagcaagtcactcccgtgaaatacgctcggctatggtccgagattcctagtgagatcgcaattgacgattatgactcaagcggggcctcaaaggacgaaatcaaggagcggttcgctcagactatggagtttgtggaggaatacctaagggacgtcgtgtgccagaggttccctttttctgataaagagaagaacaagttgacatttgaggtggtgaatctagcaaggaacctcatatatttcgggttttacaatttttccgacttactgagactcacaaaaatacttttagcaattctcgactgcgtgcatgtgactactatcttccccatcagcaaaatggcaaaaggagaagagaacaaggggtccaatgtcatgcgtagcattcacggcgtcggcgagttaatgactcaggttgtcttgaggggcggcggtttccttcctatgacccctatggctgctgctcctgaagggaatgtgaagcaagcggagcccgagaaggaggatattatggtgatggatactaaactcaaaatcatagagatcctgcagttcattttgaatgtgcgcctcgactatcgtatcagctgtcttctgtgcatcttcaaacgagagtttgacgagagtaattctcagacttcagagacttcatccggcaatagcagccaggagggcccgtcaaatgtgcctggggctcttgactttgagcacatagaggagcaagcagaggggatcttcggaggtcggaaagaaaatacaccgcttgatctggacgaccatgggggcagaacctttctaagggttctgctgcatctgacaatgcacgattacccacctttagtgagcggagcactgcagctgttatttaggcatttctcccaaaggcaggaagtgctccaggctttcaagcaggtgcaattgctggttacatcgcaagacgttgataattacaagcagattaaacaggacctggaccagctgcggtccatcgtggaaaagtcggaactctgggtgtacaagggccaaggccctgatgagactatggacggggcgagcggagaaaatgagcacaagaaaacggaagagggcaataataaaccacagaaacatgagtcgacatcgtcctacaattatagggtcgtcaaagagatccttatccgtctgtctaagctctgcgtccaggagtctgcaagcgttagaaaaagccgtaagcaacagcagcgcttactgcggaatatgggagctcacgccgtggttctggaactgctgcagattccctacgagaaagcagaggacactaagatgcaagaaatcatgcggctcgcccacgagttcctgcaaaacttttgcgctggaaaccagcagaaccaggcactcctgcataagcacattaacctgttcttaaatccagggattctggaagccgtgactatgcagcatatatttatgaataactttcaactgtgtagcgagattaatgagcgtgttgtccaacacttcgtccactgcatcgagactcacgggaggaacgttcagtacattaagttcctccagaccatcgtgaaggccgagggaaagttcattaagaagtgccaggatatggttatggccgaattagtaaattccggtgaggatgtgttggtgttttacaatgacagggcatcatttcaaaccctgattcagatgatgcgctctgaacgtgatcggatggatgaaaacagccccctgatgtaccatatccatctggtggaattgctggccgtatgcacggaggggaaaaacgtgtatactgagataaagtgcaatagcctgttgcctctggatgatattgtgcgcgtggtcactcatgaggactgtattccagaggtgaagatcgcctatattaatttcctaaatcattgctacgtagataccgaagtagagatgaaagagatctatacttcaaaccacatgtggaaacttttcgagaactttctggtagacatctgtagggcctgtaataacactagtgatcggaaacacgccgactccattctcgaaaaatacgtcacagagattgtgatgagcatcgtgactacgtttttctctagcccattttccgatcagtcaaccactctgcagacacggcagcctgtatttgtgcagctgcttcagggagtgtttagggtgtatcattgcaactggctcatgccaagccaaaaagcctctgttgagagttgtatacgggtgctgtctgacgtggctaagtcccgtgctatcgctattccagtggacttggattcacaggtcaacaatctctttctcaagtcccactctatcgtacaaaagacggcgatgaattggaggctctcggccagaaacgccgcaaggcgggacagcgtgctggccgcttccagagactaccgtaacattatcgagagactgcaggacatcgttagtgcactcgaagacagactccgcccccttgtgcaggctgagctctctgtgcttgtggacgtactgcacaggcccgaactgctgtttcccgagaacactgatgcacgccggaagtgtgaaagcggaggctttatctgtaagctgattaaacacacgaaacagctccttgaggagaatgaggaaaaactttgtatcaaggttctgcagaccctgcgtgagatgatgaccaaggatcgcggctatggtgaaaagggagaggcgttgagacaggtgttggtgaacagatactacggaaatgtgagaccttcgggtcggcgggagtccctgacgagctttggaaatggaccactttctgctggcggtccgggtaaaccaggtggcggtggcggtggaagtggatcctcaagtatgagtagaggggagatgtcattggccgaagtgcaatgccatcttgacaaggagggggcctcaaacctcgtcatcgacctgattatgaatgcttcatctgacagagtgtttcacgaatcgatcctcctggccatcgcactcctggagggtggaaataccacaatccaacatagcttcttctgtcggttaaccgaggacaagaagagcgagaaattctttaaggtgttttacgacagaatgaaggtggcccagcaggaaattaaggctacggttaccgtgaacacaagcgatctgggcaataagaagaaagacgacgaggttgacagagatgcaccatcaaggaagaaggccaaggagcccacaacacaaataacggaagaagttagagatcaattattggaggctagcgctgctactagaaaagctttcaccacttttcggcgggaagcagacccagacgaccattaccagcctggggagggcactcaggctaccgcagataaagcaaaagacgacttggagatgtctgccgttataactatcatgcagcccatattaagattcctccagcttctctgtgagaaccacaacagagatctgcaaaactttctccgctgccagaacaataaaactaattataaccttgtgtgcgagaccctgcaattcttagattgcatctgcggatccaccacgggtgggctcggactgcttggcttatacataaatgagaaaaatgtggcccttatcaaccagaccctggaatctctgacggagtactgccaaggcccgtgtcacgaaaaccagaattgcattgccactcacgagagcaacggcatcgacatcattacagcacttattcttaacgacattaatcccctgggaaaaaaacgcatggatctggttcttgaacttaaaaataacgcatcaaagctgttacttgccattatggagtcccgtcacgactcggagaacgccgaacggattttatacaatatgcgcccaaaagaattagtcgaagtcatcaaaaaagcttatatgcagggagaagtggaatttgaggacggtgagaatggcgaggatggggctgcgagccctcggaatgttgggcacaatatatatattctggcccaccagctggccaggcacaacaaggaactgcagagtatgctcaagccaggcggccaggttgacggcgatgaagcactggaattctacgcaaagcacaccgctcagattgagatcgtgcggctcgaccgaacaatggaacagattgtgttcccagtgccctcaatatgcgaattcttgaccaaagagtcaaagcttagaatctactacaccaccgaacgcgatgagcaaggcagtaagataaacgacttctttctacgaagtgaggacctgttcaatgaaatgaattggcaaaagaagttgagagcccagcccgtcctgtattggtgcgccaggaatatgagcttctggtctagcataagctttaatcttgcagtgctgatgaacttattggtcgcctttttctatcctttcaagggggtaagagggggcacgctggagccacactggtctggtctactgtggacagccatgctcatttctctggcaattgtgatcgctctgccgaaaccacacggtatacgggcactcatcgcaagcaccatacttcgtctgatctttagcgtcggacttcagccaacactgtttcttctgggggcattcaatgtttgcaataagataatattcctcatgagcttcgtgggaaattgtgggacctttacgcgggggtatagagccatggtcttagacgtagagttcctgtaccaccttctgtacctggtgatttgtgccatgggactcttcgtccatgagtttttttactcgctgttgttattcgacttggtgtaccgagaagaaaccctgctgaatgtgatcaagtctgtgacacggaatgggaggtccattattttgaccgccgtgttagcccttatccttgtatatttattttccatagttggatatctcttctttaaagacgacttcattctggaggtggacaggctgcccaatgaaaccgctgttcccgagacaggagagtccctggcttcagagttcctctttagcgacgtgtgcagagtggaaagcggcgagaactgctccagtccagcaccgagagaagagctagtgcccgcagaagagactgagcaggacaaggagcacacgtgcgaaactctgttaatgtgcattgtcacagtcctgtcacacggccttcgcagcggcggaggcgtgggcgacgtgctgcggaaaccctctaaagaagaacccctttttgcagccagagtcatctatgacctacttttcttttttatggtgataatcattgtccttaacctgatctttggtgttattatcgacacatttgccgatcttaggagtgagaagcaaaaaaaagaagagattctgaaaaccacctgcttcatatgcggacttgaacgtgataagttcgacaataagactgtaacctttgaagaacacattaaagaagagcacaacatgtggcactacctttgttttattgtgttggtaaaagtgaaggactcgactgagtacactggccctgagtcttatgtggccgagatgattaaagaaaggaacttggactggtttcccagaatgagggcaatgtcccttgtaagtagtgattctgaaggggagcagaacgagctgcgcaacctgcaggaaaagctcgagtccacaatgaagctggtgactaacctatcaggacagttaagcgaactgaaggatcagatgacagagcagaggaagcagaaacagagaattggacttttggggcatccccctcacatgaatgtgaaccctcaacaacccgcctag

SEQ ID NO: 191391 - DNA, 3615 bp, synthetic construct
  misc_feature 1..3615: note = Description of Artificial Sequence: Synthetic coding sequence
  source 1..3615: mol_type = other DNA
caggagcccggccactgccacagccggggccccggccagcccagccaacagcctctttcccaggttccgcagcattgcgccgaagcaatgaactggcggctctccgcgcgtaacgcggcgaggcgggacagcgtacttgccgctagccgggattaccgtaacattatcgagcggctgcaagatatcgtgagtgctctggaggacaggctgcgccctcttgtgcaggcagagctcagcgtgctggtggacgtcttgcaccgcccagagcttcttttccccgagaacacagatgcccgacgaaagtgcgagagtggcgggttcatatgtaagctcattaaacacaccaaacaactcctggaagaaaacgaggaaaaactgtgtatcaaagttctccagactctgcgcgagatgatgacgaaggacagaggttatggcgaaaagttgatctccatagatgaattggacaacgcagagttaccacctgctcccgactcggaaaatgctaccgaggaactggaaccctctccacctctccgccagcttgaagatcacaaacgcggtgaagccttaagacaggtgctcgtcaatcgttactacggaaatgtcaggccttccggacgcagggaaagtctgacatctttcggcaacggccccttgtcagccggagggccgggaaagccaggtggcgggggcggcgggtctggcagctcctctatgagtcgcggggagatgtcactggctgaagtgcagtgccatctcgacaaagaaggcgccagtaatctggtcatcgatctgatcatgaatgcttcgtcagatagagtcttccacgagagcattctgctggcaatcgcactgctggagggcggaaataccaccatccagcactcgttcttctgtagactaaccgaagacaaaaagagtgagaaattctttaaggtcttctatgataggatgaaggtggcgcagcaggagatcaaagctaccgtgaccgtcaatacttcagacttggggaacaaaaagaaggacgatgaagttgacagagacgccccctcccggaaaaaggctaaggaacctacaacacaaattactgaggaagtccgcgaccagctgctggaggctagcgcagcaacgaggaaagccttcaccactttccgacgcgaggctgacccagatgatcactatcaaccgggcgagggaacacaggctactgccgataaggccaaagacgacctcgaaatgagcgcagttataactatcatgcagcccatattgcgcttcctgcaactgctgtgtgagaatcacaaccgcgatctccagaacttccttcgatgccagaacaataaaactaattacaatctggtctgcgagacactgcagtttctagattgtatctgtggaagcacaactggtggactgggcttactcggcttatatattaacgagaaaaatgtcgccctgataaatcaaacgcttgagagcttgaccgagtactgccagggaccctgccacgagaaccagaactgtatagcaactcacgagtctaatggaattgacatcattacagccctgatcctgaacgatattaatcctctcggcaaaaagagaatggatcttgtcttggagctgaaaaataacgcctccaagctcctgctggccatcatggagtctcgacacgactccgagaacgctgagaggattttatacaatatgagaccaaaagaactggtggaagttatcaagaaagcgtacatgcagggagaggtggagtttgaagacggagaaaatggtgaggatggcgctgcgagtccaaggaacgtgggccacaacatctatatcttggcgcatcagctagcgcgccacaataaggagctgcaatccatgttaaagccaggggggcaggtggacggcgacgaagccctggagttttacgccaagcatactgcccagattgaaattgtccggctcgatcgtaccatggagcagatcgtctttccggtcccgagcatttgtgagtttctgactaaggaaagcaagttacgtatttactataccactgaacgagacgaacagggctcaaagatcaacgactttttccttcgttcagaggacctgttcaacgagatgaattggcagaaaaagctgagggcacagcccgtcttgtactggtgtgcaagaaacatgagtttctggtctagtattagttttaacctcgcagttctcatgaatctccttgttgccttcttctatcctttcaaaggggtaagagggggcactctcgagccccattggagcggcttgctttggaccgctatgctcatcagccttgctatagtcattgctcttccgaaacctcacggcatcagagccctaattgccagcactatcctgcgcctcatcttctctgtggggctgcagcctactctgttcttactgggagcatttaatgtctgcaataagatcatttttttaatgtcattcgtgggtaactgtgggaccttcactcgcggttatcgggcaatggtgttagatgtcgagtttctttatcatctcctgtatttggtgatttgtgctatggggctttttgtccacgaattcttttacagtctcctgctattcgacttggtttacagagaggagactttgcttaacgtcatcaagtcagtcaccaggaatggtagaagcattatcctgactgctgtactcgccctcatacttgtgtacctgttcagtatagtgggctatcttttcttcaaggatgacttcattttagaggttgaccgtttacctaacgagacagccgtgcccgagacgggcgaatctctcgcgtccgaattcttgttctcagatgtgtgtagagtagagagcggggagaactgctcatccccagcccccagggaggagctggttcctgcggaagagacggaacaggacaaggagcacacatgcgagaccctcctgatgtgcatcgtgacagtgctcagccacggtctgaggagtggtgggggcgtgggtgatgttttgagaaagccctccaaggaggagcccctgttcgcagctcgagtcatttacgatttgctgttttttttcatggtcatcattatagtgctcaacctgatctttggcgttattatcgacaccttcgctgacttgaggagcgaaaaacagaagaaggaggaaatcttaaagacaacctgtttcatctgcggccttgagcgtgacaagtttgacaataagacagtgaccttcgaggaacacattaaggaggagcataatatgtggcattacctctgctttattgtgctggtcaaggttaaagattctaccgagtacacaggaccagagtcctacgtggccgagatgattaaagagcgcaacctggactggttcccccgaatgcgcgcaatgagcttagtgtcctctgacagcgaaggagagcagaacgagctgagaaacttacaagagaagcttgagtccaccatgaagctggtcactaatctctcagggcagctgtcggaactcaaggatcagatgactgaacagcggaagcagaaacagagaatcggactgttggggcacccccctcacatgaatgtcaacccacaacagccagcttag

SEQ ID NO: 191392 - DNA, 8232 bp, synthetic construct
  misc_feature 1..8232: note = Description of Artificial Sequence: Synthetic coding sequence
  source 1..8232: mol_type = other DNA
atgagcgacaagatgagcagcttcctgcacatcggcgacatctgctctctctatgcagaaggatctactaatggatttatatccacgctcgggcttgtcgacgacagatgcgtggtgcagcctgaaacaggagatctgaacaatccccctaagaagtttagggattgcctgttcaagctctgtcccatgaataggtattctgcccagaagcagttttggaaagccgctaaacctggcgctaattccaccactgatgccgttctattgaataaactgcatcatgccgctgatctggagaaaaagcagaatgagacagagaatcgaaagcttctgggcactgtgattcagtacggcaatgtcattcagctgctgcaccttaaaagcaataaatacctgactgtcaacaagagacttccagccctgctcgaaaaaaatgccatgagggtcacactcgacgaagccggtaacgaggggagctggttttatatccagcctttttataaattgaggtctatcggagattccgtggtgatcggagacaaggtggttctgaatcctgtaaacgctggccagccactgcatgcatcgagccaccaactggtggacaatcccggttgcaatgaggtgaactcagtaaattgcaataccagttggaaaattgtgttgtttatgaaatggagtgacaacaaggacgacattctgaaggggggagacgtggtccggctgtttcacgctgaacaggagaagtttcttacatgtgacgaacataggaaaaaacagcacgtattccttaggaccacggggagacagagcgccactagtgccacatctagtaaggccctctgggaagttgaggtcgtgcagcacgatccttgtcgcgggggtgccggctactggaatagcctgttcaggttcaaacacctggccacgggccactaccttgctgcagaagtggaccccgaccaggacgcgagccgctcccgcctgcggaacgcccaggagaagatggtttactccctagtgtccgtacccgaaggaaacgatatctctagcatcttcgagctcgatcctactacccttagagggggcgatagtctcgtgcccagaaatagttacgtacgtctgcgccatctctgcacaaatacatgggtgcactccacaaacattccaatcgataaggaagaagagaagccagtgatgctcaaaattggaacctctccagtgaaggaggacaaagaggcctttgccatcgtgcccgtgtcccctgccgaagtaagggacctggactttgcgaacgacgcttcaaaagtgctgggtagtattgccggcaagttggagaaaggcacaataactcagaacgaacgtagatccgtcactaaactgctggaggacctcgtgtatttcgtgacagggggcactaattccggccaggacgtactggaggtagtcttctctaagccaaatcgtgagaggcagaagctgatgagggagcagaatatactaaaacaaatcttcaaacttctgcaggcaccgtttacagactgcggagacggacctatgctaaggctggaggaactgggtgaccagcggcatgctcccttccgacatatctgtagactttgctaccgggtgcttcgccatagtcaacaagactaccgcaagaatcaggaatacatcgctaagcaatttgggttcatgcagaagcaaatcgggtatgatgtgctagctgaggatacaataaccgctctcctgcataacaatagaaagctgttggagaaacacattaccgctgccgaaatagacacttttgtcagccttgtcagaaagaatcgggaaccccgttttctggattatctcagcgacctgtgcgtgagcatgaacaaaagtattcctgttactcaagaactgatttgtaaagctgtgttaaatccaacaaatgctgatattctgatcgagacgaagctggttctatcacgctttgagttcgagggcgtgagttccactggcgagaacgccctggaggcaggggaggacgaggaagaagtctggctgttctggagagatagcaacaaagagattcgctccaagtcagtccgcgaattggctcaggacgccaaagaagggcagaaggaagacagagatgtgctgtcatattatcgctatcagctgaacctgtttgcccgaatgtgtctagatcgccagtacctggctatcaacgaaatcagcggccaactggatgtggatctgatcctgagatgcatgtctgacgagaacctgccctatgacttgcgggcatccttttgtcgccttatgctgcacatgcatgtggatcgtgacccccaggagcaggtgacacctgtaaaatacgctcgcctctggtctgagataccttctgagatcgcaattgatgattacgactctagcggggccagcaaggatgagattaaggaacgcttcgctcagaccatggaatttgtcgaggaatatctgagagatgtggtgtgtcaaagatttcccttcagtgacaaggaaaaaaacaagctgactttcgaggtggtcaacctcgcccgcaatctgatttattttggtttttataacttttcggatctgcttcgcctgactaaaatcctcctggccattttggactgcgtgcatgtgaccacgatattcccaatctccaagatggccaaaggtgaagagaataagggcaacaacgacgttgagaaactgaagtcctcaaatgttatgcgcagcatccacggagtgggcgagttgatgacacaggtcgttctgcggggtggcggatttctccctatgacaccgatggccgccgctccagaaggaaacgtgaaacaagcagagccagaaaaggaggatattatggtgatggataccaaactcaagattattgaaatccttcagttcatcctgaatgttagacttgattatcgaatatcgtgccttctctgtatatttaaaagggagtttgatgagtccaactcccagacctcagagacctcttccggcaactcttctcaggagggcccgagcaacgtccctggggccctggactttgaacatattgaagagcaggcagagggcattttcggcggctccgaggaaaacacacccttggatttagatgatcatggcggccggacattcctgcgggttctgctgcacctgaccatgcacgactaccctcccctggtttccggcgccctgcagttactgttccgccatttttcccagcgccaggaggtgcttcaggcattcaagcaggtgcagttgctagtcacatcacaagacgtggacaactacaagcagattaaacaggatctcgatcagcttcgcagtattgtggaaaagagcgagctctgggtctacaagggacagggacccgacgaaactatggatggggctagtggcgagaatgagcataagaagactgaggaggggaataacaagccgcaaaagcacgagtccacatctagctacaactaccgggtagtaaaagagatccttatccgactgagcaaactgtgtgtccaggaatctgctagcgtgagaaaaagtcgaaagcagcagcaacgtctcctcaggaatatgggtgcacacgccgtggtgctagagttgttacagataccgtatgaaaaagcagaagacacgaagatgcaggaaatcatgcggttggcccacgaatttctgcagaacttctgtgccggaaatcagcagaatcaagccctccttcataagcacattaacctgtttttgaaccctggcattcttgaagccgttacaatgcagcacatcttcatgaacaactttcagctgtgctccgagatcaacgagcgcgttgtgcagcacttcgtccactgcatagagacccatggtcgcaacgtacagtatattaagttcttacagactatcgttaaggccgaaggcaaattcattaaaaagtgccaggatatggtaatggcggaattagtcaatagtggcgaagatgtgctggtgttctacaacgatcgtgcttctttccagaccttaatccagatgatgcggtctgagagggacaggatggatgagaacagcccactgatgtatcatatccacttggtcgaactgttggcagtgtgtaccgaggggaagaatgtgtacaccgaaattaaatgcaacagtctgctcccactcgacgacattgttcgcgtggtcacccacgaagactgcattcccgaggtaaagatagcgtacattaattttttgaaccactgctatgtggatactgaagtggaaatgaaggaaatctacacatctaaccatatgtggaaactgttcgagaacttcctggtagatatttgcagagcatgcaacaatacttccgataggaaacacgctgactccattctggaaaaatacgttaccgagatcgtcatgagtatcgtaacaacgttcttctcatctcctttttccgatcagtccacgacactgcagactcgccaaccggtcttcgtccagctgctgcagggtgtgtttagggtttaccattgcaactggctgatgccctctcagaaggcatcagtagagagctgtatccgcgtgctgagcgatgtagccaaaagtcgcgccatagccattccggtagacctcgacagccaagtgaacaatctgtttctgaaaagccattcgattgtccaaaagaccgccatgaactggagactgtctgcacggaatgctgctcgcagggatagtgtgctcgccgcaagtcgagattaccggaacataatagaaagactccaggatatcgtttcagctctggaggataggctccggcctcttgtacaagcggagctgtctgtgctcgtggatgtactgcatagacctgagctgctcttcccagagaacactgacgcccgtcggaaatgtgaatccggcggcttcatttgcaagctgatcaagcacactaagcagctgttggaggagaacgaggagaaactttgcataaaagtgctacaaaccctgcgcgaaatgatgaccaaagatagagggtatggagagaagctcatatccattgatgagctggataacgcagagctgccgcctgcccccgactcagagaatgccaccgaagaactggagccaagcccccctctgaggcagttggaggatcacaagcgcggcgaagcattgagacaggtgctggtaaaccgatactatggaaatgtgcgtcccagtggacgccgtgagtcacttacatcattcggcaacggtcctctgagcgcgggcggtcccggtaaacccggggggggcggaggtggatctggctcttccagcatgagtcggggcgaaatgtcactggctgaagtccaatgccatctggacaaggagggggcttcaaacctagtcatcgatttgattatgaacgcttcatctgatcgcgtgttccacgagtccatcctgctcgctatagccctcctggaaggaggcaatactaccatccagcactccttcttctgccggttgacagaagataagaagtctgaaaaattcttcaaggtgttctacgatcgcatgaaggtcgcgcagcaggagattaaagcaactgttaccgttaatactagtgacttgggcaacaaaaagaaagacgacgaggtggaccgcgacgcgcctagcagaaaaaaggcaaaagagcctaccacccagataaccgaagaggtgcgcgatcagttgttggaggcaagcgctgccacgcgaaaagcgttcaccacattccggcgagaagccgaccccgatgaccattaccagccaggagaaggtacgcaggccacagctgataaagccaaggatgatctggagatgagtgccgtgatcacaatcatgcaacctatactgcggtttctgcagctcctatgtgaaaaccataacagagatctccagaacttcctcagatgccagaataacaagaccaattataatctggtgtgcgagaccttacagtttctcgactgcatttgtggctccactacaggcggcctaggtctcttgggcctgtatattaacgaaaaaaacgtcgctctaatcaatcagaccctcgagtccctgaccgagtattgtcaggggccctgccacgagaatcaaaactgtatcgctacccacgagtctaatggcattgacatcattaccgccctgatactcaatgacattaacccccttggcaagaaaagaatggatctggttctagagttaaagaacaacgcctcaaagctcctcctcgcgattatggaatctagacatgactcggagaatgccgagcgcatcctctacaacatgagaccaaaggagctcgtggaagtaattaaaaaggcctatatgcaaggggaagtcgagtttgaggatggggaaaacggtgaggatggtgcggcctcccctagaaatgtgggccacaatatttatatccttgcacaccagctggcacgtcacaataaggaactacaatctatgctcaagccaggaggccaagttgatggtgacgaggcactggaattttacgctaagcatactgctcaaatcgagatcgtgcggctggaccggacaatggagcaaatcgtattccctgtgcctagcatctgcgaatttctgacgaaagaatccaaacttagaatttattacacgaccgaacgagacgaacagggttctaaaatcaatgattttttcctgcgatctgaagacctcttcaacgaaatgaactggcaaaagaagctgcgtgcccagcccgtgctgtattggtgtgcaaggaatatgagtttttggtcttctatcagttttaacctcgctgtcctcatgaacttgttggttgcgttcttctaccctttcaaaggagtcagaggcggcaccttggagccacattggtccggactgctgtggaccgctatgctcattagtcttgccatcgtgatagctctgcctaagccccacggcattcgggcactgatcgcatcaaccatcttgagactcatattttccgtgggactgcaaccgactctgttcctgctcggcgcctttaatgtctgcaacaagataatcttcctgatgtcctttgtgggaaattgcggcacttttacacgcggctatagggcaatggttctagacgtggagtttctgtaccacctactttatctggttatttgcgcaatggggctgtttgtgcacgaattcttttacagtctgctgctgtttgacctggtctatagagaagagacgctcctgaatgtgattaaatcagtaacccgcaatggtcgttccataatcctcactgctgttctcgcccttatcctggtgtatctgttcagtattgtcggctacctgttctttaaggacgacttcatactggaggttgaccggctcccaaacgaaactgctgtcccggagaccggggagtcgcttgccagcgagtttctgttcagcgacgtgtgtagagtcgaaagtggcgaaaactgcagctctcccgctcctagggaggaattggtgcccgctgaagagactgagcaagacaaagaacacacctgcgagacgctcctgatgtgcatagtcacagtcttgtcccacggactcaggtctggcggcggggtgggagacgtgctgcggaagccatctaaggaagaacctctcttcgctgcccgcgtgatttatgatctgctgttcttttttatggtgattataatcgtgctcaacctcatttttggcgttatcattgatacttttgcagatctacgctctgagaagcaaaagaaagaagagatcttgaaaacaacttgtttcatttgcggcctggaacgggacaagttcgataataaaaccgtgactttcgaggagcatattaaagaagaacacaatatgtggcactatctgtgttttatcgtgttggtcaaggtgaaggattcgacagaatacacaggaccagagtcctatgtggcggagatgatcaaggagagaaacctcgattggtttccacggatgagagccatgagtctggtgtcttcagattccgagggggagcagaacgagctcaggaatctgcaggaaaaattggagagcaccatgaaacttgtgactaatctcagcggacagctaagcgagctgaaagaccaaatgacagaacagagaaagcaaaagcaacgcatcggccttttgggacaccccccccacatgaatgtgaatcctcaacagccagcgtag

SEQ ID NO: 191393 - DNA, 8088 bp, synthetic construct
  misc_feature 1..8088: note = Description of Artificial Sequence: Synthetic coding sequence
  source 1..8088: mol_type = other DNA
atgagcgacaagatgagcagcttcctgcacatcggcgacatctgcagcctatacgccgaaggcagcaccaatggctttatctccaccctcgggttggttgacgaccggtgtgtggtgcagcccgaaaccggcgatctgaataatccccccaagaaattccgcgactgcctttttaaactctgtccaatgaatcgctactctgcccagaagcagttctggaaagctgcaaagcccggcgctaattcaactactgatgctgtgttgcttaacaaactgcaccacgctgctgatctagagaagaaacagaatgagaccgaaaacagaaagctcctggggacagtgattcagtacggcaatgttattcagctgctacacctgaaaagcaataagtatttaactgtcaacaagcgcctgcccgctctgcttgaaaaaaacgcgatgcgggtgactctggacgaagctgggaatgaaggctcctggttttacattcagcccttttacaagctccggtcaattggagacagcgtggtgatcggtgacaaagttgtcttgaatcccgttaacgcgggtcagccccttcacgctagcagtcaccaactcgttgacaaccccggatgtaatgaggtgaatagtgtgaattgtaatacctcatggaagatcgttctgtttatgaagtggagcgataataaggacgatatactcaaggggggggacgtggtgcgcctgtttcatgctgagcaggagaaattcttgacttgcgacgagcaccgcaaaaagcagcacgttttcctgaggactaccggcaggcagtctgccactagtgctacctccagcaaagccttgtgggaagtggaggtggtccagcacgacccctgccgggggggagccggatactggaactcactgttccgatttaagcacttggccacaggccactacctggctgccgaagttgaccccgaccaggacgcaagtcgctcacgcttaagaaatgctcaggaaaagatggtctattccctggtgtcagtgccggagggaaatgatatctcctcgattttcgaactggatccaacaaccctgcgaggaggagattctctcgtccctcggaattcatatgtccggttgcggcatctttgcaccaatacctgggtgcactccactaacattcccattgacaaagaggaggagaagcccgtcatgctgaagatcggtacaagccctgtcaaagaggacaaagaagctttcgcaattgtccctgtgagtccagccgaggttcgcgacctagacttcgcgaatgacgcctcaaaagttcttggaagcatcgcggggaagttggagaagggcacgataactcagaacgagcggagatccgttactaagctcctggaagatcttgtttattttgtaacaggtggaactaactctgggcaggacgtcctcgaagttgtgttcagcaaacctaaccgggaacggcagaagcttatgcgggagcagaatatactaaagcagatcttcaagctacttcaggcaccttttaccgactgtggagatggtcctatgcttaggctggaggaactgggagaccaacgtcatgccccttttcggcacatctgcaggttgtgctaccgggtgctcaggcactcacaacaggattaccggaagaaccaggagtacattgctaaacagttcggtttcatgcagaagcaaatcgggtatgacgtcctggcagaggacactataaccgcactgctgcacaacaacaggaaactactggaaaagcacatcaccgccgccgagatcgatacgtttgtgagtctagtgcgtaagaacagggagccccgatttctagactatctctctgatctgtgcgtatctatgaacaagagcattcccgtcacgcaggagttgatttgcaaagcagtactgaacccaaccaacgccgacatcctcatcgagaccaagctggtcctatcacggtttgaattcgaaggtgtctcatccacgggggagaacgcgctggaggcaggggaggacgaggaggaagtctggctcttttggagagacagtaacaaggaaattcgcagtaagtctgttagagaactggcgcaggatgcgaaagaaggccagaaggaagatcgggatgtcctgtcatattaccgctaccaattaaacctgttcgctcggatgtgcctagaccgacaatatctggccataaatgaaataagcgggcagcttgatgtggacttgatcttgcgttgcatgtctgatgaaaatctcccgtacgacctacgagcaagcttctgtcggctgatgttacacatgcacgttgacagagaccctcaggagcaggtcaccccagtaaaatacgcccgtctatggagtgaaattccatcagagatcgctattgatgactatgattcttcaggagcatctaaagatgaaataaaagagcgcttcgctcagaccatggaattcgttgaggaatacttgagggatgtcgtctgtcagcgctttccttttagcgacaaagaaaagaataaactgaccttcgaagtggttaacctcgcgcgcaatctgatctactttggcttttacaacttttcagacctccttaggttaaccaagatcctactcgctattctggactgcgtgcatgttacaaccatatttccaattagtaagatggctaagggggaagagaataaaggctccaatgtgatgcgaagtatccatggtgtgggagagctgatgacccaagtggtgctcagggggggaggattcctaccgatgacccccatggcagccgccccagaaggtaatgtcaagcaggccgagcccgagaaggaggacatcatggtcatggacacaaagcttaaaattattgaaattttgcaattcatcctgaatgtccgcctcgactaccgcatctcctgcctactgtgtatttttaagcgagaatttgacgagtccaacagccagacaagcgagaccagcagtggcaactccagccaggaagggcccagcaacgtcccaggtgcactggatttcgaacacattgaagagcaggctgaaggcatcttcgggggctccgaggagaatactcccctggacctcgatgatcacggcggacggactttcttacgcgtcctgctccacctaacgatgcatgactaccctcccctagtgtccggggctctgcagctcttattcagacacttttctcagcgacaggaggtgctgcaggcgtttaaacaagtacagctgctggtcacttcacaggacgtggacaactacaagcaaatcaagcaggatcttgaccagttgagaagtattgtggaaaagtcggaattgtgggtttacaaaggacaggggccagacgaaactatggatggcgctagtggggagaacgagcacaagaagaccgaagaaggtaacaataaacctcagaagcatgagtctacatcttcctacaattacagggtggtgaaagagatacttatccgtttgtcgaaactctgtgtacaagaatctgcctctgtgaggaaaagccggaaacagcagcaacgactgttgcgaaacatgggtgcacatgctgtggtcttggaactgctgcagattccctacgaaaaagccgaggataccaaaatgcaggaaatcatgcgattggcgcacgaattcctgcagaacttttgcgcaggcaatcagcagaaccaggctctgttacacaagcatataaatctcttccttaacccgggcattttagaagcagtgaccatgcagcatatcttcatgaacaacttccaactttgctcagagattaacgagcgtgtggtgcaacactttgttcattgcattgaaacccacggccgaaatgtgcagtacattaaattcttgcagacaattgtgaaagctgagggcaaatttatcaaaaagtgccaggacatggtgatggccgagcttgtgaacagcggagaagacgttctggtgttctacaacgaccgcgcctccttccagacactgatccagatgatgcggagcgaaagggaccgtatggacgagaattccccactgatgtatcacattcacctcgtcgaactactggccgtgtgcaccgaggggaagaacgtttatactgaaatcaagtgcaacagtctgctacctctcgatgacattgtacgggtggtgactcacgaagattgtattcccgaggttaagatcgcctacatcaacttcctgaaccactgttatgtggacaccgaagtggagatgaaggaaatctacactagtaatcacatgtggaaactcttcgagaatttcctcgtggatatttgtcgcgcatgcaacaatacaagcgacagaaaacacgcagactccatactggagaagtacgtaactgagattgtcatgagcatcgtgacgacattcttcagcagcccctttagtgaccagtccacaaccctgcagactagacaaccagtctttgtccaactgctccagggggtgtttagggtataccactgcaactggctcatgccatcccagaaagcctcggtggaatcctgcatcagagtgctcagcgacgtcgcaaagtcgcgggctatagcaatccccgtggatctggattcacaggtgaacaatctatttctcaagtcacactccattgtccagaagaccgcgatgaattggcgcctgagtgctagaaacgcagcccgccgcgactccgttttagccgcatctcgtgactacaggaatatcattgagaggctgcaggacatcgtgagtgcactggaagaccgcttgcggccgttagtgcaggcagaactgtcagtgctcgtggatgtcctccaccggccggagttgcttttccccgagaatactgatgcacgaaggaagtgcgagagcgggggctttatctgtaaattgatcaaacataccaagcaacttcttgaagaaaatgaagagaagctgtgcatcaaggtgctccagacactgagggagatgatgactaaggaccgggggtatggagagaaaggtgaggctctgaggcaggtcttagttaataggtactacggcaacgtacggccgagtgggagacgcgaaagtcttacatccttcgggaacggcccgctcagtgcgggcgggccaggtaaaccgggaggggggggcggggggtccgggtcgtctagtatgtccaggggcgagatgtccctggccgaggtgcaatgccatctcgacaaagaaggcgcgtctaacctagtgatcgatctgattatgaatgcctcttccgacagggtcttccacgagagcattctcctcgccatcgcccttctagagggcgggaatactacaatccagcattccttcttctgccgactgacagaggataaaaagtccgaaaaattttttaaggttttctacgaccggatgaaagtggcgcagcaggagattaaagctactgtcacagtaaacacttccgatctgggaaacaaaaaaaaggacgatgaagtggatcgggatgccccatctcgcaaaaaagccaaggagcccactactcagataaccgaggaggtgcgcgatcagctgctagaggcttctgccgccacgagaaaggccttcacgacgtttcgtcgagaagccgatcctgacgaccactatcagccaggagagggtactcaggcaacggccgataaagccaaggacgatcttgaaatgagcgccgttatcacaatcatgcagccaatcctgaggttcctacaattgttgtgcgaaaatcataatagagacttacagaactttttgcgctgtcagaacaacaaaacaaattacaatctcgtctgcgagacactgcaattcctagattgtatttgcggctccacaacaggggggttgggtctccttggcctgtacatcaacgaaaagaacgtggccctaattaaccagacacttgagagccttacagaatactgtcaaggcccctgccacgagaatcagaactgcatcgcgactcacgagagtaatggcattgacatcatcacagcactcatactaaatgatattaatccactgggtaaaaaacgtatggatctcgtgctggagctgaaaaacaatgctagcaagctgctgctggctattatggagagtcgacacgacagcgaaaacgcagagcggatcctgtacaatatgagacctaaagagttggtggaggtaattaaaaaagcctatatgcagggcgaagtggaatttgaggatggtgaaaatggcgaggacggagcggcgtctcctcggaatgttggtcacaacatctatatccttgcccatcagctcgcccgccacaacaaagagctgcaatccatgttgaagcccggtggccaggttgatggcgatgaagcgttggaattctacgcaaagcacacagctcagatagagatcgttagacttgatcgcactatggagcagatagttttcccagtgccgagtatatgcgagtttcttacaaaagagtcaaaactgcggatttattatacgaccgaacgggatgagcaagggtccaagattaatgacttctttttgaggagtgaggacctgtttaatgaaatgaattggcagaaaaagctgcgcgcacaaccagtactgtactggtgcgctaggaatatgtcattttggtcttccatctcattcaatctggccgtgttgatgaatcttttggtggccttcttttacccgttcaagggcgtccgaggcggcacactcgaaccacactggagtggccttttgtggacagccatgctcatatccctcgcaattgtgattgcgctcccaaaaccacacgggatacgtgccctgattgccagcaccatattgcggttaatctttagcgtggggttacaaccaacactttttctgctgggtgccttcaacgtgtgcaacaaaatcatctttttgatgtctttcgtagggaactgtggtactttcacacggggctatcgtgcaatggtgttggatgttgaattcttgtatcacctgctgtacctggtcatctgcgctatgggcctgtttgtccatgaatttttctactccctgctattgttcgaccttgtgtaccgggaggagaccttattaaacgtcattaaatccgtcactagaaatggcagatccatcatactgactgccgtactggctctcattctcgtgtacctgttctcaatcgtcggttatcttttcttcaaagacgatttcatcctggaggtggatcgtctacccaatgagaccgccgtgccagaaactggggagagcctggccagcgagtttctctttagtgatgtgtgcagagtcgaaagcggggagaactgtagtagccccgccccccgggaggagcttgtacctgcagaggagacggaacaagacaaagagcacacttgcgaaaccttgctgatgtgtatcgttacggttctgagtcacgggttaagatcaggtggaggagttggggacgttctgagaaagccatccaaagaggagcctctctttgccgctcgagtcatctatgatctgctgttcttctttatggttattatcatcgtcctgaacctgatttttggcgtgattatcgataccttcgcggatcttaggagcgagaagcagaagaaagaggaaatcctgaagaccacctgttttatttgcggactggagcgagataagtttgacaataaaacggtgacctttgaagaacacattaaggaagagcacaacatgtggcactacctgtgctttattgttctggtcaaggtgaaggattccactgagtacacgggtcctgaaagctatgtcgctgagatgatcaaagaacgcaatcttgactggtttcctagaatgcgggccatgtctctggtctcatcggactcagagggggagcaaaatgagctgcgaaacttgcaagaaaagctggaatcaactatgaaactggtaacaaatctgtctgggcaactgtcagaactgaaggaccagatgaccgaacaacgcaaacagaaacaaagaatcgggctgctcgggcaccccccacatatgaatgttaatcctcaacaacctgcgtag

SEQ ID NO: 191394 - DNA, 2166 bp, synthetic construct
  misc_feature 1..2166: note = Description of Artificial Sequence: Synthetic coding sequence
  source 1..2166: mol_type = other DNA
atgagcgacaagatgagcagcttcctgcacatcggcgacatctgctctctttatgccgagggctcaacaaatggcttcatcagcactttggggctcgttgatgacagatgcgtagtccagccggaaaccggcgatctgaacaatccgcctaagaagttcagagattgtttatttaagttatgccccatgaacaggtacagcgcccaaaagcaattctggaaagctgctaaaccgggtgccaattccactaccgacgctgtgctcttgaataaactgcatcacgccgcggatcttgagaagaaacaaaatgaaaccgaaaacagaaagctgctgggcaccgtcattcagtacggcaatgtcattcagttactacatttgaagtccaacaagtacctgaccgtgaataaacgcctgcctgctctgctcgaaaaaaacgctatgagggtgacattggacgaggccggcaatgagggaagttggttttacattcagcctttctacaaactccggtctattggtgactctgtggtgataggcgacaaggttgttctcaatccagtgaatgccggacagcctctgcacgcctcaagtcaccagctggtggacaatcccggttgtaatgaagttaatagcgttaattgcaacacatcctggaagattgtactgttcatgaagtggagtgacaacaaggacgacatcctgaaagggggagacgtcgtgcgactattccatgccgagcaggagaagttcctgacctgtgatgagcacaggaagaaacagcacgtgtttctgcgaactacaggcaggcagagtgcgacgtcagcaacttcttcaaaggcattgtgggaagtagaagtcgtgcagcacgacccatgcaggggcggcgccggatactggaatagtctgtttcgcttcaagcacttggcaaccggacactaccttgctgccgaagtagaccctgatttcgaagaagagtgtctggagttccagcccagcgtttgcaataaaatcattttcctgatgagctttgtcggcaattgcggcacttttacacgggggtatcgtgctatggtcctggacgtagagtttctgtaccatctgttatacctggtaatttgtgccatgggccttttcgtccacgaatttttttacagcctcctgctctttgacctcgtctatcgcgaagagactttattgaacgtgatcaagtcagtcaccagaaacggccgatcaataattctgacagctgttctggctctgatcctcgtatacctctttagcatagtgggttatctctttttcaaggacgacttcatcctggaggttgataggctgcccaacgagaccgcagtgcccgaaaccggcgaatcactggcaagtgaatttctgttctcagacgtctgcagggtggaaagcggcgaaaactgttcatctcccgctccacgagaggagctagtgcccgcggaagagacagaacaagataaggaacacacctgcgaaacgctcttaatgtgtatcgtcacagtcctgagccacggtctgaggtccggtgggggggtgggcgacgtactgcgaaagccttctaaggaggaacctcttttcgccgcacgggttatctatgacctgctcttcttcttcatggtaataatcatcgttctgaacctgattttcggtgttatcatcgacacttttgctgacctgcgatcggagaaacaaaagaaagaagagatcctgaagaccacatgcttcatctgcggtctcgagcgggacaagtttgataataaaactgtaacatttgaggagcacattaaagaagagcataatatgtggcactatttgtgcttcattgtgctcgtgaaggttaaagactcaacggagtatacggggccggagagttatgtggccgagatgatcaaagagaggaatctggactggttcccaagaatgagagcaatgtccctggtgtccagcgactcagagggagagcagaacgagctgcgcaatttgcaggaaaaattagaaagcactatgaaattagtgacgaatttgagcggacagttatctgagctcaaggaccaaatgacggagcagagaaaacagaagcagcgcattggcctcctcgggcacccacctcacatgaacgtaaacccacagcagccagcctag

SEQ ID NO: 191395 - DNA, 546 bp, synthetic construct
  misc_feature 1..546: note = Description of Artificial Sequence: Synthetic coding sequence
  source 1..546: mol_type = other DNA
atgaccgagaagatgagcagcttcctgtacatcggcgacatcgtgtccctgtatgccgagggcagtgtcaatggttttatttccaccctgggactggtggacgaccgctgcgtggtccaccccgaggccggagacttggccaaccctcccaagaagttccgggattgcctgtttaaagtgtgcccgatgaacagatattctgcacagaagcagtattggaaggctaagcaggctaagcaaggaaaccacacagaggcagccctgctgaaaaaactgcaacacgctgcggaattggagcaaaagcagaacgagagcgagaataaaaaacttctcggcgagatcgtcaagtattcaaatgtcatccagctcctacacatcaagtctaataagtatctgacagtgaataagaggttgcccgcactgttggagaaaaacgccatgagagtgagcctcgacgctgccggcaacgagggctcttggttttacatacaccccttctggaagttgcggtcggagggagataatgatgccagcttctggatttag

SEQ ID NO: 191396 - DNA, 8106 bp, synthetic construct
  misc_feature 1..8106: note = Description of Artificial Sequence: Synthetic coding sequence
  source 1..8106: mol_type = other DNA
atgaccgagaagatgagcagcttcctgtacatcggcgacatcgtgtcgctttacgccgaaggatccgttaacggtttcatatccaccttgggcttggttgacgaccgctgcgtcgtgcaccctgaggccggcgacctggccaatccccccaaaaagtttagggactgtctctttaaggtgtgccccatgaacaggtattctgctcagaagcagtactggaaagctaaacaagccaagcagggtaaccacaccgaggccgcgctgctgaaaaaactccagcatgccgccgaactcgagcagaagcagaatgagagcgagaacaagaagctgctaggggagatcgtcaaatattcaaatgttatccagctcctccacatcaagtcaaataagtacttgaccgtgaataagcgcctgcctgccttactcgaaaaaaacgcgatgagagtgtcccttgacgcagccggaaacgagggcagctggttctacattcatcccttctggaaactccgctccgaaggcgataacatcgtggtaggcgataaggtggtgttgatgcccgtgaacgcagggcagcctttgcacgcatccaacatcgaactcctagacaatcctgggtgtaaggaagtcaacgccgtgaattgcaatacttcctggaagattactctcttcatgaagtatagctcttacagagaggacgttctgaaaggcggggatgtggtccgattgtttcatgctgaacaggagaaatttctcacttgcgatgagtacgagaagaagcagcatatttttctacgcacaaccctgcggcaaagcgccacatcagcaacttcctctaaagcgctgtgggaaatcgaagtcgttcatcacgatccgtgccgaggaggagccggtcagtggaatagccttttccgcttcaaacacttggctacagggaactatctcgcggccgaactgaatcctgattacagagacgctcaaaatgagggtaaaaatgtcagagatggggtgccgcctacttccaaaaagaaacgtcaggccggtgaaaaaataatgtatactctggtttctgtgccccacggtaatgacatcgccagtctgtttgagcttgacgctactaccttgcagcgtgccgactgcctggtgcctagaaacagttacgtgagacttcgtcacttgtgtaccaacacctgggtcacaagcaccagtatccccattgacaccgacgaagagcgccctgtcatgttaaagattgggacatgtcagaccaaggaggacaaggaggcattcgcgatcgtctctgttccattaagcgaagtaagagacctggactttgctaatgacgcaaataaggtgctggccacaactgtgaaaaaactggaaaatggtactattacacagaatgagaggcggttcgtcacgaagcttcttgaggacctcattttctttgtggccgatgtaccaaacaacggccaggaggtgctcgacgtagtcattaccaagccaaacagagaacgccagaaactaatgagggagcagaacattttggcacaggtttttgggatcttaaaggcacccttcaaagaaaaggccggcgagggtagtatgctgcggctcgaggatctgggcgaccaacggtatgccccgtataaatacatgctgcgtttatgctatagagtcttgcgtcacagccagcaggattaccgcaaaaatcaagaatacatagctaaaaacttctgcgtgatgcaatcccagataggctatgatattcttgctgaagataccattactgctctgctccacaataatcgcaagctactcgaaaagcatatcactgccaaggaaattgagactttcgtgtctcttttgcggagaaatagggaaccaaggtttctcgactatctgtctgatttgtgtgtgagtaacactactgcaatacctgtgacacaggagctcatctgcaagtttatgctgtcgccgggcaacgctgacattctgatccagacgaaggtggtctcaatgcaggcggacaatcccatggagtcaagtatcctatccgatgacattgacgatgaggaagtttggctctactggatcgactccaataaagagcctcacggcaaggcaatccgccacctggcgcaagaagctaaagaggggactaaggccgatctggaagtcctgacatattatcgatatcaactcaacctcttcgcccgaatgtgtctggataggcagtatctggctatcaatcagatctctactcagctgtccgtggacctgattttacgatgcgtgtcagacgaaagcttgccatttgacctccgtgccagtttctgccgtctgatgctacacatgcacgtggatcgcgatcctcaggagagtgtggtaccagtgcgctacgctaggctgtggaccgagatacccactaaaatcacgatccatgagtacgattcaataactgattcaagtaggaacgatatgaaaagaaaattcgctctgacaatggagttcgtcgaagaatatttaaaagaggttgtgaatcagccttttccatttggagataaggaaaaaaataaactgaccttcgaagtcgtccacctcgcccggaaccttatatattttggattttacagctttagcgagttactgagactaaccaggacactgctggccatcctggatattgtccaggctcccatgtcaagttatttcgagcggttgtccaagttccaggatggcggtaacaacgtcatgagaacaatccacggcgtgggtgagatgatgactcagatggtactcagcagagggtcaatttttcctatgtctgtcccggacgtgccaccgtctattcatcctagcaaacaagggagtcccacagagcatgaggatgtgacagtgatggataccaagctcaagatcatagagatcttacagtttattctgagtgtgaggctagattatagaatatcttatatgctgtcaatttacaagaaggagtttggagaggataacgacaatgcggagacgagcgcctccggaagccccgataccttgctgcccagcgccatagtgccagacatcgatgaaattgctgcacaagctgaaacaatgttcgcaggaaggaaagaaaagaatccagttcagctggacgatgagggtggccgcacctttctgcgagtgctgattcacctgatcatgcacgattaccccccactgctgtctggcgctcttcaactgctcttcaagcacttctcacagagagcagaagtgctacaagcttttaagcaggtccagctgctcgtcagcaatcaggatgtcgataattacaagcagatcaaggctgaccttgaccagctgaggctaacagtcgagaagagtgagctctgggtggaaaagtcatccaactatgagaatggggaaatcggggagagccaggtgaagggaggggaggaacccatcgaggaatcgaacatattaagccccgtgcaggatggaaccaaaaagccccagatagattctaataagagtaataattatcgcatagttaaagagattctcattagactgagtaaactctgtgtgcaaaacaagaagtgccgaaatcagcaccagcgcctgctcaaaaacatgggggcccactccgtcgtcctcgatcttttgcagatcccttacgagaagaacgacgagaagatgaatgaggtgatgaatctggctcatacttttctgcagaatttttgcagggggaatccccagaatcaggttttgctgcacaagcacctgaacctgttcttaacccctggtctgctggaagcggagaccatgcgccacatttttatgaataattaccatctgtgtaacgagatctctgaacgagtggttcaacactttgtacactgtattgagacccacggccggcatgtggaatatctccgcttcctgcagacaattgtaaaggccgatggaaagtacgtcaagaaatgtcaagatatggtgatgactgagctgattaatggtggggaagacgttctgatcttctataacgacagagcctcattccccattcttcttcacatgatgtgtagcgaaagagacagaggtgatgagagtgggcccctcgcttaccatattacgcttgtcgaactgctcgctgcctgtaccgagggcaagaacgtgtataccgagatcaagtgcaattctctcctcccactggacgacatcgtacgggtggttacgcatgatgattgcattccggaggttaaaatcgcctacgtgaattttgttaatcattgttatgtggacacagaggttgaaatgaaagagatttatacatccaatcacatttggaagctgttcgagaactttctggtcgatatggcacgagtctgcaacacaaccactgatagaaagcatgccgatatctttttggaaaaatgtgtcacggaatcgataatgaatattgtctctggcttctttaattcacccttttcggataattctacctcccttcagacacatcagcctgtatttatccagctgctgcaatcagcattccgcatctataattgtacctggcccaatcctgcgcagaaggcttctgtcgagtcctgtattaggacccttgccgaggtcgccaaaaatcgtgggatcgctatcccagttgacttggactcacaggtgaacaccctgtttatgaagagccacagcaacatggtacagagggccgccatgggctggagactatcggcccgctccggcccgcgttttaaggaggccctcggcggtccagcctgggactaccgaaatatcattgaaaagttgcaagatgtggtcgctagtttagaacaccaattttctcccatgatgcaggcagagttcagcgttctcgtggatgttctttatagtcctgagctcctgttccctgagggctccgacgctcggatccgttgcggagcttttatgagcaaactcataaaccatacaaaaaaactcatggagaaagaggagaaactctgcataaaaattctacagaccctgagggaaatgttggagaaaaaagattcttttgtagaagagggaaacaccctccgcaaaattctgctcaacagatactttaagggggattatagcatcggcgtgaatggtcacctgagcggtgcttatagtaaaacagcccaagtgggcggatcattcagcggccaggacagcgataagatgggtatcagtatgtctgacatacagtgtctgttggataaggaaggggcgagtgagctggtgattgacgttatcgtcaacacgaagaatgataggattttttccgaaggcatcttcctcggtattgcgttactcgaggggggcaatacccagacacaatactccttctatcagcaactgcacgagcaaaaaaagagcgagaagtttttcaaggttctctacgaccggatgaaggcagcccagaaggagattcgctccaccgtcacggtaaacactatcgacttaggaaacaaaaagagggatgatgacaacgagcttatgacctcagggccccggatgcgagtgcgggacagcacgttgcatctcaaagaggggatgaaaggacagctcactgaagcatcaagcgctacctcgaaggcatactgcgtgtaccgacgagagatggatccagagatcgacattatgtgtaccggaccggaggcaggtaacacggaggagaagtcagctgaggaagtaactatgtcaccggctattgccataatgcaaccgatcctgaggtttttgcagcttttgtgcgaaaatcacaaccgtgaactacagaacttcctgagaaaccagaacaacaagaccaactacaaccttgtctgcgaaaccctgcaatttctagactgcatttgcggctcgacgaccgggggactgggtctgttagggctctatataaacgaaaagaacgtagctctggtcaatcagaatcttgagtcgctcacagagtactgtcaagggccctgccacgaaaatcagacctgtatagctacacacgagtccaacggaatcgatattattatagcactgatcctgaacgacataaaccccctgggaaagtatcggatggacctggtcctccagctaaagaacaacgcaagcaagctgctgttagcgattatggagtcccgtcatgattctgagaacgccgaaagaatcctgtttaacatgaggccacgagaactcgttgacgttatgaagaatgcctataatcagggactcgagtgcgaccatggcgatgatgaaggtggggatgacggcgtgtcgccaaaggacgtcggccataatatatacattttagcccaccagctcgcacgccacaataaattgctgcagcaaatgctcaagccaggatccgatccagatgaaggagatgaggcactgaagtattatgctaatcacactgcccaaattgagatcgtgaggcacgatcgcacgatggaacaaatcgtgtttcccgtacctaacatttgtgaatatctgacccgggaaagtaaatgcagggtcttcaatactacagaaagggatgaacagggaagcaaggtaaatgacttcttccagcaaactgaggacctgtataacgagatgaaatggcagaagaagattcggaacaatcccgcgctcttttggttctcacggcacatcagcctgtgggggtcgattagttttaatctagcagtgtttatcaacttagccgtcgccctgttctatcccttcggcgatgatggggacgaggggaccttatcccccctatttagtgtgctcttatggatcgccgtagctatctgcacaagcatgctttttttcttcagcaagcccgtgggcattcgtccttttttagtgtctatcatgctaagatctatttacactattggcctgggtcccactctcatactactcggagcagccaacctgtgcaacaagatcgtcttcctagtatcgttcgttggtaatcgaggaacatttacacgtgggtatagggctgtcattctggatatggctttcctatatcacgtagcttatgtgctggtctgcatgttggggttattcgtgcatgagttcttctactccttcctgttgttcgacttagtttaccgggaggaaaccctgcttaacgtgatcaagagtgtcactaggaacggaagatctattatactcactgccgtgttggccttgatcctggtctatctattctccattattggctttctgttcctgaaggacgacttcacgatggaagtggataggctgaagaacagaacccccgtcaccggctcacatcaggtgccgacaatgaccctgactacgatgatggaggcttgcgccaaagaaaactgctcacctaccatccccgcctccaacaccgctgatgaggagtacgaggatggcattgagagaacctgcgacactctcctaatgtgcatcgtaaccgttctgaaccaggggctgcggaatggaggcggagtaggagatgttctgagacgaccttctaaggatgagccactgtttgccgctcgggtcgtgtacgacttgttgttttactttattgttatcatcatcgtcttgaacctcatttttggggtgataatagacacgttcgctgatctgagatccgagaaacagaagaaggaggagattctgaagaccacatgttttatctgcggtctggagagagataagtttgataacaaaactgtgtccttcgaggagcacatcaaatccgaacacaatatgtggcattacctgtatttcatcgtcctggttaaggttaaggacccaacagagtacacaggtccagagtcatacgtggcccagatgatcgttgagaagaacctggactggtttccaagaatgcgcgccatgtctttagttagcaacgaaggggacagtgagcaaaatgagatccgttcactgcaagaaaagctggagtctactatgagcctcgtaaaacagctctccggccagttagctgaattgaaagagcagatgactgaacaaaggaagaacaagcaaagactgggattccttggatccaacacacctcacgtaaatcaccacatgccaccccactag

SEQ ID NO: 191397 - DNA, 8016 bp, synthetic construct
  misc_feature 1..8016: note = Description of Artificial Sequence: Synthetic coding sequence
  source 1..8016: mol_type = other DNA
atgagcgagatgagcagcttcctgcacatcggcgacatcgtgagcctgtacgcggaggggtccgtgaacggctttattagtactctgggattagtggatgatcgctgcgtggtagaacctgctgccggagacctagacaacccgcctaaaaagtttcgggattgtctctttaaggtttgccctatgaatagatactcagctcaaaaacagtactggaaagctaaacagacaaagcaggacaaggagaagatagccgacgtggtcttgctccagaagctgcagcacgcggctcaaatggaacaaaagcaaaacgacaccgaaaacaagaaagtgcacggtgatgtggtgaagtatggcagcgtaatacagttgctgcatatgaagtcaaacaagtatctcaccgtcaacaagagactacccgcactgttggaaaaaaatgcgatgagggtgaccctggacgctacgggcaacgagggctcctggctgttcattcagcccttttggaaactccggtctaatggcgataatgtcgtggtgggcgacaaggttattttaaatcctgtgaatgccggtcagccattacacgcctccaactacgagctgagcgataacgctggctgcaaggaggtcaattctgtgaactgcaatacgtcatggaaaattaatctgtttatgcagtttcgagaccacctggaagaggtcctcaaggggggcgatgtcgtcaggctgttccatgcggaacaagaaaaatttctcacatgcgacgaatacaagggtaagttgcaggtctttcttcggacgacccttaggcagtccgccacatctgcgacttcatctaacgctttatgggaggtggaggtcgtccatcacgatccctgtcgggggggcgccggtcactggaacggattataccgcttcaagcatcttgctacaggaaactatttagccgctgaggagaatccttcctataagggcgacgcttccgatcccaaggcagctgggatgggggctcagggacggaccggtcggcgcaacgctggagagaaaatcaagtactgccttgttgccgtcccccacggaaacgacatcgcctccctgttcgaactggatcctacaaccctccagaagaccgatagcttcgtgcctcggaactcctatgtccggctgcgacacttgtgtacaaatacttggattcagtcaacgaacgtacctattgatatcgaggaagaacgtcctatcagacttatgctaggcacttgtccaacgaaggaagacaaagaagcttttgccatcgtgtctgtgccggtgtctgagataagagatctggattttgcgaacgacgctagtagcatgctggccagtgctgtcgaaaagcttaatgagggcttcatctcccaaaatgacagaagattcgtgatccaactgcttgaggacctggtgttctttgtctctgatgttcctaataatggccagaacgttttagatatcatggtgaccaaaccgaatagggagaggcagaagctgatgagggaacaaaatattctaaagcaggtatttggcattctgaaggccccatttcgggagaaaggaggtgaagggcctttagtcagactcgaggaactgtcagatcagaaaaacgcaccttaccagcatatgtttcgcctctgttaccgggtgttaaggcactcccaggaagattatcgaaaaaatcaagagcatattgcgaagcaattcggaatgatgcagtctcagatcggttatgatatactggccgaagacacgatcaccgctttactgcacaataataggaagttgctggaaaaacatattactaaaacagaggtggagacatttgtcagcctagtccgcaaaaatcgcgagcctcggtttttagattacttgagcgacctgtgtgtgagtaaccatattgccattccagtgactcaggagcttatatgcaagtgcgtgctggatccaaagaactccgatatactcatcagaactgaactgcgcccggtcaaggaaatggcccagagccacgagtacctgagtattgaatatagcgaggaagaagtgtggctcacctggacagacaaaaataacgaacatcacgagaaatcggtacgtcaactagctcaagaggctcgggcaggaaacgctcacgacgagaatgtcctgtcctattatcggtatcagctgaaactcttcgcccgcatgtgtctggatcgtcagtacctggctattgatgagataagccaacagcttggtgtggatcttatcttcttatgtatggcagatgaaatgttgcccttcgacctgcgcgcctcattttgtcacctcatgttacacgtgcacgtcgatagggacccccaggaactcgtgactccagtgaagttcgcaaggctctggaccgagataccaacagcaattacaattaaagactacgactctaacctgaacgcgagcagagacgataaaaaaaacaagttcgccaatacaatggagttcgtggaggactacctcaataatgtggtttctgaagccgtgccttttgcgaacgaagagaaaaataaacttacttttgaggtggtctcactggcgcataacctcatctattttgggttctatagtttttctgagctgttgaggctcaccaggacgttgctgggcatcatcgattgcgtacagggaccacctgcaatgctccaggcttacgaagaccccggagggaagaacgtccgacgcagcatccaaggtgtggggcatatgatgagcacaatggtcttaagcaggaagcagtccgtgttctccgcacccagtctcagcgccggcgccagtgcagccgagccactggacagatctaagtttgaggagaatgaagatattgtcgtgatggagacaaagctgaagatccttgaaatattacagtttatacttaatgtgcgcctcgattacagaatctcatatttgctgagtgtgttcaaaaaggaattcgtcgaagtcttccctatgcaggacagtggagctgacgggacggcacctgcgttcgatagtacaaccgctaacatgaacttggaccggattggtgaacaggctgaagcaatgttcggagtaggcaaaaccagttctatgctggaggtcgatgacgagggcgggcggatgttcctccgtgtcctcattcacttgactatgcacgattatgcgcccctcgtttcaggcgctctccaactcttgtttaaacactttagtcagagacaggaggccatgcatacttttaagcaagtgcagctcctaatcagcgctcaggacgtggaaaactacaaggtcatcaagtccgagctagaccggctgaggaccatggtagaaaaatcagaactctgggtcgataaaaagggttcagggaagggggaagaggtcgaagcgggagcggcaaaagataagaaagagcgacctaccgacgaggaggggtttctccatcccccaggggagaaaagttcggaaaattaccagattgtgaaggggatcctggagaggctcaacaaaatgtgtggcgtcggcgagcagatgcgaaagaaacaacaaaggctcctgaagaatatggacgcccacaaagtgatgctggatctcttacagataccatatgacaagggtgatgccaagatgatggaaattttacgttacacacaccagtttcttcaaaagttctgtgctggtaatcccggcaaccaggccctgctccataaacacctgcatctcttcttaactccaggactactggaagcggaaacaatgcaacatatcttccttaataactatcagctctgctccgagattagcgagcccgtactacagcacttcgtacacctattagctacccacgggcggcatgtccagtacctggatttcttgcacacagtgatcaaagccgagggtaagtacgtgaagaaatgtcaggacatgatcatgacagagctgactaacgcaggcgatgatgtcgtagtcttctacaatgataaggcttcgctggctcatctgctggatatgatgaaagctgctagggatggggtggaagaccactcccccttgatgtaccacatcagtctcgtggacctccttgctgcatgcgccgaggggaaaaatgtttacacagagatcaaatgcaccagcttattgccactggaggatgtcgtttctgtagttacccacgaagattgtattaccgaagtcaagatggcttatgttaacttcgtgaatcattgctatgtggacaccgaggtggagatgaaagaaatctatacgagcaatcatatctggacacttttcgagaacttcaccctggatatggctcgggtttgttctaagcgagaaaaacgcgtggcggacccaacattggaaaaatacgttctgtctgtcgtgctggatacaatcaatgcctttttcagttctccgttctccgagaatagtacttccctgcaaactcatcagaccatagttgtacagttactgcagagcactacccgattgcttgagtgtccatggctgcagcagcaacataaggggtctgtcgaagcgtgtatccgcacactggctatggtggcaaagggcagagctatcttgctgccgatggacttggatgcgcacatcagctcgatgctttcatcaggcgcttcctgcgccgctgcggcgcagaggaacgctagtagctacaaagccactacccgggcttttcctagggtgacacctacggccaaccaatgggactacaaaaatatcattgaaaaactgcaggatattataaccgccctcgaagagcggctcaagccactcgttcaggctgagttaagtgtactggtggatgtattgcactggcccgaactgttgttcctggagggatctgaggcctaccagcgatgtgagtcgggaggttttctgagcaaactcatccagcataccaaggatctgatggaatccgaggagaaactgtgtataaaagtgctcagaaccttgcagcagatgcttctgaagaagaccaagtatggagatagagggaatcagctgcgcaagatgctactgcaaaactatctacaaaacaggaagtccactagcaggggggatctacctgatcctattggaactggtcttgacccagattggtctgccattgccgccacccagtgcagactcgataaggagggggcaacaaagctggtgtgtgacctaatcacatctactaagaatgagaagatcttccaggaatctataggcctggcgattcatctcttagacggcggcaataccgagatccagaaaagctttcacaacttaatgatgagtgacaagaagtctgagcgcttctttaaggtgttacatgataggatgaaacgggcccaacaggaaaccaagtccaccgttgccgtaaacatgaatgatttgggaagccaaccccacgaggacagggagcccgttgatccaaccacaaagggaagagtggcttcctttagcatcccgggatcttctagtcgctatagtctgggtcccagtctgagaaggggccacgaggttagtgagagagtgcagagctccgaaatggggacctccgtcctcatcatgcagcctatcttgcgcttcctccagctcctatgcgagaatcacaaccgggacctgcaaaattttctaagatgtcaaaataataagacaaactataacttggtttgtgagacactccagtttctagatatcatgtgtgggtctactacagggggactgggcctgctcgggctgtatataaatgaggacaatgtgggcctggtgatccagaccctggaaaccctcacggagtactgtcaaggaccttgtcacgagaatcagacttgtattgtcacccatgaatcaaacgggattgatatcattacagcgcttatcctgaacgatatttcccccctgtgcaaatatagaatggacttagtgctccagcttaaagacaacgcatcaaagcttcttctcgcattaatggaatcacggcacgactccgaaaatgctgagcgtattctgatatctctccgtccccaggaactggtggacgtgatcaaaaaggcttacctccaagaggaggagcgggaaaactctgaagtttctccaagggaggtcggacacaacatctatatcctcgcgttgcaactctcacgtcacaacaaacaacttcagcacctgctgaagccagttaagcggatccaggaggaagaagcggagggcatcagcagcatgctgtctctgaacaacaagcaactgtctcagatgctaaagtcatctgcacctgctcaagaagaagaggaagatccgctcgcctactacgagaaccatacgtctcagatagagatcgttaggcaggacagatcaatggaacagatcgtgttcccggtgcccggcatttgccaattcctgaccgaggagacaaaacataggctcttcaccacaactgagcaagacgagcagggatctaaagtttccgatttttttgatcaaagttcattcctgcacaacgaaatggagtggcagaggaaactcagatcaatgccactgatatactggttttcccggagaatgacactgtggggaagcatcagcttcaaccttgccgtgtttatcaatatcatcattgcgttcttttacccttatatggagggtgcttccacgggagtcttggactcaccattgatctcactcctgttctggatccttatctgcttctcgattgcagcactgttcaccaaacggtacagtattcggccactgatcgtcgccctcatcctgaggtcaatctactacttgggcataggccccaccctgaacattttaggtgcccttaatctaaccaacaaaattgtattcgttgtgagctttgttggcaatagaggcacgtttattagaggatataaagcaatggtgatggacatggagtttctctaccacgtgggctatatactgaccagtgtcttgggactatttgctcatgagctgttttatagtatactgctttttgatcttatttaccgtgaagagactctctttaatgtaatcaagagcgtgacacggaatgggaggagcattctcttgactgccctgctggccctgatcctagtgtacctgtttagcatagtggggtttttatttctcaaggacgacttcatcctggaagtggatcggctgcctaacaaccattctaccgctagccctctggggatgccacatggagccgcagccttcgtggacacctgcagcggcgacaagatggactgcgtctctggtctgtccgtccccgaagtcctcgaggaagacagggaattggacagtacagagcgagcctgtgacacactcctcatgtgcatcgtcacagtgatgaaccacggactgcgtaacggcggaggcgttggtgacatcttgagaaaaccctcaaaggacgaatccctattccctgcaagagtagtgtatgaccttctgttcttttttattgtgatcatcatcgtactgaatttgatctttggagtgatcatcgatactttcgcagaccttagatccgagaagcagaaaaaagaagagatccttaagactacttgcttcatctgcgggctcgaaagggacaagttcgataataaaacagtgtcctttgaagagcacataaaacttgaacacaacatgtggaactacttatatttcatagtgctggtgcgggtcaagaacaagactgattataccggaccagagtcatacgtggcccagatgattaagaataagaaccttgactggttccctcgcatgcgggccatgtcattggtgtccaatgagggggaaggtgaacaaaatgagatccggatacttcaggataagctgaacagtaccatgaagctggttagccatctgacggcacagctcaatgaactgaaggagcaaatgacagagcaacgcaaaaggaggcagagacttggatttgtggacgtgcagaactgcataagccggtag

SEQ ID NO: 191398 - DNA, 1326 bp, synthetic construct
  misc_feature 1..1326: note = Description of Artificial Sequence: Synthetic coding sequence
  source 1..1326: mol_type = other DNA
atgtgcgtgtgccagaccatggaggtgggccagtacggcaagaacgcaagccgtgccggggaccggggcgtgctgctggagccgttcatccaccaggtggggggccattcttcaatgatgcggtatgacgaccacaccgtgtgcaaacctctcatctcccgggaacagcgtttttacgaaagtctgccacctgaaatgaaggagtttacgccagaatataagggcgtggtgagtgtctgctttgaaggggactccgacggttacataaatttggtggcctacccatatgtcgagtccgaaaccgtagaacaggacgatactactgagagagagcagccacggcgaaagcattcccggagaagtctgcatcggagcggttccggaagtgatcacaaggaggaaaaagcgagccttagtctggagaccagcgaaagctcccaagaggcgaagtcccctaaagtggaactgcattctcattcggaagtacctttccagatgttagacggcaactctggactgagtagtgaaaagataagccataacccatggtctttgcgctgtcacaagcagcaactctcgagaatgcggagcgagtctaaggaccggaagctgtacaaatttctcctgttggaaaacgtcgtgcatcactttaaatacccctgtgtgctggaccttaagatgggaacgcgccagcatggcgacgacgcaagcgccgaaaaagccgctcggcagatgagaaagtgtgagcagtctacctctgcaactctgggggtcagggtatgtggaatgcaggtgtaccagctggacaccggacactatctgtgtagaaacaaatactacgggcggggactgtcaatagaagggtttaggaatgccctctaccagtacctccataacggtctagatctccgacgagacctattcgagcccattttgagcaagctccgcggtctgaaagcagtgctggagcgccaggcaagctatagattctactcttcctctctgctcgtcatttacgatggtaaagaatgtcgggcagagagttgcttggataggcgaagcgaaatgcgtctcaagcacttggatatggtactgcccgaggttgctagtagctgcggaccttcgaccagcccttccaacaccagcccagaggcagggccatctagccaacctaaagtggatgtgagaatgatcgacttcgcccacagcacttttaagggattccgagatgatccaacggtgcacgatggaccggaccgcggatacgttttcggtcttgagaaccttatcagcatcatggagcaaatgcgtgacgagaaccagtag

SEQ ID NO: 191399 - DNA, 831 bp, synthetic construct
  misc_feature 1..831: note = Description of Artificial Sequence: Synthetic coding sequence
  source 1..831: mol_type = other DNA
atgctggacggcaacagcggcctgagcagcgagaagatcagccacaacccatggtctctgcgttgccacaaacaacagctgagcaggatgagatcggagtctaaagatcggaagttgtataaatttctcctgctggagaatgtggtccaccacttcaagtacccgtgcgtgctagatttgaagatgggcactcgccagcacggggacgatgcctcagctgagaaggcggccaggcagatgaggaaatgtgagcaatcaacctccgcaaccctgggagtgcgagtgtgcggaatgcaggtctatcaactagacacaggacattacctgtgtcggaacaaatactatggaagggggctgagcatagagggcttccgtaacgccctctaccaatatctgcacaacggtctcgatctgcggagggatttgttcgagcctatcctatctaagctgagggggctaaaggcagttctggagcgacaggcctcttatcgcttctactccagcagtttattggttatctacgacggcaaagaatgtcgagcggagtcctgcttggataggcggagtgagatgagactaaagcatctggacatggtcctcccagaggtcgcctcatcttgcggtcctagtacttcaccaagcaatacaagccccgaagctgggcctagttctcagccaaaagtggacgtacggatgatcgattttgcacattcaaccttcaaaggcttcagagacgatccaactgtccatgatggccccgaccgaggttacgtcttcggtttggagaatttgattagcattatggagcagatgcgggacgagaatcagtag

SEQ ID NO: 191400 - DNA, 831 bp, synthetic construct
  misc_feature 1..831: note = Description of Artificial Sequence: Synthetic coding sequence
  source 1..831: mol_type = other DNA
atgctggacggcaacagcggcctgagcagcgagaagatcagccacaacccatggagcctcaggtgtcacaagcaacaactttcgaggatgcgctcggaaagcaaagaccgcaagctgtacaagttcctacttctcgagaatgtggtccaccacttcaagtatccctgcgttctggaccttaaaatgggtactcgtcagcacggcgacgatgctagtgccgagaaggccgcaaggcagatgagaaagtgcgaacagagcacctctgcgacactcggagtgagggtgtgcggaatgcaggtgtatcaattagatacgggacactacttgtgccgaaataagtactacgggcgcggcctgtctattgaagggtttaggaacgcactgtatcaatatctgcacaatggcctggacctccggcgggacctgttcgagccaatactgtccaagttacgggggcttaaagcggtgctggagaggcaggctagctaccgtttctactcttcaagcctgctggtcatatacgatggaaaggagtgccgagccgagagctgcctcgatcgccggagtgaaatgcgactaaagcatctggacatggtgttgcccgaagtcgcgagctcatgcggcccctctacctctcccagtaacacatccccagaggcaggaccatcgtcacaaccaaaagtcgacgtacggatgatcgacttcgctcactctacatttaaaggattcagagatgaccctaccgtacatgatggcccagatcgaggatacgtgttcggccttgagaacttgatctctatcatggagcaaatgcgagatgagaaccaatag

SEQ ID NO: 191401 - DNA, 1281 bp, synthetic construct
  misc_feature 1..1281: note = Description of Artificial Sequence: Synthetic coding sequence
  source 1..1281: mol_type = other DNA
atgagccccgccttccgggccatggacgtggagccccgggccaagggtgttctgctagaaccattcgtccaccaggtgggggggcattcctgtgtgctgcgctttaatgaaactacactgtgtaaacctctggtgccacgcgagcaccagttttacgaaacgttgccagctgagatgcgaaagttcaccccgcagtataaaggtgtagtgagcgtaaggtttgaggaggatgaggaccgcaacctgtgcctgatcgcttatcccctcaaaggggatcacggcattgtggatatcgtggataattccgattgcgaacctaagtccaaactactccggtggacaaccaacaagaagcaccacgttctggagactgaaaagacgcctaaagactgggtccggcaacaccggaaagaggaaaaaatgaagagccacaagttggaggaagaattcgaatggctaaagaagagcgaagtgctgtactataccgttgagaaaaaaggcaatatcagctcacaattaaagcattacaacccttggtccatgaagtgccatcagcagcagctgcagcggatgaaggaaaacgcgaaacaccgcaatcaatataagtttatactgctggaaaacctcacttccagatacgaggttccttgtgtgctcgatctgaaaatgggaactcgtcagcatggcgatgacgcttccgaggaaaaggcagccaaccagatccgtaagtgccagcagtcaacttcggctgtgataggcgttagggtgtgtggcatgcaggtgtaccaggccgggtccgggcaattaatgtttatgaacaagtaccacgggcgcaagctttccgtccagggcttcaaagaggcactgttccagttttttcataatggccggtatcttcgccgagagctgctagggcctgtcctaaagaaactcaccgagctgaaggcggtcctggagaggcaagaaagctacaggttctattcttccagcctgctggtcatttatgacgggaaggagcggcccgaggttgtcctcgacagcgacgcagaagacctagaggacttaagcgaggaatctgccgacgagagtgccggagcgtacgcctacaagccaatcggagccagttcggtggacgtccgcatgatagattttgctcacacgacatgccggctttacggcgaagacactgtcgttcacgaagggcaagacgcaggctatattttcgggctgcagtcgctaatcgatatcgtcacagaaattagtgaggagtctggtgagtag

SEQ ID NO: 191402 - DNA, 294 bp, synthetic construct
  misc_feature 1..294: note = Description of Artificial Sequence: Synthetic coding sequence
  source 1..294: mol_type = other DNA
atgagccccgccttccgggccatggacgtggagccccgggccaagggggtgcttctcgaaccctttgtgcatcaggtcggcggacattcttgcgtgctaaggtttaacgagacaaccctgtgtaaacctctggtgccgcgggaacaccagttctacgagacgctgcctgctgaaatgaggaagttcacccctcagtataaaggccagtctcaacgacccctcgtcagctggccgtccctaccacactttttcccctggtctttcccgctctggccacagggctccgtagcctag

SEQ ID NO: 191403 - DNA, 294 bp, synthetic construct
  misc_feature 1..294: note = Description of Artificial Sequence: Synthetic coding sequence
  source 1..294: mol_type = other DNA
atgagccccgccttccgggccatggacgtggagccccgggccaagggggtgctgctcgagcctttcgtgcatcaagttggcggccacagctgcgtgttgagatttaatgaaaccacactgtgcaagccactggtgcccagggagcatcagttttatgagaccctccctgctgagatgcggaagtttacgccccagtacaagggccaatcccagcggcccttagtgtcatggcccagcctgccccatttcttcccatggagcttcccactgtggccccaggggtctgttgcttag

SEQ ID NO: 191404 - DNA, 558 bp, synthetic construct
  misc_feature 1..558: note = Description of Artificial Sequence: Synthetic coding sequence
  source 1..558: mol_type = other DNA
atgagcctgaacctgcccgaggccagcctgctgagccgggccagctggccagaacaggcaaaggagcctcggcgagagggacacaccgataaacagcagaccgaagacgtgctcgccgcaggcctgaggtgtctgccacacctcccagcaatctgtgctcgtaggatgtcacctgccttcagagctatggatgtggagccacgggcaaaaggtgtactgctagaaccattcgtgcatcaagttggaggacatagctgtgttttacgctttaacgagaccacactttgcaaaccactggtccctcgggaacatcagttttacgagacattgcccgcagagatgcgtaagtttaccccccaatacaaagggaaatcccagctgttggaggggctaccacactggaggggagacgttcgcgatagggggcacggcaggccatggcaaccgtccctcgaacctagtttgccccctacactgtgtttcccctccttatcgtcattttcttcatcctggcctagtgcgcagcacttgacgcccagcgtgttcaacccttggtag

SEQ ID NO: 191405 - DNA, 264 bp, synthetic construct
  misc_feature 1..264: note = Description of Artificial Sequence: Synthetic coding sequence
  source 1..264: mol_type = other DNA
atgagccccgccttccgggccatggacgtggagccccgggccaagggcgtcctgcttgaaccttttgtgcatcaggtgggcggtcactcttgtgtcctgagattcaatgagaccactctatgcaaaccactggtgccacgggaacaccagttctatgaaaccctgcctgctgaaatgaggaagtttaccccccagtacaagggggacattagttctcatcagcacggaggtgtttttgtcggagaatggggctccctgttgtag

SEQ ID NO: 191406 - DNA, 567 bp, synthetic construct
  misc_feature 1..567: note = Description of Artificial Sequence: Synthetic coding sequence
  source 1..567: mol_type = other DNA
atgaacctgtgccagagccccttccaggagggctgccagagcctgttagctagctggcccgagcaggccaaggagccacggagggagggtcacaccgacaaacagcagacagaggacgtgctggcggccggtctgaggtgcttgccccacctgcccgctatctgcgcccggcgcatgagtcctgcttttcgggctatggacgtcgagccgcgcgcaaaaggtgtcctgctagaaccatttgtgcaccaggttggtggccacagttgcgtgttgcgttttaatgagacaacactgtgcaaacctctagtgccgagggaacaccaattttatgaaacactgccagccgaaatgaggaaattcaccccacagtacaagggaaagtctcagctgctggagggcctgcctcactggcgcggcgatgtgagagaccgaggacatggacggccatggcaaccatcactggaaccctctttacccccaactctgtgctttccatccctctctagcttctcaagctcctggccatcagcccaacacctgacaccctccgtttttaatccatggtag

SEQ ID NO: 191407 - DNA, 1233 bp, synthetic construct
  misc_feature 1..1233: note = Description of Artificial Sequence: Synthetic coding sequence
  source 1..1233: mol_type = other DNA
atggtggtgcagaacagcgccgacgccggcgacatgcgggccggcgtccagctggagcctttcctgcaccaggtcggaggccatatgtctgtaatgaaatatgacgagcacaccgtgtgtaaacccctggtgtctcgggagcagcgtttctatgaatccctccccctcgcgatgaaacgtttcaccccccaatataagggtactgtaacagtgcatctatggaaagacagtactggacatctatcactggtggctaatcctgtgaaggaatctcaagagccctttaaagtctccactgaatcagcagcagttgctatctggcagacactgcagcaaactaccggaagcaatggcagtgattgcacattggctcagtggccacacgcacagctcgccaggagcccaaaggagtcccctgcaaaggccctgttgcgttccgagcctcatctcaacacgcccgcgttttccctggttgaagataccaatgggaatcaggtcgaacgcaagtcctttaatccttggggtctgcagtgtcaccaggcgcacttgacacggctgtgctcagaataccctgaaaataagcgccaccggtttttgcttctggagaacgtcgtctctcagtatacgcatccctgcgtcctggacctcaagatgggcacacggcagcatggggatgacgcctcagaagagaagaaagcccgccatatgagaaagtgcgctcaatcgacatctgcctgcctcggagtacggatatgcgggatgcaggtttaccagaccgacaaaaagtacttcttatgcaaagataagtattatggtcggaagctctccgtggaaggatttcgccaggccctgtaccagtttctgcataatggttcccatctcaggcgggagctgttagagccaatcctacatcagttgagagcactgctcagtgtgattaggagtcaatcctcttatcgattctacagcagttctctgctggttatctacgacgggcaggagccacctgaaagagcccccggcagcccccatcctcatgaggctccacaggcggcacacggctcctctccaggaggcttaaccaaagtggatatacggatgatcgactttgcccacaccacatacaaaggctattggaacgagcacaccacttacgatggtccagacccgggttatattttcggactagaaaatctaattaggatcctccaggatatacaagagggagagtag

SEQ ID NO: 191408 - DNA, 1233 bp, synthetic construct
  misc_feature 1..1233: note = Description of Artificial Sequence: Synthetic coding sequence
  source 1..1233: mol_type = other DNA
atggtggtgcagaacagcgccgacgccggcgacatgcgggccggcgtgcagctcgagcccttcttgcatcaggttggtggacacatgagcgtgatgaagtatgacgaacacacagtctgcaagccactggtatcgcgggaacagaggttttatgagtcgttaccccttgctatgaagcggttcacacctcagtataagggcaccgttactgtgcatctctggaaggacagcaccgggcacctatcattggtcgccaatccagtgaaggaaagccaggagccgtttaaagtttctacagaaagcgccgctgtcgccatctggcagaccttgcaacagactactggttcaaacgggtctgattgtaccttggctcagtggccacatgcacagttagctcgttctcccaaagagtctcccgcaaaagctctccttcggtccgaaccacatttgaacactccagcattttcactcgttgaagacaccaatggtaaccaagtggaaaggaagagctttaacccctgggggctgcagtgccaccaggcccacttaacaaggctctgctccgaatacccggagaataaacggcaccggttcctgctactggagaatgttgtctctcagtacacccacccttgtgtgctggaccttaaaatgggtacgagacagcacggcgatgatgcgtctgaagaaaaaaaagcccgacatatgcgcaagtgtgcccagtccacatccgcctgtcttggcgtgcgaatctgtgggatgcaggtatatcaaactgacaaaaagtattttctgtgtaaggacaagtactacggtagaaagctgtccgtggagggattccggcaagctctataccaattcctgcacaatggttcccatctgagaagagagctgctcgagcctatcttacaccagctgcgggcactcctgtccgttatccggtcccaaagttcctacagattttattcttccagtctcctggtcatttatgatggacaggagccccctgaacgggctccgggatctccacaccctcatgaggctccgcaggcggcgcacggtagctcccccgggggattgaccaaggtcgatattcgcatgatcgattttgcccataccacctacaaggggtattggaacgaacatacaacttacgacggtccagatccagggtatatattcggcttagaaaacttgattagaatcctgcaggatatacaagaaggtgaatag

SEQ ID NO: 191409 - DNA, 1080 bp, synthetic construct
  misc_feature 1..1080: note = Description of Artificial Sequence: Synthetic coding sequence
  source 1..1080: mol_type = other DNA
atggcccccatgggcatccggctgagccccctgggcgtggccgtgttctgtttgctgggtctgggtgtgctttaccatctgtactcagggttcttagcgggacgtttcagtctcttcggcttgggtggcgaacctggtggcggagccgccggaccagccgccgctgccgatggtggcacggtggatcttagagagatgctggcagtatccgtactggctgccgtacgcggaggtgatgaggtgaggcgagtgagagaaagcaatgtattacacgagaagagcaagggcaaaactagagagggagctgaggataagatgacctcaggagacgtcctctctaatcggaagatgttctacctgttgaaaacggctttccctagcgtgcagatcaacacggaggaacacgtggacgccgccgaccaggaagtcatcctgtgggaccataaaatccccgaagatatcttaaaggaagtgaccactcccaaagaagtgccggccgagagtgtgacagtgtggattgaccccttggacgccactcaagagtatactgaggacttgcgtaagtatgtgaccacgatggtgtgcgtggcagtgaacggtaaaccaatgctgggggtcatacacaaacccttctcagagtacaccgcgtgggcaatggttgacggcgggtcaaatgtgaaagcaaggtcttcctataacgagaaaacacccagaattgtagtgtcaaggagccatagcggcatggtgaaacaggtggcactgcagacctttggtaaccagacaaccattattcccgccggaggagcaggctacaaggtcctcgcactcttggacgtgcccgacaagtcccaggagaaggctgacctgtacatccacgtgacctatatcaaaaagtgggatatctgcgctggaaacgctattctgaaggcgctgggcggtcatatgactaccttgtccggtgaggaaattagttacactggaagcgacggaatagaaggcggcctgttggcgtctatccgcatgaaccaccaggcactggtacggaagctgcctgacctggaaaagaccggccataagtag

SEQ ID NO: 191410 - DNA, 1251 bp, synthetic construct
  misc_feature 1..1251: note = Description of Artificial Sequence: Synthetic coding sequence
  source 1..1251: mol_type = other DNA
atggccaccgagccccccagccccctgcgggtggaggcccccggcccgcctgagatgagaacctccccagccattgaaagcactcctgagggaaccccgcagccagcagggggtcgccttaggttcctgaacggttgcgtgcccctgtctcatcaggtggcagggcacatgtatggaaaagacaaggttggaattctccaacatccagatgggacagtgctaaagcaactccagcccccgcctcgggggccaagggagctggagttttacaacatggtgtacgccgccgactgcttcgacggagtgctgttggagctgcgtaagtatctgcctaaatactacggaatttggtccccccccacagcccccaacgatctgtatctaaaactcgaggacgtcacacacaagttcaataaaccatgtatcatggacgtcaagattgggcaaaaatcttacgatccttttgcatcttccgaaaaaattcagcagcaagtgtcaaagtacccactcatggaggagattggcttcctcgtgttagggatgagagtataccacgtccattcagactcgtatgaaactgaaaaccagcactatgggagatctctaactaaagagacgattaaggacggcgtctccaggtttttccacaacggctattgcctgcggaaggacgctgtcgccgctagtatccagaaaatcgagaagatcctgcagtggttcgagaaccagaagcagctgaatttctatgcgagctctctgctgtttgtgtacgagggctcttcccagccaaccaccacaaaactaaatgataggaccctggcagaaaagtttctctccaaggggcagctatccgatactgaagtgctggaatacaacaacaactttcacgtgctgagcagtacagctaacgggaaaattgagtctagcgtcggtaaatcattatctaagatgtacgctcgccatcgaaaaatctacacaaagaaacatcactcgcaaactagtctgaaagtggaaaacctggaacaggataacggctggaaaagtatgagccaggagcatcttaatggaaatgttttgtcacagctcgagaaagtcttttatcacctgccaaccggatgccaggaaatcgctgaggtcgaggtgcggatgatagacttcgcgcacgtctttccctctaacacaatcgacgagggctatgtttatggcctgaaacacctgattagcgtgctcagatctatcctggacaattag

SEQ ID NO: 191411 - DNA, 3777 bp, synthetic construct
  misc_feature 1..3777: note = Description of Artificial Sequence: Synthetic coding sequence
  source 1..3777: mol_type = other DNA
atggccagcgcctgcggcgcccccggccccggcggcgccctgggctctcaggccccatcatggtatcatcgagatctgagcagagcagctgccgaagagttgctcgccagggcagggagagacggttcgttcttggtgcgggattcagagtccgtcgccggggccttcgcactgtgcgtgctctatcagaaacacgtgcacacgtaccggatccttcccgacggggaagatttcctcgccgtccagacatcgcaaggagtcccagtgcggcggttccagaccttgggggagttgatcggtctgtacgctcaacctaatcagggtttagtgtgtgccctgcttcttcccgtagagggggaacgagagcccgatcctcctgacgaccgggatgcgtctgacggagaggacgagaagccccctcttccacctcggtctggaagcacctcaatatctgctcctaccgggccctcctcccccctgcccgcgccagagacacccactgcccctgctgcggagtcagcccccaacggactgtccactgtgtctcacgactacctgaaagggtcttatggcttagatctggaagcagtgagaggaggagcctctcacctcccccatctaacaagaacactcgccacgagttgtagaaggctccactccgaagttgataaagtgctgagcgggctggaaattctctcaaaagttttcgatcagcaatcgagccccatggttacaagactgctgcagcaacagaatctgccccagaccggtgaacaggagttagagagcttggtcctaaagctgtcagtgctgaaagactttttaagtgggattcagaaaaaagctctaaaagctttgcaggatatgagctccaccgcacccccggccccacagcctagtactcggaaggccaagactattcccgttcaggctttcgaggtgaagctagatgtcaccttaggcgacctgactaagatcggaaagtcccagaaattcaccctctccgtagacgtagaggggggccgcctggtactccttcggcggcagcgggatagtcaggaggactggacgacattcactcacgaccgcattcgacagcttattaagagtcagagagtgcagaataaactgggagtggtcttcgaaaaggaaaaagaccgcacacagcgcaaggacttcatcttcgtctctgccagaaaaagagaggcattctgtcagctgcttcagctaatgaagaacaagcactccaaacaggacgaaccagatatgattagcgtcttcatcggcacgtggaacatgggatccgtgccaccacccaagaacgtgactagctggtttacttcaaaagggcttggcaaaacattggacgaggtcactgtgaccatcccccacgacatctacgttttcgggacacaggagaacagtgttggtgatcgagaatggctggacctgctaaggggaggactaaaagagcttaccgatctggactacaggcccatcgctatgcagtccctatggaatatcaaagttgctgtgctggtgaaacctgagcacgaaaaccgtattagccacgtgtcgactagttcagtcaagacaggtatcgcgaacaccttggggaataaaggagccgtaggcgtctcctttatgttcaacggtacatcttttggatttgtcaactgtcacctgacatctggaaacgagaaaaccgcccgaagaaaccagaattaccttgacatcctgcggctgctgtcactcggtgacagacagctgaacgccttcgatatcagcttgaggtttacacatttgttctggtttggggacctgaattataggctcgacatggacatccaggagatcctcaactacatttccaggaaggaattcgagccgttacttcgggttgatcagctcaacttagaaagggagaagcataaagtttttctgcgcttctctgaggaggagatctcgttcccgcctacatacagatatgaaaggggatcccgagacacttatgcctggcataagcagaagccgactggtgtcagaactaacgtcccttcctggtgcgatagaattctgtggaagagctaccccgagacccatatcatttgtaacagttatgggtgcacagatgacatcgttacatctgaccacagccccgtgttcggcacattcgaggtgggagtcacctcgcagtttatttcgaaaaaaggcttgtctaaaaccagcgaccaggcttatatcgagtttgaaagtatcgaggcaattgtgaaaacagcttctagaacgaagttttttattgaattttactcgacatgcctggaagaatataagaagtcattcgagaacgatgctcagtcatcagataatatcaatttcctcaaggtgcagtggtcctccaggcagctgccaacccttaaaccgatcctcgcagacattgagtacctccaggaccagcacctcctgttaacagtaaagtcaatggatgggtacgagagttacggggaatgcgtggttgctcttaagtctatgattgggagcacagcccagcaattccttactttcctcagccatcgcggggaagagactggcaacatccggggatccatgaaagtacgagttccgactgaacgtctcgggacccgagaacgcttgtatgaatggatctcaatcgacaaggacgaagccggggctaaatcgaaagcacctagcgtgtcccgcggcagccaagaaccccgctctgggtcaagaaagccagctttcacggaggcttcctgccccttgtccaggcttttcgaggagcctgagaagcctccaccgactggacggcccccagctcctcctcgcgcagcaccacgcgaagagccccttacgccacggctcaagcctgaaggtgcaccagagccagaaggcgtagccgccccaccccctaagaactcctttaacaacccagcctattatgtcctggaaggcgtcccacaccaacttctgccaccagagccccccagcccagcccgcgcccctgtaccctctgccacgaaaaacaaagtcgccatcaccgtcccagccccacaactgggacaccaccggcatccaagagtcggcgaaggatcgtctagtgatgaagagtcgggcgggactctccctccaccggacttcccacccccgcctctgcccgacagcgctatcttccttccaccatcattagatccgctgccaggcccagtggtgagaggacgaggcggggccgaggcacggggtcccccaccccccaaggcccacccccggcctccactgcctcctggtccatcccccgcatccacgttcttaggtgaggtggcgtccggagacgatcgatcctgtagtgttctgcagatggctaaaacactgtccgaggtggattatgctccagctggcccagctcggtctgcccttctccctggaccactggagctccaacctcctaggggactgccctcagactacggccgcccactcagtttccctcctcctagaataagagaaagcattcaggaggacctcgccgaggaggcgccctgcctgcagggtgggcgtgcctcgggactgggggaagcaggaatgtcagcttggctgcgtgctataggcctcgagagatatgaagaaggactcgttcacaatggctgggacgatctggagttcctttcagatatcacagaggaagatcttgaagaggccggagtgcaggatccagcacacaagaggctgctgttggacactctccagttatctaagtag

SEQ ID NO: 191412 - DNA, 105 bp, synthetic construct
  misc_feature 1..105: note = Description of Artificial Sequence: Synthetic coding sequence
  source 1..105: mol_type = other DNA
atggtgacccggctgctgcagcagcagaacctgccccagaccggcgagcaagaactggaaagtctggtgctgaagctgagcgtgctcaaggacttcctgagctag

SEQ ID NO: 191413 - DNA, 3051 bp, synthetic construct
  misc_feature 1..3051: note = Description of Artificial Sequence: Synthetic coding sequence
  source 1..3051: mol_type = other DNA
atggtgacccggctgctgcagcagcagaacctgccccagaccggcgagcaggagctagagagcctggttctgaagctgagtgtcctcaaggatttcttgagcggcattcaaaaaaaggccctgaaagctttgcaagatatgtcctccacggcacctccggcgcctcagccttccaccagaaaagctaagacgattccagttcaggcatttgaagttaagcttgacgtgacacttggtgatctgactaaaatcggcaaatcccagaaatttaccctgtctgtggacgtggagggcggcagattagtgcttttgcggcggcagcgagacagccaggaggactggaccaccttcacccacgaccgcatcagacagcttattaaatctcagcgagtgcagaataaactgggcgtagtcttcgagaaggagaaggatagaactcagagaaaggatttcatattcgtctctgcacgaaagagggaggccttctgtcaactgttgcaacttatgaagaacaagcattcaaaacaggacgagcctgacatgatctcagtcttcatagggacctggaatatggggtccgtgccacctcctaagaatgttacttcatggtttacatccaaagggcttggcaaaacattggatgaagtgaccgtgacaatcccacacgacatatacgtctttggtactcaggaaaactctgtaggcgaccgcgagtggctggatcttctcagaggtggactgaaagagcttacagatctcgactaccgtccaatcgcaatgcagtccctgtggaatataaaagtggcggtcttagtaaagcccgagcatgaaaatcggatttctcacgtctctaccagtagcgtcaagacaggtatcgccaataccctcggcaataagggagcagtcggagtcagcttcatgttcaatgggacaagctttggcttcgtgaattgccatctcacttccggcaacgaaaagactgcccgacgaaaccagaattatctggatatcttacggctcctttctcttggcgacaggcagttgaatgcctttgatatctctctgagatttacacacctcttttggttcggggacttgaactacaggctggacatggatattcaagaaatcctgaattatataagtaggaaggaattcgagccgttattgagagtcgaccagttaaatctagaacgcgagaagcacaaagtgttccttcgcttttcagaggaggaaatttccttcccccctacctaccgctacgagagaggtagtagagatacatatgcatggcataagcaaaagcccacaggggtgcgaacaaacgttcccagctggtgtgacagaattttatggaaatcctatccggagacccacataatctgcaacagttatggatgcaccgatgacattgttactagtgaccactcccccgtctttggtacttttgaggttggggtgacctctcaattcatctcaaaaaagggcttatctaagacttctgaccaggcatatatcgaattcgaatctattgaagccattgtgaaaacagccagtaggactaagttctttatcgagttctattctacatgcctggaggaatacaagaagtccttcgaaaacgacgcacagtcctcagataacatcaattttcttaaggtgcaatggagctcgcggcagctgccgacccttaagccaattcttgccgatattgaatatctacaagaccagcacctgctgcttacagtcaaaagcatggatggatacgagtcttatggagagtgtgtggtcgctctgaagtccatgatcggctccactgctcaacagtttctgacgtttctgagccatcggggagaggagacaggaaacatcaggggaagcatgaaagtaagagtgcccaccgagcgcttgggtactcgggagcggctgtacgagtggatctctatcgacaaagatgaagctggtgcaaagagcaaggcaccatctgtgagccgcggttctcaggaaccccggtctggaagcaggaaacctgcttttactgaagcctcttgcccactgtcccgactctttgaagaacctgagaagccacctccaaccggaaggcctcccgccccaccacgcgccgcaccaagagaggaacctttaactccgcgtctgaaaccagagggcgcccctgaacccgagggtgtagccgcccctcctcctaaaaatagttttaataacccagcttactacgtcctggagggagtgcctcaccagttactgccaccggagccccctagtcctgccagagcgcccgtgcccagcgcaacgaagaataaggttgcaattacagtccccgctccccagctgggccatcatcgccacccacgagtgggggaagggagttccagcgatgaggaaagtggtggaaccctcccacctcctgattttccacctccacccctcccagacagtgccatttttctccctcctagtttggaccctttgccaggacctgttgttagaggccgcgggggagccgaagcccggggcccacccccaccaaaggctcaccctaggcccccactacctccaggaccaagtcctgcctcaacttttctgggcgaagtcgcatccggcgacgataggagttgttcagtccttcagatggccaagaccctgtcagaagtcgattatgctcctgcgggcccagcgcgaagtgctctgttgcctgggcctctggagctgcagcctcctcggggactcccctccgattacgggcgacctctgtctttcccccccccacgcatcagggagtccatccaggaggatctggctgaagaggcaccctgtcttcagggcggccgggcgtccggcttgggcgaagctggaatgagcgcctggttgagggccatcgggctagaaagatatgaggaggggctggttcataacggatgggacgatctcgagtttttatccgatatcaccgaggaggacctcgaagaggccggcgttcaggatcccgcacataaaaggttactcctagacacccttcagctcagcaaatag

SEQ ID NO: 191414 - DNA, 69 bp, synthetic construct
  misc_feature 1..69: note = Description of Artificial Sequence: Synthetic coding sequence
  source 1..69: mol_type = other DNA
atggccagcgcctgcggcgcccccggccccggcggcgccctgggctctcaagccccctcgtggtactag

SEQ ID NO: 191415 - DNA, 3051 bp, synthetic construct
  misc_feature 1..3051: note = Description of Artificial Sequence: Synthetic coding sequence
  source 1..3051: mol_type = other DNA
atggtgacccggctgctgcagcagcagaacctgccccagaccggcgagcaggagctagagtccctggtgttgaaactgtcagttctgaaagattttctgagcggaattcagaagaaagcattgaaggccctgcaggacatgagtagtacagcgccgccggccccccagcctagcactcgcaaagcgaaaacaatcccggtccaggcatttgaggtcaagctggacgttaccttaggggatttgaccaagatcggcaagtcccagaagttcactctgagtgtcgatgtcgaagggggacgcctcgtgctgttgaggcgtcaaagggacagccaggaggactggacaaccttcacccatgatcgcatcaggcagctcatcaagagtcagcgtgtgcagaacaagcttggagtcgttttcgagaaagagaaggaccggacgcagcgtaaggactttattttcgttagtgcccggaaaagggaggctttttgccaacttcttcagctgatgaagaacaaacactctaaacaggatgagccagacatgatatcagtttttatagggacgtggaatatgggatccgtccctcccccaaagaacgtcacctcttggttcacttcaaagggcttgggcaagaccctggatgaagtcacggtgacgattcctcacgatatttatgtgttcggcacgcaggaaaacagtgtaggcgaccgcgaatggctggacttactgagaggtgggctgaaggagctgacggacctggactataggcccatagccatgcagagcctttggaatattaaggttgccgtgctcgttaagcccgagcatgagaaccggatatctcatgtttcgacctcttcagtgaaaaccggcatcgccaacactttagggaacaaaggggctgtcggagtgtcctttatgttcaacggtacaagttttggtttcgtgaattgtcacctcactagcgggaacgagaagactgctcggcggaatcaaaattatctggacatactgaggcttcttagcctcggagatcgacagctcaacgcgttcgacatttccctgaggtttacccatctgttctggtttggagacttgaattacagattggacatggacatccaagaaattctcaactacatctcacggaaggaattcgagcctctcctacgcgtggaccagctcaatctggagagggaaaagcacaaagtgtttcttaggttttcagaggaggagatatcatttccccccacataccgatacgaaagaggaagtagagatacttatgcatggcataaacagaaacccacaggagtgaggaccaacgttccctcttggtgcgaccgcatcctgtggaagagttatcccgagactcatatcatttgcaactcatatggctgtacagacgacatcgtgacaagcgaccactcacctgtgtttggtacatttgaggtcggggtcacctcacagtttatcagcaaaaaggggctctccaaaacatctgaccaggcatacattgagttcgaatccatcgaggccattgtgaagaccgcctccagaacgaagtttttcatcgaattctactctacatgtctcgaggaatacaagaaaagcttcgagaacgatgcacagtcttcagacaacatcaatttcttgaaagttcagtggtcctctaggcagctaccaactttgaaacccatcctggccgacattgagtacctgcaagatcaacatctgttgctcacagtgaagagcatggatggctacgagagctatggtgagtgcgtagtggctctgaaaagtatgattggatccacggctcaacagtttctcacgtttctgtctcatcgcggcgaggagactgggaacattaggggatcgatgaaggtcagagtccctactgagagactcggaaccagggagagactgtatgagtggatatcaatcgacaaagacgaggctggtgcgaaatccaaggcgccctcagtgtccaggggatctcaggaaccaaggtccgggagcaggaaaccggcctttacagaggcttcctgccctctgtcacggctgtttgaggaacctgagaagccaccgccaaccgggcgccccccagccccacctcgagctgccccccgggaagagcccttaacacccagactcaaacccgaaggagctccggagcctgagggtgtggctgcacctccccccaagaatagcttcaacaacccggcctattatgtcctagaaggtgtgccacaccagcttctgccccctgaacctcctagtccagcacgtgctcctgtgcctagtgctacgaaaaataaggtagccattacagtcccagcccctcagctaggccaccaccgtcatccaagggtgggggaaggcagctcatcagatgaggagagcggaggaaccctgcctccccctgactttccaccccccccgttaccagatagtgctatcttcttgccacctagtcttgacccactacccggcccggttgtgcggggtcgagggggagctgaagctagaggccctccaccgcccaaagctcatccacgaccacctctgccaccaggaccctcaccagcatcgacttttttgggggaggtcgcttccggcgatgaccgcagctgttctgtgctccagatggcaaagacgctgtccgaggtagattacgcccccgctggacccgcacgatccgcactgttaccgggcccacttgaactgcagcccccaaggggcctcccaagcgactatggacgtcctctttccttcccccccccaaggatccgcgagtccattcaggaggatttggccgaagaagcaccatgcctccagggcggccgcgcttccgggctgggggaagcgggaatgagtgcatggcttcgcgccattggcctcgaacgctatgaagagggcctcgtccacaatggatgggacgacctagagttcctgagcgatattactgaagaggatctggaagaggctggcgtacaagaccctgcccacaaacgtctgttattggacaccctgcagctctccaaatag

SEQ ID NO: 191416 - DNA, 57 bp, synthetic construct
  misc_feature 1..57: note = Description of Artificial Sequence: Synthetic coding sequence
  source 1..57: mol_type = other DNA
atggccagcgcctgcggcgcccccggccccggcggcgccctgggctctcaggcgtag

SEQ ID NO: 191417 - DNA, 474 bp, synthetic construct
  misc_feature 1..474: note = Description of Artificial Sequence: Synthetic coding sequence
  source 1..474: mol_type = other DNA
atggtgacccggctgctgcagcagcagaacctgccccagaccggcgaacaggagttggagagtttagtgctgaaactcagtgtgttaaaagactttctgagcggaatccagaagaaggccctgaaggccctacaggatatgtccagcaccgccccacccgcaccccagccttccactcgcaaagcaaaaaccatcccagtacaggcgtttgaggtcaagctggatgttacattaggcgacttgaccaagatcgggaaatctcagaagttcaccttatcagtggatgtcgagggcggccggctggttctgctccggaggcagcgggattcccaagaagactggacgacctttactcacgatcgaattagacaactaatcaagtcacaaagagtgcagaataaactgggcgtcgtgttcgagaaagagaaagataggactcagagaaaggacttcatctttgtctccgctcgttag

SEQ ID NO: 191418 - DNA, 1200 bp, synthetic construct
  misc_feature 1..1200: note = Description of Artificial Sequence: Synthetic coding sequence
  source 1..1200: mol_type = other DNA
atgagcgacatcctgcgggagctgctgtgcgtgagcgagaaggccgcgaatatagcccgggcttgccgccaacaggaagccttgttccagctgctcatcgaggagaagaaggagggggaaaaaaataaaaaatttgccgtggacttcaagacactcgccgacgttctggttcaggaggttattaaacagaatatggagaataagttccctggactggagaaaaacatctttggtgaggagtctaatgagttcaccaacgactggggggagaagattactcttcgtctctgtagtacagaagaggaaaccgccgaactcctgagcaaagttctaaacggaaataaggtggcaagtgaggcactggccagggtggtgcatcaggatgtggcctttacagacccaactctggattcaacagaaattaatgtacctcaagatatcctcggaatatgggtggaccctatcgacagtacttatcaatacatcaagggaagcgccgacataaagtccaatcaaggcatcttcccttgtggcttacagtgtgttacgattctgatcggggtgtatgacattcagacgggtgtcccgctcatgggagtcattaaccagccctttgtttcacgcgatcccaatacactcaggtggaaggggcaatgttactgggggttaagctacatggggacgaatatgcatagcctccagcttaccatcagtagacgaaatggtagtgagacacacactggcaataccggctccgaggctgcttttagccccagttttagtgctgttattagcacttctgaaaaggagaccataaaggccgctctctccagggtttgtggggaccgcatatttggtgctgccggagcaggctacaaaagcctgtgtgttgtgcagggacttgtggacatctacatattctctgaagatacgacctttaagtgggactcatgcgccgcccacgccattctccgagctatgggaggaggcatcgtcgatctgaaagaatgtctagaacggaaccctgagacgggtcttgatctgccacaactcgtttatcatgtggaaaacgagggtgcagccggcgtggataggtgggcgaataagggcggtctgatcgcatacaggtcccgtaaacggctcgagactttcttgtccttgcttgtacagaacctggcgccagccgaaacccacacttag

SEQ ID NO: 191419 - DNA, 1200 bp, synthetic construct
  misc_feature 1..1200: note = Description of Artificial Sequence: Synthetic coding sequence
  source 1..1200: mol_type = other DNA
atgagcgacatcctgcgggagctgctgtgcgtgagcgagaaggccgccaacatagcccgggcttgccgtcagcaagaggccctttttcaactgctgatagaggagaaaaaagaaggagagaagaacaagaagtttgctgttgactttaagacactggccgatgttctggtgcaggaagtgattaagcagaatatggagaataagttcccgggtctagagaagaatatttttggagaagagagtaatgaattcaccaacgactggggagaaaagattaccttgaggctgtgcagtactgaggaagaaaccgccgaattactctctaaggtcctgaacgggaacaaagttgcatctgaggcattagcacgtgtggttcaccaagatgtcgcgtttaccgaccccaccctggatagcacggagattaatgtgccccaggacattctgggaatttgggttgatcctattgattcaacttaccagtacattaagggctccgccgacattaaatccaaccaaggcatattcccatgcggcttacagtgtgtgacaatcctgataggagtgtacgacatccagacaggtgtacctttaatgggggtgataaatcagccctttgtctctagggacccaaacacccttagatggaaaggccagtgttattgggggcttagctatatgggtaccaacatgcatagcctgcagctcaccataagccgcagaaatggctccgagacccacacgggcaacaccggcagtgaggccgccttttcaccaagcttttcggccgtcattagcactagtgaaaaagagaccatcaaggcagccctttccagagtctgcggcgacagaatctttggtgccgcaggcgctggttataagtccctctgcgtggtccaaggcctcgtagacatctacatcttctctgaagatacaacctttaaatgggactcttgtgcggcccacgctatcttacgcgccatgggaggcggaatcgtggatctgaaggaatgtctggagcgcaatcccgagactggactcgatctgccacaattagtctatcacgtcgaaaatgaaggcgcagccggcgtcgacagatgggccaacaaagggggtcttattgcataccgcagccgcaagaggttagagacattcttgagtttactggttcaaaacttggcacccgccgagactcacacatag

SEQ ID NO: 191420 - DNA, 468 bp, synthetic construct
  misc_feature 1..468: note = Description of Artificial Sequence: Synthetic coding sequence
  source 1..468: mol_type = other DNA
atgagcgacatcctgcgggagctgctgtgcgtgagcgagaaggccgcgaatattgcccgtgcctgtagacaacaggaggcgctgtttcagttgctgatcgaagagaaaaaggagggcgagaagaataaaaagttcgctgtggattttaaaacactggccgacgtgctggtgcaggaggttatcaagcagaacatggagaacaaatttccgggattggagaagaacatctttggcgaggagagtaatgagttcaccaacgattggggcgaaaagataacactgaggctttgctctaccgaggaggaaaccgcagaattgttatccaaagtcctaaacgggaataaagtcgctagtgaagccctggctagggtcgttcaccaggacgtggcattcactgaccccacccttgattccacggagattaacgtgccccaggatatcctgggcatctgggtggaccccatttag

SEQ ID NO: 191421 - DNA, 267 bp, synthetic construct
  misc_feature 1..267: note = Description of Artificial Sequence: Synthetic coding sequence
  source 1..267: mol_type = other DNA
atgagcgacatcctgcgggagctgctgtgcgtgagcgagaaggccgccaacatcgcccgggcctgtcgtcagcaggaggctctgtttcagttactgattgaagagaagaaggaaggtgagaagaacaaaaaatttgctgtggattttaagactctggccgatgtccttgtccaagaggtcattaagcaaaacatggaaaataaattcccaggcctggagaagaacatcttcggagaggaaagcaacgagttcaccaacgactggtag

SEQ ID NO: 191422 - DNA, 639 bp, synthetic construct
  misc_feature 1..639: note = Description of Artificial Sequence: Synthetic coding sequence
  source 1..639: mol_type = other DNA
atgagcgacatcctgcgggagctgctgtgcgtgagcgagaaggccgccaatatagctcgggcgtgcaggcagcaggaagcactgtttcagctgctgatcgaggaaaaaaaggagggcgagaaaaacaagaaatttgccgtggactttaaaactcttgccgacgtcttagtgcaggaagtgatcaaacaaaacatggagaataaatttcccggactcgagaagaatatcttcggcgaggaatccaacgagtttacaaatgattggggggagaagatcacattgcgcctgtgcagtaccgaagaggagactgcagagctcctatctaaagtcctcaacggtaacaaggtggcatccgaggccctggccagagtggtgcaccaggacgtggcatttaccgacccgacactggacagcacagagattaacgttccacaggatattctaggtatttgggtggatcctattgatagcacctaccagtatatcaagggttccgcagatattaagagcaatcaggggattttcccatgcggtctgcaatgcgtgacaatcctgatcggcgtgtatgatatccagactggcgtaccccttatgggcgttatcaatcagcccttcgtttcacgagatcctaacacctag

SEQ ID NO: 191423 - DNA, 30 bp, synthetic construct
  misc_feature 1..30: note = Description of Artificial Sequence: Synthetic coding sequence
  source 1..30: mol_type = other DNA
atgagcgacatcctgcgggagctgctgtag

SEQ ID NO: 191424 - DNA, 642 bp, synthetic construct
  misc_feature 1..642: note = Description of Artificial Sequence: Synthetic coding sequence
  source 1..642: mol_type = other DNA
atgagcgacatcctgcgggagctgctgtgcgtgagcgagaaggccgctaacattgctagagcctgtaggcagcaggaagcccttttccagctgctgatcgaagagaaaaaggaaggcgagaagaataagaagttcgctgtcgactttaaaacattagccgacgtgctcgtgcaagaagtgattaaacagaacatggaaaacaaatttcccgggctggagaaaaacatctttggcgaagagtctaatgaattcactaacgattggggagagaagataactctccggctatgctcgactgaggaggagaccgctgaacttttgtctaaagtgttgaatggaaacaaggtggccagtgaagcactggcaagagttgtgcaccaggacgtggcatttactgaccctacactggactccaccgaaattaatgtaccccaagacatattgggcatctgggttgaccctatagatagtacttatcagtacattaagggtagtgctgatatcaagtccaatcagggaatcttcccctgcggtctccagtgcgtcactattctcattggtgtgtacgacatccaaacaggggttcccctcatgggcgtcatcaatcagccttttgtgtcaagagatccaaatacactctag

SEQ ID NO: 191425 - DNA, 573 bp, synthetic construct
  misc_feature 1..573: note = Description of Artificial Sequence: Synthetic coding sequence
  source 1..573: mol_type = other DNA
atgagcgacatcctgcgggagctgctgtgcgtgagcgagaaggccgctaacatagctagagcctgcagacagcaagaagcactttttcagctgttgatcgaggagaaaaaagagggtgaaaaaaataagaagtttgcggtagactttaagaccctcgccgatgtgctggtccaggaggtgatcaagcagaacatggaaaataagttccccggcctcgagaaaaacatattcggggaggagtcaaatgaattcacgaacgattggggtgagaagatcaccctccgactgtgcagcaccgaggaggagaccgccgagttactgtcaaaggtcttgaacggcaataaggtcgccagtgaagctctcgccagagtcgtccatcaggacgtggccttcaccgatcccaccctcgacagcaccgagatcaatgtgccccaggatattctgggcatttgggttgatcctatcgactccacatatcagtatattaaagggtccgccgacattaagtccaaccagggcatattcccctgtggcctgcagtgtgtgactattctgatcggggtttatgactag

SEQ ID NO: 191426 - DNA, 93 bp, synthetic construct
  misc_feature 1..93: note = Description of Artificial Sequence: Synthetic coding sequence
  source 1..93: mol_type = other DNA
atgagcgacatcctgcgggagctgctgtgcgtgagcgagaaggccgcgaacattgctcgggcgtgtaggcaacaggaagctttgtttcagtag

SEQ ID NO: 191427 - DNA, 207 bp, synthetic construct
  misc_feature 1..207: note = Description of Artificial Sequence: Synthetic coding sequence
  source 1..207: mol_type = other DNA
atgagcgacatcctgcgggagctgctgtgcgtgagcgagaaggccgccaatatcgccagagcttgtagacaacaggaggcactgtttcagctgctaatcgaggagaaaaaggagggcgaaaagaataagaaattcgccgtggactttaaaacattagccgacgtgctcgtacaggaagtgataaagcaaaacatggaaaataagtag

SEQ ID NO: 191428 - DNA, 432 bp, synthetic construct
  misc_feature 1..432: note = Description of Artificial Sequence: Synthetic coding sequence
  source 1..432: mol_type = other DNA
atgagcgacatcctgcgggagctgctgtgcgtgagcgagaaggccgccaacattgctcgggcctgccgccagcaggaagctttatttcagctcctgattgaggagaagaaagaaggagaaaagaacaagaaatttgctgtcgacttcaaaaccctggcagatgtcctggttcaagaagtaattaagcagaacatggaaaacaagttcccagggttagaaaaaaacatcttcggcgaagagtccaatgaatttacaaacgattggggcgagaaaattacgctccgcctctgttcgacagaagaggaaacagctgagctgctgtctaaggtcctgaatgggaataaggttgcctctgaggcgttggcccgggtggttcaccaggatgtcgcctttaccgacccaacactggattcaaccgaaattaacgtttag

SEQ ID NO: 191429 - DNA, 1200 bp, synthetic construct
  misc_feature 1..1200: note = Description of Artificial Sequence: Synthetic coding sequence
  source 1..1200: mol_type = other DNA
atgagcgacatcctgcgggagctgctgtgcgtgagcgagaaggccgccaacatcgcacgagcatgtcgacagcaggaagctctttttcagctgttgatcgaagaaaagaaggagggcgagaagaataagaaattcgccgtcgattttaagacactggcagatgttctggtccaggaagttattaaacagaacatggaaaataagttccccggactagaaaagaatattttcggagaagaatcaaacgagtttactaacgattggggtgaaaaaatcacactgaggctttgttccaccgaggaagaaaccgctgagctgctatctaaggtcttgaatgggaataaggtggcgtccgaagccctggctagagttgtccatcaggacgtagcatttaccgacccaactcttgactccactgaaatcaacgtccctcaggacatcttgggcatttgggtggaccccatcgattccacctaccagtatatcaaaggatccgctgacatcaagtcaaaccagggcatcttcccctgtgggctccagtgtgtcacgatccttatcggcgtgtatgatattcagaccggagttcctctgatgggggtgataaatcagccttttgtctcccgggatccaaacacgctccgctggaaggggcagtgctactggggcctttcctatatgggaactaacatgcacagcttgcagctgactataagtagaaggaacgggagtgagacccacacaggtaataccggcagtgaggctgctttctccccctcttttagtgccgtgatttcgacttccgaaaaggagaccatcaaggcagctctgagtagagtctgcggagaccggatatttggcgccgctggggccggctacaagtccttgtgtgtcgtgcagggactcgttgatatctacatattctcagaggatacaacattcaaatgggactcttgtgctgctcacgctattctcagggcgatgggaggagggatcgtagatctcaaggagtgcctcgagcggaatcccgagaccgggttggatctaccccagttggtttaccacgtagagaacgagggcgctgccggggtggatcgttgggctaacaagggtggcctaatcgcctacaggagccgcaagcggcttgagacatttctgagcctgctcgttcaaaatcttgctccggccgaaacacacacatag

SEQ ID NO: 191430 - DNA, 2934 bp, synthetic construct
  misc_feature 1..2934: note = Description of Artificial Sequence: Synthetic coding sequence
  source 1..2934: mol_type = other DNA
atgaccgcccgggagcacagcccccggcacggcgcccgggcccgggccatgcagagggcgtctacaatcgacgttgcagcggacatgctggggctctctcttgcaggcaacattcaggacccagatgagcctattctggagttttcattagcctgctccgagctgcacacaccctctctcgacaggaagcccaactccttcgtcgcagtttccgtgacaacgcctccccaggccttctggactaaacatgcccagacagaaattatcgaaggtactaacaaccccatcttcctgtccagtattgctttttttcaggactcgctaattaatcaaatgactcaggtgaaactctcggtatatgacgtgaaggatagaagccaggggaccatgtacttgctcggcagtgggacatttatcgtcaaggatctcctccaggacagacaccatagacttcatctcacactcaggtccgcagaatccgacagagttggcaacattacagtcatcggatggcaaatggaagaaaaatcagatcagagaccccccgttacaaggtctgtggacaccgttaatggacgcatggtccttccggttgacgagtcgctgactgaggcacttgggattagatccaaatatgccagcctgcggaaggataccctgctgaaaagtgtcttcggaggggccatctgcaggatgtaccgctttcctactacagatggcaaccatctgagaattctggaacagatggccgagtcagtgctaagcttacacgtaccaaggcagtttgttaagctgctgctggaagaggacgctgctcgagtgtgcgagcttgaggagctcggcgagctgtcaccatgttgggagtccttaaggcgccagatcgtcactcagtaccagacaattatcttgacgtatcaggagaacttgactgacctgcatcagtacagaggtccaagctttaaggcttcgtccctgaaggctgataaaaaactcgaattcgttcctactaacctccatatccagcgaatgagagtacaagacgacgggggctcggaccagaactatgatattgtcactatcggagcaccggctgcacactgccaaggatttaaatcaggaggtttgcggaaaaaacttcacaaatttgaggaaacaaagaaacatttcgaagaatgttgcacatcgagtgggtgccaaagtattatttatatcccacaggatgtggtgagggcgaaagagattatagcgcagattaacacactcaaaactcaggtgtcctactatgcggagcgcctgtccagagcggccaaggatcggtctgcaactgggctcgagcggacactggcaattctggccgacaaaactcgacagttggtaaccgtctgtgattgcaagctcctcgccaattcaatccacggactcaacgctgcccgaccagattatatcgcaagcaaagcttcaccaacaagtaccgaagaagagcaggtaatgctgcgcaacgatcaggacaccctcatggctaggtggactggccggaactccagaagcagtctgcaggttgactggcacgaggaggagtgggagaaggtttggctcaacgtcgacaaatccttggaatgcatcatccaaagggtcgataaactactgcagaaggagcgtttacatggagaagggtgcgaggacgtgttcccgtgcgcgggttcctgtacaagcaagaaagggaatcctgattctcacgcatactggatcaggccggaagacccattttgcgacgtgccgtcctccccctgtccttccacgatgccatccacagcgtgtcatccacacctgaccactcattgttcccctccacctgaagagtcaagtcccggcgagtggagcgaagccctctaccccctgttgaccactcttaccgactgcgtcgccatgatgtctgataaggccaagaaggctatggtgtttctgctgatgcaggatagcgctcctaccatcgcaacatacctctcattgcagtaccggcgcgacgtggttttttgtcagacactgacggccctcatttgcgggttcatcattaagctgcgaaactgcctgcatgatgatggattcctgcggcagctctacacaataggcttgctggcgcagttcgaatctttattgtccacctacggagaggagctggccatgcttgaagacatgtccctgggtatcatggatctgcgcaatgtcactttcaaagttacacaggcgaccagttccgcgtccgccgacatgctgcccgtaatcacaggaaatagggacggcttcaatgtaagggtcccgctgccaggaccgttattcgacgcactgccaagggaaatccaaagcgggatgctcttgcgcgtccaacccgtattatttaacgtcggcatcaacgagcaacaaacgctggccgagcgatttggcgacacgtctctgcaggaagtcattaatgtagaatcactggtgcgtctcaattcctacttcgagcagttcaaagaggtgttgcctgaggactgccttcctagatccaggtcacaaacttgtcttcccgagctgctacgttttctgggccagaatgtccatgctaggaagaacaagaacgttgatattctatggcaggcagccgaaatctgccgccggctgaacggcgtgagatttaccagctgcaaatctgcaaaagaccgtaccgcaatgagcgtcactctcgaacaatgtctaatcctccaacacgagcacggaatggctcctcaggtgttcactcaggcactcgagtgcatgcgcagcgaaggttgtcgtcgcgagaatactatgaaaaatgtgggaagcaggaaatacgcctttaattcacttcagcttaaggccttcccgaagcactacaggccacccgagggaacatacggaaaagtggaaacgtag

SEQ ID NO: 191431 - DNA, 2817 bp, synthetic construct
  misc_feature 1..2817: note = Description of Artificial Sequence: Synthetic coding sequence
  source 1..2817: mol_type = other DNA
atgaccgcccgggagcacagcccccggcacggcgcccgggcccgggccatgcagagagcttctaccatcgatgtcgctgccgatatgcttggcctgtcacttgccgggaatatccaagaccccgacgagccaatactggagttctctctggcttgtagtgaactgcacacgccctcccttgataggaagcccaacagctttgtggctgtgtcagtgaccactcccccacaggctttttggacaaagcatgcccagacagagatcattgagggaaccaacaatcccatttttctgagtagtattgcattttttcaggactcactgatcaaccagatgacccaggtgaagctgtcagtctatgacgttaaggacaggtctcaaggaaccatgtatctgctcgggtcggggacatttatagtgaaggacctgttgcaagatagacaccaccggctccatctgaccttacgtagcgccgagagcgaccgagtaggcaacatcactgtcataggatggcagatggaagaaaaatcagatcaacgcccaccagtaaccagaagcgttgacactgtcaatgggcgtatggtgctgcccgtggatgaatccttaaccgaagcactggggataaggagtaaatacgccagcttgaggaaggacacactgttgaagtctgtattcggtggggcaatctgccggatgtaccgtttcccaaccactgacggaaaccacctgcggattctcgaacaaatggcagaatcggttctcagcctccacgttcccaggcagtttgtcaagttgctcctggaagaggacgccgcaagagtttgcgagctggaagagctgggggaactgtccccttgctgggagtcactgagacggcagatcgttacacaataccaaactatcatcctgacctatcaagagaatctcaccgatttacatcaatacagaggccccagttttaaagcaagtagcctgaaggccgataaaaagctcgaattcgttcccaccaacctgcacatccagagaatgcgtgttcaggatgatggaggatctgaccaaaattacgacattgtgactatcggcgcccccgcagcacattgccagggcttcaagagcggcggactcagaaaaaagctgcataagttcgaagagacgaaaaagcatttcgaggagtgttgtacatcttccggatgtcagagcattatttatatcccccaggacgtggttcgcgccaaggagatcatcgcccagataaacactttgaaaacacaggtttcttactatgctgaacggctgtcacgagccgcaaaggatagatcagcaaccggtctcgagcgcacgctcgcgatactggccgacaaaaccagacagttggtcaccgtttgtgactgcaagctcttagccaattccatacacggcctcaacgcagcacgaccggattacatcgcctccaaagcctctcccacatccaccgaagaagaacaggtgatgctgaggaacgaccaggataccctgatggcgaggtggactggccgcaactcccgctcatcactgcaggtggactggcacgaggaggagtgggagaaagtctggcttaatgtcgacaagtctttagaatgcattatacagagagtggacaagcttcttcaaaaagagagattacacggggaggggtgtgaagacgtgttcccctgcgctggatcttgcacttccaaaaaagactgttctccacctcccgaggagagcagccccggtgagtggtccgaggccctctatcccctcctgaccacattaaccgactgcgtcgccatgatgtccgataaggcgaagaaagccatggtcttcctgctgatgcaggactccgccccaacgatcgctacctatttatctttacagtaccggcgcgacgttgtgttttgccagacactcaccgccttaatttgcggtttcattatcaagctgaggaattgcctgcacgacgacggatttcttagacagctgtataccatcggattgttagcacagttcgagtctctgttatccacttatggagaggagctggctatgctggaggatatgagcctgggaattatggacctgcgcaatgtaactttcaaagtaacccaggccacctcctctgcgagcgcggacatgctccccgtcatcactggaaaccgagacggctttaatgttcgggtgccgcttcccggcccactattcgatgctctgccaagagagatacagtccgggatgctgctgcgggtccaaccagtgttgtttaatgtgggcataaatgaacagcaaaccctggcagagcgcttcggggacacaagcctgcaggaggtgattaatgtggaaagccttgtcagactgaacagctacttcgagcagttcaaagaggtgctgcctgaggattgtctccctagatccagaagtcagacttgcctgcccgagctgttgaggtttttggggcaaaatgtccacgcaagaaaaaacaagaacgtggacatattgtggcaggctgccgaaatctgtagacgtctgaatggtgtgcgcttcacctcctgcaagtccgccaaagatcgcacggccatgagcgtcaccttggagcaatgtctgatacttcagcacgaacatggaatggctcctcaggtgttcacccaagcgctcgagtgcatgaggtcagaaggctgtcgccgagaaaacacaatgaaaaatgttggctcgcggaagtatgcctttaactcgctccaactcaaggcttttcccaaacattacaggcctcctgaaggcacgtacgggaaggtggaaacgtag

SEQ ID NO: 191432 - DNA, 2865 bp, synthetic construct
  misc_feature 1..2865: note = Description of Artificial Sequence: Synthetic coding sequence
  source 1..2865: mol_type = other DNA
atgaccgcccgggagcacagcccccggcacggcgcccgggcccgggctatgcagcgtgccagcacaattgacgtcgccgccgacatgctcgggttgagcctggccgggaacatccaagacccagacgaaccaatcctagaatttagccttgcctgttccgagctccacactccctcccttgatcgaaaacccaactcttttgttgcagtatcagttacgactccgccccaggctttttggacgaagcacgcacagactgaaattattgagggcacaaacaaccctatcttcctaagctctattgccttcttccaagattcgctcattaatcaaatgacacaggtcaaacttagcgtgtatgacgtgaaagacaggtcccaaggcacaatgtacctgctcggtagtggcacattcatcgtgaaggatttgctgcaagacagacatcatcggctacacctgacattgagaagcgccgagtcggacagggtggggaatatcaccgtgatcggctggcagatggaagaaaaatccgaccagcgcccaccagtcaccaggtctgtggacactgttaacggcagaatggtactgcctgtggatgaaagtctgactgaagcactgggcatccggtctaagtatgctagcctgcgcaaagataccctccttaagtcagtctttggtggcgcaatatgccgcatgtaccgcttccctaccaccgacggaaatcatttaagaattctcgaacagatggctgaatccgttctgtcactgcatgttcctcgacagtttgtgaagttgctgctggaggaggacgctgctagggtatgcgagctggaggaattaggggagctgtccccatgttgggaatccttacgtagacaaatagtaactcagtatcaaactataatcctgacataccaggaaaacctgacggatctccaccagtacaggggacctagctttaaggcctcgtccctgaaggccgataaaaaacttgagttcgtaccgactaacctacacatccagaggatgcgcgtgcaagatgacggggggtctgatcagaactatgatatcgtgaccataggcgcccctgcagcccactgtcagggtttcaagagcggaggactcaggaagaagctgcacaaatttgaggaaacaaaaaagcactttgaagagtgctgcacatcctccgggtgccagagtatcatatacataccccaggatgtggtgcgagccaaagagatcattgcccagatcaacacacttaagactcaggtgagctattacgcagagcgcctgtcacgagccgctaaagaccgatccgcaactggtctggagaggacgctggctatcttggctgacaagacgcgccagctcgtgaccgtgtgtgactgtaaattgctggctaacagtatccatggcttaaacgctgcaagacccgactatattgcttccaaagcttcaccgacaagcactgaggaggaacaggtcatgctaagaaacgatcaggacacactaatggccaggtggactggcaggaacagccgctcatcactccaagtcgattggcacgaagaggagtgggagaaggtctggctgaatgtggataagagtcttgaatgtattatccagagagtggataagcttctgcagaaggagcgcctccacggagaaggttgcgaggacgtgttcccatgcgcgggaagctgcacatctaagaaagactgcagtcctccacccgaggagtcctctcccggagagtggtccgaggcactgtatcctctgctgacaactctgaccgattgtgtagccatgatgagcgacaaagctaagaaagctatggtattcctgctcatgcaggactcggctcccaccatcgctacctacttatcccttcagtatcgacgggacgtcgtattttgccaaaccctgacagctctcatatgtggctttatcataaagctgcgcaactgcttacatgacgacgggtttctcagacagctctacaccatcggtctgctggcacaatttgagtctctcctctctacctatggcgaggaactcgcgatgctcgaagacatgtccctaggcattatggacctacgtaatgtgacctttaaggtgactcaggccactagctctgccagcgcggacatgctccccgtgataacaggaaatagagacggatttaacgtgcgagtaccccttcccggtccactctttgacgctttacctcgagagatacagtccggtatgttactccgggtgcagcctgtcctgtttaatgttgggattaacgagcagcaaaccctggccgaaaggtttggcgacacaagtcttcaggaagttattaacgttgagagtctcgtgcgcctcaatagctacttcgagcaatttaaagaggtgctccccgaggattgtttgccacgctccaggtcacagacctgcttgcccgagctgttgagattcttgggccaaaacgtccacgcgcggaaaaacaagaatgtggacattctgtggcaggcagccgagatttgccgccgtctcaatggggttaggttcacaagttgtaagtcagcaaaggaccgcactgcgatgtctgtgaccctcgaacaatgtcttattttgcagcatgagcacgggatggccccccaggtttttactcaggctttggagtgcatgcgatcaatcggtaccagggaggtggttacgcagaagaatttgtcaggactggtgcctattcgtgacctgcgactggatcctagcctgctctgtagcatccctctcctagccctcagccctaacttgctgatcgtctggctcttcctgtccatagcttacttggtcactaaactgcgctgtaagtag

SEQ ID NO: 191433 - DNA, 2919 bp, synthetic construct
  misc_feature 1..2919: note = Description of Artificial Sequence: Synthetic coding sequence
  source 1..2919: mol_type = other DNA
atgaccgcccgggagcacagcccccggcacggcgcccgggcccgggccatgcagcgagcaagcacaatcgacgtggctgccgacatgttgggcctttctcttgcaggtaacattcaggaccctgacgaaccaattctcgaattctccctagcctgctcagagttgcacaccccgagtttagataggaaacctaactctttcgtcgccgtcagcgttacaactcctcctcaggcgttctggaccaaacacgcacaaacggagatcatcgagggaaccaacaatccgatctttctatcatcaatcgcattcttccaggactcactgatcaaccagatgactcaagtgaagctgagcgtgtacgacgtcaaggatcggagtcagggcaccatgtacctgttaggctcagggactttcatcgtgaaggacctgctgcaggaccggcatcacagactccatttgactctgaggagcgcagaatcagaccgtgttggtaacataactgtgattgggtggcaaatggaagagaaatcagaccagcggccacccgtcactcgctccgttgacactgtgaatggtcgtatggtgctgccagtcgacgaaagtctgaccgaggctctgggtattaggtcaaagtacgcaagtctgcgcaaggataccctgctcaagagcgtcttcggaggagcaatttgccgcatgtaccgctttccaacaaccgatggcaatcacctgcgtatcctcgagcagatggctgagagcgtgctctctctgcacgtgcctcggcagttcgttaaactgctgctggaggaggacgcggctcgtgtctgcgaactcgaggagctcggagaattatctccctgctgggaaagtctccggagacagatcgtgacgcaatatcaaacgattattctgacataccaggaaaatctgactgatctccatcaatatcgcggaccctcctttaaagcgagctccttgaaggcggataagaagctggagtttgttcctacaaacttgcacattcagaggatgagggtgcaagatgatggcggctcggatcaaaattacgatattgtcacaatcggcgcgccggcagcccactgtcagggtttcaaatcgggagggctaaggaaaaagttgcacaaatttgaggaaactaaaaagcatacctcctccggttgtcagagcattatatatatcccccaggacgttgtcagggccaaggaaattattgctcagataaataccttaaagacccaagtcagctactacgccgagaggttgagtagggccgccaaggataggagcgccactgggctagaaagaacgttggccatcttagcagacaagaccaggcaacttgtaaccgtgtgtgactgcaagctgctcgcgaacagcatccatggcttgaacgctgccagacctgattacatagcttcaaaggcctcccccacatcaactgaggaggaacaagtgatgctgcgaaacgatcaagacaccctgatggccagatggacagggagaaatagccgctcttcactccaagtggactggcatgaggaagagtgggagaaggtatggttgaacgtggataaatctttagaatgtatcattcaacgtgtcgataagctgctccaaaaggaaaggctccatggggaaggctgcgaagacgtgttcccatgcgccgggagttgcacaagcaagaaaggcaatcccgactctcatgcttactggatacgccctgaggaccccttctgcgacgtcccaagttccccttgcccgtccacgatgccttcaacagcttgccacccccacctgaccacgcactgctcaccgcctcctgaagagtcctcaccaggggaatggagcgaggccctgtaccccctcctgacaaccctgactgactgtgtggcaatgatgtctgataaagcaaagaaggccatggtgtttttgctgatgcaggatagtgcccctaccattgccacatacctctccctgcagtacaggagggacgtcgtgttctgccagaccctgacggctttaatctgcggctttattattaaactcagaaattgcctgcacgacgacggcttcctgcgccagttgtacaccattggacttctggcccagtttgaaagtcttctctcgacatatggtgaggaactggccatgttggaggacatgagcttagggatcatggatttgcgtaatgtgacgttcaaggttacccaagcaacttcgtcggccagtgcagacatgctgcccgtgattactggtaaccgggatgggtttaacgtgcgggtgcccctgccaggaccactctttgacgcccttcccagagagatccaatcaggaatgctattacgcgtgcagcctgtcttgttcaatgtgggcattaacgaacagcaaacattagccgagcgattcggcgacacttccctccaggaggttattaacgtagaaagcttagtgcgattgaacagctacttcgaacagttcaaagaggtacttccagaggactgtctccccaggtctcggagccagacatgtcttcctgagctccttagattcctgggtcagaacgtgcatgctcggaagaataagaatgtagatattctgtggcaggcagccgaaatatgtcgtcgcctcaacggagtgcgcttcacatcatgcaagtcagccaaagaccggacagccatgagcgtgaccttggaacagtgtcttattctgcagcatgagcatggtatggcccctcaggtctttacccaggcgctagaatgtatgcgctcggaagggtgtcggcgcgaaaataccatgaagaacgtgggctctcgcaaatacgcatttaattcactgcaacttaaagcctttcccaagcattatcgaccgcctgagggaacctacggcaaagttgagacgtag

SEQ ID NO: 191434 - DNA, 2934 bp, synthetic construct
  misc_feature 1..2934: note = Description of Artificial Sequence: Synthetic coding sequence
  source 1..2934: mol_type = other DNA
atgaccgcccgggagcacagcccccggcacggcgcccgggcccgggcaatgcagagagcctccacgattgacgtcgcagccgatatgctcggtttgtccctcgccggcaatatccaggatcctgacgaacctattcttgagttctcgctcgcctgctcggagcttcatacaccaagcctcgaccgcaagcccaattctttcgtcgctgtgagcgtcacaacaccacctcaggctttctggaccaaacatgcacagaccgagatcattgaggggaccaacaatcctatctttttgtcgtccatagccttctttcaggacagtctgataaatcaaatgacccaggtcaaactcagcgtgtacgacgtgaaagaccgtagccaaggaaccatgtacctcttgggatcaggaacctttatcgtcaaggacctcctccaagacagacaccaccgactgcacctgacactcaggtctgcagaaagtgacagggtcgggaacattacagtgatcggctggcagatggaagaaaaatccgatcagcggcctcccgtcactaggtcagtggataccgtcaatggtcgcatggtgctccccgtcgacgagtcccttacggaggcattaggcataagatccaagtatgcctcactcagaaaggacaccctgctgaagagcgtattcggcggtgcaatctgcagaatgtataggtttcccacgactgatggcaatcacctgcgaatcctggaacagatggctgagtcggttctctctctccatgtgcccaggcagttcgttaagttgcttctggaggaggatgccgctcgtgtgtgtgagctggaggagctgggcgaactgagcccctgttgggagtcacttcgcaggcaaatcgttactcagtatcagacaatcatcctgacttatcaggagaatctaacagaccttcaccagtatcgaggaccatctttcaaggccagttcactcaaagccgacaagaagctcgaatttgtcccaacaaatcttcatatacagcgcatgcgcgtgcaggatgacggggggtccgaccagaactacgacattgtgaccataggcgctcctgctgcccactgtcagggcttcaagagtggagggttgcggaaaaagctgcataagtttgaggaaacaaagaaacactttgaagagtgttgcacctcttccggctgccaaagcatcatttacattccccaggacgtcgtgcgcgcgaaagaaatcatagctcagattaacacactgaaaacccaggtgtcttactatgcagaacggctgtctagagctgcaaaggatagatctgcaactggcttggaaagaacccttgccattttggcagataagactagacagctggtgaccgtgtgcgattgcaaactgctcgccaattccatccacgggctgaatgcagcacgacctgattacatcgctagtaaagcctctccgacatcaacagaggaagagcaagtgatgctccggaatgatcaggacactttgatggctcggtggacaggacgaaattcgagaagcagcctgcaagtggattggcacgaagaagagtgggaaaaggtttggttaaatgtggacaaatcattagaatgcattattcagcgcgtcgataagcttttgcagaaggagagattgcacggggagggatgcgaggacgtgttcccctgtgctgggtcctgtacgagtaagaagggcaaccctgactcccacgcgtactggattagacctgaggatccattctgtgacgtgccttcttccccatgtcccagcactatgccatcaactgcatgccatcctcacctgaccacccattgctccccccccccggaggaatcatcccctggcgaatggtcagaggcgctatatcccttgctgaccactctgacagactgtgtcgccatgatgtcggacaaggcgaaaaaagccatggtttttctgctgatgcaggacagcgctcctaccatcgcaacatatctaagcctccagtatcggcgtgacgttgtgttctgtcagactctaaccgccctcatttgcggttttatcattaagctccggaattgcctgcacgatgacgggttcctgaggcagctctacaccatcggcttgctggcccagttcgaaagcttattgtctacttatggggaggaactggccatgctggaagatatgtctctaggaataatggatctccgtaatgttacattcaaggtcacccaggccactagcagtgcgtctgcagacatgcttcccgtaataacaggtaacagagatgggttcaacgtacgggttccactacctggcccattgtttgacgcgttgcccagggagatccaatctggcatgctgctgcgggtgcaacccgtactgttcaatgtggggattaacgaacaacagacactggctgagagattcggcgatacatctctgcaggaagtcataaacgtcgaatcgctggtgagactcaatagctactttgaacagttcaaggaagtgctccctgaggactgtctgcctcgcagtcggtcgcagacgtgcttaccagagctgctgaggttcttaggccagaatgtgcacgctcggaaaaacaaaaacgtggacatattatggcaggctgccgaaatctgtaggaggctgaatggcgtgcgattcaccagttgtaagtctgcgaaggatcggacagccatgagcgtgaccctcgaacagtgcttaatcttgcaacacgagcacgggatggctcctcaggtgtttactcaggcactcgaatgcatgcggtccgaagggtgccgaagagaaaacactatgaaaaatgttggaagcaggaagtatgcgttcaacagtctccagctgaaagccttccccaaacactacagaccacccgaaggcacatatggtaaggtggagacctag

SEQ ID NO: 191435 - DNA, 2817 bp, synthetic construct
  misc_feature 1..2817: note = Description of Artificial Sequence: Synthetic coding sequence
  source 1..2817: mol_type = other DNA
atgaccgcccgggagcacagcccccggcacggcgcccgggcccgggccatgcagcgcgcatctaccatcgacgtggcagccgacatgcttggactatcattggcaggcaatattcaggaccctgatgagcctatcttggagttctccttggcatgttccgagcttcacacgcctagcctcgatcgcaagccaaatagctttgtcgcagtgtcggtgacaacaccgccccaagcattttggacaaaacacgcccagacagagatcatagaggggaccaacaacccaatattcctaagttccattgcgttttttcaggattcgctgatcaaccaaatgacgcaggtgaagctgtctgtgtacgacgtgaaagatcgcagccaagggactatgtacctgctaggctccggcacgttcattgttaaagacctgttgcaagatcggcaccatagactacaccttactctgcgctccgccgagtcagatcgggtgggcaacattaccgttatcggatggcaaatggaggaaaagagcgaccagcggcctccagtgacaaggtctgtcgataccgttaacgggagaatggtattacccgttgatgaatcattgacagaggctctcgggattcggagcaaatacgcttccctgcggaaagatacccttctcaaaagcgtctttgggggagccatctgtcgtatgtacaggttccccactacagatgggaatcatctccgcatcctcgagcaaatggctgaaagcgtcctgtctctccacgtcccccgccagtttgtcaagctgctgctggaggaggatgctgcccgtgtgtgcgaactggaggagttgggggagctttccccatgttgggaatcgctcaggaggcagatcgttactcaataccaaacaatcatactcacttatcaggaaaacctgaccgatctgcaccagtacagaggaccgagttttaaggcgtcttccttgaaagctgataaaaaactggaattcgttcccacaaatctgcacattcaaaggatgagagtgcaggatgatgggggatcggatcagaactatgatattgttactatcggcgctcccgcggcccattgtcagggctttaagagcggagggctgagaaagaagcttcacaagttcgaggagaccaaaaagcagcaagaggagagccgtaccagcagtggatgtcagtccatcatttatatacctcaggacgttgtgcgggcaaaggagataatcgcccaaatcaatacattgaagacgcaggtgtcctactacgctgagaggctctctcgtgctgccaaagatcgatcagccaccggattagagagaacccttgcaattctggcagataaaacgaggcagttggtaactgtgtgtgactgcaagctccttgctaattcaatccatggactcaacgcggctaggcccgattatatagcctctaaggcatcacctacgtctacagaagaggagcaggtcatgctcaggaacgaccaggatacactgatggctagatggacagggaggaatagtcggagctccctgcaagttgattggcatgaggaggagtgggagaaggtgtggctgaacgtggacaaaagccttgagtgtattatacagcgagtggataagctgctgcagaaagagcggctgcatggcgagggttgtgaagatgttttcccatgcgcaggttcttgtacgagtaaaaaggattgcagtcctccacctgaggaaagttctcccggagagtggagcgaagccctttatccattactcacaaccctgactgattgtgtagctatgatgagcgataaagccaagaaggcaatggtgttcctcctaatgcaggacagcgcgcccacaattgctacctatctgtctctgcagtacaggagagacgtggtcttctgtcagacactcactgcgctcatttgcggcttcataattaaactcaggaattgtctccatgatgacggctttctgcggcaactctacaccattgggctgctggctcagtttgagtcgctgttgtcaacatacggcgaggaactagcgatgctggaagacatgtccctgggtataatggacctccgaaacgtgacattcaaagtcacacaggcaacctcctctgcgtcagccgatatgttgccggttattaccgggaatagagacggtttcaatgtcagagtgcctctgccaggacctctgtttgatgctctgcctcgagaaattcaatcggggatgttactgagagtccagcccgtgctgttcaatgtgggaataaacgagcaacagacactcgccgagcggtttggagacacctccctgcaagaggtaatcaatgtggagtccctagtacgcctgaattcttactttgaacagtttaaggaagtgttgcccgaggattgtctgccaagaagccggtcccagacttgtctccctgagcttctacggtttctcggccagaatgttcatgcccggaaaaacaagaatgttgatatcctgtggcaggccgccgaaatttgcaggagacttaatggcgtcaggtttacatcctgtaaatccgccaaggacaggacggcaatgtctgtgacacttgagcagtgcctgatcctacagcacgagcacggcatggctccacaagtgttcacacaagccctggaatgtatgcgcagcgagggttgccggagggaaaataccatgaagaacgttggctctcgcaagtacgcctttaatagtctacaactgaaggccttcccgaagcactatcgtccccctgagggcacttatggcaaagttgaaacatag

SEQ ID NO: 191436 - DNA, 3021 bp, synthetic construct
  misc_feature 1..3021: note = Description of Artificial Sequence: Synthetic coding sequence
  source 1..3021: mol_type = other DNA
atggagggccagagcagccggggcagccggcggcccggcacccgggccggtctcggctctttgcccatgccgcaaggtgttgcccagactggtgcgccgtcaaaagtggatagctctttccagctgccggccaaaaagaatgctgcactgggtcccagcgagcctcggttagcattagccccagtgggccctagagccgccatgagcgctagtagcgagggtccacgcttggctttagcatcacctcgaccaatcctggccccgttgtgtaccccggaagggcagaagacagctacagctcaccgaagttcttctctggcccctacgagcgtagggcagctggtgatgtccgcctcggctgggcctaagccccctcccgccaccactgggagtgttcttgcacctacctcactcggcctggtgatgcctgccagcgcagggccccggtctccacctgttactctgggacctaacctcgcccccacgtcaagggatcagaagcaggaaccgccagcctccgtgggtcccaagcccacattggctgcgtccggtctgagcctggccttagcctcagaagaacaaccaccagaattgcctagcactccatccccggttccatcccccgtgctgtcccccacacaggaacaagctttggctccagcctccaccgccagcggggccgcaagtgtgggccaaacgtctgcacgtaagcgtgatgctccggccccgaggccactgcctgcctcagagggtcacctccagccacccgcgcagacttcaggacccaccggttcacctccgtgtattcaaacctctcccgacccgcggttatccccttcatttagggctcgcccagaggccctgcatagcagtccagaggatcccgtgctgccacggcctccccagaccctcccacttgacgtgggccagggcccctccgagccaggaacccactctcccggcctgctgtccccaaccttccggcccggcgccccttctggacagaccgtcccccccccactacctaagccccctagatcaccctcgcgcagtccatctcactctcccaatcggtccccctgtgtgccccccgcccccgacatggccctaccccgtttggggacacaaagtacaggccctggaagatgtttgagccctaatctacaggcacaggaggcaccagcacccgtgaccacttccagctccacgagcacgctgtcttcgagcccttggagtgctcagccgacctggaagtccgatccaggatttcggattacagttgtcacatggaacgttggtacagcaatgcctcccgatgatgtgacaagcctcttacatcttgggggaggcgacgacagtgacggcgccgatatgatcgcaatcggactgcaggaggtgaattcaatgctcaataagcggttgaaggacgcactctttaccgatcagtggtcggagctgtttatggacgctttaggccccttcaactttgtgcttgttagctccgtgaggatgcagggggtcattctgcttctttttgctaagtactatcatcttcccttcctgcgagacgtccaaacggactgcactcgaacaggattgggaggttattggggcaacaagggaggcgtttcagtgagattggcagcttttgggcatatgctctgctttctcaactgtcaccttcctgcacatatggacaaggccgagcaacgcaaagataactttcagaccatccttagtttacaacagttccaaggcccaggggctcagggcattctcgatcatgacctggttttctggttcggcgatctgaacttccgcatcgagtcctatgatttacatttcgtaaagtttgccatagactcggaccagcttcatcaactgtgggaaaaagaccagttgaatatggctaagaatacttggcctatcttaaaaggatttcaggagggtcctttgaactttgcaccaacatttaagtttgatgtggggacgaataaatacgacacgtcagcaaagaaacgcaagccagcctggaccgacagaatcttgtggaaagttaaagccccaggcggcggaccgtcgccatcagggcgaaagtcccatcgcctgcaggtgacgcaacattcttacaggagccatatggagtacaccgtatcggatcacaaacccgtagccgctcaattcctgctgcagtttgcatttcgtgatgacatgcctttggtaaggctggaggttgccgatgaatgggtgcggccggaacaggcagttgtgagataccgtatggaaactgtgtttgcacggtcctcttgggactggatcggactctacagggtggggtttcgccactgtaaagactacgtggcctacgtctgggccaagcatgaggacgtggatggaaatacatatcaggtaacattctccgaggaatcccttcctaaagggcatggggactttatcctcgggtattacagtcacaatcatagtatccttatcgggatcacggagccttttcagatcagtctgccctcttccgagctggcttcctcttcaacggatagtagcggcacctccagcgaaggggaggacgattcaacactggagcttctggcccccaaaagccgtagcccaagccccggcaagtctaaacgccatcgcagtcggtccccaggtctcgcacgctttcctggattggccctgagaccatccagtagagagaggcgaggagcaagccgctctccatcccctcagtcaaggcgactttcacgggtcgcccctgatcgaagcagtaatggttcatcgaggggatcgtcagaagagggcccgagcggcctgccaggcccctgggctttcccacccgcggtcccgagatctctcgggctcttaccggctctcagacttgagaccgtggacccaggaggaggcggcagctggggccccgacagggaagcactggctccaaattcgctatctcctagtcctcaaggacaccgcggtctggaggaaggtgggctcgggccatag

SEQ ID NO: 191437 - DNA, 1920 bp, synthetic construct
  misc_feature 1..1920: note = Description of Artificial Sequence: Synthetic coding sequence
  source 1..1920: mol_type = other DNA
atggccctgccccggctgggcacccagagcaccggccccggccggtgtctgtcaccgaatctgcaggcccaggaagcacccgctccagtcaccacgtcttccagtactagcaccctgtcaagcagcccgtggtcagcgcagcctacttggaagtctgaccccggatttcgcattacagtggtaacgtggaatgtgggcaccgctatgcctcctgacgatgtaaccagcctgttgcatctgggggggggagatgattctgatggggctgacatgattgccataggactccaagaggtgaacagcatgctgaataaacgcctcaaggacgcgctgtttaccgaccagtggtcggagctcttcatggacgcacttggcccattcaactttgtgctagtaagcagcgtgaggatgcagggggttattttgctgctattcgccaagtactaccatctgccgttcttgagagatgtgcagactgactgtacacggacaggattgggggggtattggggaaacaaaggaggggtgtctgtgcggctggcagcattcgggcatatgttatgtttcctcaattgtcacctgcccgcccacatggacaaggcagagcagcgtaaagacaacttccagaccatcttgagcctccaacagtttcagggcccgggggcccagggtatactcgatcacgacttggtgttctggtttggtgatctcaattttaggatcgagagctacgacttacattttgtcaaatttgctattgatagcgaccagctccatcagctgtgggaaaaagaccagctgaacatggccaaaaatacatggcctatccttaaaggattccaagagggacccctgaacttcgcccctactttcaaattcgacgtcgggacgaataaatatgatacttccgcaaagaagaggaagcccgcctggaccgacaggattctttggaaggtgaaagcacccggcggggggccaagcccctccggtcggaagtcccacaggctccaagttactcagcactcctacagatcccacatggagtataccgtttctgaccataagccggttgcagcccaatttctcctgcagttcgcctttcgcgacgacatgcccctggtccgactagaggtcgccgatgagtgggttcgcccagagcaggccgtggtgagatacagaatggaaactgtgttcgcccgaagttcatgggactggatcgggctgtatagggttggcttcagacactgcaaggactacgtagcttatgtttgggcgaaacacgaagacgtggacgggaatacataccaggtcacctttagcgaagagtcattgcctaaaggccatggagattttattctgggctactatagccataaccactctatcctcattgggattaccgagccgtttcaaatctccctacctagcagtgagctggcaagttcatccactgatagctctgggacttctagcgagggtgaagatgactctaccctggagctgcttgcgcccaagagccgttccccttcgccaggcaaaagtaaacgccaccgctcccggtctcctggtttagctaggtttcccggactggccctgcgacctagcagtagagagcgccggggcgcatcccgctcaccatcaccccaaagccgacgcctgtcccgtgtagccccggatcggtccagcaatgggtcctcccgtggatcctctgaggaggggccttccgggctccctggcccctgggccttcccccccgctgtacctagatccttgggcctgctccccgcgttacgcttagaaaccgtggaccccggcggaggcggttcttggggacccgaccgtgaggctctggccccaaacagcttgtctcctagcccacaaggacatagaggcctcgaggagggaggcctaggcccatag

SEQ ID NO: 191438 - DNA, 1917 bp, synthetic construct
  misc_feature 1..1917: note = Description of Artificial Sequence: Synthetic coding sequence
  source 1..1917: mol_type = other DNA
atggagggccagagcagccggggcagccggcggcccggcacccgggctggcttgggaagcctgcccatgccacagggcgttgcacagactggtgctccgagcaaagttgatagttcatttcagttaccggccaagaagaatgccgccctgggtccttcggagccccgaatcaccgttgttacctggaatgtggggacagccatgccacccgatgacgtgactagtctcctgcacttgggcggaggcgatgactcagatggggcagacatgatcgctataggattgcaggaggtcaattctatgctcaacaagaggctcaaagatgccctgttcaccgatcagtggtccgaactgtttatggatgccctgggcccttttaactttgtactcgtgagttcagtgagaatgcagggcgtgattctgctcttgtttgcgaagtactatcatctcccgtttttgcgagacgttcaaactgactgcactcggaccggcctcggaggatattgggggaacaaggggggggtgtccgtgcgtttggcggcttttggccatatgctctgtttcctcaactgccatctccctgcacacatggataaggctgaacagcggaaagataactttcagaccatcttatcactgcagcagtttcagggccctggcgctcagggcatcctcgaccacgatctcgtgttctggttcggtgatttaaactttcggattgaaagctacgatttgcattttgtcaaattcgcaatcgattccgaccaactacatcagctgtgggagaaggatcagctcaatatggcaaaaaacacttggcctatccttaagggattccaggaaggaccactgaattttgccccaacttttaagttcgacgtaggcacaaataagtatgacactagcgcgaagaaacggaagcccgcgtggacggaccgcattctgtggaaggtgaaggccccgggtgggggtcccagcccaagtggaaggaaaagccatcgactgcaggtcactcagcactcataccgatcacacatggagtataccgtgtctgaccacaaacctgtggcagcgcaattccttctgcagttcgctttccgcgatgatatgcccttagtgagattggaggttgcagatgaatgggtcagacctgagcaggctgtagtgcgctataggatggaaacagtcttcgcaagaagctcctgggattggatcggcctatatagagtcggcttcaggcactgtaaggactatgtggcttacgtttgggccaaacacgaagatgtagatggaaatacctaccaggtcaccttttccgaggagtcccttcctaagggccacggagattttatattaggctattacagccacaatcactccatcctaatagggatcactgagcccttccaaatcagcctgccctcgtccgagttagctagcagctccacagattcttctggcacctccagtgaaggagaggatgactccacactagagctcctagctcctaagagcaggagtccaagccccggcaagtcgaaaagacacagatctaggtcccccgggcttgcccggttcccgggccttgccctccgcccatcttctagggaacgccgcggcgcaagccgttcaccctcccctcagtctagacgactttccagggtggcaccagaccgcagctcaaacggaagctcccggggcagctcagaggaaggccctagcggactgccagggccttgggccttccctcctgccgtcccacggtcactagggctcctgcctgcccttcggcttgagactgtggaccctgggggaggtgggagctggggacccgaccgcgaggcgctagcccctaactcactctctccttcccctcagggccaccgtggtctggaagaagggggcctgggtccctag

SEQ ID NO: 191439 - DNA, 1920 bp, synthetic construct
  misc_feature 1..1920: note = Description of Artificial Sequence: Synthetic coding sequence
  source 1..1920: mol_type = other DNA
atggccctgccccggctgggcacccagagcaccggccccggccggtgtctgagccccaatttgcaggcccaggaagctccagctcccgtgactacctctagctcaactagcactctgagttcatcgccgtggtccgcccagcccacttggaaatccgacccaggtttcagaatcacggtggtgacttggaatgtaggcaccgccatgcctccagacgatgtgactagcctgctgcacctcggaggcggcgatgatagcgacggcgccgatatgatcgccatcgggctacaggaagtgaacagcatgctcaacaaaaggctgaaggacgcccttttcactgatcagtggtcagagctgttcatggatgcacttgggccttttaattttgtgctagtgtccagtgtgaggatgcagggggtcatcctgctcctgttcgcaaaatattaccacctgcccttccttcgcgacgtgcagaccgactgcacaaggactgggctgggcggctactggggtaataagggcggcgtgtccgtccgactggccgcttttggccacatgctctgttttctgaactgtcacctccctgctcacatggacaaagcagaacaacggaaggataatttccagacaatcctctccctgcagcagtttcagggtccaggggctcagggcatactggatcatgacctggttttttggttcggggatttgaattttcgtatagaaagctatgacctccactttgtgaagtttgcgatcgatagcgaccagctgcaccagctttgggagaaggatcaattgaacatggccaagaatacctggcctatactgaaaggattccaggaggggcccctgaactttgcccctacattcaagttcgacgtgggaactaataaatacgacaccagtgctaagaaacggaaacccgcatggacagatcgaatcttgtggaaagtcaaagcccctggggggggcccatcgccaagtggccggaagtcacacagactgcaagtgactcaacacagctataggtcccatatggaatacacagtgtcagaccataagcctgtggctgcacagttcttgctgcagttcgcattcagggatgacatgcccctggttaggctggaagttgcggatgagtgggtgagacccgaacaggctgttgtccgttaccggatggagaccgtatttgctcgaagctcctgggattggatcggcctctacagggtgggctttcgtcactgtaaggattacgtggcctatgtgtgggcaaagcacgaagacgttgatggtaatacctatcaggttaccttttcagaagagtctctgcccaagggccatggagatttcattctaggatattactcacataatcacagtatcctgattggcatcaccgagccgtttcagatttctcttccaagcagcgaattagctagctcttctacagactcttcggggacgtcctccgagggcgaggacgactccaccttagagctactggcgcctaagagcaggtctccatcccccggaaagagcaagaggcaccgaagccgatcccccggactggcccggttccccggtcttgctcttcgcccatcttcgagagagagaaggggtgcaagtaggagcccgagcccgcagtctcggcggctgtctcgggtagcacctgatcgaagctcaaatggaagctcacgggggtcttctgaggaaggcccctctggcctgcccggaccatgggcgtttcctcccgcggtgccccggtctctagggctccttccagctcttcgcctggagacagttgacccaggcggtggagggtcctgggggccagaccgggaagccctggctccgaactccctgagtccatctcctcagggccatcgaggtctggaggaaggtgggctgggcccttag

SEQ ID NO: 191440 - DNA, 2820 bp, synthetic construct
  misc_feature 1..2820: note = Description of Artificial Sequence: Synthetic coding sequence
  source 1..2820: mol_type = other DNA
atgagcgccagcagcgagggcccccggctggccctggccagccccaggcccatcctcgccccactttgcaccccagaaggccagaagactgccactgcacatcgcagtagctctctagctcccacttccgtagggcagctggtgatgagcgcatcagccggccctaaacccccaccagctactactggctctgtgctggcacctaccagtctgggattagtgatgcccgccagcgctggcccgcggtctccaccggtgacccttggcccgaacctggcaccaacatctagagaccagaagcaggaaccacctgccagtgtgggccccaagcctaccctggcggcatccgggttgtctttggcactggcttccgaagaacagccacctgaacttcctagcacaccctcccccgtgcccagccccgtcctgagccctacgcaggagcaggctctggcccctgccagtacggccagcggggcagcaagcgtggggcaaacaagtgcgagaaagcgagacgcaccggcccctaggccactccctgcttcagaaggacacctccaacctccggcacaaacatctggccccacaggatctcccccttgcatccagacttctcccgacccacggctgtccccatcctttagggcaagacccgaggcactgcattcaagcccggaggatcccgtgctgccacggccaccacagactttgccattagacgtcgggcaaggcccctcggagcccggcacgcactctccaggactgctttcacccacgttccgcccaggcgccccaagcggtcagacagtgcctccccccttaccaaagccacctaggtcaccctcgcgatcaccaagtcattcaccaaataggtcaccctgcgtaccacctgctccagatatggcccttcctaggctggggacccaatcaacgggcccaggccggtgcctgtccccgaacctccaggcccaggaagctcctgctccggtcacaaccagttcttcaacctccactttaagtagctccccctggtcagcccaaccaacctggaaaagcgaccccgggttccggataactgtcgtaacctggaacgtaggaaccgcaatgcctccggacgacgtcacctccctgctccatctaggcggcggggacgactctgacggggcggatatgatcgccattggtctgcaggaggtcaatagcatgctgaacaaacgcctcaaggacgcactgttcacagatcagtggtccgagctgttcatggacgccctcggtccattcaatttcgtgttagtttcctcagtgcgcatgcaaggagtgatattgttattattcgcgaagtattaccacctaccctttttgcgagacgtgcaaactgattgcacacggacaggcctaggaggatactggggaaataaaggcggagtgtctgtgcggctggccgcattcggacatatgctgtgcttcttaaactgtcatttgccagcccacatggataaggccgagcagcgtaaagacaacttccaaaccattctaagcctccaacagttccagggtcctggggcccagggcatcctggaccatgatcttgtattctggtttggcgatctcaactttaggatcgaaagctatgaccttcacttcgttaaatttgctatagattccgaccagctgcatcaattgtgggagaaggatcagctgaatatggcaaaaaatacctggcccatcctaaaggggttccaagagggtcccttgaatttcgccccaacattcaaatttgatgtcggcacaaacaaatacgatacgtccgccaaaaagcggaagcccgcttggactgatagaatcttatggaaggttaaggcccccggtggcggcccatcgccttccggtcgcaagtctcatcggctccaggtcacccaacacagctaccgctctcacatggaatacacggtctcagaccacaagcccgtggccgcacagttccttctgcagttcgccttcagggacgacatgcccttggtgcggctagaggtggctgatgaatgggtgcgacctgagcaggcggtggtgcgatacagaatggaaactgtattcgctcggagcagctgggattggattggactgtatagagtcggattccggcattgcaaagattatgtcgcttacgtgtgggctaagcacgaggacgtagacggcaacacgtaccaggtcacgttctcggaggaatccctgcccaagggccacggcgattttatcttgggctactacagccacaaccacagtatcctgatcggaattacagaacctttccaaatcagtctgccatcaagtgagctggcttcgtctagtacggactctagtggcaccagctccgaaggcgaagatgactccacacttgaactgctggcgcctaagtccagatctccatcgccgggtaagtccaagaggcacagaagcagaagtcctggactggctcgcttccctggacttgccctacggccatccagccgtgagcgcaggggcgcgtcccgaagtccttcgccacagagtaggcgcctctctcgagtggctccagacagatcatcaaatggcagttcccgggggtcatccgaggaggggcccagtggtttgcctggaccctgggcgttccccccagctgtccctcgatcgctaggcctactcccggctcttcggttggagacagtcgatccaggaggcgggggctcttggggtccagatcgcgaagctctggccccaaatagtctgagcccctcacctcagggccatcggggcttagaagagggggggctgggaccctag

SEQ ID NO: 191441 - DNA, 3534 bp, synthetic construct
  misc_feature 1..3534: note = Description of Artificial Sequence: Synthetic coding sequence
  source 1..3534: mol_type = other DNA
atggtgccctgctggaaccacggcaacatcacccggagcaaggccgaagagcttcttagtaggactggcaaagacgggagttttttagtgagggcctccgagagcatttcacgcgcatatgctctgtgcgtcctgtaccgcaattgcgtgtatacttaccgaatccttcccaacgaagatgacaagttcaccgtccaggccagcgagggggtgtctatgcgctttttcaccaagctcgaccagctgatagaattctacaaaaaggagaacatggggcttgtcactcatcttcagtatcccgtccccctcgaggaggaagacacaggggacgaccctgaagaggacaccgtcgagtctgtggtgagccctccggagctcccccctagaaacataccactgacagcatcctcgtgcgaggcgaaagaggtgcctttctcaaatgaaaaccctagggcaactgaaactagtcgcccaagtctcagcgaaaccctttttcagcgcctgcaaagcatggataccagcggcctgcctgaagaacacctcaaagctattcaggactatctgtcaactcagttggcgcaggatagtgagtttgtcaagacgggcagttcatctcttccccatctgaaaaaactaactacccttctctgtaaagagttgtacggccagatgctgcgaacggtgcccggaattgggaaagtgaaggaggaggaccacgtgcctggagaggccaacccaataaacatggtgtctaagttgtcccagttgacaagcttactgtcctcaatcgaagacaaggtaaaggcacttctgcatgaaggcccagaaagcccgcacaggccatcccttattccccctgtgacgtttgaagtgaaagctgagtcgctgggtatccctcaaaaaatgcaactgaaagttgacgtcgaatcaggaaaactgataattaaaaaaagcaaggacgggtcagaagacaagttttactcccacaaaaaaatcctgcagcttattaaaagccaaaaattcttgaacaagttagttattctggttgaaactgaaaaagaaaaaattctgagaaaggaatacgtattcgctgatagcaaaaagagagaaggtttctgtcagctcctccagcagatgaagaataagcactcggagcagccagagcccgatatgataacaatcttcatcgggacttggaatatgggcaacgcccctccacctaaaaagatcacgtcctggttcttgagcaagggacagggaaagactcgggacgattcggcggactacatcccacacgatatttacgtgattggaactcaggaagaccctctgagcgagaaagaatggttagagatcctcaagcattcgctgcaggagataacctctgtaacctttaagactgttgcaatccatacactgtggaacattcggatcgtggtcctagcaaagcctgaacatgaaaacaggatctcccacatatgtacagacaacgttaaaactggtattgcaaataccctgggaaacaagggagccgtgggcgtgtcattcatgttcaacgggacaagcctcggatttgtaaactctcacctgacttcaggttcagagaagaagttgcgacgtaatcagaactacatgaatatactcaggttcctcgcccttggcgataaaaaactctccccgtttaatattacacacaggttcacacatctgttctggttcggggacctgaactacagggtcgatctcccaacatgggaggcggagactatcattcagaagatcaagcaacagcaatatgctgacctgttaagtcacgatcagcttctcacagaacggcgagagcagaaggtctttctccacttcgaagaagaagaaatcacctttgcccccacatatcgatttgagaggctgactcgggataagtacgcatacactaagcagaaggccaccggtatgaaatataatctacctagttggtgtgaccgcgtcctatggaagtcttacccccttgtccatgtcgtatgtcagagttacgggtcgacctccgacataatgacgagcgaccatagccctgttttcgcaacattcgaggctggagtgacttcccagtttgtttccaagaacggccccggaaccgtagattcacagggacagatagagtttctccggtgttacgctaccctgaaaacgaagagccagacaaagttttacctggagtttcactcttcttgcctggaaagctttgtaaagtcgcaagaaggggagaatgaggaagggagcgagggagaactggtcgtgaagttcggcgagactcttcccaaactgaagcccattatcagcgaccctgaatatcttttggaccaacatattctgatctccatcaaaagcagcgacagtgatgagtcttacggcgagggatgtatagcccttaggctggaggccaccgagacccaactgcctatatacactcctttgacccatcacggggaactgactgggcactttcaaggagagattaagttacagactagtcaagggaaaacccgggagaagctgtacgactttgtcaagacagagagggatgaatcgagcggccccaagacactgaaatcgctgacgtctcatgacccaatgaagcaatgggaagtcaccagtcgcgcccctccgtgctctggttcctctataacagaaataattaatcctaattacatgggcgtcggccccttcggccctcctatgcctctgcatgtcaaacagacactgtctccggaccagcagcccacagcttggtcatatgatcagcctcccaaggactcacccctgggcccatgtagaggggagtccccacccacaccaccaggccagccccccatctcccccaagaagtttttaccctccacagctaataggggcctcccaccgcgcacgcaagagtctaggcctagcgacctgggcaaaaatgccggtgatactctgcctcaggaagacctgcccctcacaaagcccgaaatgtttgaaaaccccctgtacggcagtctttcaagttttccaaaacctgctccaagaaaagaccaggagagtcctaagatgccccggaaagagccacccccgtgtcctgagcccggaatcttgtccccgagcatcgtgctgacaaaagcacaggaagccgaccggggcgaagggccggggaaacaggttcccgcacctcgcctgcggagcttcacctgctcctcctccgcagagggcagggctgccggcggcgacaagagtcagggtaagcctaagacccctgttagctcccaggcccccgttccagccaagcgcccaattaaaccgtctcgctccgaaatcaaccagcagacacctcctacgccaacccccagaccccccttgccagtgaagtctcctgcagtgttacatctacagcatagcaaaggccgagactaccgcgataatacagaattgccccaccacggcaagcacagacctgaagagggtcctcccggacctctcgggagaacagcaatgcaatag

SEQ ID NO: 191442 - DNA, 2433 bp, synthetic construct
  misc_feature 1..2433: note = Description of Artificial Sequence: Synthetic coding sequence
  source 1..2433: mol_type = other DNA
aagcgggagggcttctgccagctgctgcagcagatgaagaacaagcactccgaacagccagagcccgatatgataacaattttcatcgggacctggaacatgggtaatgcccccccccctaagaaaattacaagctggtttctatcaaagggtcagggcaagacccgagatgacagcgcagactacatccctcatgatatttatgttatcggcactcaagaagatccactgtcagaaaaagagtggctggaaatactcaaacacagtctccaggaaattacgtctgtgacctttaagacggtcgccattcacacactgtggaacatcagaatcgtcgtgctggccaaacccgagcacgaaaatagaatcagccatatttgtactgacaatgtaaaaactggcatcgccaacaccctgggaaataagggtgccgtgggcgttagctttatgtttaatggaacttctttggggttcgtgaactcacatctgacgtccggatccgaaaagaagctccgtcggaaccaaaactatatgaatatcctgcggtttctcgcactgggcgataagaagctctctcccttcaatattactcaccggttcacccaccttttctggtttggggatctcaactatagggtggacctgcccacatgggaagccgagaccattattcagaagatcaagcagcagcagtacgccgatctgctgagtcacgaccagctgttaacagagcggcgcgagcaaaaagtgttcctgcatttcgaggaggaagagattactttcgcccctacctatcgcttcgaacggctgacaagagacaagtatgcgtatacaaagcaaaaagcgactggaatgaaatacaatcttcccagttggtgtgatagggtgttgtggaagtcctatccgctggtgcacgtcgtctgtcaatcttatggctccacatccgatattatgacatccgatcatagtcctgtttttgccacctttgaggccggggtgacatcacagtttgtgtcaaaaaatgggcctggaacagtggatagtcagggtcagattgaattcctgaggtgttacgccacactgaaaaccaaatcacagactaagttctatctagagtttcactccagctgtctggaaagtttcgtcaagagccaggagggcgagaacgaggagggcagcgaaggcgagctggttgtgaaattcggggagaccctccccaaactaaagcctattatatctgaccctgagtacctactggaccagcatatccttatctctatcaaatctagcgactccgacgagagttacggcgagggctgtatcgcactgagacttgaggccaccgagactcagcttcccatttacaccccattaacccatcatggcgagctgaccggccacttccagggggagataaagctacagaccagtcaggggaagactcgcgaaaagctgtatgatttcgtaaagacagagcgcgacgagtcttccggccccaagacattgaaaagcctcacttcacacgaccctatgaagcagtgggaggttacgtctcgcgctcctccctgttccgggagctcaattacggaaatcattaatccgaactacatgggagtggggcctttcgggccgcccatgcccctgcacgtgaagcagactttaagccccgatcaacagcccacagcttggagttacgatcaacctccgaaggacagtcctctgggtccgtgtcgcggcgagagcccgcccacccctccaggtcaaccccctattagcccaaagaagtttctgccaagcacagccaaccgtggcctgccaccccgaacacaggagtcacggccttcagacctggggaaaaatgccggcgacaccttgcctcaggaagacctccccctgactaagcccgagatgttcgagaaccccttatacggaagtctgagctccttccccaagccagccccgcggaaagaccaggaatctcccaaaatgccaaggaaggaacccccgccatgtcctgagcctggaattttaagtccatctattgtcttgaccaaagcgcaggaagcggacaggggggagggccccggaaagcaggtgcccgccccgcggctgcgatccttcacctgttccagttctgccgagggaagggctgcggggggcgacaagtcccagggtaagccaaagacacctgtgtccagccaggcccccgttcccgccaagcgtccaatcaagccctccagaagtgaaattaatcagcagacccctcctacaccaaccccaaggccgcctctgcccgtcaagtccccagctgtgcttcacttacagcactctaaagggagagactacagagataatacagagctgccacaccatggaaaacaccgaccagaggaaggtccgcccggaccactgggtagaacagcaatgcagtag

SEQ ID NO: 191443 - DNA, 666 bp, synthetic construct
  misc_feature 1..666: note = Description of Artificial Sequence: Synthetic coding sequence
  source 1..666: mol_type = other DNA
atggtgccctgctggaaccacggcaacatcacccggagcaaggccgaagagctcctctcacgcaccggcaaggacgggtcctttcttgtgcgggcttcggagagcatttcacgcgcatatgccctgtgcgtactctatcggaattgcgtgtacacgtaccggattcttccaaacgaggacgataaattcaccgtgcaagcttccgagggagtctcaatgcgttttttcacaaagctggaccagcttatagagttttacaaaaaagaaaacatgggactggtgacccatcttcagtatccagtgcctctggaggaggaggatacaggcgacgacccagaagaagataccgaaagtgtggtgtcacccccggaactcccaccccgcaacatccccctaacagcgagttcttgtgaagcgaaggaggtccctttttcaaatgagaacccccgcgcaaccgaaactagccgccctagtctttccgagaccttatttcagcgactgcagagcatggataccagcggtctacccgaggagcacctgaaagccatacaagattacctatcgacccagctggcccaggacagcgagttcgtgaagaccggcagcagctctctacctcaccttaagaagctgacgacattactctgtaaggagctgtatggctag

SEQ ID NO: 191444 - DNA, 2433 bp, synthetic construct
  misc_feature 1..2433: note = Description of Artificial Sequence: Synthetic coding sequence
  source 1..2433: mol_type = other DNA
aagcgggagggcttctgccagctgctgcagcagatgaagaacaagcactctgaacagcccgagcctgatatgattacaatattcattgggacctggaatatgggcaatgccccacctcctaaaaaaatcacgtcatggttcctatctaaagggcaggggaaaaccagagacgattcagcagactatattccccatgacatctatgtcatcggtacacaggaggatcccctctctgagaaggagtggcttgagatcctgaaacactccctccaggaaattacctccgttacattcaagaccgtggcgattcatacactctggaatattcgaatcgtggtccttgccaagcccgaacatgagaatagaatttcccacatctgtaccgacaacgtgaaaacaggaatcgctaatacactgggcaataaaggtgcagtcggcgttagctttatgttcaacggaacgagtctgggtttcgtgaactcacatctaacatcagggtctgagaaaaagttgagaaggaaccaaaattatatgaacatacttcggtttctagcgcttggggataaaaagctcagtccctttaacatcacacacagatttacccacctcttttggttcggtgaccttaattacagagtcgaccttccgacgtgggaagcagagaccattatccagaagatcaagcagcagcagtacgctgatctcctcagccacgaccagctgctcactgaacggcgtgaacagaaagtgttcttacatttcgaggaagaggaaataacatttgcacccacgtaccgattcgagagattaacacgggacaaatatgcttacaccaaacagaaggcaactggaatgaaatacaatttaccgagctggtgcgatcgtgtgctttggaagtcataccccctcgtgcatgtcgtttgccagagctatgggagcacctcagacattatgacttccgatcacagccccgtgttcgcaaccttcgaggccggggtgactagtcagttcgtgtccaaaaacggacccggcacggtcgactcccagggacaaatagagttcttacgctgttacgctaccctgaagactaaatcccagaccaagttctatctcgagtttcacagcagttgtctcgagagcttcgttaagagccaggagggggaaaatgaggagggatccgagggcgagttagtggtcaagtttggcgagacattgcctaaattgaagcctatcattagtgaccctgagtaccttctggaccagcacatcctgatatcaatcaaatccagcgatagcgatgaaagctatggtgagggttgcattgcattgagactggaggcaaccgagacacagctgcctatttatactcccctgacccatcacggcgaactgacaggccacttccaaggtgagataaaactgcagacctcacagggtaagactagggaaaaactctacgatttcgttaagactgaacgcgatgaatcgtcggggccaaagacgttgaagtcccttactagccatgaccctatgaagcagtgggaggtgaccagtagggcacccccttgcagcggctcctccatcactgagatcataaatccaaactacatgggcgtcgggccattcgggcctccaatgcccctccacgtgaagcagaccctgagtcctgatcagcaacccactgcgtggtcatacgatcagcccccaaaagatagtccactcggtccttgcagaggcgagtcccctccaacccctcctggacagccccctataagtcctaagaagttcctcccctccaccgcaaacagaggacttcctcctaggacccaggaaagcaggccatcagacctcggtaagaacgctggagacacactcccccaggaggatctgcccttaactaagcctgagatgtttgagaatccactgtacggtagtttatcttctttccccaagcctgctcctagaaaagaccaggaatccccaaagatgcctcgtaaagaacctcccccttgtcccgagcctggaatactgtcaccatccattgtccttacgaaagcgcaggaagctgaccgcggcgaggggcctggtaagcaggtcccggccccccgactaagatcatttacctgctcttcttccgcagaggggcgggcggccgggggagacaagagtcaaggcaaacccaagacacccgtgtcttctcaagcaccagtgcccgctaagcgtcctattaagccctcccgctcagagataaatcagcagactcctccgactcccacacctcgaccaccactgcctgtgaagagcccggccgtcctgcatctacagcatagcaagggaagggattatagagacaataccgaactcccccaccacggcaagcacaggccagaagagggcccccccggaccccttggccgaactgctatgcaatag

SEQ ID NO: 191445 - DNA, 2433 bp, synthetic construct
  misc_feature 1..2433: note = Description of Artificial Sequence: Synthetic coding sequence
  source 1..2433: mol_type = other DNA
aagcgggagggcttctgccagctgctgcagcagatgaagaacaagcattcggagcagcctgaaccagacatgattacaattttcatcggcacgtggaacatgggaaatgcccccccccccaaaaagataacttcttggttcctgtctaaaggacagggaaagaccagagatgacagcgccgactacatccctcatgatatctatgtcattggcactcaggaggatccacttagtgaaaaggaatggcttgagatcctcaaacattcacttcaagagatcacctcagtcaccttcaaaacagtggccattcacaccttatggaacatacggattgtggtattagctaagccggagcatgagaatagaattagtcatatctgcactgataacgtgaaaacaggcattgcaaataccttggggaataaaggtgctgtgggcgtttccttcatgtttaacggtacatctctcggttttgtgaattctcacctcacatctggatccgagaaaaaacttcgcaggaatcagaactacatgaacattttgcggttcctcgctctgggagataagaagctttccccattcaacatcactcatagattcacccatctgttctggtttggggatctgaactacagagtcgatctgcccacatgggaggccgagacgattattcagaagattaagcagcagcaatatgcagatctgctgagccacgatcagcttctcaccgagaggcgggagcagaaggtgttcttgcactttgaggaagaagaaatcacttttgctccgacttaccgcttcgaacggttgaccagggataagtacgcttatacaaagcagaaggccactggcatgaaatataatctccccagctggtgcgaccgagtgctctggaagagctacccacttgtccacgttgtctgccagtcttatggaagtacaagtgacattatgactagtgatcactccccagtgttcgcaactttcgaagccggagtcacgagccaatttgtaagcaagaatgggcctggtacggtagatagtcagggtcagatcgaatttctgcgttgctatgcaactctgaaaacaaagagtcagactaaattctatctggagttccattcgtcatgcctagaaagctttgtaaagagccaagaaggcgaaaacgaggagggctccgaaggggagttggtggtcaaatttggagagaccctgcctaaattaaagcccattatctccgacccagagtacctcctggaccagcacattcttatctctatcaaaagcagtgactctgacgaatcctacggtgaaggatgtattgcactgaggctggaagcaaccgagactcagctccctatctacaccccactgactcaccacggggaacttacagggcacttccagggcgagatcaagctgcagaccagccagggaaagactcgggaaaagctctatgacttcgtgaagacggaaagagacgagtcaagtggccccaagaccctgaagtcacttacctctcacgatccaatgaagcagtgggaggttactagtcgcgcacccccctgtagcggttcctcaatcactgagatcataaaccccaattacatgggtgtcggccccttcggccctcccatgcccttacacgtcaaacagactctctcccccgaccagcaacctacagcctggtcttatgatcaaccgccgaaagattctcccctcggtccatgccggggcgagtcccctcccaccccccccggccagccacctatatcccctaaaaagtttctcccgtccactgcaaacagggggctgccacctcgcacccaggagtctcgcccatccgacctaggaaagaatgctggtgacactctgccccaggaggacctccctctgaccaagcccgaaatgttcgagaaccccttgtacggctccttgtccagcttcccgaaaccggcaccccgaaaagatcaggaatcacccaagatgccaagaaaggaacccccgccctgtcccgaaccaggtattttgtccccatccattgtgctgacaaaagctcaagaggccgatcggggggagggtcccggtaaacaggtgccagccccccgacttagatcttttacttgtagttccagtgcggaaggacgcgccgccggcggggacaagtcccaaggaaaaccgaaaactcccgtgagctcacaagctccggtgcctgctaaaaggcctatcaagccttctcgctccgagatcaaccagcagacccccccgacacctactccgcgccctcctctcccagtgaagagtccagccgttctccatttgcagcactctaaaggccgcgattaccgggataataccgaactgccacatcacggaaagcaccgacccgaagaaggcccaccagggcccctggggaggaccgccatgcagtag

SEQ ID NO: 191446 - DNA, 2826 bp, synthetic construct
  misc_feature 1..2826: note = Description of Artificial Sequence: Synthetic coding sequence
  source 1..2826: mol_type = other DNA
cggccccaggtgcccggcgaggccaaccccatcaacatggtgagcaagctgagccagctaacctcactgctaagttcaatcgaagacaaggttaaagcgctgttgcatgagggacccgagtccccccaccgcccttcccttataccacctgtcactttcgaggtcaaggccgagagccttggaatcccccagaaaatgcaattgaaggtggatgtggagagcggtaaactgatcattaaaaagtcgaaagatgggtccgaagacaaattctattctcataagaaaatcctgcagttaattaagagtcagaagtttctgaacaagcttgtgatcctggttgagaccgagaaggagaagatcttgaggaaggaatacgtatttgccgatagtaagaagcgcgaggggttttgtcaactattgcagcagatgaaaaacaaacattccgaacagccagagccagatatgattaccatctttatcgggacttggaacatggggaacgcacctccacccaaaaagatcactagctggtttctgtctaaggggcagggcaagactcgcgatgactccgcggattatattcctcacgacatctacgtgataggaactcaggaggaccctctttctgaaaaggaatggcttgagatcctcaagcatagcctgcaggagattacctcagtaactttcaagaccgtggcgattcacacactgtggaatatccgtattgtggtgcttgctaagccagaacacgaaaatcgcatcagccacatctgtacagataacgtgaagaccggaattgccaacaccctgggtaataaaggcgccgtcggagtgtccttcatgtttaatgggaccagcttagggttcgtgaatagccatctcacatccgggtcagaaaagaaactgagaaggaatcagaattacatgaatatattacgcttcctcgcactgggggacaaaaagctttcccccttcaacatcactcatcgcttcacccatctcttttggttcggggaccttaactatcgagtggatctccctacttgggaggctgaaactataattcaaaaaatcaagcagcaacaatatgcagacctattatcccacgatcaactgctgacagagcgcagagaacagaaggtattcctgcactttgaggaagaggaaataactttcgcgcccacctatcggtttgagaggctaaccagggacaagtatgcctatactaagcagaaggctaccgggatgaaatataatctgccatcctggtgtgatcgtgtactctggaagagttaccccctggtacatgtggtgtgccagagttacggatctacctcagacattatgacctctgatcattccccggtttttgcaaccttcgaggccggggtcacatctcagttcgtgtccaaaaacggccctggcactgttgacagtcaggggcagatcgagttcctccgatgctatgcaacactaaagactaagtcgcaaaccaaattctacctggaattccattctagctgtttagaatcatttgtgaaaagccaggagggagagaacgaggagggatcagaaggagaactggtggtgaagttcggcgaaactttgcccaagctgaagcccattatcagcgatccggagtacttgcttgatcagcacatcctcatctctatcaaaagcagcgactctgatgaatcttacggagagggctgcattgccttgcgtctggaggccaccgagacccagctgcccatttatactcccctgacccatcacggagaacttaccgggcactttcagggcgagattaagctgcagaccagccagggcaagacacgagaaaagctctatgactttgtgaagaccgagagggacgaatctagcgggcccaagacattgaaatcactgacatcgcatgatcctatgaagcagtgggaagtaacaagcagggctcccccatgtagcggcagctctatcacagaaattattaatccaaactatatgggggtaggtccttttggccctccaatgccactccacgtcaagcaaactctgagtcctgaccagcagcccaccgcctggagctacgatcagccacccaaggacagccccctgggcccatgcagaggcgagtctcccccaaccccacctggccagccacccatttccccaaaaaagttcctcccaagtactgccaatagggggcttcctcccagaacccaggagagccggcccagcgacctgggcaagaacgctggcgataccctgccacaggaggacttgcctctgacaaagcctgagatgttcgaaaatccgttgtacgggtcactctcttcattccctaagccggcgcctagaaaggatcaagagagccccaagatgccgagaaaagagcccccaccttgccctgagcccgggatcctgtccccgtcgattgtcttgacaaaagcccaggaggccgacagaggggaagggcccggtaagcaggtgcccgcacccaggttaaggagcttcacttgttcaagtagcgcggaaggccgcgccgccggaggggacaagtcccagggaaagcccaaaacacccgtgagctctcaggcaccagtgcccgccaaacggcccataaaaccctcacgctccgaaattaatcagcagacaccgcctacacctactcctcgcccacccctcccagtgaaatcacccgccgtgttgcacctgcagcactccaagggaagagactatagagacaataccgaattgccccaccacggaaagcaccgccccgaagaaggaccaccaggccccttgggccggactgctatgcagtag

SEQ ID NO: 191447 - DNA, 669 bp, synthetic construct
  misc_feature 1..669: note = Description of Artificial Sequence: Synthetic coding sequence
  source 1..669: mol_type = other DNA
atggtgccctgctggaaccacggcaacatcacccggagcaaggccgaggagctattgtctcgcacagggaaagatggctcctttttagtaagagcctccgagtctatcagccgtgcgtatgccttatgcgtactatacagaaattgcgtatatacttatcggatacttcctaacgaagacgataagttcacggtacaggcctcagagggggtgtctatgcgcttttttaccaagctggaccaactgatcgagttttataagaaggagaatatggggctggtcactcacctgcagtacccggttccactggaagaggaggatacgggcgacgaccccgaagaagacacagtcgaatctgtggtttctccacccgaactgccaccgcgaaatatccccttaacagcatctagttgtgaggccaaagaagtgccattttctaacgaaaacccgcgcgccaccgaaacatctagaccttctctctcagaaacgcttttccagcgtttacagagtatggacacttctgggctaccggaggaacatctgaaagctatccaagactacctatctacccaactcgcccaggattctgagtttgtaaagaccggatcctcatcattgcctcacctcaaaaaactgaccaccctgctttgtaaggaactgtatggatag

SEQ ID NO: 191448 - DNA, 2826 bp, synthetic construct
  misc_feature 1..2826: note = Description of Artificial Sequence: Synthetic coding sequence
  source 1..2826: mol_type = other DNA
cccccccaggtgcccggcgaggccaaccccatcaacatggtgagcaagctgtcccaactgacaagtcttttaagctcaatcgaagataaagtgaaagctcttctccacgaggggcccgaatcaccacatcgaccatccctgatcccccctgtgacttttgaagtgaaggctgagtcgctgggcatcccgcagaagatgcagttaaaggttgatgtggagtcaggtaagttgatcatcaaaaagagcaaagacgggtccgaggacaagttttactcccacaagaagattctgcagctaattaaatcccagaagttcctgaataaactagtcatcctcgtcgagactgagaaagaaaaaatcctcagaaaagaatatgtgttcgcagacagtaagaaacgggaaggattttgccagctgctccagcaaatgaagaacaagcactccgagcaaccagaaccagatatgattaccatctttattggcacctggaatatgggcaacgcccctcctccgaagaagatcactagttggtttttgtccaaaggccagggcaagactcgcgacgacagcgccgattacattcctcatgatatatatgtgatcgggacacaggaagaccccctaagcgaaaaggagtggctggagattcttaaacacagtctgcaggagattactagcgtgacatttaaaacagttgctattcacaccctgtggaacatcaggatcgtcgtcttagcaaagccagagcacgaaaaccgtataagccatatttgtactgacaacgtgaaaacaggaatagccaatacattgggcaacaagggagccgtcggggtgtcattcatgttcaacggcacgtctctcggttttgttaatagccacttgacctcgggatctgagaaaaagctgcgcagaaatcagaattacatgaacatactgaggtttctcgcacttggtgacaagaagctttcccctttcaacattacacatagattcacacatctcttctggttcggcgacctcaattatagggtggacctgccgacgtgggaggcagagactattatccaaaagatcaaacaacaacagtatgcagatctgcttagtcacgatcagctactaactgaacggagggagcagaaggtttttctccactttgaagaggaggaaattacatttgccccaacatatcggtttgagcgtctgacgcgggacaagtatgcttacaccaaacagaaggccaccggtatgaagtacaacctcccgtcatggtgtgatcgcgtgctctggaaatcttatcctcttgtgcacgtggtctgtcaaagttacggatcaacaagcgacatcatgacatcagaccacagtcctgtgttcgccacgtttgaagcgggggttacatcgcaatttgtatctaagaatgggcccggtaccgtagattcacagggacagattgaattcttaagatgctacgccacccttaagacaaaatctcagacaaaattttacctggagttccacagttcttgcctggagtccttcgtgaagagtcaagagggtgagaatgaagaaggctccgaaggggagctggtcgtcaagtttggcgagacgcttcctaagcttaagcctattatctcagatcctgagtatctgctggatcagcacatcttaatttcgatcaaaagtagcgactcggacgaatcttatggcgaaggatgcattgccctgagactcgaggctaccgagactcagttacctatctacacgcctctgactcatcacggtgagctgacagggcacttccagggagaaattaaattgcagacatcacagggcaagaccagagaaaagttatacgattttgtcaaaacagagagagatgagtcaagtggccctaagacactgaagtctctaacatcacacgaccctatgaaacagtgggaagtaacatccagggctcccccctgctcaggttcaagcattaccgagatcatcaacccaaactacatgggcgtgggtccgttcgggccacccatgccgctacatgtgaagcagacgttgagtcccgaccagcagccgacagcttggagttacgaccaacctcccaaagacagccctctgggcccctgccggggcgaatcccctcccacaccccccgggcagccaccgatctcacccaagaaatttctgccaagtacagctaataggggtctgcccccaagaactcaagagagcaggcccagtgatttaggcaagaatgctggagacacactgccccaagaagacctaccattgacaaaaccagagatgtttgaaaaccccctgtatggctccttatccagctttcccaaacccgcacccaggaaggaccaagaatcccctaagatgccccggaaggaacccccaccgtgtccggaacccgggatcctctcaccttcaattgtgctcacaaaggctcaggaagccgaccgcggcgagggcccaggcaagcaagtacccgctcctagactgcggtctttcacatgtagctccagcgctgagggccgagctgctgggggggacaaatcacagggaaaacccaaaactcctgtttcgagtcaagcccccgtgccagccaagagacctataaaacctagtaggtctgagatcaatcaacaaacaccaccaacgcctaccccccggccacctctccctgtcaagtcccctgccgtgcttcacctgcagcattctaaaggtcgggactacagggataacaccgagctgccccaccacggaaaacatcgaccagaggagggcccccctggccccctggggcgaactgcaatgcagtag

SEQ ID NO: 191449 - DNA, 1791 bp, synthetic construct
  misc_feature 1..1791: note = Description of Artificial Sequence: Synthetic coding sequence
  source 1..1791: mol_type = other DNA
atggtgccctgctggaaccacggcaacatcacccggagcaaggccgaagagctcttgagcaggacaggcaaagatggaagcttcctggtgagagcatccgagagtatttctagggcatacgccctgtgtgtgttatatcgaaactgcgtatacacataccgaatcctccccaacgaagacgataaattcactgtgcaggcttctgagggtgttagcatgaggttttttacaaagctggaccagctgatcgaattctacaaaaaagagaacatgggcctggtcacccatctacaatatccggtcccactggaggaggaagataccggagatgaccccgaggaggacactgtcgaaagcgtcgtgagcccgccagagctcccgcctcggaacattcctctcacagcgagctcctgcgaagccaaagaggtgccgttctccaatgaaaacccgcgtgcaactgagacgtctcgccccagcctgagcgagacactattccaacgtctgcagtctatggacacatcaggcttacctgaagagcatttaaaagcgatccaggattacctctcaacccaactagcccaagatagtgagtttgtcaaaacgggcagttcttcattgccacaccttaaaaaactcaccactcttctctgcaaggaactctacggctactgcctggaagtgctgcttagctacccgctgtctctgttatcccaagtgcctggtgaggctaacccgattaacatggtatccaagttgtcacaactcacatccttgctgagcagcatagaggacaaagtcaaagctctcctgcacgagggaccagagtcgccacaccgtcctagtttgatccctccagtcaccttcgaggttaaagctgagagtttaggcatcccacaaaaaatgcagctgaaggtagatgtagaatcaggcaaactcatcataaagaaaagcaaggatggcagtgaagataaattctacagtcataaaaagatactgcagctgatcaaatctcagaagtttttaaataagctcgtgatcctggtggagaccgagaaggaaaagatacttagaaaagaatacgtttttgccgactcgaagaaaagggagggcttttgccaattgctgcagcaaatgaagaacaagcattcggagcagccagaacccgacatgatcacaatctttatcgggacttggaatatgggcaatgctcctcctcctaaaaagataacctcatggtttctcagcaagggtcaggggaagaccagagacgatagtgcagattatattcctcacgatatttatgtgataggaacccaagaggatcccttgagcgaaaaggagtggctggagattctgaaacatagtctgcaggagatcacatctgtaaccttcaaaaccgttgcaatccataccctgtggaatattcgcatcgttgttctcgctaaacccgagcacgagaatcgaatttcacatatctgtactgataacgtcaaaactgggattgccaacacgctgggtaacaaaggggcagtaggcgtgtcctttatgtttaatgggacctctctgggcttcgtcaactctcatctcacctcgggcagtgagaaaaagctgagaaggaaccagaactatatgaacattttgcgcttccttgccttgggggacaagaagctgagcccctttaatatcacccacaggtttacgcacctcttctggttcggggacctcaattaccgtgtagatcttccaacctgggaggccgagaccatcatccagaagataaagcagcaatag

SEQ ID NO: 191450 - DNA, 837 bp, synthetic construct
  misc_feature 1..837: note = Description of Artificial Sequence: Synthetic coding sequence
  source 1..837: mol_type = other DNA
tgacagaagaactggctgcgggagttctaccaggtggtgcacacccataaacctcactttatggctctgcactgtcaggagttcggtggcaagaactacgaggcaagtatgagccacgtggataagtttgttaaggaactgttgtcatctgatgctatgaaggaatataatagggctcgagtgtacctggacgaaaactacaaaagtcaggaacacttcactgcactggggtctttttatttcctccatgagtcgctcaagaacatctatcagttcgatttcaaggcaaaaaaataccgaaaggtcgctggaaaggagatctactctgatactctcgagagtacccccatgctggaaaaggagaagttcccacaggattatttccccgaatgcaaatggagccgaaaaggcttcatcaggacacgctggtgtattgccgactgtgcttttgacctagtaaatattcatctcttccacgatgccagcaaccttgtggcgtgggaaacttccccgagcgtgtactctggtatccgccacaaggcgctcgggtatgtcctggataggatcatcgaccagcggttcgaaaaggtctcttattttgtgttcggggacttcaatttccgtcttgattcaaagtcagttgttgagctgctagagtttgataaggaactaagtgtgttcaaagaccggctgtacgagctcgacatctcttttccgccttcatacccgtacagtgaggacgctcgccaaggcgagcagtatatgaacactcggtgccccgcttggtgcgaccgcatcctcatgtccccatctgctaaggagctggttctgagatag

SEQ ID NO: 191451 - DNA, 1164 bp, synthetic construct
  misc_feature 1..1164: note = Description of Artificial Sequence: Synthetic coding sequence
  source 1..1164: mol_type = other DNA
atggccggcaaggccgccgcccccggcaccgccgtgctgctggtgactgcgaatgtgggcagcctcttcgatgacccggagaaccttcagaaaaattggctacgagagttttatcaagtcgtgcatactcataagccacacttcatggcattgcattgccaggaattcgggggaaagaattacgaggcctctatgagtcatgtggataagttcgtgaaagaattactcagcagcgacgccatgaaggagtataaccgggccagggtgtatctcgacgagaactacaaatcccaggagcacttcacagcactcggctccttttattttttacatgaatctctcaagaacatctatcaatttgatttcaaagccaaaaaatatcggaaagtggctggcaaggaaatctatagcgacacactcgaaagtaccccaatgctggagaaggagaaatttccacaggactatttccctgaatgcaaatggagtagaaaaggtttcatcagaacccggtggtgtatcgctgactgcgcctttgatctggtcaatattcaccttttccacgatgcttctaatctggtcgcctgggagacctctcctagcgtttacagcgggatcagacacaaagccctcggatatgttctggatcggatcatcgaccagaggtttgagaaagtttcctactttgtttttggggacttcaacttccggcttgacagcaagtccgttgtagagaccttgtgcacgaaggcgacaatgcagacggtgcgggcagcggacacgaatgaggtggtcaagttgatattcagggaatcagacaacgatagaaaggtcatgctgcaactcgaaaagaaattgttcgattacttcaatcaggaagtgtttagggacaacaacggaaccgccctgcttgagttcgataaggaactgtccgttttcaaagacaggctctacgagttggatatatcatttccaccctcgtacccttactctgaggacgccaggcagggggaacagtacatgaatactcgctgtcccgcatggtgcgatcgtatcttaatgagtcccagtgctaaggagctggtcttgagggtctcagtgtgctgtccctcacccggccaccgcggcatgtggtcggcagggtccggactcgctcagccttggtag

SEQ ID NO: 191452 - DNA, 1239 bp, synthetic construct
  misc_feature 1..1239: note = Description of Artificial Sequence: Synthetic coding sequence
  source 1..1239: mol_type = other DNA
atggccggcaaggccgccgcccccggcaccgccgtgctgctggtgacagccaacgtcggatccctcttcgatgatcccgaaaacctccaaaaaaattggttgagagagttttatcaagtggtgcacacccacaaacctcacttcatggctctccattgtcaagagttcgggggtaaaaactacgaagcaagcatgagccacgtcgataaattcgtgaaagagctgttaagctcagatgcaatgaaagagtataatcgggcgcgggtgtacctggacgagaactacaagtctcaggagcactttaccgcacttggaagcttctattttctccacgaaagtttaaaaaacatctatcagttcgacttcaaggcaaaaaagtaccgcaaggtggctggaaaggagatttattccgacacactcgagtctactcccatgctggaaaaggaaaaattcccccaggactactttcccgagtgtaaatggtctcggaaggggtttataagaacaagatggtgcatagccgattgcgcctttgatttagtcaatattcatttgtttcacgatgccagtaacttagtggcttgggaaacaagcccttccgtttattccgggattcggcacaaggcccttgggtacgttttggatcggataattgatcaaagatttgagaaggtgtcttattttgttttcggagattttaacttcaggctggatagtaagtcggtggtggagactctctgcacaaaggcgacaatgcaaaccgtcagagccgctgatactaacgaagtagtgaaactgatcttccgggaaagcgataatgacagaaaggtgatgctgcagttggaaaagaagctgttcgactactttaaccaggaagtattcagggacaacaacggcaccgctctgctggagttcgacaaggagttgagtgtgttcaaggatcgcttatacgagcttgatatctccttcccaccatcctacccttactccgaggacgcacggcagggcgagcagtacatgaataccaggtgtccagcctggtgcgatcgcatacttatgtccccttccgccaaggaactggtgctgagatctgaatccgaagagaaagtggttacctatgaccacatcgggcccaatgtgtgtatgggcgatcataagccagtttttctggctttcagaattatgccaggtgctggaaagcctcatgcccacgttcacaagtgctgcgtggtacaatag

SEQ ID NO: 191453 - DNA, 558 bp, synthetic construct
  misc_feature 1..558: note = Description of Artificial Sequence: Synthetic coding sequence
  source 1..558: mol_type = other DNA
atggccggcaaggccgccgcccccggcaccgccgtgctgctggtgactgccaacgtaggatcacttttcgacgaccccgagaacctccaaaaaaattggcttagagaattctatcaggtggtccacactcataaacctcacttcatggcgctgcattgtcaagagttcggaggcaaaaactatgaagcttccatgtcccatgtcgataaattcgtgaaagagcttctatcctcggacgccatgaaagaatataacagagctcgagtttatctggacgaaaattataaaagccaggagcattttacagctctcgggtccttctatttcttacacgaatccctgaagaatatttaccagttcgacttcaaggctaaaaaatacagaaaggttgccggaaaagagatctacagcgacactctggagagtaccccaatgctcgagaaagagaagttcccccaggattactttccagaacgccacgttccacacacctccctggaagcgctcctcatccttcacgaggaccctcagcttcccgacccacacttaccactctag

SEQ ID NO: 191454 - DNA, 1068 bp, synthetic construct
  misc_feature 1..1068: note = Description of Artificial Sequence: Synthetic coding sequence
  source 1..1068: mol_type = other DNA
atggccggcaaggccgccgcccccggcaccgccgtgctgctggtgactgcgaatgtcggtagcctgttcgacgaccccgagaatctacaaaaaaattggctgcgagaattctaccaggtagtccacactcacaagccccactttatggccctgcactgccaggaattcggtggtaagaactacgaagccagcatgagccatgttgataaattcgttaaagaattgctcagctctgatgctatgaaggaatacaacagagctcgagtgtatctggatgaaaattataagtcacaggagcactttacagctcttgggtccttttattttttgcacgaaagcttgaagaatatctaccagttcgatttcaaagcaaagaaataccggaaggttgccggcaaagagatttacagcgacaccctggagagcaccccaatgttggagaaggagaagttcccacaggattactttccagagtgtaaatggtctaggaaggggtttataaggacgagatggtgcattgccgattgcgcattcgacttggtaaacattcatctgtttcacgatgctagcaacctggtggcttgggagacttctcccagcgtttactcggggatccgacacaaggccctggggtatgtgcttgacagaatcatagaccaacgctttgagaaagtatcttacttcgtgtttggggacttcaatttccggctagacagcaaatctgtggtggagctcttggagttcgataaggagctgtccgtattcaaggacagactgtatgagctggatatctcatttccgccatcatacccctattctgaagatgcacgccaaggtgagcagtacatgaacacgaggtgcccggcatggtgtgatcgcatcttgatgagcccatccgcaaaggagctggttctcaggagtgaatctgaggagaaagtggtgacctatgatcacatcggacctaatgtatgcatgggagaccacaaaccagtttttcttgcatttcggatcatgcctggcgccggaaagccacacgcccacgtccacaagtgttgtgtggtgcaatag

SEQ ID NO: 191455 - DNA, 417 bp, synthetic construct
  misc_feature 1..417: note = Description of Artificial Sequence: Synthetic coding sequence
  source 1..417: mol_type = other DNA
gtgaccgccaacgtgggcagcctgttcgacgaccccgagaacctgcaaaaaaactggcttagagagttctatcaggccttgggcagtttctactttttgcacgaaagcttaaagaatatctaccagtttgattttaaggccaagaagtaccgtaaggtggccgggaaggagatatactctgatacactcgagtcaacgccaatgctcgagaaggagaaattcccccaggactacttccccgagtgcaagtggtcacgcaaagggttcatccgaaccagatggtgtattgccgactgcgcgtttgacctggtcaacattcatctgttccacgacgcctctaaccttgttgcttgggagacctcgccctccgtgtatagtggaattcgccacaaggcactgggctatgtgctggactag

SEQ ID NO: 191456 - DNA, 990 bp, synthetic construct
  misc_feature 1..990: note = Description of Artificial Sequence: Synthetic coding sequence
  source 1..990: mol_type = other DNA
atgaaggagtacaaccgggcccgggtgtacctggacgagaactacaaatctcaggaacactttaccgctttgggctccttttattttctgcacgagagtttgaaaaatatataccaatttgatttcaaagccaaaaagtacagaaaggtagcgggcaaagaaatttatagtgacactctggagagtacccctatgttagaaaaagaaaaatttccgcttctcccaagggtacagatggtcaagaaaaggttacaccccgacgaggtgatcgcggattgtgcctttgatctggtgaacattcacctcttccatgacgcgagcaatctcgtagcatgggaaacaagtccatccgtgtactccgggataagacacaaggcactcggttatgtgctggaccggatcattgatcagagattcgaaaaggtatcttactttgtctttggcgactttaacttccgcctcgacagtaaatccgtcgtagaaacgctttgcacaaaggctaccatgcagactgtcagggctgcagatacgaatgaggtagttaaactaatttttagagagtcggataacgatcgcaaggtcatgttacagctagaaaagaagctgtttgactatttcaatcaagaagtctttagggacaacaacggaaccgcccttctggagtttgacaaagagctgtccgtattcaaagaccgtctgtatgaactcgatattagcttcccaccctcctacccttatagcgaagacgcccgacagggagagcagtacatgaatacccggtgtcccgcgtggtgcgaccggattcttatgagtccgtccgctaaggaattggtgctgcgctctgagtcagaagaaaaggtagttacctatgaccacattggtcccaatgtgtgtatgggcgatcacaagcccgtctttctagcctttagaattatgccgggagccggcaaacctcacgcacacgtgcacaagtgttgtgtcgtccaatag

SEQ ID NO: 191457 - DNA, 315 bp, synthetic construct
  misc_feature 1..315: note = Description of Artificial Sequence: Synthetic coding sequence
  source 1..315: mol_type = other DNA
ctggacatcagcttcccccccagctacccctacagcgaggacgcccgtcagggggaacagtatatgaatactcgttgcccggcttggtgcgatcgcatcctgatgtctccctcagcaaaagaactggtgctgcggtccgagagtgaggaaaaggtcgtgacatacgaccacattgggccaaatgtctgcatgggcgaccataagcctgtatttttagccttcagaatcatgccgggtgctggtaaacggtgccagcgccacgagaggaccctgagggagccgccatgctcaaggggccccaatactcattcttag

SEQ ID NO: 191458 - DNA, 546 bp, synthetic construct
  misc_feature 1..546: note = Description of Artificial Sequence: Synthetic coding sequence
  source 1..546: mol_type = other DNA
gccgccgcccccggcaccgccgtgctgctggtgaccgccaacgtgggctcactctttgatgaccctgaaaacctccagaaaaactggttgagggaattctatcaagtcgttcacacccataagccacacttcatggcactgcactgccaagagttcggaggcaaaaattatgaagccagcatgagtcacgtagacaaattcgtcaaggagctcctgtcctcagacgccatgaaagagtacaacagggccagagtgtatctggatgagaattataagtcccaagaacatttcaccgcgctcgggagtttctatttcttgcacgagtcattgaagaacatttatcagtttgatttcaaagcaaagaagtacaggaaggtcgcaggcaaagagatctactccgatacactggaaagtacccccatgctggagaaagaaaagttccctcaggattatttcccagagcgacacgtacctcacacctctctcgaggctttgctgattcttcacgaggaccctcagctgccagaccctcatttgcccttatag

SEQ ID NO: 191459 - DNA, 459 bp, synthetic construct
  misc_feature 1..459: note = Description of Artificial Sequence: Synthetic coding sequence
  source 1..459: mol_type = other DNA
atggccggcaaggccgccgcccccggcaccgccgtgctgctggtgacagccaatgtgggttccctttttgatgatcccgagaatttgcagaaaaactggctgcgcgagttttatcaggccctcggttcgttctattttttacatgaatctcttaaaaatatctaccagtttgacttcaaagctaagaaatatagaaaggtggctggaaaagagatctattcagacacacttgaatccacgcctatgcttgaaaaagaaaagttcccacaggactatttccctgaatgcaagtggtcaaggaagggatttatccggacccggtggtgcatcgctgactgtgcctttgacctcgtcaatattcatctgttccacgacgcttccaatcttgtggcatgggaaacatctccaagtgtttacagtggcattaggcacaaggcactggggtacgtcttagactag

SEQ ID NO: 191460 - DNA, 1935 bp, synthetic construct
  misc_feature 1..1935: note = Description of Artificial Sequence: Synthetic coding sequence
  source 1..1935: mol_type = other DNA
atgcccagcaaggccgagaacctgcggcccagcgagcccgccccccagccaccggaggggcggacactacagggacaactccccggtgcaccccctgcccaaagggccggttcccctcctgatgccccaggcagcgaatcgccggctctggcgtgttccacgcctgctaccccgtccggcgaagacccccctgcccgcgctgcgcctatcgccccccgacctccagcaaggcctaggttagaaagggctctctcattagacgataaaggttggaggaggcgtcggtttcgggggtcacaggaggacttggaggccagaaacggcaccagcccaagcagaggtagcgtacaaagcgaggggccgggcgcacccgctcactcctgcagcccaccctgcttatcaacatccctgcaggaaatccccaagtcacgaggcgtgctgtcatctgagcggggttccccgagctccggtggaaatcctctgtctggggtggcatcatcttctcccaaccttcctcaccgcgacgccgctgtcgccggctcttctcccaggttgccaagcttgttaccccctcgacccccccccgctctgtctctggatatcgccagtgacagtctgcggacagcaaataaagtcgacagcgatttggctgactataaattgcgggcgcagccgctacttgtgcgcgctcacagctctctgggccccggtcgcccacgcagcccactggcttgtgacgattgctcactacgcagcgcgaaatcatcgttctccctcttggctcctattcgcagcaaagacgtcaggagccgcagctacctggaggggtccctgttggcctcaggagcactgctcggagcggatgagctcgcacgctattttccagaccggaacgttgccctgtttgtagctacgtggaacatgcagggccagaaagagttacctccctctttagacgaatttctccttcccgctgaagccgactacgcacaggacttgtatgtgattggagtgcaggaaggctgttccgacaggcgggagtgggaaacaagactgcaagaaaccctcggtccgcattatgtgctcctttcgtccgcggctcacggagtgctgtatatgagcctgttcatacggcgggacttgatctggttttgcagtgaggtggaatgttcgaccgtaaccactagaatagtaagtcagattaaaaccaagggtgcgctgggaatatccttcacgttttttggaacatcctttcttttcataacctcccatttcacaagcggagacggcaaagtggctgagcggctactggattatacccgcaccgtgcaggcgttagtgctgcctcggaatgtgcctgacaccaacccctacaggagctcagcggccgacgtaaccaccagattcgacgaggtgttctggttcggcgactttaatttcagactttctggtggtagaaccgtagtcgatgcactcttatgtcagggcctggtggtagacgtcccagcactgcttcaacacgatcagctcatccgtgagatgaggaagggatcaattttcaaggggttccaggagcctgatattcactttctgccctcctacaagttcgacattggaaaagatacctacgactccactagtaagcagcgaaccccgtcttacaccgatcgagtactttatcgcagccggcacaagggcgacatctgtccggtcagctattcgtcttgccctgggatcaagacaagcgaccatagacccgtatatggtctttttagagtgaaagtgaggccagggcgagacaacatccccctagccgcagggaaattcgatcgggaactctacttattgggcattaaaagaaggatttccaaggagatacagcgccagcaagcattgcagtcccaaaactcaagcaccatttgttcagtgtcatag

SEQ ID NO: 191461 - DNA, 960 bp, synthetic construct
  misc_feature 1..960: note = Description of Artificial Sequence: Synthetic coding sequence
  source 1..960: mol_type = other DNA
atggaccagagcgtggccatccaggagaccctggccgagggcgagtactgcgtaatcgctgtgcagggggtattgtgcgaaggggattcacggcagagccggctgttggggttggttagatatcgtttagaacatgggggacaagagcacgctctgttcctgtacacacatcggcgaatggccatcaccggcgatgatgtatctctcgaccagattgtgcccgtgagtcgcgatttcaccttggaggaagtcagcccagatggcgagctgtacatcctagggagtgacgtaactgttcagctcgatacggccgaactatccctggtttttcaactgccctttggatctcagacacgaatgttcttacacgaagtcgccagagcctgccctgggttcgattccgctacccgcgacccagagttcttatggctcagtcgttatcgctgcgcggagctcgaattggaaatgccgacaccccgtgggtgtaatagcgccctcgtcacatggcctggctatgcaacaatcggcggggggcggtacccaagtaggaaaaagcggtggggcctggaggaggctcgcccccagggcgcgggcagcgtcctgttctggggaggagccatggagaaaactggtttccgcctgatggaacgtgcccacggagggggttttgtgtggggcaggagtgcccgggacggacgtcgagatgaagagttggaagaggctggacgagaaatgagtgctgccgctggctcacgagaacggaacactgctggctccgctggcggtgggaaactcggctggggtgcgggaccaggggcagccgttcgcccagcgcttggctgggcaggctcagccgtctggccagtggatgcgaggggtgaggaccagtctccggggggaccactagaggccgggacacttgggcaaaaattttgcgacgttctgttgaggagggcctag

SEQ ID NO: 191462 - DNA, 2982 bp, synthetic construct
  misc_feature 1..2982: note = Description of Artificial Sequence: Synthetic coding sequence
  source 1..2982: mol_type = other DNA
atggaccagagcgtggccatccaggagaccctggccgagggcgagtactgcgtgatagccgttcagggcgtgctctgtgaaggcgacagtcggcagagccgtctgctagggctggtgagatacagactggaacatgggggccaagagcatgcgctctttttgtatacacatcggagaatggctatcacaggcgatgacgtgagtctcgaccagatcgtgcccgtctccagagattttacgctggaagaggtgtcaccagacggggagctgtacatactggggtccgacgtgaccgtccagctggatactgctgaacttagcttggtgttccagcttccattcggaagtcaaacgcggatgtttctgcatgaagtggcccgggcgtgcccaggatttgactctgctacacgggacccagagtttctgtggctctcccggtaccgatgcgcagagcttgagttagaaatgccaactcctagagggtgcaattccgctctcgttacctggcccggatacgccaccataggcggaggccggtacccttctcggaaaaaaaggtgggggttggaggaagctagaccacagggcgccggatctgtgctattttggggaggggccatggagaagactggatttcgtttgatggagcgggcccacgggggaggatttgtttggggtcgctctgcacgcgatggtcgacgtgacgaggaactggaggaggcagggagggagatgtccgccgccgctggctccagggagcgcaacactgcaggaggctccaattttgacggcctgcgtccgaacggaaagggcgtcccaatggatcagagttcccggggacaggataagcctgaatctctacagcccaggcaaaacaaaagtaaatctgaaattacagatatggtgcgctcaagcaccattaccgtgtctgacaaagcccacattttatccatgcagaagtttggcctacgggacacaattgtgaaatcccacctgcttcagaaggaggaagattacacatacatccaaaatttcaggttttttgccggcacctacaacgttaacgggcagtcacctaaggaatgcctgcgcctgtggctttctaacggcattcaggcgcctgacgtttattgcgtggggttccaggaactggatctaagtaaagaggcctttttcttccacgacacgcccaaggaggaggagtggttcaaagcagtgtctgaggggcttcacccagatgccaaatatgctaaagtgaagttaatcaggctggttggaataatgcttctgctgtatgtcaagcaggagcatgccgcttacatttccgaagtagaagcagagaccgtcgggacaggtatcatgggcagaatgggtaacaagggcggcgtggccatccgctttcagttccacaatacaagcatttgcgtggttaatagccatttggcggcccacatcgaagagtacgaaaggagaaaccaggattataaagacatttgctctcgcatgcaattctgtcagcctgacccatccctgcctccactgaccatatcgaatcatgacgtaatcctgtggctgggagacctgaactacaggatcgaagaattagatgtggagaaagtcaaaaaacttatagaggaaaaagattttcagatgctgtacgcctacgatcagctgaaaattcaggtggccgcgaaaactgtctttgaggggtttacggaaggcgaactgacctttcagcctacatacaaatacgacactggatccgatgattgggacacctcagaaaagtgccgcgcccccgcctggtgcgacaggattctgtggaaggggaaaaatatcacacagctgtcctatcagagtcacatggcactgaagacttctgaccacaagccagtctctagcgtgttcgacatcggtgtgagagtcgttaacgacgagctatacagaaaaacacttgaggagattgttcggtctcttgataagatggaaaatgcaaacatcccttccgttagcttgtctaagcgcgagttctgttttcagaatgtcaaatacatgcagctaaaggtcgaatccttcactatccataatgggcaggtgccatgtcactttgagttcataaataagcctgacgaggagtcctactgcaaacagtggttgaacgccaatccctcgaggggcttcctgcttcctgactccgacgttgagattgatttggagctctttgtgaataaaatgaccgctacaaagctaaactcgggcgaggacaaaattgaggacattctagtgctccatctagaccggggcaaggattacttcctgtccgtttccgggaactacctgccaagttgtttcggcagtccaatccatacgttgtgttacatgcgtgaacccattctggacctgccccttgagacgatatcggagctgactcttatgcccgtttggactggtgatgatggcagtcaattagattctcccatggaaattcccaaggagctctggatgatggtcgattacctgtataggaatgctgtccaacaggaggatctgttccaacagcccgggttgcgctctgagttcgagcatatcagggactgtctggacactggaatgattgacaatctttccgccagcaaccactcagtggcagaggccctcttacttttcttggaaagcctgcccgaaccagttatctgctacagtacataccacaactgtctggagtgcagtggcaattatactgcaagcaagcaggtgatatctacactgcctatcttccacaaaaatgtgttccactacttaatggccttcctgcgagaactactcaaaaacagtgctaaaaaccacctggatgagaacatattggccagtatatttggatcccttttgttgagaaatcccgcagggcaccaaaaactggatatgacagagaaaaagaaggcccaagaattcattcatcagtttctgtgcaatccactttag

SEQ ID NO: 191463 - DNA, 2742 bp, synthetic construct
  misc_feature 1..2742: note = Description of Artificial Sequence: Synthetic coding sequence
  source 1..2742: mol_type = other DNA
atggaccagagcgtggccatccaggagaccctggccgagggcgagtactgcgttatcgctgtacagggcgttctctgcgagggcgattctaggcagagccggttgctggggctcgtgcgctaccgtctcgagcacggtggccaggagcacgccctctttctgtatacacataggcgcatggctattacaggcgacgacgtatctctggaccaaattgtacccgtgagcagagatttcacactcgaggaagtgtctcctgacggcgagctgtacatccttgggtctgacgtgactgttcagctcgacactgccgagctgtcacttgtcttccagctacccttcggatctcagacccgtatgttcctccatgaggtagcccgggcgtgccctgggttcgactccgccacccgggaccccgaatttctttggttgagccgctataggtgcgcagagttggagctggagatgcccacacctcgtggctgcaatagtgctctggttacatggcctggctacgcaaccatcggtgggggagggtcaaatttcgatggactgcgaccgaatggtaagggagtgcccatggaccagagtagcagagggcaggataagcctgagagcttgcagcccaggcagaacaagagtaagtctgagataactgacatggtacggtcttctaccatcacggtgagcgataaggcccacatcctcagtatgcagaaattcggcttgagagatactattgtgaaatcccatctgctgcaaaaggaagaggactatacctacattcaaaatttccggttttttgccggtacatataatgttaacggccaaagtcccaaggaatgtctccggttgtggctttcaaatggcattcaggccccagacgtgtactgtgtggggtttcaggagctggacctttccaaggaagccttttttttccacgatacccctaaggaagaggaatggtttaaggccgtcagtgaagggctccatccagacgctaagtacgctaaggtgaagctgatacggctcgtgggtattatgctactcctgtacgttaagcaggaacatgctgcctatatttccgaggtagaagctgaaactgtgggaaccggaataatgggtcgcatgggcaataaaggaggtgttgccattagatttcagtttcataatacctctatatgcgttgtgaatagccacttagctgctcatattgaggagtacgaacggcggaaccaggattataaggacatctgttctcggatgcagttctgtcagcccgacccaagcctgcctcccttaactatcagcaatcatgatgttattctttggctgggggaccttaattaccggatcgaagaactggatgtggaaaaagtgaaaaaactgatcgaggaaaaagactttcagatgttgtacgcttatgatcagttaaagatccaggtggctgcaaagacagttttcgagggatttacagaaggggaacttacgtttcagccaacctataagtacgacactgggagcgacgattgggacacttcagaaaagtgtcgggctccagcatggtgcgaccggatcctgtggaagggcaagaacattacccagctgtcctatcagtctcatatggcactaaaaacctctgatcacaagcctgtttcctccgtcttcgatatcggagtgcgcgtggttaatgatgaactgtaccgcaagacactggaggaaatcgttcgctccctggataagatggagaacgccaatatcccatccgtatcactgtccaagcgcgagttttgctttcagaacgtgaaatacatgcaactgaaagttgagtcattcaccattcacaacggacaggtaccttgccattttgagttcattaacaagcctgatgaggaatcgtattgcaagcagtggctgaatgccaatccctcaaggggtttcctcttgcctgacagcgatgtggaaattgacctggaactgttcgtgaacaaaatgaccgcgaccaagctcaatagtggagaggacaaaattgaggatatcctggtgctccacctggacaggggcaaggactacttcttatccgtcagcggtaattacttgccttcctgcttcggaagccccattcacaccctgtgctatatgcgcgaacccatcctggacctccctctggaaaccatctcagagctgaccctaatgccagtgtggactggggacgatggttcccagcttgattctccaatggagatacccaaggaactgtggatgatggtcgactatttatatcgaaacgcagtccagcaggaggatctctttcaacaacctggactaaggtcggagtttgaacacatcagggactgtttagataccggcatgatagataacctgtcggccagcaaccactcagtggcagaagccctgctgctgtttctggagagcctgcccgagcccgtcatctgttactccacctaccacaactgtctcgagtgctctggcaactacacagcttccaagcaggtgatctctaccttacctatctttcacaagaatgtttttcactaccttatggcattcctgagagagctgctgaaaaacagtgccaaaaatcacctggacgaaaacatcctggcatccatttttggctcgctgctgctgcgcaatccagccggacaccagaaactggacatgacagagaaaaaaaaagcacaagagttcattcatcagttcctatgcaatcccctctag

SEQ ID NO: 191464 - DNA, 2982 bp, synthetic construct
  misc_feature 1..2982: note = Description of Artificial Sequence: Synthetic coding sequence
  source 1..2982: mol_type = other DNA
atggaccagagcgtggccatccaggagaccctggccgagggcgagtattgcgttattgctgtgcagggagtcctgtgcgagggcgacagccgtcagtccaggttgctggggcttgttaggtatcgcttggagcacgggggacaggagcatgccctctttctgtatacccatcgccggatggcgatcactggagacgatgtgagcctggaccagatagtacctgtgtcgcgggatttcactctggaggaggtctcacccgacggcgagttatatattctcggctccgatgtcaccgttcagctagataccgcagagctgagtctggtctttcagttacctttcggcagccagactagaatgtttcttcacgaagtggcaagagcatgtccaggcttcgactcagctactcgagatcctgagtttctctggctttcacgctacaggtgcgccgaactcgaacttgagatgcctaccccacgagggtgcaactctgccctggtgacgtggccaggatacgccactatcggaggcggtagataccctagtcgcaaaaagagatggggccttgaggaggctagacctcaaggagccgggagtgtgctgttctggggtggagcaatggagaaaacaggattcaggctcatggaaagggcacacggcgggggcttcgtgtggggacgaagcgcacgcgatgggaggagagatgaggagctcgaggaggccggccgcgaaatgtccgcagccgcggggagtcgcgagcgcaataccgctggggggagcaattttgatggtctaagacctaacggcaagggagttccaatggaccagtccagtcgtggccaggataaacctgaaagtctccagcccagacagaataagagcaaatcagagataaccgacatggtgaggtcatctacaatcacggtctcagacaaagcacacattctttctatgcagaaatttgggctcagggatactatcgtgaagagtcatctcctccagaaggaggaggactacacatacattcagaacttccgtttctttgctgggacctacaatgtgaatgggcagagccctaaggagtgcctgcggctgtggttgagcaacggcattcaggctcctgacgtgtactgcgtgggttttcaggaactggacctctctaaggaggcatttttctttcatgatacccctaaagaggaggaatggtttaaggccgtatcggagggacttcaccccgatgcaaaatacgctaaagtcaagctcatccggctcgttggaattatgttgttgctgtacgtgaaacaggaacatgccgcctatataagcgaggtggaggctgaaactgtcggaaccgggattatgggtaggatggggaacaagggcggagtggcaatacggtttcagtttcataatactagcatttgtgtggtcaactcccacctggccgcacacatagaggaatacgagcgcagaaaccaggactacaaggatatctgctcaaggatgcagttttgccagcctgatccatctcttccccccctgacgatctcaaaccacgatgtcattctgtggttaggggacctgaactatagaattgaagagctggacgtggagaaggtgaaaaaactgatcgaggagaaagacttccaaatgctttacgcgtacgaccaacttaagattcaggtggccgctaaaactgtgtttgaaggattcaccgaaggagaactgactttccagcccacttacaaatacgacacagggagcgatgattgggacacttctgagaagtgtagagcccccgcctggtgcgaccggatcctgtggaaaggaaagaatattacacagctgtcttatcagagccatatggctttgaaaacatctgaccataagcctgtctcctctgtcttcgacattggtgtgcgggtggtcaacgacgaattgtaccgcaagaccctggaggagatagtgaggagcctggataagatggagaacgccaatataccctccgtttctctgtctaaacgcgagttctgtttccaaaatgtaaaatacatgcagctcaaagtggagtcttttacgatccacaacggtcaggtaccttgccacttcgagtttattaataaacctgatgaggaaagttattgtaaacagtggctaaatgccaatccttccaggggctttctcctccccgattcagacgtggagatcgaccttgaactgtttgttaacaaaatgacagccaccaaactgaattccggtgaggataaaatcgaggacatcctggtgctccacttggatcgtggcaaggactacttcctgagcgtttcagggaattatctccccagttgtttcggtagtcctatacacacgctgtgttacatgcgcgagcctatcctcgatctccctcttgaaaccatcagcgagctgacactgatgcctgtctggaccggcgacgacggaagccagctggatagtcctatggaaatacctaaagagttatggatgatggtggattatctttatcgcaacgccgtgcagcaggaagacttatttcaacaacctgggctgaggtccgaattcgagcacataagggactgcctggacaccggaatgatcgacaaccttagcgcaagtaaccattccgttgctgaggccctgctgctctttttagagagcctgcctgaacctgttatttgttactcaacttaccacaactgcctagagtgttctggtaattacaccgccagcaagcaagtaatttccaccctaccaatctttcataagaatgtgtttcactacctgatggcctttctgagagaactgttgaagaattcggctaagaatcatctggatgaaaatatactagccagtatcttcggatcactacttttacgcaatcccgcaggccaccagaaattagacatgacagaaaagaaaaaggcacaggagtttatacatcaatttctgtgcaaccccctgtag

SEQ ID NO: 191465 - DNA, 2250 bp, synthetic construct
  misc_feature 1..2250: note = Description of Artificial Sequence: Synthetic coding sequence
  source 1..2250: mol_type = other DNA
atgagcgccgccgccggcagccgggagcggaacaccgccggcggctctaacttcgatgggctccggccaaatggcaagggcgtcccgatggaccagagttctcggggacaggataaacctgagtcacttcagccaagacaaaacaagagtaagagtgaaatcacagatatggttcgatcctcaacaatcacagtgtcagataaggcccacatactgtctatgcagaaattcgggttgagagacacgatcgtgaaaagtcacctgttacagaaagaggaagattatacttacatccagaattttcgcttctttgctgggacctacaatgtcaatggacagtcacctaaagaatgtctacgcctctggttaagtaatgggatccaagcccccgacgtgtactgcgtaggtttccaggagctcgacctaagcaaggaggccttcttttttcacgatacccccaaggaagaagaatggtttaaagcagtcagtgaagggctgcatcctgacgccaaatacgccaaggttaaactcatcaggcttgtggggattatgctgctgttgtatgtgaaacaggaacatgcagcctacattagtgaggtcgaggccgagacggtgggcaccggaatcatggggcgaatgggcaataaggggggcgtggcaattcgtttccagtttcacaacacctctatctgtgtagttaacagtcacctcgccgctcacattgaggagtatgagagaaggaatcaggactacaaggatatttgctccagaatgcaattttgtcagcccgatccatcccttccacccctcactatcagcaaccacgacgtgattctgtggcttggagacttaaattataggatcgaggaacttgacgtagagaaagtaaagaaattgattgaagagaaagatttccagatgctgtatgcttatgaccagctcaagattcaggttgctgcaaagacggtgttcgagggatttactgaaggagaactcacatttcagcctacctacaagtatgacacagggtccgacgattgggacacaagtgaaaagtgccgcgctccagcctggtgcgacagaatcctgtggaagggaaaaaacatcacacaactatcctaccagtcgcatatggctctcaagacatccgaccataagcccgtgtcgagcgtgttcgacatcggcgtgagagtggtcaatgatgagttgtaccgaaaaaccctagaggaaatcgtgcggtcactcgacaaaatggaaaacgccaacataccaagcgtgtccttgagcaagcgggagttttgcttccagaacgtcaagtacatgcagctgaaagttgaaagcttcacgatccacaacggacaggtgccatgtcatttcgaattcatcaacaagcccgatgaggaatcctattgtaagcagtggcttaatgcaaacccgagccgaggctttctgctcccagattctgatgttgagattgatctggagctgttcgttaacaaaatgactgccacaaagctaaacagtggggaagataagattgaagatatcttagtgctgcatctggacagaggaaaagactatttccttagcgtcagtggaaattacctcccttcatgctttggcagccccatccacacactctgttatatgagagagccaatactggacttacccttagaaaccatcagtgagctgactctgatgccagtgtggaccggtgacgatggcagtcagcttgattcccccatggagatccccaaggagctgtggatgatggtggattacttataccgaaacgctgtgcagcaggaggatttgtttcaacagcccgggctgagaagcgagtttgaacacattagagattgtctcgacacaggtatgattgacaacctgtccgcctctaatcatagtgttgccgaggcactcctgttgtttctggaaagcctccctgaacccgtgatatgttattcgacttaccacaactgtctggagtgttcaggcaactacaccgcctctaagcaggtcatctccaccctacctatctttcacaagaatgtgttccactacctcatggcgttccttagggaattgctcaagaactccgcaaaaaaccatttggatgagaacattctggccagcatttttggtagtctactgctcagaaaccccgccggacatcagaaactggacatgaccgaaaaaaagaaggcccaggaattcatccatcagtttttgtgtaaccccctgtag

SEQ ID NO: 191466 - DNA, 2487 bp, synthetic construct
  misc_feature 1..2487: note = Description of Artificial Sequence: Synthetic coding sequence
  source 1..2487: mol_type = other DNA
atggaccagagcgtggccatccaggagaccctggccgagggcgagtactgcgtcattgcggtgcagggggtcttatgcgaaggtgacagcagacagtctcgacttctgggcctcgtgcggtatcggctggaacacgggggtcaggagcatgccctttttctttacacgcatagacgtatggccattactggcgatgacgtctctctcgaccaaattgtgcctgtttcacgtgatttcacgcttgaagaggtgagccctgatggagagctttatatcctggggagcgacgtgacagtccagcttgacacagctgagctctctctggtctttcagctgccttttggctcccaaaccaggatgttcctccacgaagtcgccagggcttgccccggctttgacagcgccaccagggatccggagtttttgtggttgagccgttatcgctgcgccgaactggagctggaaatgcccacaccccggggatgcaattccgcgctcgtgacgtggccaggctacgccaccatcggcggaggaagatacccttcacgtaagaaacgttggggtctggaggaggccagacctcaaggagctggatccgtcttgttttggggaggagctatggaaaagacagggttcaggctcatggaacgagcccatggcgggggcttcgtttggggaaggtccgcaagggacggtagaagggatgaagaactcgaggaggccggacgcgagatgtcagcagcggccggcagccgggaacgcaacacagccggaggctctaattttgacggcttacgaccaaacgggaaaggggttccgatggaccagagttcccggggtcaggataaacctgaatcgctgcagccacgccagaacaagtccaaatccgagatcacagacatggtgcgcagcagcaccattactgtgtctgacaaagcccacatcttaagtatgcagaagttcggcttgcgtgacactattgttaagtcccatcttttgcagaaagaggaagattacacctacatccagaattttcgattcttcgctgggacctataatgtaaatggccaatctccgaaggagtgtctcaggctgtggctgagcaatggtattcaggcgccagatgtttactgtgttggttttcaggaactggacctgagcaaagaggcatttttctttcatgatacaccaaaagaggaagagtggttcaaggcagtcagtgaggggctgcatcctgatgccaagtacgcaaaagtgaagcttatccgactcgttggcattatgctactactttacgtgaagcaagagcatgctgcgtatatatctgaagtcgaagctgagactgtaggcactgggattatgggacgcatggggaacaagggcggggtggccattaggttccagtttcacaacacatccatttgtgtggtcaattctcatcttgctgcgcacatcgaggaatacgagagaaggaaccaggattataaggatatttgctcccgcatgcagttctgccagccggatcctagtctgcctccgctgacgatctctaaccacgacgtaatcctctggctcggcgacctgaactacagaatcgaggagctggatgtggagaaggttaagaagttaattgaggagaaggattttcaaatgctgtacgcctacgatcagctaaagatccaggttgcagctaagaccgtcttcgaagggttcacggagggggagctcaccttccaacctacgtacaaatatgacacgggcagcgacgattgggataccagcgagaaatgtcgagctccggcttggtgcgaccgcattctctggaaaggcaaaaatatcacacagcttagttaccaatctcacatggcactgaaaacctctgaccataagccagtgtcttccgtctttgatatcggtgtacgcgttgtgaacgacgagttgtacagaaaaactctggaagagatcgtgagaagtctcgataagatggagaatgctaacatcccatcggtgtccttgtccaaacgggagttttgtttccagaatgtgaagtacatgcagctgaaagtggagagctttaccattcacaacggccaggttccctgccattttgaattcataaacaagccagatgaagagtcgtactgcaagcagtggctgaacgccaatccatcccgtggcttcctactcccggattcagacgtcgaaatagacttggaactttttgtcaataaaatgaccgctacgaaactcaatagtggcgaagataagatcgaagacatccttgtattgcatttggacaggggtaaggattatttcttaagcgtgagtggtaattacttaccaagttgtttcgggagccctattcacactctctgttatatgcgggaacctatcctcgacctccccctggaaacaatatcggagttgttggcatacctggcagcctactgtttcgagacacagctcgttacgaaaagtttgatttag

SEQ ID NO: 191467 - DNA, 528 bp, synthetic construct
  misc_feature 1..528: note = Description of Artificial Sequence: Synthetic coding sequence
  source 1..528: mol_type = other DNA
atgcagaagttcggcctgcgggacaccatcgtgaagagccacctgctccaaaaagaagaagactacacatacatacaaaattttcggttcttcgcaggcacctataatgtcaatggccagagtcccaaggaatgtttgcggctctggctaagcaacgggattcaggcccccgatgtgtactgcgttggttttcaggagctcgacctgtccaaagaagcctttttttttcatgacacgccgaaggaggaggagtggttcaaggcggtgagtgagggccttcatccagacgccaagtacgccaaagttaagctcatccgcctggttgggatcatgcttctgctctatgtcaagcaggagcacgccgcctacattagtgaggtcgaagctgagactgtgggcaccgggatcatggggaggatgtgcgatctggtggccggcggcccccaactgcaggaccgcagagctgggtgcgggaagtccgagaaagcacatagacgtgaagggcttagcaacgcagtgtgcatttag

SEQ ID NO: 191468 - DNA, 834 bp, synthetic construct
  misc_feature 1..834: note = Description of Artificial Sequence: Synthetic coding sequence
  source 1..834: mol_type = other DNA
atggccgacccctggcaggagtgcatggactacgccgtgaccctggcgaggcaggcaggcgaggtagtgtgcgaagctatcaagaatgaaatgaatgtgatgctgaaaagcagcccagtggatcttgtcaccgccacagaccagaaagttgagaagatgcttataagtagcatcaaggagaagtacccttctcactcattcattggggaagaaagtgtggccgcaggcgaaaaatccatcctgacagataatcctacctggattatagacccgattgacggcactacaaacttcgtccaccgcttcccttttgttgcagtttccatcggtttcgccgtgaacaagaagatcgagttcggagtggtctatagctgtgttgagggaaagatgtacactgcaaggaaaggcaagggcgcattttgcaatggccagaagctgcaggtgtctcaacaagaggacatcacaaaaagcttgctggtgactgagctgggatcttctcgtacacccgagacagtccgtatggtactctctaacatggaaaaactgttctgtatccccgtgcatgggatccgcagtgttggcacagccgccgtcaatatgtgcctggtggccacgggaggtgcagatgcctactacgagatgggcatacattgttgggacgtggccggtgctggcatcatagtcaccgaagcaggaggcgtcctgatggatgtaaccggcggaccttttgatttgatgagtagacgcgtgattgccgccaacaacagaattctcgccgagcgaatagccaaagagatccaggtaatccccctgcagcgtgatgacgaagactag

SEQ ID NO: 191469 - DNA, 597 bp, synthetic construct
  misc_feature 1..597: note = Description of Artificial Sequence: Synthetic coding sequence
  source 1..597: mol_type = other DNA
atggccgacccctggcaggagtgcatggactacgccgtgaccctggcacggcaggccggggaagtggtgtgcgaagccattaaaaacgagatgaatgtgatgctcaagtcatctcctgtcgacctggtcacagccaccgatcaaaaggtagaaaagatgctcatttcctctatcaaggagaagtacccgtctcactcatttatcggagaagaatccgtagccgcaggggaaaaatcaatcctaacagacaatcccacctggataattgacccaatagacggcactactaacttcgtccatagatttccattcgtggccgtttctattggcttcgcagtaaacaagaaaattgagtttggtgtagtctacagctgcgttgagggaaagatgtacacggcgcggaaggggaagggcgccttttgcaacggacaaaaactgcaggtgtctcagcaagaaggatccggtgtgctggagcaacagctattgatttgtgctctgtggcaattggccgaacaaatgcatatcatgaaatgggagtttaccgccggcatgttgcaggaacttgctctcctacttcttaagctggtggcttgctag

SEQ ID NO: 191470 - DNA, 1011 bp, synthetic construct
  misc_feature 1..1011: note = Description of Artificial Sequence: Synthetic coding sequence
  source 1..1011: mol_type = other DNA
atgggccagcggcccggccccgtgctgcccgccgtggccgtgctgggacaggtggccaagcgaaaagtggcttggctattgcgctggaaagctgtgacccgcacagagacagcagggaactcctctggcgtatatggttttggaaaaatgaagatttttgttaagtacttccagaaaatggctgacccttggcaagaatgcatggactatgcggttacactggccaggcaggcaggcgaagtggtatgcgaagccattaagaacgaaatgaatgtgatgctgaaaagcagcccagtggatctcgttacagccactgaccagaaagtggaaaaaatgttgatctcctcaataaaggaaaaatatccttcccacagctttatcggagaggagagtgtggctgccggagagaaatccatccttaccgacaaccccacttggataatcgacccgattgacggtactaccaattttgtgcatcgcttcccattcgtcgcggtatcaatagggttcgccgtcaacaaaaagattgagttcggtgtggtttattcatgcgtggaagggaaaatgtatactgcccgcaaaggtaagggcgcattttgcaacggccagaagctgcaagtgtcccaacaggaagacataacaaaaagtctgctcgttactgaattggggtctagccggacccccgagaccgtccggatggtgctgagcaatatggaaaaactcttctgtattcctgttcatgggattaggtctgtggggactgcagcagtaaatatgtgcctggtggctacaggaggtgcagacgcctattacgaaatgggaatccattgttgggatgttgccggggctggtatcattgttactgaagccggcggcgtgctaatggacgtgacagggggccccttcgatctcatgagcaggagggtgatcgcagccaataacagaatacttgccgagcgaatagccaaggagattcaggtcattcccctgcaacgggatgatgaggactag

SEQ ID NO: 191471 - DNA, 462 bp, synthetic construct
  misc_feature 1..462: note = Description of Artificial Sequence: Synthetic coding sequence
  source 1..462: mol_type = other DNA
atggccgacccctggcaggagtgcatggactacgccgtgaccctggctcgtcaggccggcgaagttgtctgtgaggctatcaaaaacgagatgaacgttatgcttaaatcatcgccggtcgacctggtcacggccacggatcagaaggtggagaagatgttaatttcatccattaaggagaagtatcccagccacaggttccccttcgttgctgtgagtattgggttcgccgtgaacaaaaagattgagttcggggtagtgtactcgtgcgtggaagggaagatgtacacagctaggaaaggcaaaggggccttttgcaatggccaaaagttacaggtcagccagcaggaagacatcactaaaagccttcttgtaaccgaactgggaagctccagaacaccggagacggtgcgcatggttcttagtaacatggaaaaattattttgtatcccagtgcattag

SEQ ID NO: 191472 - DNA, 636 bp, synthetic construct
  misc_feature 1..636: note = Description of Artificial Sequence: Synthetic coding sequence
  source 1..636: mol_type = other DNA
atgggccagcggcccggccccgtgctgcccgccgtggccgtgctgggccaagtggcaaagcggaaggtggcgtggttgctgcgttggaaggcagtgactcgtacagagacagccggaaactcctctggcgtatatgggttcggtaaaatgaaaatctttgttaaatacttccagaagatggccgacccttggcaggaatgcatggactatgcagttactcttgcacgccaggcgggagaggttgtctgcgaggctattaaaaacgaaatgaatgtgatgttaaagagctcccccgttgacctggtgacggcaaccgaccagaaggtggaaaagatgctcatcagcagtatcaaagagaaatatccttctcattcctttatcggagaagagagtgtggctgccggggagaaatccatcctcacagacaaccccacatggattatcgatccaatcgacgggactactaacttcgtgcataggtttccctttgtggcagtttctatcggattcgctgtgaataaaaagatagaatttggagtcgtgtatagttgcgtggagggcaagatgtacacagcaaggaaagggaagggcgctttctgcaatgggcaaaaactgcaggtgtcccagcaagaatag

SEQ ID NO: 191473 - DNA, 867 bp, synthetic construct
  misc_feature 1..867: note = Description of Artificial Sequence: Synthetic coding sequence
  source 1..867: mol_type = other DNA
atgaagcccagcggcgaggaccaggccgccctggccgccggcccctgggaggaatgcttccaggccgcggtgcagctggcgctgagagccggccagatcatccggaaagctctgactgaggagaagagagtcagtaccaaaacttcagccgctgacctcgtgactgagacagaccacctggtggaggatttaatcatcagcgagctacgcgagcgctttccaagccatcgattcatcgcagaggaggccgccgcaagtggagcaaagtgcgtattgacacactcacctacctggataattgacccaattgacgggacttgtaacttcgtccatcgcttcccaaccgtcgccgtgagcataggcttcgccgttaggcaagaactggaatttggggtcatctatcactgtacagaggagaggctctacacggggagaaggggtagaggcgccttttgtaacggacagaggttaagagttagcggggagacagatctgagcaaggctctcgtgctgaccgagataggaccaaaaagagatcctgccaccctgaagctttttttaagcaatatggagaggctgctgcatgcaaaagcccacggcgtgcgggtgattgggtcaagcactctggctctctgtcacttggcctcaggcgccgccgacgcatactaccagtttggcctccattgttgggacctcgcagcagcaactgtcatcatcagagaggctggtggcattgtgatcgatacttctggtggtccactcgacctgatggcttgcagagtagtggctgcatccacacgagaaatggcaatgctgattgcgcaagccctccagaccatcaactacggccgagacgacgaaaagtag

SEQ ID NO: 191474 - DNA, 258 bp, synthetic construct
  misc_feature 1..258: note = Description of Artificial Sequence: Synthetic coding sequence
  source 1..258: mol_type = other DNA
atgaagcccagcggcgaggaccaggccgccctggccgccggcccctgggaagagtgcttccaggcagccgtgcagctggcccttcgcgcagggcagatcattagaaaagctcttaccgaggaaaaacgtgtatcgaccaagacctccgccgctgatctcgtgacagaaaccgatcatctagtggaggacttgatcatcagcgagctgagagaaagatttcccagtcaccgctctcccttctccctggtgcatatgtag

SEQ ID NO: 191475 - DNA, 1071 bp, synthetic construct
  misc_feature 1..1071: note = Description of Artificial Sequence: Synthetic coding sequence
  source 1..1071: mol_type = other DNA
atgctggagcagatccggcgggacatccgggacttccggagcagcgccgggctggataaggtgattgtcctctggacagcaaatacggagcggttctgtgaggtgatacccggtctcaacgacacagccgaaaacctattgagaactattgaacttggcctggaagtgagccctagcacactgtttgcagtggcctctattttagagggttgcgcattcttgaatgggagtcctcagaatacactggtgccgggcgccctggagctcgcctggcagcatcgtgtgtttgtgggcggggatgactttaagagcggacaaaccaaagttaagagcgtcttggttgatttcctgataggttccggtctgaaaactatgtcaatcgtgtcttacaatcatctggggaacaatgatggcgagaacctctctgctccactgcagttccgctctaaggaggtctccaaatctaatgtggtggacgacatggtccagtctaaccccgtgttgtataccccaggcgaagagccggaccactgtgtggttattaagtatgttccgtacgtcggcgattccaagcgcgctctagatgaatataccagtgagctcatgctaggcggtactaacacactggtgttgcacaacacctgcgaagattctcttctggcagcacctatcatgcttgacctggcccttctgacagagctgtgccagagagtgagcttctgtactgatatggatcctgaacctcagacatttcaccctgtgctgtctctcttgagtttcctgttcaaggcccctcttgttcccccaggcagccccgtggtcaacgccttgttcaggcaaagaagctgcatcgagaacatcctgcgggcttgcgtcgggctgccaccccagaatcacatgcttctggaacacaaaatggaaaggccaggaccctccctgaagagagtggggccagtggcagcaacgtatcccatgctgaacaaaaaaggcccagttcccgccgcgaccaatggttgtacgggtgatgcgaacggccacctgcaggaggaaccaccaatgccgacaacctag

SEQ ID NO: 191476 - DNA, 1677 bp, synthetic construct
  misc_feature 1..1677: note = Description of Artificial Sequence: Synthetic coding sequence
  source 1..1677: mol_type = other DNA
atggaggccgccgcccagttcttcgtggagagccccgacgtggtgtacggccccgaagcgatcgaagcccagtatgaatatcgcacaactcgggtaagtcgcgaaggaggagttttgaaggtacatcccactagtacaaggttcacattccgcacagctcgccaggtgccacgactcggagtgatgctggtgggctggggaggcaacaatgggtctaccctaacagcagccgtcctggccaaccggctacgcctgtcctggcccacacggagtggaaggaaggaggcaaattactacgggtcactgactcaggcaggcacagtgtccttgggcctggatgctgagggtcaggaggtctttgttccattcagtgccgtattgcccatggtggctccaaatgacttagtattcgacgggtgggatatctctagcctgaatctggctgaagccatgcgcagagctaaggtgcttgattgggggctccaggagcagctgtggccacacatggaagcactgcgaccaagaccatcagtttacattccagagttcattgcggcaaaccagagtgccagagccgacaatctgatcccaggcagtagagcccagcaactggagcagattcggcgtgatattagagattttcgaagtagcgccgggctggacaaggtgatcgtcctgtggacagcaaacacggagaggttttgtgaagtgatccccggtctgaacgacacggcggagaatcttcttaggaccattgagctgggcctggaagtgagtccttctacactgttcgcagtggcaagtattctggaaggctgcgcctttctaaatggctccccccagaatacgctcgtgccaggcgcattagagctggcttggcagcaccgggtctttgtgggtggggatgatttcaagtctggccagactaaagtcaaatccgtgcttgttgatttcttaatcgggagtggcctgaaaaccatgtctattgtctcatacaaccatctgggcaacaacgacggagagaatctgtccgctcctctgcagttccggtccaaagaggtgtctaagtcgaacgtggtggacgacatggtgcagagcaatccagtgctgtacaccccaggggaagagcccgatcattgtgtcgtaataaagtacgtcccatacgtgggagactctaagcgagccttggacgagtacacaagcgagctgatgttgggaggtactaatacactggtgctgcacaatacttgcgaagattcactcttggccgccccgatcatgctggatctggctctactgacggagctttgccagcgagtatccttttgcacagacatggatcccgagccacagaccttccatcccgtgttgagcttgctcagcttcctgttcaaggccccacttgttccacccggctcccccgttgtcaatgctcttttccgccagagatcttgcattgagaacattctgagggcctgcgtgggactgccccctcagaaccacatgctcttagaacataagatggagcggccaggcccttcacttaagcgcgttgggcctgtggccgccacctacccaatgctgaataagaagggtccggttccagccgcaacgaacgggtgtacaggcgatgccaacggacatctccaggaggagccgcctatgccgactacttag

SEQ ID NO: 191477 - DNA, 1515 bp, synthetic construct
  misc_feature 1..1515: note = Description of Artificial Sequence: Synthetic coding sequence
  source 1..1515: mol_type = other DNA
atggaggccgccgcccagttcttcgtggagagccccgacgtggtgtatggtcccgaagctatcgaggcccagtatgagtatcggacaacaagagtgagcagagaaggtggggtgctgaaggaggcaaactactatgggtccctgacacaagcgggcacggtgtccctggggcttgacgcagaaggacaggaggtattcgtccccttctcggccgtcttaccaatggtggcccccaatgacctggtttttgatggatgggatatctcttcactaaatctggccgaggccatgagacgggccaaggtgctggactgggggctccaggaacagctgtggccgcacatggaggctctgaggccacgtcccagcgtctacatccccgaattcattgccgccaatcagtctgctcgggccgacaatctgatccctggctccagagcccaacaacttgagcagattcgccgagacatccgagatttccgcagttccgctggtctggacaaggtcattgttttgtggacagctaatactgagcgtttttgtgaggtgattccaggtttaaatgacactgctgagaacctgttaagaacgatcgaattggggctcgaagtgtctcccagcacgctgttcgccgtggcctctatcttagaaggttgcgccttcctgaacggcagcccccagaacaccttagtacccggagccttggaactcgcttggcaacatcgggtttttgttggtggtgacgatttcaagagcggccagaccaaggtgaagtccgtgctggtcgattttttaattggaagcgggctgaaaacaatgagcattgttagttataaccatttgggcaacaacgacggcgagaaccttagtgcccccctgcaatttcgctccaaagaggtcagtaagtctaatgtggtggatgatatggtacaaagcaatcctgtcttgtacacgccaggagaagagccggaccattgtgtggtaattaaatacgtgccctatgtgggcgactctaagcgagcccttgatgaatacacctctgaactgatgctcgggggtacaaacacactggtactgcataacacttgtgaggattccctactcgccgcccctattatgttagatcttgcactgctgactgaactctgtcagcgcgtttctttttgtaccgatatggatccggaaccccagacctttcaccccgttctatcccttctctcattcctcttcaaggcgccgttagtgccgcctggctccccggttgtgaacgccctattcaggcagcgatcttgtattgagaatattctcagggcctgcgtggggctgcccccgcagaatcatatgctcctggaacacaaaatggagaggccaggtcctagtctcaagagggtgggcccagtagccgcaacttatcctatgctgaacaagaaaggtccagtgcccgccgccaccaatggttgtacaggggatgctaacgggcacctccaagaagagccccccatgcctacgacatag

SEQ ID NO: 191478 - DNA, 1227 bp, synthetic construct
  misc_feature 1..1227: note = Description of Artificial Sequence: Synthetic coding sequence
  source 1..1227: mol_type = other DNA
atgcggcgggccaaggtgctggactggggcctgcaggagcagctgtggcctcacatggaggctctccggcccagaccctctgtgtacatccctgagtttattgcagctaatcagtctgcacgcgcagacaacctcattcccggatcgcgcgcccagcaattggaacaaatccgtagagacatcagggatttcaggtcatccgccgggctggataaagtgattgtgctgtggacagctaacaccgaacgcttttgcgaagtcatacccggcctcaacgataccgccgaaaacttactgagaacaatagagttgggattggaagttagtccctctactctctttgccgttgcaagcattcttgaagggtgcgcctttctgaacggcagcccgcagaatacattggtgccaggagccctagagctggcttggcagcaccgagttttcgttggcggagatgatttcaagagtggccaaacaaaggtgaagtcagtactggtcgactttctcatcggatccggccttaagacaatgagcatcgtatcctataatcatctgggtaacaacgatggcgaaaatctgtcggctcccctgcaattccggtccaaagaagtcagcaaaagcaacgtcgtggatgacatggttcagtccaatcccgtcctgtatacccccggtgaagagccagatcactgtgttgtgattaaatacgtcccctacgtcggggattcaaagcgcgctttagacgaatatacgtctgaactcatgttgggcggcactaatacacttgtgctacataatacatgcgaagacagcctccttgctgcacccattatgctggatctggcgctgctaactgagctttgccagcgggtttcattctgcacggatatggacccagaaccacaaacttttcaccctgtgctctcgctcttatccttcctgttcaaggcccccctggtgccccccggcagcccagtggttaacgccctctttcgccagaggtcatgcatcgagaacattttgagggcctgcgttgggctcccgccacagaatcatatgctcctcgaacacaaaatggagcgccccgggccaagtttgaaaagggttggcccagtcgccgccacttacccgatgctgaacaagaaggggccagtgcctgcggctacgaatgggtgcaccggggacgcaaatgggcatctccaggaggaacctccaatgccaacaacctag

SEQ ID NO: 191479 - DNA, 1386 bp, synthetic construct
  misc_feature 1..1386: note = Description of Artificial Sequence: Synthetic coding sequence
  source 1..1386: mol_type = other DNA
atgaccctgcccggcggccccaccggcatggcccggcccggcggcgcccgaccctgttcccctggtttggagcgcgcgcccagacggtccgtcggggagttgcgactgctgttcgaagctcggtgcgccgctgtggcggccgccgctgcagctggtgaaccacgcgctagaggggcaaagagacgcgggggacaggtcccgaacgggctgcccagggcaccccccgcccctgtcatcccacagcttaccgtgactgctgaggagcctgatgtgccgcctacctcaccagggcctcccgagagggagcgggactgtttgcccgctgctgggtcctcccacttacagcagccccgacgacttagtacctccagcgtctcttcaaccgggtcgtcctcattactggaagactcagaagatgacttactgtctgattcagagagtcgtagtcgaggcaacgtgcagctggaggcaggggaggatgtagggcaaaagaatcactggcaaaaaatccgtaccatggtcaacttgcctgttattagcccatttaagaaacggtacgcttgggtgcagcttgccggccacacaggcagttttaaagcagccggcacgtctggactgattctgaagcgctgctcggagccagaaagatactgcctagctcgccttatggcagacgcactacgaggctgtgtgccggcttttcacggagtggtcgaacgcgacggcgaatcttacctacagctacaagacttgctggacggatttgacggcccttgtgtcctggattgtaagatgggagttaggacgtatcttgaagaggagctaactaaagccagagaaagaccaaagctcaggaaagatatgtataaaaagatgcttgccgtggaccccgaggcacctacagaggaggagcacgcccagagagccgtaacgaagcccagatatatgcagtggagagagggtatctcatcctcaaccaccctgggattcaggattgaggggatcaaaaaggccgacgggagttgtagcaccgattttaagactaccagatctcgcgaacaggtgctaagggtgttcgaggaatttgtacagggagatgaggaggtccttaggagatatctgaatagactgcagcagattagagacacactggaagtgtccgaattctttcggaggcatgaagtaattggctcttctctgctgttcgttcacgatcattgccatcgcgccggcgtgtggctaattgacttcggcaaaaccacccctctgcccgacggccaaatcctagatcaccggagaccttgggaggaaggcaacagagaggatggataccttctgggtttagacaatctgataggcatcctggcctctttagctgagcggtag

SEQ ID NO: 191480 - DNA, 2841 bp, synthetic construct
  misc_feature 1..2841: note = Description of Artificial Sequence: Synthetic coding sequence
  source 1..2841: mol_type = other DNA
atggccgtgtactgctacgccctgaacagcctggtgatcatgaactctgctaacgagatgaagagtggcgggggccccgggccttctggaagcgagaccccaccacctccccgccgagccgtgctctcaccaggatctgttttttcccccggtcgtggagcctccttcctatttcctccagcggagtcgttgtctcctgaggaacccaggagtccgggcgggtggcgatcagggaggaggcgccttaactctagtagtggttcaggttccggatcaagcggctcttccgtatcttcaccgtcctgggcaggccggttgcggggggaccgacagcaggtagttgctgccggcacactgtcaccccctggacccgaagaggccaaacgtaagttgcgcattttgcagagggaattgcagaatgttcaagtgaatcagaaggttggcatgtttgaggcccacattcaggcccagagctccgccattcaagccccccggtctcctcgcctggggcgagcacggagcccgtccccctgcccattccgttccagctctcagccaccagggcgtgtgttggtgcagggcgcaagaagcgaggaacggcgcacaaaatcatggggcgagcagtgccctgagacctccgggaccgacagcggccgcaagggggggccttccctttgttcaagccaggtgaaaaaagggatgcctcctctgcctggtagagcagctcccaccgggtcggaagcccaaggccccagcgcctttgtcagaatggaaaagggtatacctgctagcccacgttgcggctctcctaccgccatggaaatcgataaacgtgggtcacccacaccgggcacccgatcttgtttggcccctagcttaggcttgtttggtgcctctctgacgatggccactgaggtggcagcccgcgtcacctcgaccggtccccatagacctcaggatctggccctgacagagcccagcggacgggcccgcgagctcgaagatttacaaccccctgaggcgctggtggaaaggcaaggccagtttctcggcagcgagaccagtcccgccccggaacgggggggcccaagagacggagagccgcccggcaagatgggcaaggggtatttaccctgcggcatgccaggatccggtgagcccgaggtcggtaaacggcccgaagaaaccaccgtgtcagttcaatctgcggagtcttcagacagtctgtcatggtctcgtctaccaagggcgctagcctctgtaggccctgaagaggcgcgcagcggcgctccagtggggggaggccgatggcagctgtcagaccgggtcgagggagggagcccaactctgggtcttcttggcggaagcccatccgcacaacccgggactggcaatgtagaagcaggcattccctctggacgcatgctcgaacctctgccctgttgggatgcggccaaggatctcaaagaacctcagtgtcctcctggcgatcgggtgggagtgcaaccaggcaactcacgcgtgtggcaggggacaatggaaaaagcggggctcgcatggactagaggcaccggcgtgcagtcggagggcacctgggaatctcagcgtcaggacagcgatgctttgccaagtcctgaattgttgccccaggatcccgacaagcctttcctacgcaaggcttgttcccccagtaacattccggccgtgatcatcacagatatgggtacacaggaagacggtgccctggaagaaacccagggaagtccccgggggaatctgccattgcgcaagctcagctcgtcttccgcttcgtccaccggctttagctcgagctatgaagatagcgaggaggacatctcttccgaccccgagcgcacgctggaccctaatagcgccttcctccatacactggatcagcagaaaccccgcgtcagcaagagctggcgcaaaatcaagaacatggtgcattggagcccattcgtgatgagctttaagaagaagtatccgtggattcaactcgcagggcacgcgggctcttttaaagcagccgctaatggtcggattcttaagaagcactgcgaatctgaacagagatgtctggatcgtctgatggtcgatgtgctgagacctttcgtgcccgcttatcacggcgacgttgttaaggacggcgaacggtacaatcaaatggacgaccttttggctgacttcgatagcccctgtgtgatggattgtaagatggggattcgaacctaccttgaggaggagctgacgaaggcaagaaagaaaccaagccttcgcaaagacatgtaccagaagatgatcgaggtggatccagaggcaccaactgaggaggagaaagcacaaagagcagtgacgaaaccgagatatatgcagtggcgggaaacgatttccagtacggctactctgggctttcgaattgaaggaatcaagaaggaagacggcactgtcaatcgggattttaagaagacgaagacacgggagcaagtgaccgaggctttcagggaatttaccaaggggaaccacaacatcttgattgcttatcgtgaccggctcaaggctatcaggacaaccctggaagtgtccccattcttcaagtgccacgaggtcatcggaagctcactgttattcatccacgataaaaaggagcaagccaaggtctggatgatcgatttcggcaagacgactcccttgccagaaggccaaacactgcagcacgatgtgccctggcaggagggtaatcgcgaggatgggtacttgagcggcctgaacaacctggtcgacatcttgaccgagatgtctcaagacgcccctctggcatag

SEQ ID NO: 191481 - DNA, 1935 bp, synthetic construct
  misc_feature 1..1935: note = Description of Artificial Sequence: Synthetic coding sequence
  source 1..1935: mol_type = other DNA
atggccgtgtactgctacgccctgaacagcctggtgatcatgaacagtgccaatgagatgaagtccggggggggccctggcccatcaggttccgaaactcccccccctccgaggagggctgttttatccccaggctccgttttttcccccggccggggggcaagcttcttgttcccacctgctgaatctctttccccggaggaaccacgttctcctgggggctggagatctgggcgccgccgacttaacagctcctccggatccggctccggaagttccgggagttctgtaagctccccgagctgggctggcagactaagaggggaccgccagcaggtggtagccgccgggactctaagtccacctggaccagaggaagctaaaaggaaactaaggatcctacagcgggagcttcagaacgtgcaggtcaaccagaaagtgggaatgtttgaggctcatattcaggctcaaagctctgcaatacaagcccctcgatctccgcgactgggaagggctcggtctccatcaccatgtcccttcagatcttcttcccagcccccagggcgcgttctggtacagggagcccgttccgaagaaaggagaactaagtcctggggagaacagtgtcctgaaacttctgggactgacagcggcagaaaaggcgggccgtccctgtgtagtagccaggtgaagaaaggaatgcccccactcccaggccgggctgcgcccacgggatcagaagctcagggcccctcagctttcgtccgtatggagaaagggatcccagccagtccaaggtgcgggtctccaaccgccatggaaatcgacaaaagaggaagtccgacaccaggcacgcgttcatgcctggctccctccctcggtctctttggcgcctctctaacgatggctacggaggtagcagctagggtcactagtacaggaccccatcgtcctcaagatttagcactgaccgagccctcagggcgggctcgcgagctggaagatttgcagcccccagaagcgctcgttgagagacaggggcagtttctgggctccgagaccagccccgcacctgaacgcggcgggccaagagatggcgagccacccggcaaaatgggtaaaggatacttaccttgcggcatgcccgggtcaggggaacctgaggtgggaaaaaggcctgaggagacaacggtttcagtccaatccgctgagtcatcagacagccttagctggtctaggctccctagagcattagcttcagtgggacccgaagaagcgaggagcggcgctcctgtcgggggaggtcgttggcagctgagcgacagggttgaaggtggatcacccacccttggattgttgggagggtctccttcagcacagcccggtacaggcaacgtcgaagctggtattccttccgggcgtatgctagagccactgccttgctgggacgctgccaaggacctcaaggagccacagtgtcctcccggagatagggtgggagttcagcctgggaattctcgggtatggcagggaactatggagaaagcaggtctggcatggactcggggtacaggcgtgcagagtgaaggcacctgggagtcccagaggcaggatagcgatgcgctgcctagcccagaactgttgccacaggatcccgacaaaccatttctgaggaaggcctgttccccctctaacatacccgccgtgatcatcacagacatgggaacacaggaggatggtgctctcgaggagacccaagggagcccacgtggaaacctccctttgcgcaagctgtcttcttccagcgcctcgagtactgggttctccagtagttatgaagatagcgaggaggatatctcatccgatccagagcgcacacttgaccccaacagcgcttttcttcatacgctggaccaacaaaagcccagggtttag

SEQ ID NO: 191482 - DNA, 2841 bp, synthetic construct
  misc_feature 1..2841: note = Description of Artificial Sequence: Synthetic coding sequence
  source 1..2841: mol_type = other DNA
atggccgtgtactgctacgccctgaacagcctggtgatcatgaactcagcaaatgaaatgaaatcaggcggggggccaggaccaagtggaagcgaaacacctcctccgccccgacgagccgtgctttctccaggctctgtgttttctcctggccgtggtgcctctttcttattcccacctgcggaatcgctgagtcctgaagaacctcggtcacccgggggttggcgttccgggaggaggcgcttaaattctagctctggcagtgggtccgggagctctggatccagtgtgtcgtcacctagttgggctggacgcctgaggggcgaccgtcagcaagttgtcgctgccggtacactgagtccccccggcccggaagaagccaagagaaagctgcggattctgcagcgcgagctacagaacgtccaggtgaatcaaaaagtgggaatgttcgaagcacacatccaggcccagtccagcgccattcaggctccccgttcaccacgcctgggtcgggccagatcacctagcccctgtcctttccgctcatcgagccagcctccaggacgggtgctggtccagggagctagaagcgaggaacgccggacaaagtcttggggtgagcagtgtccggaaacctccggcaccgatagcggtagaaaaggaggcccctctctgtgctcaagccaggtcaagaaaggaatgccgccgctgcccggcagagcggcccctactggctcagaagcccagggtccctccgcctttgtacgcatggaaaaggggattccagcctcacctcgctgtggttcccccacagccatggaaattgacaaaaggggctcacctacacccgggacacgctcttgtctcgctccctcactaggactgttcggcgcctccttgacaatggccaccgaggtcgccgctagggtcacgtcaaccggcccccatcgaccacaggatttggctctaacggaacctagtggccgcgcacgtgagctcgaggatttacagcccccagaagcgctagtcgaacgccagggtcagtttctgggcagcgagactagtcctgcccccgagagaggcggaccacgtgacggagagccccctgggaagatggggaaaggctatttaccatgcggcatgcccggctctggtgaaccagaagtcgggaagcgcccagaggaaactactgtcagcgtgcagagtgcagagtccagcgatagccttagctggtctcggctcccccgggccctggcatcagtggggcctgaggaagcaagatccggagcaccagtcggcgggggtagatggcaactatccgaccgcgttgaggggggaagcccaacccttggcctcctcggcggatccccctctgcccagccaggaacgggaaatgttgaggcaggaatcccgagtggcaggatgttggaacccctcccatgttgggatgccgcaaaagatctgaaagagccgcagtgtccccctggtgaccgggtgggggtgcagcctgggaatagccgggtgtggcaaggcaccatggagaaggctggcctggcatggaccaggggaacaggcgtgcagtcagaaggaacttgggaaagtcagaggcaggactccgatgcattgccaagcccagagctactgccacaggatccagataaaccattcctccgcaaggcctgctctccttccaatattcccgctgttatcatcactgatatggggactcaggaagacggggcactggaagagacccaaggttccccccggggaaacctgccgctgcgcaagttgtccagttcttctgctagcagtacaggattttcatcgagctacgaggattcagaggaggacatatcgtctgatccggagaggaccctcgacccgaactccgcctttctgcatactctcgatcagcaaaagccacgggtaagtaagtcttggcgcaagattaaaaacatggtgcattggtccccttttgtaatgtcatttaaaaagaagtacccatggattcagctagccggccatgcggggtcattcaaggctgcagctaatggacggatcctgaaaaagcattgcgagtcagagcagcgctgtcttgacaggctcatggtggacgtactgaggccattcgtacctgcctatcacggcgacgtggttaaggatggcgagagatacaaccagatggatgacctgctggccgactttgatagtccctgtgtgatggattgcaaaatgggaatacggacgtatttggaggaggagcttacaaaagcccgcaaaaagccctccctccggaaggatatgtaccagaaaatgatagaggttgatcccgaggctcctacagaagaagaaaaagcccaaagagccgtaaccaagccccgttacatgcagtggcgggagaccatttcttctacagcaacactcgggttcaggattgagggcatcaagaaagaagatgggactgtaaatagagattttaagaagacaaagaccagggagcaggtgactgaagcttttcgcgaattcaccaaggggaaccacaacatcctcatcgcatacagggaccgtctgaaggctatacgcaccactctcgaggtgagcccgttctttaagtgccatgaagtaatcgggagttctctgctctttatacacgataagaaggaacaggcgaaggtgtggatgattgattttggtaagaccactccactcccagagggccagacactccagcacgacgtgccctggcaagaggggaatcgtgaggacggctatttgtccggccttaacaatctggtggatatactgacagaaatgtctcaagacgctcctctggcctag

SEQ ID NO: 191483 - DNA, 2052 bp, synthetic construct
  misc_feature 1..2052: note = Description of Artificial Sequence: Synthetic coding sequence
  source 1..2052: mol_type = other DNA
atgcggcggtgcccctgccggggcagcctgaacgaggccgaggccggcgctcttccagcagcggctcgtatgggactggaagccccccggggaggcagacgtaggcaaccaggtcagcagaggcccgggcccggagcaggagcacccgcaggccggcctgagggtggtggaccctgggcccgaacggaaggctcaagtctgcacagcgaaccagagagggcagggcttggtcccgcccctgggacagagtcaccccaggcagaattttggaccgatggtcaaactgaacctgctgctgctgggcttggcgtcgagacagagaggcccaaacagaagacagagcctgaccggagcagtctacgtacacatctcgaatggagctggtctgaactggaaacaacctgtctgtggacggaaacaggcactgacgggctttggaccgacccccacaggagcgacctgcaattccaacctgaagaagcatccccctggacacagcccggcgttcacggcccttggacagaacttgagactcacggatcacagacccaacccgaacgggtaaagtcctgggcagataacctctggactcaccagaatagttcctccttgcagacacacccagaaggcgcctgtccctccaaggaaccatccgccgatggctcctggaaggagctgtacactgatgggagtcgcacgcagcaggacatagaggggccctggactgagccgtacacggacggctctcagaagaaacaggatacagaggcagcacgtaagcaaccagggacagggggtttccagatccagcaagatacggatggttcttggacacagcctagcacggacggcagccaaacagccccaggcaccgactgcttactcggcgagcccgaagatgggcccctggaagagcccgaacctggcgaattgctgactcatctatacagtcatctgaagtgttcacctctctgtcctgtacctagactgattatcactccggaaactcctgaaccagaggctcagcccgtgggaccaccctcaagggtggaaggaggatccggggggttttcttcagcgagctctttcgacgagagcgaagacgatgttgtggccggaggcgggggtgcttccgatcccgaggacaggagtggttctaagccgtggaaaaagttgaaaactgttcttaaatacagcccctttgttgtctctttcagaaaacactacccatgggtccagctatctggacacgccggcaactttcaggcaggtgaagatgggagaatactgaaacgcttttgtcagtgtgagcagcgtagcttggagcaactaatgaaggatccactgcggccctttgtgccggcctattacggtatggtcctgcaggacggccagacctttaaccagatggaagaccttttggcggacttcgaggggccatctatcatggactgcaagatggggtctcggacatatttagaggaggagctggtgaaggctagggaaagacccagaccgcgcaaagacatgtacgaaaaaatggtggctgtggaccctggagctccaacgccagaggagcacgcacagggcgccgtgactaaaccccgctatatgcagtggcgggaaactatgtcgtctacttcaacattggggttccgaatcgaggggatcaagaaagccgatgggacttgcaatacgaacttcaagaagacccaggccctcgagcaagtgaccaaggttctggaggatttcgtggacggtgaccacgtcatcctgcaaaaatatgtagcctgcctcgaagagctgcgagaggccttggaaatttctcctttctttaaaactcatgaagtcgtgggttccagtcttttgttcgtacatgaccacacaggcctggccaaggtgtggatgatagattttggcaagactgtcgccctaccagatcaccagactttgtcccatcgtctgccttgggccgaaggcaatagggaggatgggtacctgtggggcctagacaacatgatatgcctgctccaggggttggctcagtcatag

SEQ ID NO: 191484 - DNA, 1740 bp, synthetic construct
  misc_feature 1..1740: note = Description of Artificial Sequence: Synthetic coding sequence
  source 1..1740: mol_type = other DNA
atgcggcggccccccggcaacggcgaggccgccagcgagggccccgggggctggggcctttggggagtacaggagtcccggcggctgtgttgtgccggccatgataggtgcaaacaggccctgctccaaatcgggattaacatgatggctctgcccggcgggcgacatcttgattccgtaaccctccccggccagcgactgcacctaatgcaggtcgatagtgtgcagaggtggatggaggatctgaagcttatgaccgaatgtgaatgcatgtgcgttctgcaggcgaaaccaatttccctagaagaagacgcgcagggcgatctgattctggccgggggccccgggcctggagatcctcttcagctgttgctgaagcggggatgggtgattagcacagaattgaggagaatcggccagaagctcgcccaggatagatgggctagggttcactcaatgagcgtgcggctgacatgtcacgccaggtcaatggttagtgagtatagcgccgtaagccgaaactctctgaaagaaatgggtgagatcgagaaactgctgatggaaaaatgcagcgagctgtcggctgtgactgagcgctgtctccaggtggagaacgaacatgtgctgaaatcaatgaaggcgtgcgtatccgagacgttgagcatgctgggtcagcacttcggtcagttgctggagctggcgctaactagagaagtgcaggctttagtgagaaaaatcgatgcctcagacaatatttataccacagagtctactacggggaatctcttttctctcacccaagaaggagcgcctctctgtcggatcatcgcaaaggagggcggggtcgtggcgctgtttaaggtatgccgccaggactctttcaggtgtctctaccctcaggccttgcgcaccctggccagcatatgctgcgtggaagagggggttcaccagctcgaaaaggtagacggagtgctgtgcctggcggatatcttaacagacaattcacactctgaagccactagagccgaagcggctgcggtcgtcgcccaggtcacctcaccgcatctcccggttacacagcacctgtcgagtttcctggaatccatggaggagatcgtaacagccttagtgaagctgtgtcaggaggcaagcagcggagaggttttccttctggcttctgccgcccttgccaatatcaccttcttcgacaccatggcctgcgaaatgcttctgcaactcaacgcgattcgcgtgctgctggaggcgtgttctgataagcagcgggtcgacacaccgtataccagggatcagatcgtaaccattctggccaacatgagtgttctcgaacagtgcgctagcgatattatccaggagaacggtgtgcagttgattatgggaatgctgtcagagaaaccccggagtggtacccctgcagaagtcgccgcctgtgaaagggtgcagcagaaggcggccgtcacgcttgccaggctgagcagggacccagacgtggctagggaagccgtgaggctcagttgtatgtcccgccttattgagctgtgcagatcaccatctgagagaaatagttctgatgccgtccttgtggcctgcctagccgcattgcggcggttggcaggcgtttgcccagagggactgcaggattcggattttcagcagcttgttcagccacgactcgtggattctttcctgctttgctcaaacatggaagagtcctttgtgtag

SEQ ID NO: 191485 - DNA, 1599 bp, synthetic construct
  misc_feature 1..1599: note = Description of Artificial Sequence: Synthetic coding sequence
  source 1..1599: mol_type = other DNA
atgatggccctgcccggcggccggcacctggacagcgtgaccctgcccgggcagagactccaccttatgcaggtggattctgtccagagatggatggaagatctgaagctgatgaccgagtgcgaatgtatgtgcgtgctccaggctaagccgataagcctggaggaagatgcgcagggggatttgattcttgcaggaggcccagggcccggagatcctctgcagcttctcctcaaacgcggctgggtcatcagtaccgagttgcgcagaatcggtcagaagctggctcaggaccgatgggctagagtccattcaatgagtgtaaggttgacatgccatgcccgcagcatggtgtccgaatacagcgctgtgtcgcgtaactcattgaaggagatgggggaaatcgagaagctgctgatggagaaatgttctgagctgagcgccgtaaccgaacggtgcctgcaggtcgagaatgagcacgtcctgaagtccatgaaggcatgcgttagtgaaaccctgtcaatgctaggccagcattttgggcagctgctagaattagccctgacgcgcgaagtgcaagccttggtgcggaaaattgacgcttcagacaacatttacaccacagaaagcacaacgggcaatctgttttccctgacgcaagagggcgccccactctgccgcatcatcgccaaagaggggggggtggtggcgctctttaaggtgtgtaggcaagattccttccgatgcttatatccccaggccctgcggaccctggcttccatctgctgcgttgaagagggcgtacatcagttggaaaaagtagacggggtgctgtgtctagccgatatactcactgacaattctcactcagaagctacgcgcgccgaggcggctgctgtggttgcccaggtcacgtctccacacctcccggtgacccagcacctctctagttttctggagtcaatggaagagatcgtaaccgcactcgtcaagctgtgtcaggaggcatcaagcggggaggtgtttcttctggcttctgccgccctagccaacatcacgttctttgataccatggcctgcgaaatgttactacagctgaacgccatcagagttctgctcgaggcatgctctgacaagcaaagggtggatacaccatacacccgtgaccaaatcgtcaccattctggccaatatgtctgtacttgagcagtgcgcatcagatattattcaggaaaacggagtccagctgatcatgggtatgctgtcagagaagccccgatcgggaacaccggcagaggtcgccgcctgcgaacgagtgcaacaaaaagccgctgtcaccttggccaggctcagtagggaccctgacgtcgcgagagaggcagttagactgagctgcatgtctcgcttgattgagttatgtcgatctccctctgaaaggaactccagcgatgctgtactggtcgcctgtttggccgcactcaggaggctggccggcgtgtgcccagaaggcttgcaggactcggattttcagcaattagtgcagcctcgcctggtggactctttcctgttgtgtagcaatatggaagaaagttttgtctag

SEQ ID NO: 191486 - DNA, 927 bp, synthetic construct
  misc_feature 1..927: note = Description of Artificial Sequence: Synthetic coding sequence
  source 1..927: mol_type = other DNA
atgatggccctgcccggcggccggcacctggacagcgtgaccctgcccggacagagactgcacctgatgcaggtcgattctgttcagagatggatggaagacctgaagctgatgacagagtgtgaatgcatgtgcgtcctccaggcaaaaccgatttcacttgaggaagatgcccagggggacttaatactggccggaggaccgggcccaggggatcccctgcagttactactcaagcgcggatgggtcatatccactgaactgcggcgaattggccagaagctggcgcaagacagatgggctcgggtacatagcatgagcgttcgtctcacctgccacgctagatccatggtctccgagtattcagccgtgtctaggaactcacttaaagagatgggggagatcgaaaaacttttaatggagaaatgctctgaactgtcggcggtgaccgagagatgtctacaggtggagaacgagcacgtgctcaagtccatgaaggcgtgcgtttctgagacacttagcatgctgggacagcattttgggcaactgctcgaactggccctaactagagaggtgcaggtggaatctcatagcgtcactagattagagtgtagcggcgccatttctgctcaatgcaacctgagactgttgggtagctctgactcacctgcttctgcaagtcaggccctcgtgcgcaaaatcgatgcctctgataatatttacaccactgaatccactacaggcaacctgtttagcttgactcaggaaggggcgcctctatgtcggatcattgccaaggagggcggcgttgtggccttatttaaagtctgtcggcaggattcttttcgctgtctatatccccaggcgctaagaacgctagcctctatttgttgtgtggaagaaggcgtccaccagttggagaagtag

SEQ ID NO: 191487 - DNA, 1473 bp, synthetic construct
  misc_feature 1..1473: note = Description of Artificial Sequence: Synthetic coding sequence
  source 1..1473: mol_type = other DNA
atgatggccctgcccggcggccggcacctggacagcgtgaccctgccgggacagcgcctccatctcatgcaggtggactcagttcagcgctggatggaggacctgaagctcatgactgagtgcgagtgcatgtgcgtgctgcaggccaagccaatatcacttgaagaagacgctcagggcgatttgattctggcaggtggacctgggcccggcgacccactgcagctgctgctcaaaagaggctgggtgatctccaccgaactgaggaggattggccagaaactggctcaggatcgctgggccagagtgcattcaatgtccgtgagattgacttgtcacgccagaagtatggtgtctgaatatagcgctgtctccaggaactccctgaaagaaatgggcgaaattgaaaaactgctcatggagaagtgctccgagctttcagcagtgaccgaaaggtgtctgcaggtggaaaacgagcacgttctaaaaagtatgaaagcttgcgtctcagagactttgagcatgctggggcagcattttggtcaattgcttgagctcgcgctaactcgtgaggtgcaggcgctcgtgaggaagattgatgcttccgacaatatttacactaccgagtccaccacgggcaatctcttctcactaacacaggagggcgccccattatgtcggataatcgctaaagtggacggtgtactgtgcctcgccgatatcttaacggataactcccacagcgaagccacaagagcagaagccgccgcggttgtcgcccaggtgacctctccgcatttaccagtgacccagcatctgagcagttttctggagagcatggaggagattgtgactgcgctggtcaagctgtgccaggaggctagttctggtgaagtatttctcctggcgtctgcagcgctagccaatattactttctttgataccatggcatgcgaaatgcttctgcaactgaatgctattcgggtattgctggaggcttgctctgacaaacagcgtgttgacacgccctacacccgagaccaaattgttacgatactggcaaacatgtccgtgctcgagcagtgcgcttctgacatcatccaggaaaatggagtgcaactgatcatggggatgctcagcgaaaaaccacggtcaggcacacccgccgaagtagcagcttgtgaacgagtgcaacagaaagcggctgtcacccttgcacgcctgtccagggatcctgacgtagcccgcgaagctgtgcgcctgtcttgcatgagccgcctgatcgagctttgtaggagcccctctgagcggaacagttccgatgccgttctggtggcatgcctggctgcattgaggaggctggctggcgtgtgtcctgagggactccaggactctgattttcagcagctggtgcagccaagactggtcgatagctttttgctgtgttccaacatggaagagagttttgtgtag

SEQ ID NO: 191488 - DNA, 1473 bp, synthetic construct
  misc_feature 1..1473: note = Description of Artificial Sequence: Synthetic coding sequence
  source 1..1473: mol_type = other DNA
atgatggccctgcccggcggccggcacctggacagcgtgaccctgccaggccaaaggttacatctgatgcaagtcgactctgtacagcggtggatggaggatcttaaactgatgaccgagtgtgagtgtatgtgcgtcctgcaggcaaaaccgatctcgctcgaggaagacgcacagggcgacctgattcttgctggcggcccaggccccggagaccctctacagctgctcctgaaacgcggctgggtaatatcgacagaacttcgacgaatcggacagaagctcgcacaagatcgatgggcccgcgtccacagtatgagcgtgcgactgacttgccatgcgaggtccatggtgtcagagtacagtgcagtcagccgtaacagcctgaaagagatgggtgagatagagaaactgcttatggaaaaatgtagcgagctttcggccgtgaccgaacgctgtctgcaggtggagaacgagcatgtactgaaaagcatgaaagcttgtgtttctgagactctaagcatgctcggacagcactttggccagcttttagaattggccctcactagagaggtccaggctctggtgcggaagatcgacgcttcggataacatttatacaaccgagtctactacgggtaacttattttccctgactcaggagggagcgcccctatgtaggattatcgccaaagtggacggcgtgctttgccttgcggatatcctgacagataactcccattcagaggcaactagggcggaggcagccgcagtagttgctcaagtaacaagtccccatctgcctgtgactcagcatctgtctagtttcttggagtccatggaagagattgtgaccgcgcttgtgaagctctgccaggaggcaagcagtggggaggtgttcctcctggctagcgccgctctggcaaacatcacctttttcgacactatggcctgtgaaatgctgctacagttgaacgccatccgagtgttgctggaggcatgctccgacaaacaacgagtggacaccccttatacccgcgatcaaatcgtaaccatcctggctaatatgtcggtgctagaacaatgcgccagcgatataatccaggagaatggggtccagctgatcatggggatgttatctgagaagccgcgaagcgggactcctgcggaagttgcagcttgcgagagagtgcagcagaaagctgccgtcacgctggcacgattatccagggaccccgacgtggctagagaggcggtgcgcctgtcatgcatgtcgcgcctgatcgagctatgccggagcccttctgagcgcaattcctccgacgccgtgctagtggcgtgtctggcggccttgagacgtctggctggtgtttgccccgaagggctgcaagattctgactttcaacagctggtgcagcctcggctggtggactcatttctcctgtgttctaatatggaggaatcattcgtctag

SEQ ID NO: 191489 - DNA, 1599 bp, synthetic construct
  misc_feature 1..1599: note = Description of Artificial Sequence: Synthetic coding sequence
  source 1..1599: mol_type = other DNA
atgatggccctgcccggcggccggcacctggacagcgtgaccctgcctggccagcgcttacatctcatgcaggtggactctgtgcaaagatggatggaggacctgaagttgatgactgaatgtgaatgcatgtgcgtgctacaggcaaaaccaattagcctcgaagaagacgcccagggagacttaatcctggcaggcggcccgggacctggcgatcctcttcagctattgctcaagagaggctgggtgatctcaaccgagctccgacgcatcggtcagaaactggcccaggacaggtgggctcgcgtccattcaatgtcggtccgcctaacatgccacgcacgctccatggtctccgagtactctgcagtatctagaaatagccttaaagaaatgggggagatcgaaaaactgcttatggaaaaatgcagcgaactcagtgctgtcaccgagcggtgtctgcaggtagaaaatgaacacgtgctgaaatcaatgaaggcatgtgtctccgagacactctccatgttgggacagcactttggccagctactggagctcgcgctgaccagagaggtgcaggccttggtgcgaaagatagacgcctctgacaatatctatactacagagtcgacaactgggaaccttttttctctcactcaggagggtgcacccctgtgtagaattatcgctaaggaaggtggcgtggtagccctatttaaggtttgccggcaggattcatttcgttgcttataccctcaggcactgaggacattagctagtatatgctgcgtggaagagggggtgcatcaactagagaaggtcgacggcgtgctatgccttgctgacatcctgactgacaatagtcatagcgaggcgactcgagcggaggcagcggccgtggttgcccaggtgaccagcccccacttacctgtgactcaacacctgtcctctttccttgagagcatggaggagattgtgacagccctggtgaagctatgtcaggaggcgtcctccggtgaggtatttctgctggcctctgcagctctggcgaacatcaccttctttgacactatggcgtgcgaaatgctgctccagctaaatgctatccgagttctgctggaggcttgttcagacaagcagcgcgttgacacaccctacactagagaccagatcgtcactatcctggccaatatgtcagtgctcgagcagtgtgcctccgacatcatccaggaaaatggagttcaactgataatggggatgctatccgagaaacccagatctggaacacccgccgaggttgcagcatgtgagcgggtacagcagaaagccgccgtcacccttgctcgtctgtccagagatcccgacgtcgcaagagaggctgttagactatcctgtatgtcccgtctaattgagctgtgcaggagtccaagcgaacggaactccagcgacgccgtgttggtggcctgtcttgcggcattgagacgcttggctggagtgtgcccagaaggcctccaggatagcgactttcagcaactcgtccagccccggttagtcgactcattcctcctgtgttcgaatatggaggaatcatttgtttag

SEQ ID NO: 191490 - DNA, 834 bp, synthetic construct
  misc_feature 1..834: note = Description of Artificial Sequence: Synthetic coding sequence
  source 1..834: mol_type = other DNA
atgccccggctgcacgaccacttctggagctgcagctgcgcccactctgcacggcggaggggcccccctcgggcgtcagccgctggtctggctgcgaaggtgggcgaaatgatcaacgttagcgtatctgggccttccctgctagccgcccatggggctcccgacgccgaccctgcccctcgaggccgctccgccgctatgtctgggccagaaccaggctccccttatccgaacacctggcaccatcgtttgctccaaaggtccctggtgcttttttcggttggggtggtcttggcgctggtgttaaacctcctacagatacaaaggaacgtaacactgttcccagaggaggtcatagctacaatcttctcaagcgcctggtgggtccctccctgttgtggaacggcagccgccgtcgtcggtttgctatacccttgcatcgattcacacttgggggaaccacataaattcaagagggagtgggcgtctgtaatgcgctgtatcgcagtctttgtagggataaatcacgcatctgccaagctggatttcgccaacaatgtgcagttgtccctaactctggcagcattatccctgggcttgtggtggacattcgaccgcagccgctccgggctcgggctggggatcactatagcattcctggcaacattgattacgcagtttctagtctataacggagtttatcagtataccagccccgatttcctgtacataaggtcctggctcccctgcattttctttagcggaggcgtgaccgtgggtaacataggaaggcagctggctatgggtgtgccagaaaagcctcacagcgattag

SEQ ID NO: 191491 - DNA, 537 bp, synthetic construct
  misc_feature 1..537: note = Description of Artificial Sequence: Synthetic coding sequence
  source 1..537: mol_type = other DNA
atgccccggctgcacgaccacttctggagctgcagctgcgcccactctgctagacgacgcggaccgcctagggcttctgccaaacttgactttgccaataacgttcagctttccttgaccctcgccgccctgagcctgggattgtggtggacattcgaccggtcacggtcaggcctggggctggggatcacaatcgcctttcttgcaacactcatcacccagttcctggtgtacaatggggtctatcaatatactagccccgacttcctctacatccggagctggctgccatgtatattcttcagcggaggagtcacagtgggaaatatcgggagacagttggccatgctgatccctttttgcgaagagctgaatctgaagactacttggctgtttcacaagactcgttccaactatagggtgttccttaagtcaccaatcgtaattgagagctcgaagccaccaatcctgagggcacgtaagatcctcgaggaaaacctcacagtggactacgacaaagattatttattttcatag

SEQ ID NO: 191492 - DNA, 372 bp, synthetic construct
  misc_feature 1..372: note = Description of Artificial Sequence: Synthetic coding sequence
  source 1..372: mol_type = other DNA
atgccccggctgcacgaccacttctggagctgcagctgcgcccactctgccagaaggcgcggcccacctagagccagtgctgcaggtcttgcggctaaagtgggcgagatgatcaacgtgtcggtttctggtccctctctgctcgccgcccatggggctccagatgccgatccagcaccgcgcggcagatccgctgccatgagtggcccggagcccgggagcccatacccgaacacctggcatcacaggcttctgcagcgctccctggtgttgttttctgtcggcgttgttctagcgctcgtgcttaatcttctccagattcagagaaatgtgaccctcttcccagaggaggtaattgccaccattttttag

SEQ ID NO: 191493 - DNA, 495 bp, synthetic construct
  misc_feature 1..495: note = Description of Artificial Sequence: Synthetic coding sequence
  source 1..495: mol_type = other DNA
atgccccggctgcacgaccacttctggagctgcagctgcgcccactctgctaggcggcggggcccacctagggcctccgccgcggggttggctgctaaagtgggcgagatgatcaacgttagtgtgagtggtcccagcctgctggcagctcacggcgcgccagatgctgacccagctcctcggggccggtccgcggccatgtccggtcctgaaccgggttccccttacccaaatacatggcaccatagactgctgcagcggagtctggtgctgttttccgtcggagtggtactcgcactggtactcaacctgttgcaaatccaacggaacgtgacactcttccctgaagaagtaattgccactatcttttccagcgcatggtgggtgcccccgtgctgtggaacagcagccggcatccacccgcagatttccagtatcttcgttctcgggagcttggtctatttctcacaagaggcctcccggtggggcacctag

SEQ ID NO: 191494 - DNA, 678 bp, synthetic construct
  misc_feature 1..678: note = Description of Artificial Sequence: Synthetic coding sequence
  source 1..678: mol_type = other DNA
atggccgagggcgagaccgagagccccggccccaagaagtgcggcccctatatctcctccgtcacttcccagagcgtgaatctcatgatccggggagtagttctgttcttcataggggtgtttctcgccctcgtgctgaatcttttgcagattcagcgaaacgtgactctgttccctccagacgtgatagcctcaattttctcttccgcttggtgggtgccaccatgctgcggtaccgcgtcagccgtcatcggactgctgtacccatgcattgaccgacatcttggcgaacctcacaagtttaaacgagaatggtcctctgtgatgagatgcgttgcggtgttcgtcgggatcaaccatgcctctgcaaaggtggatttcgataacaatattcagctctcactgacattggcggccctgtctatcggactttggtggactttcgatcggtcccgcagcggtttcggtctgggagtgggtatagcattccttgccacggtggttacccagcttctcgtgtacaatggtgtttaccagtatacgtcccctgacttcctctatgtgcgaagttggctgccctgtattttttttgcggggggtatcaccatgggtaatatcggacgccagctggcaatgtatgaatgcaaagttatcgccgagaagagtcatcaagaatag

SEQ ID NO: 191495 - DNA, 4149 bp, synthetic construct
  misc_feature 1..4149: note = Description of Artificial Sequence: Synthetic coding sequence
  source 1..4149: mol_type = other DNA
atggccaccggcggccggcggggcgccgccgccgcccccctgctggtagccgtcgccgcattactgctgggagcagcagggcatttatatcctggagaggtctgtcctggaatggacatccggaacaacctgactcgtctgcatgagttggagaattgtagcgtgatcgaaggccatctgcagattctgctgatgttcaaaacccggcctgaagacttccgcgatctcagttttccaaagctgatcatgataaccgactatctactcttgtttcgcgtgtatggtctcgagagccttaaggatctttttcctaaccttacagtgatcaggggctctcgcttgtttttcaattacgccctggtgatcttcgaaatggtgcacctgaaggagctgggtctctacaatctcatgaatataactcgaggaagcgtgcgtatcgagaaaaacaatgaactgtgctacctggcaacaattgattggtctaggattttagacagcgtggaggataattatatagttttgaacaaggacgacaatgaggagtgtggagacatctgccctggcactgctaaaggcaagacaaattgtccggcaacagttattaacggacaatttgtggaacggtgctggacgcattcacactgtcagaaggtttgtcccaccatttgtaaaagccacggctgtaccgctgaaggcttgtgttgtcacagcgagtgcctgggaaattgctctcaaccagacgacccaacaaaatgtgtggcatgtagaaatttctaccttgatggacggtgcgttgaaacatgcccaccgccttattatcatttccaggactggaggtgtgtgaatttttcgttctgtcaggacctccaccacaagtgcaagaactcacgcaggcagggatgccaccagtatgttattcacaacaataagtgtatccccgaatgcccttccggctatacaatgaatagttctaatctgttatgcaccccttgtctgggaccctgccccaaagtttgtcacctgctggagggcgaaaaaaccattgatagtgtcacttctgcacaggaactccgggggtgtacggtcatcaatggcagccttatcatcaatatccgaggaggtaataaccttgcagcagagcttgaggccaacctcggcttgatagaagaaattagcggatacctgaaaattcggaggagctacgccttggtctccctgtcttttttccggaaattgcgattgatcagaggggaaactctcgaaatcggcaattactccttctacgccttagacaatcaaaacttgagacaactatgggattggtccaagcacaacctgacaatcacccagggtaaattgttctttcactacaatccaaagttgtgtctctctgagatccataaaatggaagaggtttcgggtacaaagggtagacaggaaaggaacgatatcgctctgaagacaaacggcgaccaggcaagctgtgagaacgagctcctgaagttcagctatattcgcaccagcttcgataaaattttattgaggtgggaaccttactggcctcctgacttccgggatctgctgggattcatgctgttttataaagaggctccctatcagaacgtcaccgaattcgacggtcaggacgcctgcggttcgaactcatggacggttgtggacatagatccccccctccggtctaacgatcctaaatctcagaatcaccctggctggctgatgcggggtttaaaaccttggacgcagtacgctatattcgtgaaaactttagttacgttttccgacgagcgtagaacttatggcgctaaatccgatataatttatgtacagactgatgctactaacccatctgtgcctcttgacccgataagcgtatctaactcatcctctcagatcatcctcaaatggaagccaccctcagatcccaacggcaatataacacattacctggtcttttgggaacgccaggctgaggactctgaattatttgaactcgactactgtctgaaggggctgaaactgcccagtcgcacttggagcccgccttttgagtccgaagactctcagaaacacaaccaatccgagtacgaggatagcgccggcgagtgctgttcctgtccaaagaccgacagccagatactgaaggagctcgaagaatctagcttccgcaaaacatttgaagattatcttcataatgttgtgtttgtcccgaggaaaacctcatcaggtacaggtgcagaagacccaagaccctctaggaagcgacggtcattgggggatgtgggcaatgttacggtagccgtccctactgtcgccgcatttcccaatacttctagcacttctgtgccgacttcgccggaggaacatcgcccctttgagaaggtcgtgaataaagagagccttgttatctcaggtcttaggcacttcaccggatacagaattgagctgcaagcttgtaaccaggatacacccgaggagaggtgtagcgtggccgcctacgtgagcgctaggacaatgcccgaagccaaagcagatgatatagtaggcccagtaacacatgagatcttcgagaacaatgttgttcatctcatgtggcaggagccgaaagaacctaacggcctcatcgtgctgtatgaggtgtcgtatcggcgatacggagacgaggagttgcacctgtgtgtgagccgcaagcactttgccctcgaaagaggctgtcggctgcgaggtttgtcacctggaaattatagcgtcaggatccgagctacgtccctcgctggtaatggctcctggacagaacctacatacttctatgttaccgactatctggacgttcccagcaacatcgccaaaatcattatcgggccactgatcttcgtattcctgtttagcgtcgtcatcggcagtatctatttatttctgcgcaagagacagccggacggacctctggggcctctatatgccagctccaatcccgaataccttagtgcatccgatgtatttccttgttctgtgtatgtgccagacgagtgggaagtctcacgcgagaagatcactctactacgagaacttggccaggggtctttcggcatggtgtatgagggaaacgcgcgcgacatcatcaagggagaggcagaaacgcgagttgcagtcaaaacagtaaacgaaagtgcctctttacgcgagaggattgagttcctcaatgaggcctccgtcatgaagggtttcacctgccatcatgtcgtacggttattgggagtggtatctaaaggtcagcccacactcgtggttatggagctgatggcgcatggcgatcttaaatcttacctgagatctctgagacctgaagccgagaataacccgggtcgccctcctcctacgctccaggaaatgatccaaatggcagcagaaattgctgatggcatggcctacttgaacgcaaagaagttcgttcaccgggatttagcagcaagaaactgcatggtcgcccacgacttcacggtgaagatcggagattttggcatgacacgcgatatatatgagaccgattattaccgcaaaggtggaaaaggactgctgccagtgcgttggatggcaccagagagtttgaaagatggcgtctttacaacgagctctgacatgtggtccttcggcgtcgtgctgtgggagatcacaagcctggcagagcagccataccaaggtctatccaatgagcaggtgcttaagtttgttatggatggcggatacctggatcaacctgataattgccccgagagagtcacggatctgatgcgtatgtgctggcagtttaatcctaagatgcgcccgacattcctcgagattgtgaacctgctgaaagatgatctgcatccgagcttcccagaggtcagcttttttcattcggaggaaaacaaggcccctgaatccgaggaattagaaatggagttcgaggatatggaaaacgtgccacttgatagatctagccattgccaacgtgaggaagccggggggcgtgatggaggcagcagcttgggcttcaaacgcagctatgaggagcacatcccttacacccacatgaatgggggcaagaaaaatggaaggatcttgaccctgccaaggagcaacccaagttag

SEQ ID NO: 191496 - DNA, 4113 bp, synthetic construct
  misc_feature 1..4113: note = Description of Artificial Sequence: Synthetic coding sequence
  source 1..4113: mol_type = other DNA
atggccaccggcggccggcggggcgccgccgccgcccccctgctggtggccgtggcagccctgctactcggcgcagccggacacctttatcctggggaggtctgtccagggatggatatacggaacaaccttacacgtctccatgagctggagaactgctccgtcatcgaagggcacctccagatcctgctgatgtttaagactcgccccgaagattttcgcgacctgagcttcccaaaattaataatgattaccgactatctgctcctcttccgggtgtatggcctggagagtttaaaagacctatttccaaacctgacagttattcgggggagcagactgttttttaattacgctctggtcatcttcgagatggtccatttaaaagagcttgggctctacaatcttatgaacatcactcggggtagcgtgcgtattgaaaagaataacgagctttgttatctggctaccattgattggtcaagaattctggatagcgttgaagacaattacatcgttctgaataaagacgacaacgaggaatgcggagatatttgtcccggaacggccaaggggaaaaccaattgtccagccactgtcatcaatggccaattcgttgagagatgttggacccattcacattgtcagaaagtgtgtcctactatttgtaaatcacacggctgcacagccgagggtctctgttgccattccgaatgtctcggaaattgctcgcagcctgacgatccaacgaagtgtgtcgcttgtagaaacttttacctcgatggacggtgtgtcgaaacttgcccccccccatattatcacttccaggactggcggtgtgtgaatttttccttttgccaggatcttcaccataaatgtaaaaatagcaggcgtcaggggtgccatcagtatgtaatccacaataataagtgtataccagaatgccccagtgggtacactatgaactctagtaacctgctatgcactccctgtttgggtccttgcccgaaggtctgccacctgttggagggggagaagacaatcgacagtgtgactagcgcccaagaattgcgtgggtgtaccgtcatcaacggctccctaattattaatatccgagggggcaataacttggctgccgagcttgaggctaacctgggtctgatcgaagaaattagtgggtatctgaagataagaaggagttatgcgctggtcagccttagtttctttaggaaactcaggttgattaggggagagacacttgagatcgggaattactcgttttatgccctggataatcagaacctgcgccagctgtgggactggtcaaaacacaatttaacgattacccagggaaagttgttcttccactataacccaaaactctgtctgtctgagatccacaagatggaagaggtgtcgggcacgaaaggacgacaggagaggaacgatatagcgctaaaaaccaatggagatcaagcttcctgcgaaaatgagctgctgaagttttcctacattcggacttcttttgacaaaatcctattacggtgggagccttattggccccccgatttccgggacctgttgggcttcatgctgttttataaggaagccccttatcagaatgtaacagaatttgacgggcaggatgcctgcggttctaacagttggactgtcgtcgatatcgatcccccccttcgctcaaatgaccctaagtcacaaaatcatccagggtggctgatgaggggcctgaagccttggacccaatatgccatctttgtgaaaactctcgtgactttctccgacgagagaaggacatacggcgccaagagtgacattatttatgtgcaaaccgatgccaccaatcctagtgtgcccctcgatccaatttctgtcagcaatagttcttcgcagatcatcctgaagtggaagcccccgagcgatcccaatggcaacatcacccactacctggtattttgggagcgccaggctgaagactctgagctctttgagctcgactattgtctgaagggcctaaagttgccctcaagaacctggagtccccccttcgagtctgaggattcccagaaacacaaccagtctgagtatgaggacagtgccggtgaatgctgctcatgcccaaaaaccgattctcagatcctgaaggaactggaagagtctagttttcgaaaaactttcgaggattacctgcataacgtagtgtttgtgcctcgaccctctagaaagaggcgctctctaggagacgtgggtaacgtgacggttgccgtgccaacagtagccgcctttcctaatacatcatcaacgagcgtgcctactagccctgaggagcaccgccccttcgagaaggtagtgaataaagagtccctggtgatctctggtcttcgacactttacgggatatagaattgagctgcaggcatgcaatcaggataccccggaggagagatgtagtgtggctgcctacgtgtccgcccgcactatgcccgaagcaaaggccgacgatattgtcggccccgtgacacacgagatttttgaaaataatgtagtgcatctgatgtggcaagaacctaaagagccaaatggactgattgtcttatacgaggtatcctatcgtcggtatggggacgaggagctgcacctgtgcgtgagtagaaaacacttcgcacttgaaaggggatgtagacttcgagggctcagtccgggaaactattcagtgaggattagagctacttcacttgctggcaacggctcctggaccgagccaacctacttttatgtgacggactatctggacgtgccgagcaatatcgcaaaaataataattggacctcttattttcgtgtttctgttcagtgtggtgatcggaagcatctatctatttctcagaaagcgccagcccgacggccctctcggccccttatacgcatctagcaacccagagtacttatctgcctccgatgtcttcccctgcagtgtttatgttcctgatgagtgggaggtatcacgtgagaaaataacactgctgagagagcttggtcagggtagcttcgggatggtctacgagggaaatgcccgcgatataatcaaaggagaggccgagacgagagttgctgtgaagaccgtgaatgaatctgccagcctacgggagagaattgaattcttgaatgaggcaagcgtgatgaagggtttcacttgccaccacgttgtacgcctgttgggtgtggtcagcaaagggcaacctactctggtagtgatggagctgatggcccatggggacttgaagagctacttgcgaagcttgagacctgaggctgaaaataacccgggacgtcctccccctacacttcaggagatgatccagatggccgcagaaatcgcagacggtatggcatacctcaacgcaaagaagtttgttcacagagacctagccgcccggaactgcatggtggctcacgattttacagtgaagattggtgattttggcatgacaagggacatatatgagacggactactaccgcaaaggaggaaagggattactccctgttaggtggatggcgcccgagtcattaaaggatggggtcttcacgaccagctccgacatgtggtcgtttggtgtggtgctgtgggagattacaagccttgccgaacaaccttaccagggcctgtctaatgagcaggtgttgaagttcgtcatggacggaggatacctggaccagcccgataattgtcccgaaagggttacagatctaatgcgcatgtgctggcagtttaatcctaagatgagaccaactttcctcgagattgtgaacctcctgaaagatgacttgcatccctcctttccggaagtaagcttttttcatagtgaggaaaacaaggccccggagagcgaggagcttgagatggagttcgaggacatggaaaacgtgcctctggaccgttcctctcactgtcagcgggaagaggcaggtggcagggacggcgggtcatccctgggctttaaaaggagctatgaggagcatattccttacacccatatgaacggaggcaaaaaaaatggccgaattttgactctgcccagatccaatcctagttag

SEQ ID NO: 191497 - DNA, 252 bp, synthetic construct
  misc_feature 1..252: note = Description of Artificial Sequence: Synthetic coding sequence
  source 1..252: mol_type = other DNA
ccctaccagaacgtgaccgagttcgacggccaggacgcctgcggctctaattcctggacggttgtggacatcgacccgcctctgaggagcaacgaccccaagtctcaaaaccatcccggctggttaatgagagggctcaagccttggactcagtacgcaatatttgtcaagacactggtaacatttagcgatgaacggcggacctatggagcgaagtcggacataatctatgtccagaccgacgcaacatag

SEQ ID NO: 191498 - DNA, 4017 bp, synthetic construct
  misc_feature 1..4017: note = Description of Artificial Sequence: Synthetic coding sequence
  source 1..4017: mol_type = other DNA
atggccagccccccccggcacggcccccccggccccgccagcggcgacggtcccaatctcaataacaataacaacaacaacaaccattcggtgcgcaaatgtggctatcttcggaagcaaaagcacggacacaaaaggttcttcgttcttagaggcccaggggccggtggtgatgaagcaaccgctgggggggggtctgcccctcagcccccccgcctcgaatactatgagagcgaaaagaaatggcgatcaaaagccggtgcccctaagcgcgtgatcgctttggactgttgtctgaacattaataagagagccgatgccaagcacaaatacctgatcgccctgtacacgaaggatgagtactttgcagtagccgctgagaatgaacaggaacaagaaggctggtatagagcactgactgatttggtttccgagggtcgcgccgcggcaggggacgccccgccggcagccgccccagccgcctcttgcagcgccagtctgccaggcgcattgggtggctcggcaggagctgcaggcgccgaggattcctacggtctcgtggcacccgcgactgcggcctacagggaagtgtggcaggtcaatctcaagccaaaggggctggggcagtccaagaacctgacaggtgtgtatcgtctttgcctgagtgcccgaaccatagggtttgtcaagctcaattgcgagcagccttctgtgactctgcaactgatgaatatccggcgttgtggacacagtgattcattcttcttcattgaggttggccgctctgcagtgacgggaccaggtgagttgtggatgcaggctgatgatagcgttgtggcgcagaatatacacgaaacgatccttgaagctatgaaggccctcaaggaactgttcgagttcaggcccagatctaagagtcagtcttctggatcatccgctactcatccaatttcagtgccgggcgctaggagacaccatcatttggtgaaccttcccccatcacaaactggcctggtgaggaggagccggaccgactcactggctgcgaccccccccgccgccaagtgttccagttgcagagtgcgaaccgccagcgaaggtgatggaggcgccgcggctggggctgctgctgctggggcaagacctgttagcgtagccggcagccctctgtctccgggtcccgtccgggcgcctttgagcaggtctcatactctgagcggcggctgtggcggacgcggatcaaaagtggccctcctgcccgctggcggtgctctgcagcactctaggtccatgagtatgcccgtggcccattcccctcccgctgccaccagtccgggtagcttaagcagttcctctggtcacgggtcaggtagttatccaccacctccgggcccacatccgccactgccccaccctttgcaccatgggccagggcagcgccctagctcgggatctgccagcgcctccggatccccctctgatcccggttttatgtcgcttgatgagtatgggagctcaccgggagacctgcgtgcattctgcagtcatcgaagtaatactcctgaatccatagcagaaacacctcccgcaagggatggtggggggggaggcgagttctatgggtacatgacaatggatcgcccattatcccactgtggcagaagttaccggagagtgtcaggggatgcagcacaggacctagatcggggcttgcgaaagcggacatattcattgactacccccgctcgtcagaggcccgtgccacagccatcaagtgcgtccttggatgagtatacattaatgcgggcaactttttctggcagtgccggcagattgtgccccagctgtcccgccagcagccccaaggtagcttaccacccttatccggaagattacggggatatagagatcggctcgcaccggtcttcttcctcgaatctgggagccgacgacggttatatgccgatgaccccgggcgccgcccttgccggttccggatcgggaagctgtcgctccgacgattacatgccaatgagtccagcttctgtctccgccccaaaacagattctgcaacccagggccgccgcagcagccgcagccgccgtaccgtcagccggaccagctggaccagcccccacatcagccgctgggaggacctttcctgctagcggggggggatacaaggcttcttcccctgccgagagttccccagaagatagcggttacatgaggatgtggtgcggaagtaaactgtcaatggagcacgccgacggtaagcttttgccgaatggcgattacctaaatgtcagtccgtccgacgccgtgaccacgggcacaccccctgattttttctcagcagccctccatcccggcggcgagcccttaaggggagtgcctgggtgttgctattctagcctgccacgatcgtacaaagctccatacacttgcgggggggactccgaccagtacgtcttgatgagctccccggtgggtaggatcctggaggaagagaggctcgaaccacaggccactcccgggccttcacaggcggcgtcagcctttggcgccggcccgactcagcccccgcatccagttgtgccctccccagtgcggccgtctgggggacgacccgagggttttcttgggcagagaggacgggctgtgagaccaacacgcttgagtctagaggggctgccttctttgccttctatgcacgagtacccactgccccccgagccaaaatctcccggcgaatacatcaacattgactttggggaacctggagcccgactctctcctcctgctcctccactcctcgcaagtgcggctagttcaagttctctgttatctgctagctccccagccagctctctcgggagcgggacaccaggcacgtctagtgactccaggcagaggtcccctttgagcgattatatgaatctggatttcagctcgcccaagtcacccaaacccggcgctccttcgggtcatccagtcgggagcctggacggcctgctttccccagaagcttcatctccttatccccccttgcctcctcgcccttctgccagcccctcatccagcctgcagccaccaccccctcctccggctccgggtgagctgtacagactgccccctgcaagcgctgtggctactgcccaaggaccaggcgccgcgtcaagtttaagttctgacaccggcgataatggggactatactgaaatggccttcggagtcgctgctacaccgccgcagcctattgcggcccctccgaagcccgaagccgccagggtggcctcacccacatcgggcgttaaaaggctgagtctgatggaacaggtgagtggcgtggaggccttcctccaagcctcccagcctccggatcctcaccggggcgcaaaagtgattagagccgatccccagggcggacggaggcgccactcctcggaaaccttttcttccacaaccacagtgactcccgtctcacctagcttcgcccacaacccaaagagacataatagcgcctcagtggaaaatgtgagtctgaggaagtcaagtgaggggggggtgggtgtgggtcccggcggcggcgacgaaccacccacatcccctcgccaattgcaaccggctccccccttagcaccccaaggcagaccatggactccaggacagcctggcgggctcgtaggatgtccaggctctggaggttccccaatgcggagagagacgtccgcgggctttcagaatgggctcaactatatcgctatcgacgtgcgtgaggaaccaggcctgcctccacagcctcagcctccccctccccctctgccacagcctggtgacaaaagttcttggggcagaactagatctttggggggactgatctcggccgtgggcgtgggaagcactgggggcgggtgtggcggtcccggaccaggcgcactcccccctgcgaatacctacgcttcaattgactttctctcacaccacctgaaagaggcaaccattgtcaaagagtag

SEQ ID NO: 191499 - DNA, 3894 bp, synthetic construct
  misc_feature 1..3894: note = Description of Artificial Sequence: Synthetic coding sequence
  source 1..3894: mol_type = other DNA
atggccgtgcccagcctgtggccctggggcgcctgcctgcccgtgatcttcctctctcttgggttcggcttggatacagttgaggtttgtccctccctggatattagatccgaggtggccgaactgcggcaactggaaaattgctccgtggtcgaaggccacctgcaaatattgctgatgttcacagccacaggtgaggactttcgtggattgagtttcccgcgtctgacacaagtgactgactatctgctgctgttccgcgtgtatggactggaatctctgcgggatttgttccctaatctcgctgtgattaggggaacacgactgttcctagggtacgctttagttatctttgagatgccacacctgcgtgatgtggctcttcctgctctgggggccgttttacgcggcgcagtcagagtggagaaaaatcaagaattgtgccacctgagcaccatagattggggcctgttgcagccagctccaggggcaaatcatatcgttgggaacaagctcggcgaggagtgcgctgatgtctgtccaggtgtgcttggagcagctggggaaccttgcgctaagaccacattttccggacatactgattatagatgttggacgtctagccactgccagcgcgtttgcccctgcccacacggaatggcttgtactgctaggggagagtgttgccatactgagtgccttgggggttgcagtcagcccgaggatccccgggcatgcgtagcctgccgacacctctactttcagggcgcctgtctgtgggcttgcccccctggtacctatcaatatgagtcatggagatgtgtgactgcagagagatgtgcgagtcttcattctgtgccaggccgcgcttcaacatttgggattcaccagggatcatgcctggcacagtgcccgtctggatttacacgtaactcctcttcaattttctgtcataagtgtgagggcctctgtccaaaagagtgcaaagtcggcacaaagaccattgatagcatacaagctgctcaggatctcgttgggtgcacgcacgtggaaggttcattaattctgaatctgcgtcaaggctacaatcttgagcctcaactgcagcacagtctgggtctcgtggagaccattaccggtttcttgaagatcaaacattcgttcgctctggtctcgctgggctttttcaagaatctgaagctgatccgcggagacgccatggttgacggaaactatacactgtatgtactcgacaaccagaaccttcagcagctgggttcatgggtagcggccggcttgactattcccgtgggaaagatctactttgcttttaaccccagactgtgcctggagcacatctaccgcttggaggaggtcaccggcacccgaggcaggcaaaataaagctgagatcaatccccgcaccaatggggatagagccgcgtgccagactcgcaccttgcggtttgtcagcaacgtgacagaagctgatcgcattctgttgcgatgggaaagatacgaaccgctggaggccagagacctcctgagtttcattgtgtactacaaagagagtccctttcagaacgcaacagaacacgtcggtcctgatgcctgcggcacgcaaagctggaacctgttagatgtggagttgcctttgagcagaacgcaagagcccggggtaactctggcctcactgaagccatggactcagtacgcggtcttcgtccgcgcaatcaccctcactactgaagaagattccccacatcagggcgcccagtcacccatcgtctacttgcgtaccctcccagctgctccaactgtaccacaggatgtcatttcaacctctaattcttcttctcatctgctagtccgctggaaaccccctacccagagaaatgggaatctgacctactacctcgtgctttggcaaagactagccgaggacggggacttgtacctgaatgattattgccatcggggattaagactgccgacatcaaacaatgacccacggtttgacggggaagacggagacccagaagcagagatggagtctgattgttgtccctgtcagcatccgccccctggtcaggtactcccgcccctggaggcccaggaagcatcattccagaagaagtttgagaatttcctacataatgccattacaatcccgatcagtccttggaaagtgacatctatcaataagagccctcagcgggacagcggccgacatcgtagagcggccggccccctgcgacttgggggcaattcatctgactttgaaatccaggaagataaggtgcctagggaacgggccgtgctctctggcttgcggcacttcacagagtaccgaatcgacattcatgcgtgtaaccacgcagctcacactgtagggtgctctgccgccacttttgttttcgccaggacaatgcctcatagggaagccgacggaatccctggcaaagtggcatgggaggcctcttccaagaactcagttcttctcaggtggctggagcccccggatccgaatgggctgatcctcaagtacgagataaagtaccggcggttaggagaggaagccacagtgctgtgcgttagcaggttaaggtatgccaaatttggtggtgtgcacttggcactcttgcctcccggcaactactctgctagggtccgggctacttctctagctgggaacggaagctggacagatagcgtagcattctatatactcgggccagaagaggaggacgctggaggactccatgtgttgctgacagccactcccgttggattaaccctattaatagtgctcgcggctctagggttcttctatggcaagaaacggaatcgcactttatacgcttcagtcaaccccgagtacttctctgcatccgacatgtacgtgccggacgagtgggaggtgccacgggagcaaatctctatcattcgcgagctgggccagggatccttcgggatggtttacgagggtctggcgcgggggctcgaggccggagaggaatccactcccgtggctttgaaaacggtgaatgaactggctagcccccgcgagtgcatagaattcctaaaggaagctagcgtcatgaaagcttttaaatgccaccacgtcgttagactgctgggtgttgtttcccagggccaaccgaccctggttataatggagctgatgacgagaggtgaccttaagagccacctgcggtcactgaggcccgaagccgagaacaaccctgggttacctcagccggcgcttggcgaaatgatccagatggctggagagatagccgatggcatggcttacctggcggccaacaagttcgtccatagggatctggcagcacgaaattgtatggtgtcacaggattttacagtgaagataggcgacttcgggatgacgcgggatgtctacgaaaccgactactacaggaagggcggcaaggggttactgccggtgaggtggatggcgccagaaagcctcaaggacggcatctttacaacccatagtgatgtatggtcatttggggttgtactctgggagatcgttaccttggcagaacagccatatcaaggcttgtcaaatgagcaggtgttgaagtttgtaatggacggaggcgtgctggaagaactagagggttgtccgctacagcttcaggagttaatgtcaaggtgttggcaaccaaacccaagattgagaccgtcatttacgcacattttggattccattcaagaagagctacgcccatcattccgcctcttgtcattttattatagccccgaatgcaggggggcgaggggttcgcttcccaccacggacgcggaacctgattcgagccctacaccgcgcgactgtagtccgcagaatggcggacctggacattag

SEQ ID NO: 191500 - DNA, 3060 bp, synthetic construct
  misc_feature 1..3060: note = Description of Artificial Sequence: Synthetic coding sequence
  source 1..3060: mol_type = other DNA
atgcggtaccggctggcctggctgctgcaccccgccctgcccagcaccttcagaagtgtgctcggcgctcggctccccccccccgaaaggctatgcggatttcagaaaaagacctattccaagatgaataaccctgcaatcaagaggatcggaaatcacatcactaaatcacctgaggacaagcgtgaataccggggcttggaacttgcaaacggaattaaagtcctgcttatctctgaccctacgacagataagtccagtgcagcgttagatgtgcatattggcagtttgtccgacccccccaacattgctgggctctctcacttttgtgagcatatgctgttccttggaacaaagaagtatccgaaggagaacgaatactcccagttcctttcagaacacgcaggaagcagcaatgccttcacctctggtgagcatacaaactattacttcgatgtgtctcatgaacacttggaaggagcacttgatcgctttgctcagttcttcttgtgcccactgtttgacgagagttgcaaggacagagaggtgaatgcagtggatagtgaacatgaaaagaatgtcatgaatgatgcctggagactgttccagctcgagaaagccaccgggaacccaaagcacccattctcaaaatttggcacagggaacaagtatacgctggaaacccgacccaatcaggaagggatcgatgtgagacaggagctgctgaaattccacagtgcttactactcctctaaccttatggctgtgtgcgttctgggtagagaaagcctggacgacttgacaaacctcgttgtgaagcttttttccgaagtggagaacaagaatgtaccactccccgagttcccagagcacccttttcaggaagaacacttaaaacagctctataagatagtccccatcaaagacatccgcaacctgtatgtgactttccctataccagacctgcagaagtactataaaagtaatccagggcattacctgggccatctaatcggacatgagggccctgggagccttctgtctgagctgaagtcgaaaggttgggtaaacacgctcgtgggtggccaaaaagaaggtgcccgtgggttcatgttttttatcataaatgtggacctgactgaagagggcctgctgcacgtcgaagatatcatactacatatgttccaatacatccagaaacttcgcgccgaagggccacaggagtgggtgttccaggaatgtaaggatctgaacgcggtagcatttcggtttaaggacaaggaacgccctcgtggatacacgagcaagatagccgggatcctgcactattatcccctcgaggaagttctaaccgccgaatatctgcttgaagagtttcggccagacctgattgagatggttttggacaaacttaggcctgaaaatgtgcgcgtcgctattgtgtccaaaagctttgaaggcaagactgatagaaccgaggagtggtatggcacccaatacaagcaagaggcaatccccgatgaagtaatcaaaaagtggcagaatgcagatcttaacggaaagtttaagttgcctacgaagaacgagtttattccaacgaacttcgagattcttccactggagaaagaggctactccataccccgccctcattaaagatacagccatgtcaaagttatggtttaaacaggatgacaagttcttccttcccaaggcatgtcttaatttcgagttctttagtcctttcgcttatgtcgatcctctgcactgcaatatggcctacctttatttggaattgcttaaggatagcctcaacgagtacgcgtatgcagcagaactggcaggcttgagttatgatctgcagaatactatttacggcatgtacctctctgtgaagggatataatgataagcagccaatccttctgaaaaaaataatagaaaagatggccacctttgaaattgacgaaaaacgttttgaaataatcaaggaggcttatatgagatcactcaacaattttagagcagaacagcctcaccaacacgccatgtattacttgcggctccttatgaccgaggtcgcgtggaccaaggacgaactgaaagaagccctggatgacgtcaccctcccaagattgaaggcgttcattccacagctgctcagcagactacacattgaagctcttctgcacggaaatatcaccaagcaggctgcccttgggatcatgcagatggtggaggacacgttgatcgagcacgcccacacaaaaccactactgccttcccaattggtgcggtacagagaagtgcagctccccgatcgtgggtggtttgtgtaccagcagaggaacgaggtccataataattgcgggattgaaatttactaccagacagatatgcaatccaccagcgagaacatgttcttagaactcttctgtcagatcatttctgaaccatgctttaatactctgcgcaccaaagagcaactcgggtacatagtgtttagcggccctcggcgcgccaacggcattcagggcctcaggtttatcatccagtcagaaaagccaccacactatctcgagagtcgggtcgaggcattcctcattacaatggagaagtcgatcgaggacatgaccgaggaggctttccaaaaacatatccaagctctagcaatccggcgtctcgacaagcccaagaagctttcagctgaatgcgccaagtattggggtgaaattatttcacagcagtataattttgatcgggacaacacggaggtcgcatacttaaagaccctgacaaaggaggatattataaaattctacaaagagatgcttgccgtcgatgccccccggaggcataaagtatccgtacatgtgctggcacgggaaatggacagttgtcccgtggtgggggagtttccttgccaaaacgatatcaatctgtcccaggcccctgctcttccacagcccgaagtaattcaaaatatgaccgagtttaaacggggtctgcctctatttccccttgtgaaaccacacatcaacttcatggccgcaaaactgtag

SEQ ID NO: 191501 - DNA, 1395 bp, synthetic construct
  misc_feature 1..1395: note = Description of Artificial Sequence: Synthetic coding sequence
  source 1..1395: mol_type = other DNA
atgagcaagctgtggttcaagcaggacgacaagttcttcctgcccaaagcttgccttaactttgagttttttagcccatttgcttacgtcgacccattacactgcaatatggcctacctgtaccttgagctcctgaaggacagcctgaatgagtacgcttatgctgcggaactggccggattatcatatgatctgcagaacaccatctacggcatgtatttgtccgtcaaaggctataatgataagcaacccatcctgctcaaaaaaatcattgagaaaatggcaacctttgaaattgatgaaaaaaggtttgaaatcatcaaagaagcctacatgcgatccctgaataacttccgtgctgagcagccccaccagcatgccatgtactatctgcgcctgctgatgactgaggtggcatggaccaaagatgaacttaaagaggccctcgacgacgtgacacttccaaggctcaaggcttttatcccccagcttctatctcgactccatatcgaagccctgcttcatggcaacatcaccaagcaggcagcattgggcattatgcaaatggtggaagataccttaatcgaacatgcccacacaaaacccctgttgccaagccaattagtgcggtatagggaagtgcagctccccgaccgcggctggtttgtataccagcaacgtaacgaggtccacaacaactgtgggatcgagatctattatcagactgacatgcagagtacttccgaaaacatgtttctggagctgttctgccagatcattagcgagccgtgtttcaacacactgcgtacaaaagagcagctcggttacatcgtatttagtggaccaaggcgcgcgaatggcattcaggggcttcggtttataattcagtcagaaaaacctccccactatctcgaatcaagagtcgaagcgttcctgattacaatggagaagtcaatcgaagatatgacggaggaagcttttcagaagcatattcaggccctcgcaatccggcggcttgataagccgaagaagctgagcgccgagtgtgctaaatactggggcgaaataatatcacagcagtacaatttcgaccgggataacacagaggtcgcttacctcaagacactcaccaaggaagacataataaaattttataaagaaatgctggcagttgacgctccccgtaggcacaaggtctccgtccacgtgctggctcgggagatggattcatgtccagtggtcggcgagttcccatgccaaaacgacatcaacctgtcacaggccccagctctgccacaacctgaggtgatccagaacatgaccgaatttaaaaggggactgccactctttcctcttgttaaaccgcatatcaatttcatggccgcaaaactgtag

SEQ ID NO: 191502 - DNA, 774 bp, synthetic construct
  misc_feature 1..774: note = Description of Artificial Sequence: Synthetic coding sequence
  source 1..774: mol_type = other DNA
gagttcatcatccggggcggccgggtgcccagccactgcctgcacttttcaagatcttttcagaaaaaaacctacagtaaaatgaacaacccagccatcaagaggatcgggaatcatattacaaagtcgcccgaagataagcgcgagtataggggacttgaactggctaacggcatcaaggtcttgttgatttcagatcccaccaccgataagagcagcgctgcactggatgtgcatatcggcagcttgagcgatccccccaatatagctggtttgtcccatttttgtgaacacatgctattccttggcaccaagaaatatcccaaagaaaacgagtattcgcagtttctcagcgagcacgctggctcatcaaatgcgttcacttccggggagcacacaaattactactttgatgtgagtcacgaacacctggagggagccctggaccgcttcgcccagtttttcctgtgccccttattcgacgagtcttgtaaagatcgcgaggtcaatgcagtcgacagcgaacacgaaaagaatgttatgaatgatgcgtggaggctttttcaattggaaaaggccaccggaaatccaaagcacccgtttagtaaattcgggactggaaataagtataccctggagactaggcccaatcaggaaggaatcgatgttagacaggagctgctcaaatttcattctgcctactactcgtcaaacctcatggcggtatgtgtccttggccgcgagtccctcgacgatctcaccaacctcgtatag

SEQ ID NO: 191503 - DNA, 396 bp, synthetic construct
  misc_feature 1..396: note = Description of Artificial Sequence: Synthetic coding sequence
  source 1..396: mol_type = other DNA
atggacccccggctgcccgcctgggccctggtgctgctgggccccgctctggtctttgctcttggccctgcaccaacacccgagatgcgcgaaaagctgtgtggccaccattttgttagagccctggtgcgggtatgtggcggcccgcgctggtcgacggaagcccgtcggcctgctaccggaggtgacagagaactgctgcagtggttagaacgcagacacttactgcacgggctggtcgcagattccaatttgaccctgggtcccggcctgcagccgctgccacagacttcgcaccaccacagacaccacagggctgcagccactaacccggctcgttattgttgtctgagcggctgtacgcagcaagacttactgactctgtgtccctactag

SEQ ID NO: 191504 - DNA, 474 bp, synthetic construct
  misc_feature 1..474: note = Description of Artificial Sequence: Synthetic coding sequence
  source 1..474: mol_type = other DNA
atggacccccggctgcccgcctgggccctggtgctgctgggccccgcgcttgtgttcgccctggggccagctcccactcccgagatgcgggagaagctgtgcggccatcacttcgttagagccctggttcgggtttgtgggggtccgcgctggtctacagaggctagaagacccgccaccgggggggatcagagggaaagccattcagttagtcaagctggtctgaagctgcttagttcatcaaaccctccaactctgacgtttcagagcgttggcattagtgacgtctcatgctattcaggctggcgggacgacatctgctcaatgggctggtggcccaccgtgatttcgaggtgggacctggcctgctccccttgtccgaggccactaaccatcacggcaaccactgtacaactccctccgactctgcacgccactgctgcttctgtggctgtgccaaacaagacttgctag

SEQ ID NO: 191505 - DNA, 420 bp, synthetic construct
  misc_feature 1..420: note = Description of Artificial Sequence: Synthetic coding sequence
  source 1..420: mol_type = other DNA
atggccagcctgttccggagctacctgcccgccatctggctgctgctatcccagctcctgagagagagcttggcggcagagctcaggggctgtggacctcgctttggcaaacacctgctgtcctactgccctatgccggagaagaccttcacaaccacccccgggggctggcttctcgagagtggaaggcccaaagaaatggtgtctacctctaacaataaggacggacaagccctggggaccacgagtgagttcatcccgaatctttctcccgaactgaagaagcctctctccgaaggacagccttcccttaagaaaattatactgtctaggaaaaagagatccggacgccataggtttgatcctttttgctgcgaggtgatctgtgacgatggaacatcagtgaagttgtgtacctag

SEQ ID NO: 191506 - DNA, 408 bp, synthetic construct
  misc_feature 1..408: note = Description of Artificial Sequence: Synthetic coding sequence
  source 1..408: mol_type = other DNA
atgaagggcagcatcttcaccctgttcctgttcagcgtgctgttcgccatctccgaggtccgatccaaggaatccgtgcgcctgtgcggcctcgaatacatacggactgtgatatacatctgtgcatcaagcaggtggagaaggcaccaggagggcattcctcaagctcagcaggccgaaactggaaatagctttcagttgccccataaaagggagttttcagaggaaaaccccgcacagaacctgcctaaagtcgacgcatctggggaggatcggctctggggcgggcagatgcccaccgaggaactgtggaaaagtaaaaaacactccgtgatgagtaggcaggatctccagactctctgctgcacagacggttgtagcatgaccgacctaagcgccttgtgctag

SEQ ID NO: 191507 - DNA, 642 bp, synthetic construct
  misc_feature 1..642: note = Description of Artificial Sequence: Synthetic coding sequence
  source 1..642: mol_type = other DNA
atgccccggctgctgcggctgagcctgctgtggctgggcctgctgctggtgcgcttcagcagggaactgagcgatatctctagtgctcgcaagctgtgcggaagatatctcgtgaaagagatagagaagttatgcggccatgcaaactggtcacagttccgttttgaggaggagactccattttcacgactcatcgctcaagccagtgagaaggtagaagcctactccccctaccaatttgagagcccgcagaccgcgagtcccgcgcggggacgtgggacaaatcccgtgtccacgagttgggaggaagcagtcaattcatgggaaatgcaatctctcccagaatacaaagacaagaaaggatatagccccctaggtaagacaagagaattcagcagcagtcataatatcaacgtgtacatacacgaaaacgcaaaatttcaaaaaaaacgccggaacaaaatcaagaccctgtcaaatcttttctggggccatcacccccagagaaagcgtaggggttacagtgaaaagtgctgtctcaccggatgtactaaagaggaactgtcgattgcctgtttgccttacattgattttaagaggctgaaggagaagaggtcctctctcgttacgaagatctactag

SEQ ID NO: 191508 - DNA, 1734 bp, synthetic construct
  misc_feature 1..1734: note = Description of Artificial Sequence: Synthetic coding sequence
  source 1..1734: mol_type = other DNA
atgaacaagctgtacatcggcaacctgaacgagagcgtgacccccgccgacctagaaaaagtattcgctgaacacaaaatttcctattccggtcagtttttggttaagtccgggtacgcatttgtcgactgtcctgatgaacattgggcgatgaaggcaatcgagacctttagcgggaaagtggaactgcagggcaaacggctggagatcgagcacagtgtcccaaagaagcagcgctcaagaaagatccaaattcgtaacattcctccccaactgagatgggaagtgcttgactctctattggctcagtacgggactgtagaaaattgtgagcaggtgaataccgaaagtgaaacggccgtggtgaatgtgacttatagcaacagagagcagacccgacaggccatcatgaaactgaatgggcaccaactcgaaaatcacgccctgaaggtatcctatattcctgacgagcagatagcccagggacccgaaaacggccgtagggggggctttggctctcgcggccaaccaagacagggaagccccgttgcagcaggggcacctgcaaagcagcagcaggtagatatccctctgagactgctggtccctactcagtatgtgggcgccatcataggaaaggagggcgccacgatccgaaacatcacaaagcagacacagtccaaaatcgacgtgcatcggaaagaaaacgcaggggccgccgaaaaagccatttctgtccacagtaccccggaagggtgctcctccgcatgcaaaatgattctggaaatcatgcacaaagaagctaaggacacgaaaacagccgacgaggtaccactgaaaatacttgctcacaacaatttcgttggaagactgattggaaaggagggccgcaacctgaagaaggtggagcaggatacagagactaaaatcaccatctctagcttgcaggatttaaccctgtacaatcccgagagaaccattacagtcaagggggcaattgagaattgctgtagagcagagcaggagattatgaagaaagtccgggaggcatatgaaaatgatgtagctgccatgagcctccagagccatctgatccctgggctaaatctcgctgcagtagggctgttccccgcttcctccagcgccgtcccccctcctccgtcctcagttaccggcgccgcgccgtactccagtttcatgcaggcccctgaacaagagatggttcaggtgtttattccagcccaggccgtcggcgcaataattgggaaaaagggacaacacataaaacagctgtccaggtttgcctccgcatcaatcaaaatagcccccccagaaactcctgattcaaaggttagaatggtgattatcactggccctccagaagctcagttcaaggcccaggggaggatctacggaaaattaaaggaggagaatttcttcggtcctaaggaggaggtgaagttggagacccacattcgcgtgccagccagtgctgctggacgcgtgataggcaaggggggaaagactgtgaatgagttacagaatctcacagccgctgaagtcgtcgtgccgcgggaccagacacccgatgagaatgaccaggttatcgtgaagattataggtcacttttatgcaagccagatggcccagcgcaagattagggacatattggcgcaggtcaagcagcagcatcagaagggccagagcaatcaggcccaggccaggcgcaaatag

SEQ ID NO: 191509 - DNA, 1317 bp, synthetic construct
  misc_feature 1..1317: note = Description of Artificial Sequence: Synthetic coding sequence
  source 1..1317: mol_type = other DNA
atgaacaagctgtacatcggcaacctgaacgagagcgtgacccccgccgacttggagaaagtattcgcggaacataaaatctcttactccgggcaatttctcgtgaagagcgggtatgcctttgtagactgtcccgatgaacattgggctatgaaggctatcgaaacctttagcgggaaggtcgagctgcagggaaagcggctggaaattgagcattctgtgccaaagaaacagaggtccaggaagattcagattcgcaacattccacctcagttacgctgggaagttctggatagccttttggcccagtacggaactgtggagaactgcgagcaggttaacaccgaaagcgaaacagccgtggtgaacgtcacatatagcaatcgtgaacaaactcgccaggccgacgaggtccctcttaagatactggcccacaataacttcgtcgggaggctgattggcaaggagggccgaaacttgaagaaggtcgagcaggatacggagaccaagattacaatctcttctcttcaggatctgactctgtacaatcctgagagaaccatcaccgtgaagggcgctatcgaaaattgctgtagggctgagcaggagattatgaagaaagtacgagaggcttatgaaaatgatgttgccgccatgtctctgcagagccacctgattcccggcctgaatttggccgccgtgggcctattccccgctagctcctccgcagtgccccctccgccgtcgtcagtcaccggcgccgcaccttattcctcattcatgcaagcccctgagcaggagatggtacaagtgtttatccctgcccaggccgtcggcgcaattatcgggaagaaggggcagcacatcaagcagttgtcaaggtttgctagtgctagcattaaaatcgcaccacccgagaccccggatagtaaggtcaggatggtaataatcacgggcccacctgaggcccagttcaaggcccagggacgaatatacggtaaactaaaggaagaaaattttttcggacccaaggaggaagtgaagcttgaaacccatatccgcgtcccagctagtgccgccggaagagtgattggtaagggaggaaaaactgtcaacgagctgcagaatctcacagctgctgaggttgtggtgcctagagatcagaccccggacgagaatgaccaggttattgtgaagataattggccatttctatgcatcacagatggcccagcgaaaaatccgggacatattggctcaggtgaagcagcaacatcagaaggggcaatctaaccaggctcaggccagacggaaatag

SEQ ID NO: 191510 - DNA, 1671 bp, synthetic construct
  misc_feature 1..1671: note = Description of Artificial Sequence: Synthetic coding sequence
  source 1..1671: mol_type = other DNA
atgatgaacaagctgtacatcggcaacctgagccccgccgtgaccgcggacgatttgagacaactgtttggcgaccgaaaacttccactggcgggacaggtattgctgaagtccggatacgcctttgtcgactatcccgaccagaattgggccattcgtgccatcgagaccttgagtggaaaggtggaactgcatgggaagattatggaagttgactactcggtgagcaagaagttgcgctcacgcaagattcagatcagaaacattcctccccatctgcaatgggaggtactggatggcctcctcgcccagtacggaacagtagaaaatgtggaacaggtgaataccgatactgaaaccgccgtggtaaatgtgacttacgcaacccgggaggaggccaagattgctatggagaaacttagtgggcatcagtttgaaaactattctttcaaaattagttacattcccgatgaagaggtctcatccccttctccccctcaacgcgctcagagaggcgaccattcttcaagggagcagggtcacgctcctggaggaacatcgcaagctaggcagatcgattttcccctacggatcttggtgccaacacagtttgtgggggccattatcggcaaggagggtctgacaattaagaatatcacaaagcagacacagtcgagggttgacattcaccgtaaagaaaacagcggagccgcggagaaacctgtgactatccatgctacacccgagggcacttctgaagcctgccggatgatcctggagatcatgcagaaggaagcagacgaaacaaagttggccgaggagattcccttgaagatcctggctcacaatggcctcgtggggaggctgatcggcaaagaggggaggaatctaaaaaagatcgagcatgagaccggaaccaaaattacgatcagctctctacaagatctgtctatttataatcctgaacgcactattacagtgaagggtacagtagaggcctgtgcctccgccgagatcgaaataatgaaaaagcttcgtgaggcttttgaaaacgatatgctagctgtgaacacacattcaggctatttcagctccctttatccccaccatcagtttggcccctttcctcaccaccacagctatcccgaacaggaaattgtgaacttatttatacccacacaggcagtcggtgctataattggcaaaaagggtgctcatatcaagcagctggctagatttgcaggagcctctattaagattgccccagctgaaggcccagatgtgagcgaacggatggtgattatcacaggacccccggaggcccagttcaaagcacagggacggatctttggcaaactaaaggaggagaacttcttcaatcctaaggaagaagtcaagctcgaggcacacatccgggtccctagctcaaccgccggacgggtgatagggaagggggggaagaccgtgaatgaactgcagaacttgacctccgcagaagtgattgttccccgggaccagaccccagatgagaacgaagaggtgatcgtccggattataggtcatttcttcgccagccaaactgcacaaagaaagatccgcgagatcgtgcagcaggtgaagcagcaagaacagaagtatccccaaggcgtggcttcccagcgttcaaaatag

SEQ ID NO: 191511 - DNA, 1800 bp, synthetic construct
  misc_feature 1..1800: note = Description of Artificial Sequence: Synthetic coding sequence
  source 1..1800: mol_type = other DNA
atgatgaacaagctgtacatcggcaacctgagccccgccgtgaccgctgacgatttgagacaactgtttggcgatagaaaattgccacttgcaggtcaagtgctgctgaagagcggatacgcctttgtggactaccctgatcagaactgggctattagggcaatcgaaactcttagtgggaaagtggagctgcatggcaagatcatggaggtggactactccgtgtctaagaagttgaggtcgcgaaaaatacaaattcgtaacatccctccacacttgcagtgggaagtattggacggattactagcgcaatacggtaccgtagaaaacgtggaacaggtgaacaccgacaccgagaccgccgtcgtgaacgtcacatacgccacacgggaggaagcaaagattgccatggaaaaactttccggtcaccagttcgagaactattcatttaagatatcctatattccagacgaggaggtgagttcccccagccctccccaacgggcccaaagaggagaccactcttccagggaacagggacatgctcccggggggacaagtcaggccagacagatcgattttcctctcaggattctggtgcctacccagtttgtaggagcaatcatcggaaaagaaggccttacgatcaagaatatcactaaacaaacacagtcccgcgtggatatccacaggaaggagaactctggtgcagccgaaaagccagtcaccatccacgccactccagagggcacctcagaggcttgcagaatgattttggaaattatgcagaaagaggcggatgagacaaaactagctgaagagatcccactcaagattctggcccacaacgggctggttgggcgcttaattggcaaagaaggaaggaatctcaagaagattgaacatgaaactggaacaaagatcacaatttcatctttgcaagacctttcaatctacaatcctgaacgtacaataacggtcaaaggcacggtagaggcttgcgccagcgccgagatcgaaattatgaagaaactgagagaggccttcgaaaacgatatgcttgcggtcaaccagcaggcgaacctcatccctggtctgaatctcagtgcactcggaatcttcagtacaggactcagcgtactctcaccacctgctgggccaaggggcgctccacctgccgccccttatcatccatttactacccattccggctacttttcttcactttatccacaccaccaattcggaccattcccacaccaccacagctaccccgagcaggaaatagtaaatttgtttataccgactcaagctgtgggggccatcattggaaagaagggagcccacatcaaacagctcgcaagattcgcgggggcgtccatcaagatagcgcctgctgaagggcccgatgtgtccgaaaggatggtgattatcactggaccacctgaggcgcagtttaaggctcaggggcgtatattcggcaaactgaaggaggaaaattttttcaacccaaaagaggaagttaaactggaagcacatatacgcgtgccttcttcaacagctggcagagtgatcggcaagggtggtaaaaccgtgaatgaactccagaatctgacaagcgcagaggtgatcgtccccagggatcagactcccgacgagaatgaggaggtcatagtgaggattatcggtcattttttcgcaagtcagactgcccaacggaagattcgcgagattgtgcagcaggtcaagcagcaggaacagaagtaccctcaaggagtggcctcccagcgctccaagtag

SEQ ID NO: 191512 - DNA, 1629 bp, synthetic construct
  misc_feature 1..1629: note = Description of Artificial Sequence: Synthetic coding sequence
  source 1..1629: mol_type = other DNA
atgttcagctgccccggccactaccacgtggacggcttcctgaaccccgggtccaggaagatccagatcagaaatattcccccacacctgcaatgggaggtgctggacgggctgctggctcagtatggcactgttgaaaacgttgagcaggtcttcgccttctctcttgtgaacacagatacggagacagccgtcgtgaatgttacctatgccacccgggaagaggctaagatcgccatggagaagctgagcgggcatcaatttgaaaactactccttcaagattagctatatccctgacgaggaagtttcctcaccgagccccccacagcgcgcccagagaggcgaccactcatcacgtgaacagggacatgcaccgggcggcacttctcaagcgcggcaaatagacttcccccttaggatacttgtgccaactcagtttgtgggcgctataatcggcaaagagggactcacaatcaaaaatatcaccaaacagacccagagtcgcgtcgacatccaccggaaggagaattctggggccgcagagaagcccgtgaccattcatgccacacccgagggcactagcgaggcctgcaggatgatcctcgaaatcatgcagaaagaagcagacgaaacaaagctggcggaagaaattcctctgaagatcctggctcataacgggctagtgggaagactaatcggcaaggaaggaaggaacctgaagaagatcgaacatgaaactgggaccaaaattactatctcttcgctgcaggacttgagcatttacaacccggaaaggactataaccgtaaaagggacagttgaggcttgcgccagcgcagagattgagataatgaaaaaactcagggaggcttttgagaacgacatgctggccgtcaatcagcaagccaacttgataccgggacttaacttgagcgctctgggtattttctctacaggcctatctgtactgtccccacccgctggcccacgaggagctccacccgccgccccataccatcccttcacaacacacagcggttatttttccagcctgtaccctcaccaccagtttggccccttccctcatcaccacagttaccccgaacaagaaatcgtgaacctttttatcccaacccaggctgtgggggccatcattggtaagaagggggcacacattaaacaactagctcggtttgccggggcttccataaagatagctccagcggaggggccggacgtgtccgagcgcatggtgattataacgggtcccccggaggctcagtttaaggcccaaggcaggatatttgggaaactgaaggaggagaacttctttaacccgaaagaggaagtcaagctggaggctcacattagggtcccttccagcaccgcagggcgggtcattggaaaaggtggaaaaaccgtcaatgagctgcaaaacttaaccagtgctgaagtaatcgtgcccagagatcagaccccggacgagaatgaagaggttatcgtgcgcatcattgggcacttctttgcctcacagaccgcacagaggaaaattcgggaaattgttcagcaagtgaagcaacaggagcagaagtatccacagggcgtcgcaagccagcgttccaaatag

SEQ ID NO: 191513 - DNA, 1740 bp, synthetic construct
  misc_feature 1..1740: note = Description of Artificial Sequence: Synthetic coding sequence
  source 1..1740: mol_type = other DNA
atgaacaagctgtacatcggcaacctgagcgagaacgccgccccctcagatctcgagtcaatattcaaagacgctaagattccggtgtcaggcccctttctggtgaagacgggttatgcctttgtggactgccccgacgaatcttgggcactgaaagcaattgaggccctctccggaaagattgagcttcatgggaagccaattgaagtagagcatagtgttcctaaacgtcagcgtatcagaaagctacagattcggaatataccgcctcatctgcaatgggaagtacttgatagcctgctggtgcagtatggggtggtcgaaagttgtgagcaggtaaacacagactccgagacggctgtagtgaatgtgacatacagttctaaggaccaggccagacaggccctggacaaattgaacggctttcagttagagaacttcacactcaaggtcgcctatattccagatgaaatggccgcccagcaaaatcctctgcagcagccgcgagggcgcagggggctgggacagaggggctccagtagacagggttcccctggcagtgtctccaaacagaaaccctgcgatcttcctctgaggctgctcgtccctactcaattcgtcggggctattattgggaaggaaggggccacaataagaaatatcaccaagcagacgcagtcaaagatagatgtacatcggaaggaaaacgcaggagctgccgagaagtccatcacgatcctttcaacccccgagggcactagtgcagcctgtaagtccatcttagagattatgcataaggaagcccaggacattaaattcaccgaggagatccccctcaagattctcgcccataataacttcgtggggaggctcattggaaaggaaggccgaaatctgaagaagatagagcaggataccgatactaagatcacgatttcacccctgcaggaattgacattgtataatcctgagagaactattacggtgaaaggcaatgtagagacctgcgccaaggccgaagaggagatcatgaagaaaattagagagagctatgaaaatgacattgccagcatgaatctgcaggctcatttgatccccggactgaatcttaacgcccttggactgttccctcctacctctggaatgcctccacccacatctgggccaccttcggccatgactcccccctacccccaattcgagcagtctgagactgaaaccgtccacctgttcattccggccctgtctgttggagccatcatcgggaaacagggacagcacatcaagcagctgtcccggtttgccggagcaagtatcaaaatcgcaccagccgaagcccccgacgcaaaggtgcggatggtaatcataacagggcccccagaggcgcagttcaaggcccaaggtagaatatacggaaagatcaaagaggaaaacttcgtaagccctaaggaggaggtcaaactcgaggcacatattcgcgttccttccttcgccgccggccgcgtgatcgggaagggcggaaagactgtcaacgaactacagaacctttcatccgcggaggttgtggtcccacgagatcagactcctgatgagaatgaccaagttgtggttaagataacagggcatttctatgcatgccaggtcgcccaaagaaaaatccaggaaattctgacacaggtcaagcagcatcagcagcagaaagcactgcagagcgggccaccccagtcccggaggaaatag

SEQ ID NO: 191514 - DNA, 7476 bp, synthetic construct
  misc_feature 1..7476: note = Description of Artificial Sequence: Synthetic coding sequence
  source 1..7476: mol_type = other DNA
atgggcgccgccgccggccggagcccccacctgggccccgcccccgcgagaagaccccagcggagtcttctgctcctccagttgctgctgctggtcgctgcgcccgggtccacccaagcccaggcagcaccttttcccgagctgtgcagttatacctgggaggccgtcgacactaagaataatgtactgtataaaataaatatttgtggctccgtggatattgtgcagtgtgggccaagctctgccgtctgcatgcatgacctgaaaactcgaacatatcacagcgtgggggattccgtcctccgctcggctaccaggtcattactggagtttaataccaccgtaagctgcgatcaacagggaaccaatcacagagtgcaaagctccatagctttcctctgcggaaagacactagggacaccagaatttgtgaccgccaccgaatgtgtgcattacttcgaatggcgaacaacggctgcatgtaaaaaagacattttcaaggccaacaaggaagtgccttgttacgtgttcgatgaagaacttcgaaagcatgaccttaatccactgatcaaattgtcgggggcatacctggttgacgattcagaccccgacacttcactgttcataaatgtgtgtcgcgacattgatacattgcgtgatccagggtcacagctgcgcgcctgcccccccggcaccgctgcctgccttgtcagaggtcaccaagctttcgatgtcggtcaacctagagacggactcaagctggtgcgtaaggataggctggtgttatcttacgtacgagaggaggccggcaagctggacttctgcgacggccactcacctgccgtgactattactttcgtatgcccatctgagcggcgggagggtacaattcccaagctgaccgctaagagtaactgccgttacgagatcgagtggattacagaatacgcctgccacagagactatctggaatccaaaacctgctctctttcaggcgagcagcaggatgtcagcattgacctgactcccctggcccagtcgggcgggagtagctacatatcagacggaaaagagtatctcttctatcttaatgtatgcggcgaaacggaaatccagttctgcaacaagaagcaggctgccgtgtgccaagtaaaaaaatccgatacatcacaagtaaaggccgctggcaggtatcataaccaaaccctccgctacagtgatggagacctcacccttatttactttggcggagacgaatgttcttcaggatttcaaagaatgagcgtcatcaatttcgagtgcaacaaaacagctgggaacgacggcaaggggaccccagtctttacgggtgaagtagactgtacctattttttcacgtgggatacggagtacgcttgcgtgaaagaaaaggaagatctgctttgcggtgccactgatggaaaaaaaaggtatgatctcagtgccctagtacgacatgccgagccagagcagaattgggaggcagttgatggctcccagaccgaaacagagaagaagcatttcttcatcaatatttgccatcgcgtcctccaggagggtaaggccaggggctgcccggaagacgccgctgtgtgcgccgtggataaaaacgggagcaagaaccttggtaaattcatctcttctcccatgaaggaaaaaggcaacatacaactctcttattctgacggggatgactgcggtcacgggaaaaaaattaagactaacatcaccctggtttgcaaacccggcgacctggaatctgcaccagttttaaggacttctggcgaaggtggctgtttttatgaatttgagtggcatactgcggcagcctgtgtgctctcaaagacagagggggagaattgtacagtattcgatagccaagccgggttctccttcgatctgagcccgcttacaaagaaaaacggcgcctataaggtggaaacaaaaaagtacgacttttatatcaatgtctgcgggcctgtttccgttagcccttgccagcccgattcaggcgcttgtcaggttgcaaaatccgatgaaaagacttggaacctgggtttgagcaatgctaaactgagctattacgatggcatgatccaactgaactatcgggggggaaccccatacaataatgagaggcacactccaagggccactctgatcaccttcttatgcgatagagatgccggcgtggggttcccggagtatcaggaggaggacaatagcacttacaactttagatggtacaccagctacgcctgtcccgaggagcctttggaatgtgtcgtgaccgacccaagcactctggagcagtatgacttgagttccttggcaaagagcgagggcggcctcggcggaaactggtatgcaatggacaactcaggcgagcacgtaacttggagaaaatactacatcaacgtgtgtcgcccactaaaccctgttcccggctgtaaccggtacgccagcgcctgccagatgaaatacgaaaaggatcaaggaagcttcactgaagtggtgagcatctctaacctgggcatggcaaagactggccccgtggttgaggacagtggcagtcttctgctcgaatatgtgaatggatctgcctgcaccaccagtgacggcagacagacaacatacactactaggatccatctggtctgttcccgagggcggctgaatagccaccccattttttccttaaactgggaatgcgtggtaagtttcctgtggaatactgaggcggcctgccccattcagaccaccactgacaccgaccaggcctgcagcataagggaccctaactccggctttgtgtttaatttaaaccccctgaactcttcacagggctataatgtgtccgggatcggcaagatctttatgtttaatgtctgcggcaccatgcccgtatgcggtacaattcttggaaaaccagccagcggatgcgaagctgagacccagaccgaggagctgaagaattggaaaccggccagaccggtcgggatcgagaagtcgttgcagttaagtacggagggcttcatcactttgacctacaagggaccactttctgccaaggggacagctgacgcctttattgtgcgcttcgtttgcaatgacgacgtttatagcggacctctgaaatttctgcaccaagatattgactccggacagggaattcgcaacacatatttcgaattcgagaccgcactggcctgtgtccctagcccggttgattgtcaggtgaccgacctagccggcaatgaatacgacttgacagggctgtcgacagtcagaaaaccttggacggcagttgacaccagcgtggatggcaggaagcgcactttctatctctccgtgtgtaacccgttaccctacatcccgggttgccagggatcggcagtgggcagttgtcttgtgagcgagggcaacagctggaacctaggcgtggtgcagatgtctccccaggctgctgccaatggaagcctcagcataatgtacgtgaacggagataaatgtggcaaccaacggttcagcaccaggatcacatttgagtgtgctcagatctcaggcagccctgccttccagctccaggacggttgcgagtacgtgttcatctggaggaccgtcgaagcctgcccagtcgtgcgagtggagggagacaactgcgaggtgaaagaccctagacacggaaatctctatgacctgaagcccctggggcttaacgataccatcgtctctgctggagaatatacctactactttagggtatgcggtaagctgagctccgacgtttgccctacttccgacaaatcaaaagttgtaagttcttgccaggagaaaagggaacctcaagggtttcataaagtcgccggcctccttactcaaaagctaacgtacgagaacgggctgctgaaaatgaattttaccggcggagacacctgccataaggtgtaccagagatctactgccatattcttctattgcgatagggggacgcagcggcccgtgtttctcaaagagacttcagactgttcgtaccttttcgagtggcgcacccagtacgcctgccccccctttgacttgacggagtgctcgtttaaggacggtgccggtaattcttttgacctgtcttccctgtctaggtatagtgacaactgggaggctattaccggaacaggcgatcctgagcattatctgattaacgtgtgcaagtctcttgccccacaggctgggaccgagccatgcccacctgaagccgccgcttgtcttttaggtggctccaagcccgtgaacctagggagagtccgcgatggccctcaatggcgtgatgggattatcgtccttaaatacgtagatggggacctatgccctgacggaatcagaaagaagagcacaacgatccgttttacgtgctctgagtctcaggtcaacagccgtcccatgttcatttcagcagtcgaggattgcgagtatacgttcgcttggccgaccgctactgcttgccctatgaagagtaacgaacacgatgactgccaggtgaccaatccttccacaggtcatttattcgacctgtccagcctttccggacgggctggatttacagcggcctacagtgaaaaaggactagtgtacatgagtatttgcggagagaacgagaactgtccgcctggcgttggcgcttgctttgggcagaccagaatttctgtgggtaaagccaacaagaggctgagatatgttgatcaagtgcttcagttggtgtacaaggatgggtccccatgccccagcaagtctgggttgtcttataagtccgtcatctcattcgtttgtagaccggaggctcgtcctactaatcgacctatgctgatctccctggacaagcaaacatgtactctgttttttagttggcatacccctctcgcctgtgagcaggcaacagaatgcagcgtgcgcaacggcagctcaatcgttgatttgtctccactgatacaccgcaccgggggttacgaggcatatgatgagtccgaagatgatgcctccgacactaaccccgacttttacatcaacatatgccaacctctgaatcctatgcacggagtgccctgtccggcaggggcggcggtgtgcaaggtgccaattgatgggccgcccatcgacatcggccgcgtggctgggcctcccattctgaacccaattgctaacgaaatttacctgaattttgaatcgtcaaccccctgcctggccgacaaacactttaattacacatcgctgattgccttccactgcaaacggggagtgagcatggggacacctaagctgcttagaacgtccgagtgtgatttcgtgttcgagtgggaaacaccagtcgtctgccctgacgaagtgagaatggatggttgtacactgacagacgagcaactgctttattcattcaacttaagctctcttagcactagcactttcaaagtgacacgggactctaggacttattccgtgggagtgtgcacttttgccgtggggccggagcaggggggctgcaaagacggtggagtgtgcctgctgagcggaactaaaggggcttccttcggccggttacagtctatgaaattggactataggcaccaagacgaggccgtcgtccttagctacgtgaatggtgaccgttgtcccccggaaaccgacgacggcgtcccatgtgttttcccatttattttcaacggtaaatcttatgaggagtgtatcatagaaagccgggcaaaactctggtgttccactaccgcagattatgacagagatcacgaatggggattctgccggcactctaattcttaccgaacctcatcgatcatcttcaaatgcgacgaggacgaagatataggtagacctcaagtgttcagtgaggtgagagggtgcgacgtcaccttcgagtggaagacgaaggtagtgtgtccacccaagaagctcgaatgcaaatttgtgcaaaagcacaaaacctacgaccttagactcctctcttccctgacaggctcttggtcacttgtgcataatggcgtttcctattatattaacttatgccagaaaatctacaagggaccgttaggttgttctgagagggctagtatctgtagaagaacaaccactggcgacgtgcaagttctgggactggtgcatacacagaaactgggagtgatcggtgataaggtcgtggtaacatattcgaaaggctatccgtgtggaggcaataagactgcaagttccgtcattgaactcacctgtactaaaacggtgggtagacccgctttcaaaaggtttgatatcgacagttgtacatattatttctcatgggatagccgggccgcgtgcgctgtcaagccccaagaggtccagatggtcaacgggaccattacaaacccaatcaacggcaagagtttttctctaggggacatttactttaagctgttcagagcatcaggcgacatgcgcacaaatggggacaattatctttacgaaatccagctgtcctccatcacctccagtcggaatccagcttgcagcggcgctaatatctgccaagtcaagcctaacgaccagcactttagcaggaaagtgggcacgtccgataagactaaatattatctgcaagacggggacctagacgttgtgttcgcctctagttctaagtgtggcaaggataagacgaaatccgtatcatctaccatctttttccattgcgacccactggtggaagatggaatcccggaattttcacacgaaaccgctgattgccagtatctcttctcttggtacacctcggcagtctgccctctgggcgtcggctttgactctgagaaccctggagacgacggtcagatgcacaagggcctttcagagaggagccaggccgtgggcgcagtgctctctcttctcctggttgccctgacttgctgcctgttggctctgttactatacaagaaggagcggagggagaccgtcatctccaaacttaccacttgctgccgcagatcaagcaacgtttcctataagtacagcaaggttaataaagaagaagaaacggatgagaacgagactgagtggttaatggaggagattcagcttcctcctcctaggcagggcaaggaggggcaggaaaacggccacattaccacgaagtctgtcaaagccctctccagtctccacggcgacgaccaagacagcgaagatgaggtcttgacgatccccgaggtgaaggtgcacagcggaaggggagcaggcgctgaaagctctcatcctgtacgcaatgcccagagcaacgctctacaagagcgcgaagatgatcgcgttgggttagtgcgaggcgagaaggcccggaagggcaagagctcaagcgcgcagcagaagacagtctcatcaaccaaactggtatcgtttcatgatgacagtgacgaggacctgctgcatatctag

SEQ ID NO: 191515 - DNA, 780 bp, synthetic construct
  misc_feature 1..780: note = Description of Artificial Sequence: Synthetic coding sequence
  source 1..780: mol_type = other DNA
atgagcgaggtgcccgtggcccgggtgtggctggtgctgctgctgctgacagttcaggttggcgtcacggccggagcgccttggcagtgtgcgccttgtagcgccgaaaagctggccttgtgcccccccgtgagcgcctcatgtagcgaggtcacgcgttcagctggttgtggatgctgtcctatgtgcgccttgcctttgggcgctgcatgtggtgttgcaacggcaagatgcgccagaggcctgtcctgcagggcacttcccggggagcaacagccccttcacgctcttacaagaggtcagggggcttgtgtgcaggaatcagacgccagtgcaccgcacgcggccgaggctggatcacccgaaagcccagagagcacggagataaccgaagaggaactgttggacaatttccacctgatggcgccttcagaagaggatcactccatcctctgggatgctatcagcacttacgatgggtctaaagccctgcatgttacaaatatcaagaagtggaaagagccatgtaggatagagttgtatagggtagttgagtccctggcaaaagcccaggaaacaagcggggaagagatttccaaattttatctcccaaactgcaataagaacggcttctaccacagtcggcagtgtgagacaagcatggacggagaggcaggactctgctggtgtgtctatccatggaacgggaaacgcatccctggtagtcctgaaatccggggtgatccaaactgccaaatctacttcaacgtgcagaactag

SEQ ID NO: 191516 - DNA, 777 bp, synthetic construct
  misc_feature 1..777: note = Description of Artificial Sequence: Synthetic coding sequence
  source 1..777: mol_type = other DNA
atgctgcccctgtgcctggtggccgccctgctgctggccgccggccctggcccaagcctcggggatgaagccatccactgccccccttgtagtgaggagaaactcgcgaggtgtcggccaccagtgggctgcgaagagctggtgcgggaacccggatgcgggtgctgcgctacatgtgcactgggactgggaatgccatgcggcgtctacaccccacgttgtggatccggcctgcgttgctacccaccccgcggcgtcgaaaagcccttgcacacgctcatgcatggccagggcgtgtgcatggaacttgccgagattgaagctatccaagagtccctccaaccctctgataaggatgaaggggaccatcctaacaatagcttcagcccctgttccgcacatgatcgcaggtgcttgcagaaacactttgctaaaattcgagaccgaagcacttccggggggaaaatgaaagtgaatggcgccccaagagaagatgcacggcccgtaccccagggaagctgccagtctgagctacaccgggcccttgagagacttgccgcatcccagagcaggacacacgaagatctgtacattattcccatccctaactgcgaccggaatgggaactttcacccaaaacagtgtcaccccgctttagacgggcagcggggaaaatgctggtgcgttgacagaaaaactggcgttaagctgcccggggggcttgaaccgaagggggaactagattgccaccaactcgccgattcgttcagggaatag

SEQ ID NO: 191517 - DNA, 477 bp, synthetic construct
  misc_feature 1..477: note = Description of Artificial Sequence: Synthetic coding sequence
  source 1..477: mol_type = other DNA
atggagctggccgagatcgaggccatccaggagagcctgcagcccagcgacaaggatgagggagaccatcctaacaattcatttagtccctgttctgcacacgatcgaagatgcctgcagaagcactttgctaagatcagagaccggtctactagcgggggcaagatgaaggtgaacggagcccctcgcgaagacgcacgcccagtgcctcagggctcctgccagtcggaactccaccgcgctctggagcggttggctgcgtctcagagtagaacacatgaagacctctacatcatcccaattccgaactgcgaccgtaatggcaacttccatccaaagcagtgtcaccccgcgctggatgggcagcgaggaaaatgttggtgtgttgacaggaaaactggtgtgaagttaccaggagggctggaacccaagggggaactcgattgtcaccagttagcagattctttccgggagtag

SEQ ID NO: 191518 - DNA, 849 bp, synthetic construct
  misc_feature 1..849: note = Description of Artificial Sequence: Synthetic coding sequence
  source 1..849: mol_type = other DNA
atggagcggcccagcctgcgggccctgctgctgggcgccgccggcctgctgctgcttctgttgccgcttagttccagcagttcgtctgacacttgcggcccctgcgagcctgcatcttgtcctccactacctcctttgggctgcctcctcggagagacgagggacgcctgtggctgctgccccatgtgtgcccgaggcgagggtgaaccatgcggtgggggtggtgctggtcggggctactgcgcccccgggatggagtgcgtcaagagccggaaacggaggaagggtaaagccggagcagcagccgggggcccaggggtatcaggcgtctgtgtctgcaaatctagatatcctgtgtgcgggtctgatggcacaacttatccttcaggttgtcagctcagggccgcgtcacagagggcagaaagtcgcggggagaaggccattacccaagttagcaaaggaacctgcgagcagggcccatccatagttactccgcctaaagacatctggaacgtcactggcgcacaggtctacctcagttgcgaagtgattggcatcccaacgccagtgctaatttggaacaaggtcaagcgcggacactatggcgtgcagaggactgagctcctgcccggggatagggataatctagcaattcagactcggggaggtcctgagaagcatgaggttaccgggtgggtactggtctcccccctctccaaagaggatgccggggagtacgagtgtcatgcatccaattcacagggacaggccagtgcgtctgccaaaataaccgtggtggacgcactgcacgagatccccgtgaaaaaaggagagggagccgaactctag

SEQ ID NO: 191519 - DNA, 840 bp, synthetic construct
  misc_feature 1..840: note = Description of Artificial Sequence: Synthetic coding sequence
  source 1..840: mol_type = other DNA
atggagcggcccagcctgcgggccctgctgctgggcgccgccggcttgctcctattgcttctgcccttgagttcctcctctagttcggacacgtgcggtccatgcgagccagcctcatgcccaccactaccacccctgggatgcctgcttggagagaccagggatgcctgcggatgttgtccaatgtgtgctcgtggagagggagaaccgtgcggcggcggaggtgcgggcagagggtactgtgctcccggcatggagtgcgtaaaaagtcgaaaacgccgaaagggaaaagccggcgccgcagcaggcggacccggtgtttcgggcgtttgcgtatgtaagtcaaggtatcctgtctgtggttccgacgggaccacctaccccagcgggtgccagcttcgggcagctagccagcgcgctgagtcaagaggcgagaaggccatcactcaggtgagcaaagggacatgcgagcagggtccgtctatagtaacacctcccaaggacatttggaatgtcaccggcgcgcaggtatacctctcttgtgaagttatcggtattcctactccggtccttatctggaacaaagtcaagcggggacattacggagtccagagaactgagctgctgcctggtgatagggataatctagctatccagacccggggcggcccagaaaaacatgaagtcaccggatgggttcttgtcagcccactatcgaaagaggacgccggggaatatgagtgccatgcctccaacagccagggccaggccagcgcatcggctaagatcacggttgtggacgccctacacgaaatcccagtgaaaaagggtactcagtag

SEQ ID NO: 191520 - DNA, 393 bp, synthetic construct
  misc_feature 1..393: note = Description of Artificial Sequence: Synthetic coding sequence
  source 1..393: mol_type = other DNA
atggagaccctgggcgccctgctggtgctggagttcctgctgctgtcccctgtcgaagcccagcaggccaccgagcacagactgaagccttggctcgtgggcttggctgccgttgttggcttcttgtttatcgtatacctggttttgctcgctaatcgcctttggtgttctaaggctagagctgaagacgaggaagagacgacctttcgcatggagtcaaatctgtaccaggatcaatcagaggacaaacgcgaaaaaaaggaagccaaggaaaaggaagaaaagagaaagaaggagaaaaagacagccaaagagggcgaatccaatttggggttggatcttgaggagaaagagcctggagaccatgaaagggctaaatccacagttatgtag

SEQ ID NO: 191521 - DNA, 1932 bp, synthetic construct
  misc_feature 1..1932: note = Description of Artificial Sequence: Synthetic coding sequence
  source 1..1932: mol_type = other DNA
atggccctgcggaaggccggcgacctggagccccagttcacccccgaacgccgctttaggctttgttggtaccaagctcattctggtcgcgctctcctgggcccaccaccacaggctagtccgcccgcagggggactagccctcgcacttttgttgctgtcttgggtcgcgctagggccaagaagtcttgagggcgctgacccagggacacccggcgaggcagaggggccagcatgtcctgccgcttgcgtctgcagttatgacgacgacgccgacgagttaagtgtgttctgctcatcaagaaatctcacccgacttccagacggggtaccaggaggcacacaggcgctttggctggacggtaacaacctttccagcgtgccgcccgccgcctttcagaacctatcctccctcggctttctgaacctgcagggcgggcagctggggtcgctggaacctcaggcattattagggttggagaatctgtgccacttgcacttggagcgaaaccagctgaggtctctggccctcgggaccttcgcccatactcctgccctggcgtctctcggccttagtaataatcgactgagtcgtctcgaagacggactcttcgagggcctgggttctttgtgggacctgaacctgggatggaacagcctcgcagttctgcctgacgccgcattcaggggcctaggttccctgcgtgagctagtactggctggtaatcgcttagcctatctgcagccagctctgttttcgggcctcgcagaactacgggaactggatctgtctagaaatgctctcagagccattaaagccaacgtcttcgttcagctgccacgattgcagaaactctacctggaccgcaacctgattgcagcagtcgccccgggcgcatttttaggactcaaagccctcagatggttggatctgtctcacaacagggtcgctgggctgctggaagatacgttccccgggttgttagggctccgggtgttgagactctctcacaatgctatagcgtctctgaggcctaggacctttaaagatctccacttccttgaagaactccagcttggacataacaggataagacaactggccgagcgctcttttgaggggctcgggcaactggaggtgctgacactggaccataatcagctacaggaggtaaaagctggggctttcctgggactaacaaatgttgcggtcatgaacctgtccggcaattgtctgaggaacctgcctgaacaagtgttcaggggccttggaaaactgcactccctccacctcgaaggcagctgcctgggaaggatcaggcctcatacattcacaggactgtcaggccttcgtcgtttgttcctcaaggataacgggctggtcggaatcgaggagcagtctctctggggactggccgagcttttagaactggacctaacttctaatcagctcacccacttaccacacagactgttccaaggcctgggcaaactggagtacctgctcctctctaggaaccgacttgccgagctacccgctgacgcccttggaccattgcagcgagctttctggctcgacgtaagccacaatcgcctggaggcactccccaactccctgctcgcccctctgggtcgtttgaggtacttatctctcagaaataattccctgcgaacatttacaccccagccacccggcctggaaaggttgtggctagaggggaacccatgggattgtggttgccctctcaaggctttacgggactttgccttacaaaacccctctgctgtcccccgctttgtgcaagctatctgcgagggggacgactgccagccacccgcctacacctacaataatatcacgtgtgcatccccccctgaagtcgtcggcctggatctcagggatctgagcgaggcccattttgcaccttgctag

SEQ ID NO: 191522 - DNA, 1533 bp, synthetic construct
  misc_feature 1..1533: note = Description of Artificial Sequence: Synthetic coding sequence
  source 1..1533: mol_type = other DNA
atgccccggggcttcctggtgaagcggagcaagaagagcacccccgtgtcctatcgggtccgcggcggggaagatggagaccgcgctctgctgctaagcccttcttgcggtggggctagagcagagcctcctgcccccagcccagtacctgggcccctgcctccacctcctccagccgaacgggcccacgccgcgctcgctgctgccctcgcctgtgcccctggacctcagcctcctccgcagggcccccgagccgcacacttcggcaatccagaagccgcccaccccgcccctctatacagccctacccggccagtgtctcgagaacacgaaaaacataaatacttcgagagatccttcaacctcgggagccctgtatctgccgagtcttttccaacccccgccgctctgctaggcggaggcggtggtggcggagcctcaggcgccgggggaggaggcacctgtgggggcgacccattactgttcgcacctgcagagcttaagatgggcaccgccttttccgctggagcagaggctgccaggggccccggtcctggcccccccctgccacccgcggccgccctcagacccccaggcaagagaccacctcccccgaccgccgcagagccaccagccaaggctgtcaaggctccgggagcaaagaagccaaaggctattaggaaactccactttgaggacgaggttactaccagcccggtcctcgggctgaagattaaagagggacctgtggaggcccccaggggccgcgctgggggggcagcccggcccctgggggagtttatctgccagttgtgtaaagaagagtacgcagatccctttgctttagcccagcacaaatgctcaaggattgttagggtggaatacagatgccccgaatgcgccaaggtattctcgtgtcccgccaacctcgcttctcatagaaggtggcacaagcctcggcctgcaccagccgccgcacgggctcccgagccagaggccgctgcgagagccgaggccagagaggctcccgggggcggcagcgatagggacactccatctcccggaggtgtgtcagagagcggctccgaggatggcttatatgagtgtcatcactgtgctaaaaaatttcgacgccaggcttatctgcgtaagcatctgttagcccaccatcaggccctgcaggccaagggcgctccccttgcacccccagccgaagatttattggccctgtatccagggcctgacgaaaaggcaccacaggaagcggccggcgatggggaaggcgctggcgttctgggcctgagtgcaagcgcagagtgtcatttgtgccccgtgtgcggtgagtcctttgccagcaagggtgcacaggaacggcatctccgcctcctgcacgcagctcaagtctttccatgcaagtactgccccgcaacattctacagtagccctggactgacacggcatatcaacaagtgtcacccctccgaaaatcgccaagtgatactgcttcaggtgcctgtaaggccagcctgctag

SEQ ID NO: 191523 - DNA, 1701 bp, synthetic construct
  misc_feature 1..1701: note = Description of Artificial Sequence: Synthetic coding sequence
  source 1..1701: mol_type = other DNA
atgccccggggcttcctggtgaagcggaccaagcggaccggcggcctgtaccgcgtccggctggcagagcgagtattcccccttttaggcccccagggcgcacctccctttctggaggaagctccatctgcaagcctcccaggggctgagcgggccaccccccccacaagagaggaaccaggtaaaggactcactgcagaggctgctagggaacaaagtggaagcccctgcagagccgcaggcgtgtcacccggcactgggggtagagagggcgcggaatggcgtgccggaggccgggaaggtcccggcccctcaccatccccaagcccttcgcccgcaaagcctgccggtgccgaactgcggcgcgcatttcttgagaggtgcctgtcaagcccagtgtccgcagagagttttcctggcggtgccgcagctgtggcagcgttcagctgtagcgtggccccggccgcggcacctacgccaggggaacaatttctgttgcccctgcgagcgccatttcccgaaccagcacttcaaccagatccagcacctcttagtgccgctctgcagtctcttaagagagccgccggcggcgagaggcgtggaaaggcccccaccgattgcgcctctgggcctgcagcagcaggtatcaagaaaccaaaggctatgcgtaagctttcttttgcggacgaagtaactactagcccagtgcttggtctaaaaataaaagaggaagaaccaggagctccttcacgaggcctggggggctctcgcactcccctgggcgagttcatttgccagctgtgtaaggagcagtatgctgatccattcgcactggctcagcacaggtgtagtagaatcgtacgcgttgagtacaggtgccctgagtgtgataaagtgtttagctgtccagccaatctcgccagccatagaagatggcacaaacctcgcccagctgcagccaacgcagccacagtgagctccgccgacgggaagccccccagttctagcagttcatcctctcgggattctggagctattgcatccttccttgcggagggtaaagagaattctcgaattgaaagaaccgcagatcagcatccacaagccagggactcttctggcgcagatcagcaccctgacagcgccccgcggcagggcttgcaggtattgactcacccagagcctccactcccccaaggcccgtatactgagggcgtgctgggcaggagagtgcctgttcctgggagtactagcggcggacgggggtcggaaattttcgtttgcccctattgccacaaaaagtttcggcggcaggcctacctgcggaaacacctgtccactcatgaggccgggtctgcccgtgccttggcacctggcttcggctctgaacgaggagcacctctggcctttgcatgcccactgtgtggggcacattttccaacagcggatatccgggaaaaacacagactgtggcacgctgtcagagaggagttgctgctgcccgctctggctggagctccgcccgagaccagcggcccaagcgggccaagtgacggatccgctcaacagatattctcttgtaaacattgtccatccacattcttttcctctcccggactgacccgccatataaacaaatgccacccgagtgagagtagacaagtacttttgctgcaaatgcctttacggcccggctgctag

SEQ ID NO: 191524 - DNA, 792 bp, synthetic construct
  misc_feature 1..792: note = Description of Artificial Sequence: Synthetic coding sequence
  source 1..792: mol_type = other DNA
atggtgaagatcgccttcaacacccccaccgccgtgcagaaggaggaagccagacaggacgtggaggcacttctctctaggacggttaggacacaaattctaactggaaaggaattacgcgttgcaacacaagagaaggaggggagctcgggaaggtgcatgcttaccttgctgggtctatcgttcattctggcaggcctcattgttgggggcgcttgcatttataagtattttatgcctaagagtaccatataccgtggggaaatgtgctttttcgactcagaagatccagccaactctctccgcggcggagagcccaatttcctgcccgtcaccgaggaggccgacattcgagaggacgacaatatagcaatcattgatgtgccagtgcctagcttctcggactctgaccctgctgcgattattcacgattttgaaaaggggatgactgcatacttggatcttctgctgggcaactgctaccttatgcctttaaacacctctattgtcatgccacccaaaaacctggttgagctattcgggaaattggcttccggaaggtacctaccacaaacgtacgtcgttcgcgaggacttagtggctgtcgaagaaattagggatgtaagcaacctgggcatttttatctatcagctctgcaataacaggaagtctttcaggctaagacggcgtgacctgctgctcgggttcaataagcgcgctattgacaagtgctggaagatacggcactttcctaacgaattcatcgtggaaactaagatctgtcaggagtag

SEQ ID NO: 191525 - DNA, 660 bp, synthetic construct
  misc_feature 1..660: note = Description of Artificial Sequence: Synthetic coding sequence
  source 1..660: mol_type = other DNA
atggtgaagatcgccttcaacacccccaccgccgtgcagaaggaggaagcaagacaggacgtggaagccctgttatcacgcactgtgcggactcagattctaacagggaaatctaccatctatcggggcgagatgtgctttttcgattccgaagaccccgcgaattcactacgaggtggggaacctaatttcctgccagtgaccgaggaggcagatatcagagaggacgataatattgctataatcgacgttcctgtgccctccttctccgatagcgatccagccgccatcattcatgattttgagaaaggaatgacggcatacttggacctattactgggcaattgctatctgatgcccctcaatacatccatcgtaatgcctccaaagaatctggtggaactgttcggcaaactggcctctgggaggtacttacctcaaacatacgttgtgcgggaggacctggttgctgtcgaggaaatcagagacgtgtccaatcttggcatcttcatctatcaactctgtaataatagaaagtctttcaggcttcggcgcagggatttgctgctgggctttaataagcgtgcaatcgataagtgctggaaaattcggcatttccctaacgagtttatcgttgagaccaagatctgtcaggagtag

SEQ ID NO: 191526 - DNA, 801 bp, synthetic construct
  misc_feature 1..801: note = Description of Artificial Sequence: Synthetic coding sequence
  source 1..801: mol_type = other DNA
atggtgaaggtgaccttcaacagcgccctggcccagaaggaggccaaaaaggatgagcctaaaagtggtgaggaggcattgattatccccccggacgccgtggctgtcgattgcaaagacccagatgatgttgtgcctgtgggacagaggagggcctggtgctggtgtatgtgctttggactggcgtttatgttagctggagtgattctgggaggggcatatctgtacaagtactttgccctccaaccagacgatgtgtactattgcggtatcaaatatatcaaagacgacgtaattctcaacgagccttctgcggatgcgccggccgccctttaccagaccatcgaggagaacataaagatttttgaagaggaagaggtcgagttcatttcggtccctgtccctgagtttgcagatagcgaccccgcaaatatcgtgcatgatttcaacaagaagttgaccgcatatctggacctaaatctggataagtgctacgtgattcccctgaataccagcatagttatgcctccacgaaacctgcttgagttgctaataaatatcaaggctggcacttatttaccacaatcttatcttattcacgagcatatggtgattactgatcgcatcgagaatatcgaccatctcggattcttcatttatagactttgtcacgacaaggaaacctacaagctgcaacgtagggaaactatcaagggaatccaaaagcgagaggcctcaaactgcttcgctatccgtcatttcgagaataagttcgccgtggagactctgatttgttcttag

SEQ ID NO: 191527 - DNA, 693 bp, synthetic construct
  misc_feature 1..693: note = Description of Artificial Sequence: Synthetic coding sequence
  source 1..693: mol_type = other DNA
atggtgaagatcagcttccagcccgccgtggccggcatcaagggcgacaaggctgacaaggcatctgcctctgcacctgctcctgctagcgctactgaaattctgctgaccccagcccgagaggagcagcctccccaacaccggtctaagagaggtggctcagtcggaggggtgtgctacctctcaatgggaatggtagtgctgctgatgggtctggtgttcgcgtccgtatacatttatcgctatttttttctcgcacagctagctcgggataatttttttaggtgtggcgttttatatgaggactcgctgagctctcaggtgagaacgcagatggagttggaggaagatgttaagatttatttagacgagaactacgagaggataaacgtgcccgtgccacagttcggtgggggtgatccagcagacattatccatgatttccaacgtcgcggcacatatctccctcagacatatatcattcaggaagagatggtcgtgaccgagcatgtgtcagacaaagaggcactgggaagtttcatatatcatctgtgtaacggaaaagatacgtatcggctgcgcaggcgggctacacggcggcgaattaataagcgtggagccaagaattgtaacgcaattcggcacttcgagaatacattcgtggtggagacactgatatgcggggtggtatag

SEQ ID NO: 191528 - DNA, 804 bp, synthetic construct
  misc_feature 1..804: note = Description of Artificial Sequence: Synthetic coding sequence
  source 1..804: mol_type = other DNA
atggtgaagatcagcttccagcccgccgtggccggcatcaagggcgataaggccgacaaggcatcagccagcgcccccgcacccgccagtgcgactgagatcctgctgacccccgcccgtgaagagcaacctccccaacatcgcagcaaacgcgggggaagcgtagggggtgtgtgctatctgtcaatgggcatggtagtattattgatgggccttgtctttgctagtgtgtatatctaccgctacttttttctggcacagcttgctcgtgataacttcttccggtgtggcgtgctgtacgaggacagtttaagctctcaagttcgaactcagatggagctggaggaggacgtcaagatttacctggatgaaaattatgaacgaattaacgtgccagtcccacagtttgggggaggcgacccagctgacattatacacgacttccagagaggactcacagcttaccacgacatttctctggacaagtgctatgtcatcgagctgaacaccacgatcgttttgccgccacgcaacttttgggagcttcttatgaacgtgaaaagaggcacctatttgcctcagacatatattatccaagaggagatggtcgtcacagaacatgtgtccgacaaagaggcactaggtagttttatctaccacttatgcaacggcaaagatacttacagactgaggcggcgagcaacacggagaagaattaacaaacgaggcgctaaaaactgcaatgccatccggcatttcgaaaacacgttcgtcgtggagaccctgatctgcggcgtggtatag

SEQ ID NO: 191529 - DNA, 663 bp, synthetic construct
  misc_feature 1..663: note = Description of Artificial Sequence: Synthetic coding sequence
  source 1..663: mol_type = other DNA
atggtgaagatcagcttccagcccgccgtggccggcatcaagggcgataaagccgacaaagccagtgcctcagctcccgccccggcgtccgcaactgagatcctcttgacccctgctcgccttgcgcgggacaatttttttcgatgtggagtactgtatgaggacagcctgagcagccaggtacgtacccagatggagctagaagaggacgttaagatctatctcgatgagaactatgaacgcattaatgtacccgttcctcagtttggtggaggagaccctgcagatataattcatgacttccagcgtggattgacagcttaccatgacatttccctcgacaaatgttatgttatcgaacttaacactaccatcgtactgcccccccgaaatttctgggaactgttaatgaacgtgaagagggggacatatctccctcaaacctacattattcaggaagaaatggtggtgacagaacatgtaagcgataaggaggccttaggcagctttatctaccacttgtgtaacggaaaagacacttacagacttcgtcgtagagcaactagacggaggattaataaaagaggcgctaagaactgcaacgcgattagacactttgaaaacaccttcgtggtagaaaccctgatctgcggggttgtgtag

SEQ ID NO: 191530 - DNA, 543 bp, synthetic construct
  misc_feature 1..543: note = Description of Artificial Sequence: Synthetic coding sequence
  source 1..543: mol_type = other DNA
atggtgaagatcagcttccagcccgccgtggccggcatcaagggcgataaagcggataaggcctcagcttccgccccggcacctgcaagcgccacggaaatccttttaactccagcgcgagaggagcagcccccccagcacaggtccaaacggggagggtctgtgggcggtgtgtgttacctgtctatgggcatggtggtattgctgatggggttggtgtttgcaagtgtctatatatatcggtacttcttcctggcccaattagctagagacaacttctttaggtgtggtgtcctctacgaggactccctgtccagtcaagtgaggacccagatggaactggaagaggacgtcaagatttatctggatgagaactatgagaggatcaatgtgcctgtgccgcaatttggcggcggagatcctgccgatataatccatgatttccagcgaggattgactgcttaccacgacatctccctggataagtgctacgtgattgaattgaatactacgattgtgctgccaccaagaaatttctggtag

SEQ ID NO: 191531 - DNA, 1839 bp, synthetic construct
  misc_feature 1..1839: note = Description of Artificial Sequence: Synthetic coding sequence
  source 1..1839: mol_type = other DNA
atggccgccgccggccggctgcccagcagctgggccctgttcagccccctgctggctggccttgccttgttaggggtgggccctgtgcccgcccgcgcactgcacaatgttactgccgagttgttcggagcagaggcttgggggactttagcagctttcggggacttaaactcggacaaacagaccgatttattcgtgttacgcgagcgcaatgacctcatagtgtttctggcggaccaaaacgcgccttacttcaaaccaaaggtcaaggtctcgttcaagaatcattctgcacttatcaccagcgtcgttccgggggactacgacggcgatagtcaaatggatgttctactcacctacctccccaaaaactacgcaaagagcgagttgggtgccgtgatcttctggggccaaaatcagacattggacccgaacaacatgaccatcctgaataggacttttcaggacgaaccactcatcatggattttaacggcgacctgatcccggacatttttggaattacaaacgagagcaatcagcctcagatcttgttgggcgggaatcttagttggcatcccgccctgactacaacctccaaaatgcggatccctcacagtcacgctttcatagacttgacggaagattttacagccgacctattcctgactactctaaacgccacaacgagcacttttcagttcgaaatctgggaaaatttggacgggaacttctctgtgagtacaatactggagaagccacagaacatgatggtggtcggtcagagtgccttcgcagactttgatggggatggccatatggaccatttattgccgggatgtgaggacaagaattgtcaaaagtccacgatatacttggtgcgatctggaatgaaacaatgggtgcccgtgctgcaagatttcagcaataaggggacactctggggcttcgtgccttttgtagacgaacagcagcctacagaaattcctattccgatcaccctgcacataggggattacaacatggacggctatccggatgctctggtgattttgaagaacactagtgggtccaatcagcaggcctttcttcttgagaacgtgccatgtaataacgcttcatgcgaggaagcgagacgcatgtttaaggtgtattgggagcttaccgacctgaaccagatcaaggacgctatggtagcaaccttcttcgatatttacgaggacggcatccttgacattgtggtattatccaaaggatataccaaaaacgatttcgcaattcacacgttgaaaaataactttgaggccgatgcgtatttcgtgaaagtgattgtgttatctgggctgtgtagcaatgactgccctcggaaaataacaccctttggagtgaaccagccagggccctatatcatgtatactacagtggacgcaaacggctatctgaagaacggtagtgccggacagctcagtcagtcagcccaccttgctctccagctgccctacaacgtcctgggtcttgggcgcagcgctaacttcctcgaccacctgtatgtgggcattccccggccatcaggagaaaagagtatacgcaaacaggagtggacagctatcattcccaatagtcagttgattgtgattccttacccccacaacgtcccgagatcatggtccgcgaagctctacttaacacccagcaatatcgtcttgctgactgcaatcgctttgataggcgtttgtgtattcattctggccattattggcatcctacactggcaggaaaagaaggcagatgacagagaaaagcgccaggaagcacaccgcttccattttgatgctatgtag

SEQ ID NO: 191532 - DNA, 819 bp, synthetic construct
  misc_feature 1..819: note = Description of Artificial Sequence: Synthetic coding sequence
  source 1..819: mol_type = other DNA
atggacggctaccccgacgccctggtgatcctgaagaacaccagcgggtcaaaccaacaggcatttctgcttgagaatgtgccatgcaacaacgcctcatgtgaagaggctagacgtatgtttaaagtgtactgggagttaaccgatcttaatcaaataaaagacgcgatggtcgccacattcttcgacatctacgaagatggcatcctggacatcgtggtgctgtcgaagggctataccaaaaatgattttgccatccacaccttgaaaaacaacttcgaggcagatgcctatttcgtgaaagtcatcgtgctgagcggattgtgctctaacgattgcccgaggaagatcactcccttcggcgtgaaccagcccgggccctacatcatgtatacaacagtagatgctaacggctatctgaagaacggttccgctggccaactctctcagtccgcccacctcgctctgcagctgccctacaatgtgctgggcctgggtcgcagtgcaaactttctggatcatctgtacgttggcatccctcgcccttccggtgagaagtctattagaaagcaagagtggaccgctattatccccaatagccaacttattgtcatcccttatccccacaatgtgcccaggtcttggagcgcaaaattatacctgaccccgtccaacattgtgctgctgaccgctattgcgttaattggtgtttgtgtctttattctggctatcattggaatcttgcactggcaagagaagaaggccgacgatcgggagaaaaggcaggaggcccatcgtttccattttgacgccatgtag

SEQ ID NO: 191533 - DNA, 1074 bp, synthetic construct
  misc_feature 1..1074: note = Description of Artificial Sequence: Synthetic coding sequence
  source 1..1074: mol_type = other DNA
atgatggtggtgggccagagcgccttcgccgacttcgacggcgacgggcatatggaccacctgctacccgggtgtgaagataagaactgtcaaaagtcaaccatatatctcgttcgctccggcatgaagcagtgggtgccagtcctgcaggactttagcaacaaagggaccttgtggggattcgtgcctttcgtggatgaacagcagccaaccgaaatccctattccgatcacactccacataggggactacaacatggatggatacccagatgccctggtgattttgaaaaataccagcgggtctaaccagcaggcatttctgctggagaacgtgccttgcaataacgccagctgtgaggaagcgcgacgtatgtttaaagtgtactgggagctgacagatcttaatcagataaaagatgcaatggttgcgacctttttcgatatctatgaggacggtattctcgatatcgtggtcctcagtaagggctatacaaagaatgacttcgcgatccacacactgaagaacaactttgaagccgacgcatactttgtcaaggtgatcgttctcagtggcctctgcagtaatgattgcccccgtaaaattacaccatttggcgtcaatcagccggggccatacattatgtacaccaccgtggacgccaacgggtaccttaagaatggctcggctggccagttgagccagagtgctcaccttgccctgcagttaccatataatgtacttggcctagggagaagcgccaactttttagaccatctctacgtgggcatcccaagacccagcggggagaagtccattcgcaaacaggaatggacagcaatcatcccgaatagccagctcatcgtcatcccctaccctcataatgtaccccggagttggagtgccaaactttatcttacaccctcaaatattgtactgctaacagccatcgcactgataggggtctgtgtgttcattctggccattatcggaattttgcactggcaggagaaaaaggcagacgatagagagaagcggcaagaggcacaccggttccactttgacgcaatgtag

SEQ ID NO: 191534 - DNA, 1395 bp, synthetic construct
  misc_feature 1..1395: note = Description of Artificial Sequence: Synthetic coding sequence
  source 1..1395: mol_type = other DNA
atggacgtgctgctgacctacctgcccaagaactacgccaagagcgagttaggcgccgtgatattctggggccaaaatcagacactggaccctaataatatgaccatcctcaacagaaccttccaggatgagcctctcatcatggatttcaatggcgacctgatccccgatatcttcgggataacaaacgagtccaatcaaccccagattcttctgggaggcaacctctcctggcatccggccctaactacgaccagcaaaatgcggattccccacagtcacgcctttatcgacctcacagaagattttaccgccgaccttttcctaaccacgttaaatgcgactacgtcaacatttcagttcgaaatttgggagaacctggatggaaacttctccgtatccactattttagagaaacctcagaacatgatggtagtaggccagagcgcctttgctgactttgacggagatggtcatatggatcacctgctgcccggctgtgaagacaagaactgccaaaaatccaccatttatttagtacgatccgggatgaagcagtgggtgcccgtactgcaggacttcagtaacaagggaaccctttggggtttcgtccctttcgtggacgaacagcagccaactgagattccaataccaatcactctccatataggcgactacaacatggacggatacccagatgccttagtgatcctgaagaatacatcagggagtaatcagcaggcttttctgctggagaatgtcccttgcaataacgcttcatgtgaggaggctcggcgaatgttcaaagtctactgggaactgacagacctaaatcagataaaagacgctatggtagcaacgttcttcgacatctacgaggacggaattctagacattgtggtgttgtcgaagggttacacaaaaaatgactttgccatccacacactgaagaacaattttgaggctgacgcttacttcgtaaaggtcattgtcctctccggactttgcagcaacgattgcccaagaaaaataacacccttcggagtgaaccagcctgggccctatattatgtatacaaccgtggatgcgaacggctacctgaaaaacggatccgccggccaactgtcccagagtgcccatctagccctgcagttaccatacaacgtgctcggattaggccgcagcgctaacttcctcgatcatctttacgtaggaatcccacgcccgtcaggggagaagtcgatacggaaacaggaatggacagccatcatccctaacagccagctcatcgtaatcccatacccacacaatgtgcctcgcagctcccatcgctgtttatgcttccacctgggcaacaattggcactttacactggctggcaaagagtcaaggtag

SEQ ID NO: 191535 - DNA, 1044 bp, synthetic construct
  misc_feature 1..1044: note = Description of Artificial Sequence: Synthetic coding sequence
  source 1..1044: mol_type = other DNA
atgagcctgctgtgccggaacaagggctgcggccagcacttcgaccccaataccaatctacctgacagctgctgccatcatcccggggttcccatcttccacgacgccctgaaagggtggtcttgctgcaggaagcgcactgttgacttttcagagttcctgaacatcaagggatgcacaatgggtcctcactgtgcagagaaactgcccgaggcacctcagcctgaaggccctgccacttctagtagcctgcaggagcagaagcccctgaacgtcattcctaaaagcgctgaaaccttacgaagagagcgtccaaagtcagagttaccactaaagttgctccctctgaacatctcacaggcactggagatggccctcgaacaaaaagagctggatcaagaaccgggcgctgggctggattctctcattcgcacaggatcgtcatgtcagaaccccggttgtgacgccgtctaccaggggcctgagagcgacgccacaccttgtacttaccaccctggggcgcccaggttccatgagggtatgaagtcctggagctgctgcgggatccaaacgctggactttggcgcatttctcgcacaaccaggttgccgcgtgggccggcatgactggggaaaacaattgccggcctcatgccgccatgattggcaccaaactgactcccttgttgttgtgactgtctatggacaaattcctctccccgcttttaattgggtgaaagcaagccagacagagcttcacgtccatatcgtcttcgacggaaaccgagtgttccaggcacaaatgaagctttggggggtcatcaacgtggagcagtcaagtgtgttcctgatgcccagccgagtcgagatttccctcgtgaaggccgaccccggcagctgggcacagctggagcacccagacgccctggctaagaaagccagggcaggcgtggttctagagatggacgaagaggagtctgatgatagtgatgatgatcttagttggaccgaagaggaagaggaggaagaggccatgggtgaatag

SEQ ID NO: 191536 - DNA, 990 bp, synthetic construct
  misc_feature 1..990: note = Description of Artificial Sequence: Synthetic coding sequence
  source 1..990: mol_type = other DNA
atgagcaccgacagctgctgccaccaccccggcgtgcccatcttccatgacgccctgaaggggtggtcttgctgtcgaaagcgaaccgtggattttagcgagttcctcaatattaagggctgtaccatgggaccacactgcgcagagaaacttcctgaagccccccagcccgagggcccagctacttctagttcactgcaagaacagaagccattgaatgtgatccctaagagcgccgaaactctgagacgcgagcgacccaagtcagaacttcctctgaagctgctcccactgaacattagccaggctttagaaatggcgttagaacagaaagaattggatcaggagcccggagccgggctggactcactgattcgcacgggctcatcctgccagaaccccggttgcgatgccgtctaccaggggcccgaatctgatgctacaccgtgcacttaccatcctggggctcctagatttcatgagggcatgaaatcttggtcatgctgcgggatacagaccctggactttggtgcctttttggctcagcccggttgtagggtgggtaggcatgactggggaaagcagcttccggcttcatgccgccacgattggcaccagacggactcgctggtcgtagtgaccgtgtatggtcagatcccactcccagccttcaattgggtcaaggcttcacagactgagctccatgtgcacatcgtgttcgacggtaacagagtgttccaggcacagatgaaactgtggggggttattaacgtggaacagagctccgtgtttttaatgccatctagggtcgagatttctctggtgaaagccgaccctggttcctgggcccagctggagcatcctgacgcattagccaaaaaggcacgcgctggggttgtactcgagatggacgaggaggagagcgatgacagcgatgacgatttgtcatggaccgaagaggaagaggaagaggaggctatgggggagtag

SEQ ID NO: 191537 - DNA, 603 bp, synthetic construct
  misc_feature 1..603: note = Description of Artificial Sequence: Synthetic coding sequence
  source 1..603: mol_type = other DNA
atgttccggaagggcaagaagcggcacagcagcagcagcagccagtccagcgagatcagcacaaagtccaagtctgtagactcatccctcggcggcctaagcagaagcagcacggtggcttctcttgacacagactctacaaagagtagcggacagagcaataacaattctgatacatgcgctgagttccgtattaaatacgtgggggctatcgagaaactgaaattgtccgaagggaaaggattggaagggccccttgacttgatcaactatatcgacgttgcccagcaggacggaaagctgccctttgtcccaccagaggaggaatttatcatgggcgtttcaaaatacggtattaaggtgtctacatctgaccagtacgacgtgttgcaccggcacgccctgtacctcattatacgcatggtgtgctatgacgacggtcttggcgctggcaagtcactccttgcactgaaaacaacagacgcctcgaatgaagaatatagtctgtgggtgtatcagtgtaattcacttgaacaagctcaggccatctgcaaggtgcttagcacggcttttgactccgtgctgacaagtgaaaaaccctag

SEQ ID NO: 191538 - DNA, 603 bp, synthetic construct
  misc_feature 1..603: note = Description of Artificial Sequence: Synthetic coding sequence
  source 1..603: mol_type = other DNA
atgttccggaagggcaagaagcggcacagcagcagcagcagccagtcctccgagatcagtaccaaatctaagtctgtggacagcagtctcggagggctctcccgctcctccaccgtagccagtctagatactgattctactaaaagcagcggtcagagcaataacaacagcgacacctgcgctgaatttaggataaagtacgtgggcgccatcgagaaactgaagctgagcgaaggaaagggtctagaaggacccctcgatctgatcaactatatcgatgttgcccagcaagatggcaagttgcctttcgtccccccagaagaagagttcattatgggagtcagcaagtatggtattaaagtttccacatctgatcaatacgatgtcctccaccggcatgccctgtatctaattatccggatggtttgctacgatgatggtctaggggcaggtaagtcactcctggcactcaagactaccgacgcaagcaatgaggagtattccctttgggtgtaccaatgcaattctcttgaacaggcgcaggccatctgcaaagtgttgagcacagccttcgattctgtattaacctctgagaagccatag

SEQ ID NO: 191539 - DNA, 255 bp, synthetic construct
  misc_feature 1..255: note = Description of Artificial Sequence: Synthetic coding sequence
  source 1..255: mol_type = other DNA
atgttccggaagggcaagaagcggcacagcagcagcagcagccagtcctcagagatcagtacaaagtccaaatcagtcgattcaagtctggggggcctctccagaagcagtactgtagcgtcactcgataccgactccaccaaaagtagcggccaatccaataataactctgacacttgcgccgagttcaggattaagtacgttggagccatcgaaaaactaaagttaagtgagggaaagggactggagggatag

SEQ ID NO: 191540 - DNA, 291 bp, synthetic construct
  misc_feature 1..291: note = Description of Artificial Sequence: Synthetic coding sequence
  source 1..291: mol_type = other DNA
atgttccggaagggcaagaagcggcacagcagcagcagcagccagtccagcgaaatttctacaaaaagcaagtccgtcgattcttcactgggcggcctgtctcgcagtagtacggtcgcctcactggacacagactctactaaatcgtcagggcagtctaacaacaattccgatacatgcgccgaattcaggatcaaatacgttggcgcgatcgaaaagttgaaactgagcgagggaaaagggctggagggcccgctggacctgatcaattatatcgatgtggctcagtag

SEQ ID NO: 191541 - DNA, 261 bp, synthetic construct
  misc_feature 1..261: note = Description of Artificial Sequence: Synthetic coding sequence
  source 1..261: mol_type = other DNA
atgttccggaagggcaagaagcggcacagcagcagcagcagccagtcttcagagatcagtactaaatccaaatccgtggacagcagcttgggggggctcagccgatccagcaccgtggcttctcttgacactgattcgaccaagtccagtggccagtccaacaacaactcagatacgtgcgccgaatttagaattaaatacgtcggggcaatcgagaagttaaaattgtccgaaggaaagggactggaggggcctctctag

SEQ ID NO: 191542 - DNA, 411 bp, synthetic construct
  misc_feature 1..411: note = Description of Artificial Sequence: Synthetic coding sequence
  source 1..411: mol_type = other DNA
atgttccggaagggcaagaagcggcacagcagcagcagcagccagtccagtgaaattagcactaagagcaaatctgtggactcatctctgggagggttatcgagaagcagcacagtggcctcactggacacggatagcactaagtcctctgggcaaagcaacaacaatagcgacacctgcgcggagttccgaatcaagtacgtcggcgcgattgagaagctgaagttgagtgaaggaaagggtctcgaggggccattagacctgattaactacattgatgtggcccagcaggatgggaagctcccgtttgtgcctcccgaagaggaatttatcatgggcgtgagcaaatacggaattaaagtatcaacaagcgatcaatatgatgttctgcacagacacgccttatactag

SEQ ID NO: 191543 - DNA, 345 bp, synthetic construct
  misc_feature 1..345: note = Description of Artificial Sequence: Synthetic coding sequence
  source 1..345: mol_type = other DNA
atgttccggaagggcaagaagcggcacagcagcagcagcagccagtcttcagaaatctcaacaaagagcaaatctgtggattcctcacttggcggcctttcaaggagctcgacagtcgcgagcttggacacagattcgacaaaatcttccggccaaagcaataataacagcgatacatgtgcagaatttagaattaagtacgtgggcgcaattgagaagctgaagctttccgagggtaagggcctggagggcccgctcgacctcataaactacatcgatgtcgcacagcaagacggtaagctgcctttcgtgccacctgaggaagaatttataatgggggtgtag

SEQ ID NO: 191544 - DNA, 198 bp, synthetic construct
  misc_feature 1..198: note = Description of Artificial Sequence: Synthetic coding sequence
  source 1..198: mol_type = other DNA
atgttccggaagggcaagaagcggcacagcagcagcagcagccagtcctcagaaatctcaacaaagtcaaagagcgttgacagttcactgggcggattaagcaggagctccacggtcgctagcctggacactgactctacaaaatcatctggacagtcgaacaataattcagacacatgcgccgaatttcgcatttag

SEQ ID NO: 191545 - DNA, 453 bp, synthetic construct
  misc_feature 1..453: note = Description of Artificial Sequence: Synthetic coding sequence
  source 1..453: mol_type = other DNA
atgttccggaagggcaagaagcggcacagcagcagcagcagccagagctccgaaatctcaacaaaatcaaagtctgtggattcctccctcggtggtctgtcccgatcatctaccgtggcctccctcgatacggattccacgaagtcatccgggcagtctaacaataatagcgacacttgtgctgaatttcggattaagtacgtgggcgcgattgagaagttgaaacttagcgaaggcaagggtttggagggtccgttggacctcattaattacatcgacgtcgctcagcaggacggaaagttgccctttgttcctccagaggaggagttcattatgggggttagcaagtacggaatcaaggtctccacctctgatcagtacgaacaggctcaggcaatttgcaaggtgctgagcaccgcgtttgattctgtcctgacctccgagaagccctag

SEQ ID NO: 191546 - DNA, 534 bp, synthetic construct
  misc_feature 1..534: note = Description of Artificial Sequence: Synthetic coding sequence
  source 1..534: mol_type = other DNA
atgcccgtgaagcggagcctgaagctggacggcctgctggaggagaattccttcgatccaagtaaaatcactaggaagaagtctgtgatcacgtactcaccgactaccgggacctgtcagatgagtctatttgctagtcctaccagctccgaggaacagaagcaccggaacgggctgtccaatgaaaaacgaaagaaacttaaccacccaagcctcacagagagcaaggaatccactacaaaagacaatgatgaatttatgatgctgctgagcaaagtggagaaactctcagaagagatcatggagatcatgcagaacctcagcagtatacaggctctggaggggagtagggagcttgaaaatttgatcggtatttcttgcgcctcacacttcctgaagcgcgaaatgcaaaagacaaaggaactgatgacaaaggtgaacaaacagaagctgttcgagaagtccacagggctgccacataaggctagcagacacctagactcttatgaatttctcaaggccattttgaactag

SEQ ID NO: 191547 - DNA, 513 bp, synthetic construct
  misc_feature 1..513: note = Description of Artificial Sequence: Synthetic coding sequence
  source 1..513: mol_type = other DNA
atgcccgtgaagcggagcctgaagctggacggcctgctggaggagaattccttcgaccccagtaagatcacaaggaagaagtccgttataacctacagtcccacgaccggaacttgtcagatgtctctcttcgcatctcccacttctagcgaggagcagaagcatagaaacggactgagtaacgagaagcgaaaaaaattgaatcaccccagcctgaccgagagcaaggaaagtacaacgaaggataatgacgagtttatgatgttgttatctaaagtggagaaattgtcagaagaaattatggaaattatgcaaaatctatcctcaattcaggccttagaaggctccagggagttggaaaatttgatcggtatatcctgtgcatcccacttcctaaaaagggaaatgcagaaaactaaggagctgatgactaaagttaacaaacagaaactattcgaaaagagcactggccttcctcataaaggtcaacctcagatgtctcaacctctctag

SEQ ID NO: 191548 - DNA, 651 bp, synthetic construct
  misc_feature 1..651: note = Description of Artificial Sequence: Synthetic coding sequence
  source 1..651: mol_type = other DNA
atgcccttcgcccccgtggcccaggcccgggtgcagtggcacgacttccggtcgttgcaacacctgctccctgcttttaaaaggttttcctgtttgtcactgggtagttcttgggattacagcgtaaagagatcattaaagctggacgggctgcttgaagaaaactcattcgatccgagcaagattacgagaaaaaaaagtgtaattacttatagccctacaacaggaacctgccagatgtctctcttcgcaagtcccacgtctagcgaagagcagaaacatcgaaacgggttgtccaacgagaaacggaaaaagctgaaccatcctagccttaccgagtccaaagagagtactacgaaggataacgatgagtttatgatgctgctttcaaaagtcgagaagttaagtgaagagatcatggaaatcatgcaaaacctaagttccattcaagctctggaaggctcgcgtgagttggaaaatctgataggcatctcatgtgctagccacttcctgaagagggagatgcaaaaaacgaaagaattgatgacaaaagttaacaagcagaagctattcgaaaagtccactgggctcccccacaaggcctcacggcacctggacagctatgagttcctgaaagcaattctgaattag

SEQ ID NO: 191549 - DNA, 3540 bp, synthetic construct
  misc_feature 1..3540: note = Description of Artificial Sequence: Synthetic coding sequence
  source 1..3540: mol_type = other DNA
atggccccccggccccgggcccggcccggcgtggccgtggcctgctgttggctcctgacggtggtgctgaggtgctgcgtgagcttcaacgtggacgtgaagaattccatgactttcagtggccccgtggaagacatgtttggatatactgtgcaacagtacgagaacgaagaggggaaatgggtcctcataggttctcctctcgtgggccagcctaaaaataggacgggggacgtttataagtgtccagtgggccggggcgaatcactgccttgcgtcaagttggatctaccggtaaacacttccataccgaatgtgactgaagtgaaggaaaacatgaccttcggttccacactggtgactaacccgaatggcggctttctcgcctgtggccccctgtatgcctacagatgtgggcatctgcactacaccactggcatttgctcagacgtctccccaacatttcaggtggtaaatagcatcgcccctgtgcaggagtgctctacacagctggatattgtgatagtgctggatgggtctaatagcatatatccttgggatagtgtgactgctttcttgaacgatctgctggagcgtatggacattggccccaagcagacccaggtgggcatcgttcagtatggggagaacgtcacacatgaatttaatctgaataagtattcttctaccgaggaagtcctggtggccgccaagaaaattgtgcagagggggggaaggcagacgatgacagccttgggaatcgatacagcaaggaaggaagccttcacagaagcccggggagcccggcgaggcgtgaaaaaagtgatggtcattgtcaccgatggagagagtcacgacaaccataggctgaaaaaagtcattcaggattgtgaggacgagaacatccaacgcttcagcatcgccattttgggttcctacaatcgcggcaatctgtccaccgaaaagtttgtggaggaaatcaagagcatcgcaagtgagccaactgagaaacactttttcaatgtttcggatgaattggccctggtgaccattgtaaagacactcggtgaacgaatttttgccctggaagctactgccgaccagagtgccgcctcattcgagatggagatgtctcagactggattctctgcccattactctcaggattgggtgatgctgggcgctgttggagcttacgactggaatggcacagtagtgatgcagaaagccagccagatcattatcccccgcaataccaccttcaatgtagaatctacaaaaaaaaacgaaccactggcttcctacctgggatacactgtgaatagtgctactgcgtcctccggcgacgtgctgtatatcgctggacaaccaagatacaaccacactggacaggtcattatttaccgcatggaggatgggaacattaaaattctgcagactttgtccggcgagcagatagggagttacttcggctcaatcctgaccaccactgacatcgacaaagattctaatacagatattctcctcgtaggtgcacctatgtacatgggaaccgaaaaagaggaacaaggcaaagtatacgtatatgcactgaaccaaacacggtttgagtaccagatgagcctggagccaataaaacaaacctgctgctcctccagacagcataacagttgcaccaccgaaaacaagaatgagccgtgcggcgcccggttcggcacagcaatcgcagccgtgaaggatctcaatctggatggcttcaatgatatcgtgatcggcgcacccctcgaagacgaccacggtggagcagtgtatatctaccacggctcaggcaaaaccatccgaaaggaatacgcccagcggatcccctccggtggcgatgggaagacattgaaattctttggccagagcatacatggggagatggacctgaatggtgatggtctgacagatgttacaattggaggacttggaggcgcagcactcttctggtctagagatgtggccgttgtaaaagtgacaatgaatttcgaacctaacaaggtaaatattcagaagaagaactgtcatatggagggcaaagaaactgtctgtatcaatgcaactgtgtgcttcgacgtaaagcttaaatcaaaggaggacactatctacgaggccgatcttcagtatcgggtgacccttgatagcttgagacagatctctaggagctttttttccggaacacaggagcgcaaagtgcagaggaatatcaccgttaggaaaagcgaatgcaccaaacactccttctatatgcttgacaagcatgactttcaggacagcgtgaggattacgctggacttcaatctcaccgatcccgagaatggccctgttttagatgactccttgcccaacagtgtgcacgagtatattccctttgccaaagactgtgggaacaaagaaaaatgcatctctgacctgtctcttcatgtcgcgaccactgagaaagaccttctgatcgtgcggtcccaaaatgacaagtttaatgtgagtctgaccgtcaaaaatacaaaagatagcgcatataatacaagaacaatagtccactatagccccaatctggtgtttagtggaatcgaagcaatccagaaggactcttgcgaatcaaaccacaatatcacctgcaaagtgggctatcccttcctccgacgcggtgaaatggtgacctttaaaatcctgttccagtttaacactagctatcttatggaaaatgtcacgatttacctgtccgcgactagcgattctgaagaacccccggagactttaagcgataacgttgtcaacatatcaatacctgttaagtatgaggtcggattgcagttctattcatctgcaagtgagtaccacatttccatagccgcaaacgagaccgtccctgaggttattaacagtactgaggacattggaaatgagattaacattttttaccttatccgcaagtcgggcagttttcccatgccagagctgaagctcagtatcagcttcccgaatatgaccagtaatggatatccagtgctttatcccaccgggctgagttcatcagaaaacgcaaactgtcgcccccatattttcgaagacccgttctctattaactcaggcaagaagatgacgacttcaacagaccatctgaagcgcgggacaattctggattgcaatacttgcaaatttgccactataacgtgtaacctcacttcctctgacatcagccaggtgaatgtctccttgatcctgtggaaacctacattcataaagtcctattttagctcactgaatcttactatccggggcgaactcaggtcggaaaacgcttcactggtcctttccagttccaaccaaaagagggaactggctatccagatctccaaggacggactgcctgggcgagttcctctgtgggtgatcctcttgagtgctttcgctggccttctgctgctgatgctcctcatccttgctttgtggaagatcggattttttaagcggccactcaaaaagaaaatggagaagtag

SEQ ID NO: 191550 - DNA, 3567 bp, synthetic construct
  misc_feature 1..3567: note = Description of Artificial Sequence: Synthetic coding sequence
  source 1..3567: mol_type = other DNA
atggacctgccccggggcctggtggtggcctgggccctgagcctgtggcctggatttaccgacacgttcaatatggataccagaaagcccagggtcattcccggctcccgcacagctttttttggttacaccgtacagcaacacgacatcagtggcaataaatggctcgtggtgggggcgcccttagagacgaatggttatcagaaaacaggggacgtctacaaatgtccggttattcatggaaactgtaccaaactcaacctgggtcgagtgacgctgagtaacgtgtctgagcgtaaggataacatgagactgggtttgtccctggctactaatccaaaggataattcatttcttgcttgctcacctctatggtcccacgagtgcggctcctcatattataccactgggatgtgctcgcgcgtcaatagcaattttcgcttttccaaaaccgtcgccccagccttacaacggtgtcagacttacatggatattgtcatagtactggacgggtccaactcaatctacccctgggtggaggtgcaacatttcctgatcaacatcttgaaaaaattttatattggtcccggtcaaattcaagtgggcgtggtccagtatggcgaggatgtcgtgcacgagtttcacttgaacgactaccgctctgtgaaggacgtggtcgaagcagcaagccatattgaacagagggggggcaccgagaccaggaccgccttcgggattgaattcgctagaagtgaggcatttcagaaagggggcagaaagggggcaaaaaaggtaatgatcgtcatcactgacggggagtcccatgattcgcccgatctggagaaggtgatacaacaaagcgagcgcgataatgtaacaagatatgccgtcgcggtcctgggatactataaccgcagaggtatcaaccctgaaacctttctgaacgaaattaagtacatcgcttccgatcctgatgataagcattttttcaatgtgacggatgaggctgccttaaaagatatagtggacgcgctcggggacaggatcttttcactcgaagggacaaacaaaaatgagacttcatttgggctggagatgtctcagaccggattctcatctcacgttgtggaggacggcgttctgctcggtgcagtcggagcctacgattggaacggagcagtgctgaaggaaaccagtgctggtaaagtcatccccctgcgtgagagttacctgaaggaattcccagaggagctcaaaaatcacggggcctacctcggctacaccgtgaccagtgtcgtttcctcccgacaggggcgcgtgtacgtggctggagctccccggttcaatcatacaggaaaagtcatcctgttcacaatgcacaataacaggtccctgactatccaccaagcaatgcgcgggcagcaaataggctcatatttcgggagcgagatcactagtgttgatatcgacggagatggagtcactgatgtgctcctcgttggagctcctatgtatttcaacgaaggtcgagaacgcggaaaggtgtatgtgtatgagctacgtcagaatctgtttgtttacaatgggacactaaaagattcacacagttaccagaatgcccgatttggcagctctatagctagcgtgagggacctgaatcaggacagttataacgatgtagtcgtgggcgctccactcgaagacaatcacgctggggctatttatatttttcacggctttcgagggtctatattgaaaactcctaaacaacgtataaccgcatccgagcttgcaactggactacaatattttggatgtagcatccacggacagctggatctcaacgaggatggcctgatcgatctcgcggttggggcactgggcaacgccgtaattttgtggagcagaccagtggttcaaattaacgcgtcactccatttcgagccgagtaagataaatatcttccacagggactgtaaaagaagtggtagggacgcaacgtgcctcgctgcttttttgtgttttactccgattttcctggccccacactttcagactaccaccgtaggcatccggtacaatgcaaccatggacgagcggaggtatacaccccgtgcacacctggatgagggcggggacagatttacgaaccgagcggtgctattgtcttctggacaggaattgtgcgagaggattaattttcatgtgctggataccgctgactacgtgaaacccgttacattctctgtcgaatatagcctcgaagaccctgatcacgggcctatgctggatgacggttggcccactaccttaagagtctcggttccattttggaacggttgcaacgaggatgaacactgtgtccctgacctggtgcttgacgcccgcagcgacctcccaaccgcgatggagtattgccagcgggttttacggaagcccgcccaagactgctcggcctataccctgtcctttgataccacagtgttcattatcgaaagcacgcggcagagagtcgctgtggaggctactctggagaaccggggagagaacgcctactctactgtcctaaatatttcccagtccgccaacctacagtttgcttcattgatccaaaaggaagacagtgacgggtcgatcgaatgcgtgaacgaggaacggcgcctgcagaagcaagtttgcaacgttagttacccattcttccgggccaaggccaaggttgcctttcgcctagatttcgaattttcaaagagcatctttttgcatcatcttgagattgaacttgctgcaggatcagattctaatgagcgcgacagtacgaaagaggacaacgttgcccctctgcggtttcacttaaagtacgaggcagacgtactgttcacacgatcaagtagtttgagccattacgaggtgaagccgaacagctcactcgaaaggtacgatggaatcggaccgccgttctcgtgcattttccgaatccagaatctgggactcttcccgatccatgggatgatgatgaagattaccatcccaatcgcgacacggagtggaaataggctgctaaagctccgagactttctgacggatgaagcaaatacgtcatgcaacatttgggggaattccacagagtacagaccaacgcccgtcgaggaggatctgaggcgtgcgccgcagctgaaccactccaattcggacgttgtaagcattaattgcaatatcaggctagtgcccaatcaggaaattaattttcacctacttggtaacctgtggctccggagcctcaaggccctgaagtacaagtccatgaaaatcatggtgaacgctgctctccaacggcagtttcactcaccctttatcttccgcgaggaggatccctcccgccagatagtgttcgagatcagtaaacaggaggattggcaggttcctatctggatcatcgtgggatctactctaggaggcctcctgttactggccctgcttgtgttggccttgtggaagctaggttttttccgctccgcacgtaggagaagggaacctggcttagaccctaccccaaaggtgcttgagtag

SEQ ID NO: 191551 - DNA, 3570 bp, synthetic construct
  misc_feature 1..3570: note = Description of Artificial Sequence: Synthetic coding sequence
  source 1..3570: mol_type = other DNA
atggacctgccccggggcctggtggtggcctgggccctgagcctgtggccaggttttacggacactttcaatatggacacccgtaagcccagggtgatcccaggctctaggacagctttcttcgggtatactgtccagcagcacgatatctcaggaaataagtggctcgtggtcggagcgcccctagagaccaatggataccaaaagaccggcgacgtttacaagtgtcccgtaatacacggaaactgtaccaagttgaacctagggcgagtcacgctgtctaacgtatcagagcggaaggataatatgcgactcgggttgagcctggcgacgaaccctaaggacaactcatttttggcgtgctccccactttggtcacacgagtgtggcagttcctattataccaccggcatgtgctctagggtgaattccaattttcggttttctaagaccgtggcgcctgcactgcaacgctgtcagacctacatggatattgtcattgtgttggacggctccaattccatatatccatgggtagaggtgcagcacttcctcattaacattctcaaaaaattttatataggtccaggtcagattcaggtgggcgtcgtgcagtatggcgaggatgtcgtgcatgaattccacttgaatgattaccgcagcgtcaaggacgtggtggaggctgcctcacatattgagcaaaggggagggactgagacaagaactgcatttgggatagagtttgcccggtctgaggcttttcagaaaggagggaggaagggagctaagaaagttatgatagtcattactgacggggagtcacacgactcccccgatctggagaaggtaattcaacagtctgaacgggataacgtgacgcgatatgctgtggctgtgctggggtattacaatcgcaggggaattaaccctgaaacattcctgaatgaaatcaagtacatcgcttcagaccctgatgataaacattttttcaacgtgaccgacgaggctgcactaaaagacatagttgatgccctcggagaccgaatctttagcttggagggaacaaacaagaatgagacttctttcggactggagatgtcccagactgggttctcctctcacgtggttgaggatggggtgttacttggtgcagtgggcgcctatgattggaacggtgcagtcctaaaggagacgtccgccgggaaggtgattccacttagggaatcatatctgaaggagtttcccgaagaactgaagaaccacggagcctatctgggctacacagtgacgtccgtggtgagttcaaggcagggaagggtgtatgtggctggcgctccaaggttcaaccacaccggaaaggtcatcctgtttactatgcataataataggtccttgaccattcaccaggcaatgcgcggccagcagatcggatcttacttcggtagtgagataactagcgtggacattgatggtgatggggtgactgacgtgttgcttgtaggtgctcctatgtatttcaacgaggggagggagcgtgggaaagtctacgtttatgagttacgccagaacctctttgtatacaacgggacgcttaaggactctcatagctaccagaacgctcggttcgggtcgtcaattgcaagtgtgagagatcttaaccaagattcctataatgatgttgttgtgggcgctccgttggaggacaaccacgccggcgctatatacattttccacgggtttcgtgggtctatcctgaaaacaccaaaacagagaatcactgcgtcagaactggccaccggtctgcaatactttggatgctctatacacggccaattggacctaaatgaagacggcctcatcgacctggctgtcggggcgctgggcaatgctgtgattctctggtctcgccccgtggtgcagattaacgccagcctgcactttgagcctagcaagattaatatcttccatcgtgattgcaagaggagcggccgcgatgccacttgtctcgctgccttcctttgcttcacccctatattcttggcccctcactttcagactaccacggtggggattcgttacaatgccacgatggatgagaggagatacacgcctagagctcacttggacgagggcggcgatcggttcaccaaccgtgcagtgctgctgagttcaggccaggagctttgtgagagaatcaatttccatgtgttggatacagccgactatgtgaaaccggtgacattttccgtggaatatagcttggaagatcccgatcacggtcctatgcttgatgacggctggccgacaaccctgcgcgtctctgtcccgttttggaatggctgtaacgaagacgagcattgtgtgccagatcttgtccttgatgcacgcagcgacctaccaacggccatggagtattgtcagagagttctgcgtaagcccgcacaggactgcagcgcatacaccctgtcttttgatactactgtcttcataatagaatctacccgacaacgtgtagccgtcgaggccaccctcgagaaccgaggcgagaacgcatatagcacagtgcttaatatctcccagtccgccaatctacagttcgcctcactgatccagaaggaggactctgacggaagcattgagtgtgtaaacgaagagagacgcctacagaaacaggtgtgtaacgtcagttaccctttttttagagcaaaggccaaggtagccttccgacttgacttcgagttcagcaagagtatctttctccatcatctggagattgaactggctgccgggagcgacagcaacgagcgagactccacaaaggaggataacgtggctcccctgcgtttccatcttaagtacgaagcagacgtcctgtttacccgaagttcaagcctgagtcactacgaagtaaagcccaactcttctctggaacgatacgacggaatcggaccaccattttcctgcatcttcagaatccagaatctcgggctgtttcccatccacggaatgatgatgaaaataaccattcctatcgcaactagaagcggtaatagactcctcaagctgagggactttctcactgacgaagttgcaaacacctcctgtaacatttgggggaatagcaccgagtacaggccaaccccagtggaagaagatctgagacgcgcaccccagctcaatcactctaactctgacgtggttagtatcaattgtaatattcggctcgtgcctaaccaagaaatcaacttccaccttttgggaaatctgtggcttcggagcctcaaggccctgaagtataagagcatgaagataatggttaatgcagcccttcagcggcaatttcacagcccctttatattcagagaagaggatcccagtaggcagatcgtctttgaaatctcaaagcaggaggactggcaggtcccaatctggattatagtagggtccaccctcggggggctgctcttacttgccctgctggtgttggcactgtggaagctcggattttttagaagcgcacgaagacgccgggagcccgggttagatccaacccccaaggtcctcgaatag

SEQ ID NO: 191552 - DNA, 2472 bp, synthetic construct
  misc_feature 1..2472: note = Description of Artificial Sequence: Synthetic coding sequence
  source 1..2472: mol_type = other DNA
atgagccagaccggcttcagcagccacgtggtggaggacggcgtgctcctgggcgcagtgggtgcatacgactggaatggcgcagtactgaaggaaaccagtgcaggcaaagtgatcccactgcgcgagagctacctgaaggagttccctgaggagctaaaaaaccatggcgcatacttaggctacacagtcacttctgtggtgagcagccgacagggaagggtgtacgtggcaggagctcccaggttcaatcacacgggtaaagtaatcttgtttacaatgcacaataatcgcagcctgacaattcaccaagcaatgcggggacagcagatcggctcttacttcggttctgaaatcaccagcgtggacattgatggcgatggagtgaccgacgttctgctcgttggtgctcctatgtattttaacgaaggaagggagcggggcaaagtttatgtttatgagcttcgacagaacttgttcgtgtataatgggaccctgaaagacagccactcttatcagaacgcaaggtttggaagctcaattgcttcagtccgggacctcaaccaagacagctacaatgatgtggtcgttggcgcccccctggaggacaatcatgccggtgccatctatatttttcatgggttccgggggagcattctgaagacccccaaacagaggatcaccgcatccgagctggccacaggactgcagtatttcggctgttcaatccacggacagctggacctaaatgaggatggcctcattgatctggccgtgggagcactcggaaatgcggtcattctttggagtcgccccgttgtgcaaatcaatgcatcactccactttgaacccagtaaaatcaatatcttccaccgggactgtaagagatccgggcgggacgcaacctgcttagcggcgttcttgtgcttcacccctatattcctggcccctcattttcagactaccaccgttggcattcgatacaacgccactatggacgagcgtaggtatacacccagagctcacctggacgagggaggggacagatttaccaatagggctgttctgctgtctagcggacaagagctgtgcgaaaggatcaatttccacgtcctcgacaccgcagactatgtaaaaccagtgacattcagtgtggagtattcactggaggaccctgatcatggacccatgttggacgatggctggcccacaacgctaagggtgtcagtgcctttttggaatggctgtaacgaagatgaacactgcgtgcccgacctggtgctggacgcccgcagtgacctgccaactgccatggaatactgtcagcgcgtgctgcgtaagccagcacaagactgttccgcctataccctctcttttgacacgacagtgtttattatcgagagcacaagacaacgagtcgccgtagaggcaaccctggagaatcggggcgaaaatgcctattccaccgtgctcaatattagccaatcagctaaccttcagttcgccagcttaattcagaaggaggattctgacggctctatagagtgcgttaacgaagaacgccgcctgcagaagcaggtctgcaacgtttcctatcctttctttagggcgaaagcaaaagtcgcattccgacttgactttgaattttctaaatcaattttcctgcaccacctggaaatcgaattagccgctgggagcgacagtaatgaacgggactctacgaaggaagacaacgttgcgccccttagatttcacttgaagtacgaagcagacgttctattcacgagatcgtcttcactgtcgcactacgaagtgaagccaaattcctcgctggagaggtacgacgggattgggccaccgtttagctgcattttccggatacaaaaccttggacttttccccatccacgggatgatgatgaaaatcacaatccctatcgctacgaggagtgggaatagactcctcaagttaagggacttcctgaccgatgaagctaatacaagttgtaacatctgggggaactcaaccgagtatcggcccacccctgtcgaggaagatctgcgccgggccccgcagttgaatcatagcaactcagatgtggtgagcatcaactgcaatattagactcgtccccaatcaagagattaacttccatctgctgggtaacctgtggttacgatctctcaaggcgctcaagtacaaaagcatgaagataatggtcaatgccgcattgcagcgtcagtttcacagcccttttattttcagggaagaggacccttcaagacagatagttttcgaaatcagcaagcaggaggattggcaagtgcctatctggatcattgttgggtcaaccctgggcggcctactgcttctggccctgctggtgctcgccctgtggaaactcggcttttttcgcagcgcacgccggcgcagggagccaggcctcgaccccacccccaaagtactggagtag

SEQ ID NO: 191553 - DNA, 1953 bp, synthetic construct
  misc_feature 1..1953: note = Description of Artificial Sequence: Synthetic coding sequence
  source 1..1953: mol_type = other DNA
atggacctgccccggggcctggtggtggcctgggccctgagcctgtggcctggttttactgataccttcaacatggacactcggaagccacgcgtgattcctggctcacggaccgcattcttcggctatactgtgcaacaacacgatatcagtggaaataaatggttagtcgttggcgccccgctcgagacaaacgggtatcaaaagaccggcgacgtatacaagtgccctgtcatccacggcaactgcaccaaactcaacctgggaagagttacactctcgaatgtgagcgaacgtaaagataatatgcggctgggcctatctctggcgacaaaccccaaggacaattcttttctcgcatgctctccgctgtggtcgcatgagtgcgggtcatcctattacaccaccggcatgtgctcccgggtgaactcaaacttccggtttagcaagactgtagcccccgcactccaaagatgtcagacgtatatggacatcgttattgttctggacgggagcaattccatctatccctgggtcgaagtgcagcacttccttattaatatccttaaaaagttttatattggacccgggcagattcaggtcggcgtcgtacagtacggtgaggatgtggtgcatgaattccaccttaacgactatcgcagcgtgaaagacgtagtggaggcggcctcgcatattgaacaacgcggcgggaccgagacccgaaccgccttcggcatcgaattcgcacgctcagaagctttccaaaagggcggacgtaagggggccaagaaggtaatgatcgtgatcactgatggagagtctcacgactcaccagatcttgagaaggtcattcagcaatcagaacgcgacaatgtcactcgttacgcagtcgctgtgcttggatattataataggaggggcatcaacccggaaacatttctgaatgaaatcaaatacatagcttctgatcctgacgataagcacttcttcaatgtcacagatgaggctgccctgaaggatatagtagatgctcttggagatcgtattttttcactggagggcaccaataagaacgagacctcttttggtttagaaatgagccagacgggtttctcgtctcacgtggtcgaagacggggtcctgctgggagctgtgggtgcctacgactggaacggagccgttctgaaggaaacctccgctggcaaagttatccctctccgagagtcctaccttaaggaattccctgaggagctcaagaaccatggggcctacttgggctacacggttacgtccgtggtgagcagtagacaagggcgagtgtatgttgcgggagccccccgatttaaccatacaggaaaggttattctgtttaccatgcacaacaatcggagtctgaccattcaccaggcgatgcgtggccagcagatcggaagttactttggcagcgaaattacaagcgtggatatcgacggcgatggcgtgacggatgttctgttggtgggagctcccatgtattttaacgagggtagagaacgggggaaggtgtacgtctatgagttaagacaaaatctgttcgtgtataacggcacccttaaagactcccattcctaccagaacgcccgctttgggtctagcatcgctagcgtgcgcgatttaaaccaagatagttacaacgatgtggttgtcggtgcccctctggaggataatcatgccggtgccatttatatatttcatggcttccgaggctctatcttgaagaccccaaaacaacgaatcactgctagcgagctggcgacaggactgcagtatttcgggtgctctatacatggccagttggatctgaatgaggacggactgatagacttggccgtgggagcactcggtaacgcagtgattctctggactcccccccccaaatgctggagcgaggctcctgaggaaacattaagttag

SEQ ID NO: 191554 - DNA, 3546 bp, synthetic construct
  misc_feature 1..3546: note = Description of Artificial Sequence: Synthetic coding sequence
  source 1..3546: mol_type = other DNA
atgggccccgagcggaccggcgccgcccccctgcccctgctgctggtccttgccctgtctcaaggaatcctgaattgttgtctggcctataacgttggactccctgaggccaagatcttttcagggccttcgtccgagcaattcgggtacgccgtacagcaatttattaacccaaaaggcaactggctgttagtcggcagcccctggtctggttttccagagaatcgcatgggagacgtctataaatgccccgtcgatttgtcaacggccacatgtgaaaagcttaacctacagacgtctacctcgatcccaaacgtaaccgagatgaaaacaaatatgtccctcggcttgatcctgacccggaacatggggacgggcggtttcctcacttgcgggccactgtgggcccaacaatgtgggaatcagtattacaccactggagtgtgcagcgacatcagccctgatttccaactgtcagctagtttctctcccgctacccagccttgcccctccctgatcgacgtggtcgtggtttgtgacgaatcaaactccatctatccgtgggacgccgtaaaaaatttcctggaaaagttcgttcagggactcgacatcggacctacgaaaacccaggtgggtctaattcagtacgccaataatcccagagttgtctttaatctgaacacctacaagactaaggaagagatgatcgtcgctaccagtcagacatcccagtacggtggcgacctcaccaatacattcggcgctattcaatacgcaagaaagtacgcatattctgccgcttctggcggacgaagatcagccactaaggtcatggtcgtcgtcacggacggagaaagtcacgatggctctatgttgaaagccgtgatcgatcagtgtaatcatgacaacatcctccggttcggcattgctgtcctcgggtatctcaataggaacgcactggacaccaagaacttgatcaaagagatcaaggccattgcttcaattccaaccgaacgctacttttttaatgtgtccgacgaggcggcgctcctagagaaggctgggacacttggcgaacagatcttcagcatcgagggcaccgtgcaaggtggtgacaactttcagatggaaatgagtcaggtgggcttttccgccgattactcgtcccagaatgatattttaatgctcggagccgtgggcgcattcggctggagcggaaccatcgtgcagaagaccagccatggacaccttatcttcccgaagcaagcatttgaccagatcttacaggatcggaatcattcctcttacctaggctacagcgttgctgcgatcagcacgggagaatccacccattttgtggctggtgcaccacgcgccaactacaccggccagattgtgctgtatagcgtgaatgagaacggcaacatcaccgtgatccaggcacataggggtgatcagattgggagctacttcggcagcgttttatgttctgtcgatgtggacaaggatacgatcaccgacgtcctgctggttggcgccccaatgtatatgtccgacctgaaaaaggaggaggggcgcgtgtaccttttcacaatcaaagagggcattctggggcagcatcagtttctggagggtccagaagggatcgagaatacccgcttcgggtccgccatcgctgcgctgtcggacatcaacatggacggctttaacgacgtgattgtgggatccccgctggagaaccagaactcgggagccgtctatatctacaacgggcaccaggggacaatccgcacgaaatactctcagaaaatccttggatcagacggggcttttagaagccatcttcagtatttcgggcgttcattggacggatatggcgaccttaacggagattctatcactgatgtgagtattggcgccttcggccaagtggtgcaattgtggtcccaatccatcgccgatgtggccatcgaagcctcgttcacaccagagaaaatcactctcgtcaataagaatgctcagatcatcttgaaattgtgtttctccgctaaattcagaccaactaagcagaacaatcaagttgccatcgtctataacatcaccctggacgccgatggattttcatcaagggtgacatccaggggcctcttcaaagagaataatgagcgatgcctgcagaaaaatatggttgtgaatcaggcccagtcttgtcctgaacacatcatttacattcaggaaccgtccgacgtcgtaaatagcctggatcttagagtggatatctctctggaaaatcctggtacgagccccgcgctggaagcctatagtgagactgcgaaggtattttctattcccttccataaggactgtggagaggatggattatgtatctcggacttagtactggacgttcgccagattccagccgcacaggagcagccctttatcgtgtccaatcaaaacaaacgactcactttctctgttacactgaaaaacaagcgcgagagtgcctacaatacagggattgtggtggacttctccgagaatctgtttttcgcctccttctctttgccagtcgacggaaccgaggtgacttgccaggtagctgcttcgcaaaagtctgtcgcgtgtgacgttgggtacccagcgctgaagagagagcagcaagtgacgtttactatcaactttgacttcaacctgcaaaacctgcagaaccaggcaagcctgagtttccaggccctgagtgaaagccaggaagagaataaagctgataacttggtcaatctcaaaattcctcttctctacgacgctgaaattcacctgacaagatctacaaatataaatttctatgagatcagttcagacggcaacgtacccagcatcgtccacagcttcgaggatgttggacccaaattcatattctctctcaaggtgaccacaggtagcgtgcctgtttctatggcgacggttattatacacatcccccaatacacaaaggaaaaaaaccctttaatgtacctcactggagtgcagaccgataaggcaggcgatattagctgcaatgcggacatcaatccgctgaagatcggccagacgtcatcatccgtaagttttaagtcagaaaactttagacatacaaaggagctcaattgccgtacggcatcttgttccaacgtgacgtgctggctgaaagatgtgcatatgaaaggagagtacttcgtgaatgtcaccacaaggatatggaacggtaccttcgcctcatccacttttcagaccgtccagctgaccgccgccgcagaaattaatacatataatccagagatctatgtgattgaagataacacagtgactatacccctgatgatcatgaagcccgatgaaaaggctgaggttcccacaggagtcattatcggctcaataatagctggcatcctactgctgctggcccttgtggcgatcttatggaagcttggcttctttaaaaggaagtatgaaaagatgactaaaaatcccgatgagatcgacgagaccaccgagctgagcagctag

SEQ ID NO: 191555 - DNA, 2448 bp, synthetic construct
  misc_feature 1..2448: note = Description of Artificial Sequence: Synthetic coding sequence
  source 1..2448: mol_type = other DNA
atgggccccgagcggaccggcgccgcccccctgcccctgctgctggtgttggctctatcacagggcatcctgaattgttgtctcgcctataacgtcggtctacccgaagcaaagattttttcgggcccctcttccgagcagtttggctacgccgtccagcagtttatcaatcctaagggcaactggctccttgtgggtagtccatggtctggtttcccagagaatcggatgggagacgtttataagtgtccagtggacttgtctactgctacttgcgaaaagctgaaccttcagacctcaactagtattcccaacgtcacagaaatgaagacaaatatgtctctcgggctcattctcacgcgtaatatgggcaccggcggctttctgacatgcggtcccctttgggcgcagcaatgtggcaaccagtattataccaccggcgtgtgtagcgacatttctccggacttccagctgtctgcaagcttttctcccgccacacaaccatgccccagtctcatagatgtcgtagtggtttgtgacgaatccaactcgatttatccatgggacgctgtcaagaacttcctggaaaagttcgtgcagggcctggacataggaccaaccaagacacaggtgggcctaatacagtatgcaaataacccaagagttgtcttcaacctcaatacttataagacgaaggaagaaatgatagtggctacaagtcagacctcacagtacggcggcgacctgacaaatactttcggggccatacagtacgcacgcaaatacgcatacagtgccgcctcagggggtagacggagtgcgacaaaggttatggtggtggtaacggatggcgagtctcacgacgggtcgatgttgaaagctgtaatcgaccagtgtaatcatgataacatcctgcgattcggcatcgcagtgctcggctacctaaatcgaaacgccctcgataccaagaatctgataaaggagattaaggccatcgcctctatacctacagagagatatttcttcaatgtgtctgacgaggcggctctgctggagaaggcaggtacccttggagaacagatttttagcattgagggaacggtgcaaggtggcgacaactttcagatggaaatgtcccaggtagggttcagtgctgactacagcagccagaacgatatactcatgctcggtgccgtgggagccttcggttggagtggcaccatcgtgcaaaagacgtctcacggccacctgatctttcctaaacaggcctttgatcaaatcttacaggaccgtaaccatagctcctatctgggatacagtgtggctgccattagtactggcgagagcacacactttgtcgcgggggcgccacgagcaaactacacaggccagatcgtgctatacagtgtcaacgaaaacgggaacattactgtgatacaggcgcatcgaggtgatcagatcggctcctacttcggctccgtcctgtgctccgtcgatgtggacaaagataccattactgacgttctcctggttggtgctcccatgtatatgtctgacctaaagaaggaagaaggaagagtatatctcttcactataaaagagggaattctgggtcagcaccagttcttagaaggaccagagggaatagagaatactagatttgggtccgcaatcgccgcccttagtgacataaatatggatgggttcaacgacgtcatcgtcggctcaccactggagaatcagaacagtggggcagtatacatctataatggccaccagggaacaattaggacgaaatactctcaaaaaatacttggcagcgatggagcctttcggtcccaccttcagtacttcggccggtctctcgatggttatggcgatctaaacggcgacagcattactgatgtgtccatcggcgctttcggacaagtagtccagctgtggtcccagtctatcgctgacgtcgctattgaggcaagcttcactcccgagaagattacactcgtgaacaagaacgcccagatcatcttgaaactgtgcttttctgccaagttcagacctacaaaacaaaataatcaggttgctatcgtgtataacattaccctagatgctgatggatttagctctcgggttacctcacgagggcttttcaaagaaaataatgagcggtgcctccaaaagaacatggtggtcaaccaggcgcaatcatgccccgaacatattatctatatacaggaaccaagcgacgttgttaattcactggacctgcgcgtcgacatcagcctcgaaaaccccggcactagccccgctctggaggcctacagcgagaccgcaaaggtctttagcatccccttccataaggactgcggggaagatggcctatgcatttccgacctggtcttggacgttcgccagataccagcggcacagttaatgggacaaaaatag

SEQ ID NO: 191556 - DNA, 1926 bp, synthetic construct
  misc_feature 1..1926: note = Description of Artificial Sequence: Synthetic coding sequence
  source 1..1926: mol_type = other DNA
atgggccccgagcggaccggcgccgcccccctgcccctgctgctggtcctggccctctcccaggggatcttgaattgctgcttggcctataatgttggactgcctgaagccaagatattctccggtccttcctcggaacagttcgggtacgccgtccagcaatttataaaccccaaggggaattggttgctcgtgggatctccatggagcggtttccctgaaaatcgaatgggtgatgtgtataaatgtccagtagatctttctaccgctacctgtgagaaattgaacctgcagacatctaccagcattccgaacgttactgagatgaaaaccaatatgtcattaggtctaatcctcacccgaaacatggggaccggtggcttcctgacttgtggcccattatgggcacagcagtgcggcaatcagtactacacaacaggagtctgttccgatatatctcctgacttccagctctctgcctccttcagcccggccacccagccttgtcccagtctgatcgacgtggtggtggtgtgtgatgaatccaactccatttacccgtgggatgctgttaaaaatttccttgagaagttcgtgcagggtttggacattgggccaaccaaaacacaggtaggacttatacagtacgccaacaacccccgggtggtatttaaccttaacacctataagacaaaagaggaaatgatcgtggctacatctcagaccagccaatacggcggggatctgacaaataccttcggcgcgatccagtatgcccggaagtacgcctactccgccgccagcggcgggcggcgcagtgccacgaaagtaatggtggtggtgaccgacggggaatcccacgatggcagtatgcttaaggcagttattgaccagtgtaatcacgacaatatcttgcgattcggcatagccgtgctaggatacctcaacaggaacgctctggataccaagaaccttattaaggagattaaggctatagcatctattccaactgaacgctattttttcaatgtgagtgacgaggcagctctgctggagaaggccgggactctgggagagcagatcttttcaatcgagggcaccgtgcagggaggcgacaacttccagatggaaatgagccaggtgggctttagcgctgactatagcagccagaacgacatcctaatgttaggggctgttggggcgttcggctggagtggtaccatcgtacaaaaaacctcccacggacacctgatcttccctaagcaagctttcgatcagatcctccaggatcggaaccactcctcctatttaggatattccgtcgcggcaatttctactggcgaatcaacccatttcgtggctggagcccccagagcaaactatacaggacagatagtcttgtacagcgtgaatgagaatggcaacataaccgtgattcaggcccatcggggggaccagatcgggtcctacttcggctctgtgctgtgcagcgtcgacgttgacaaggataccattactgacgtgctcctggtgggtgcccccatgtatatgagcgaccttaagaaagaagaggggagggtctacctgttcactattaaggagggaatattggggcagcatcagtttctggaaggtccagaagggatagagaacacaaggttcggttccgcgattgcagccctgagcgacatcaatatggatggtttcaatgacgtgatcgtaggttccccactcgaaaatcaaaattctggggcagtgtacatatataacggtcaccagggaaccattcgaacaaagtactcccagctcctatgcacaatcatatcgtgccaaacctgtagtttccggaagagctgggatccaatggagccattaggggctatctcctcaaccctcggtgggccatggatggcaatggagatatag

SEQ ID NO: 191557 - DNA, 2829 bp, synthetic construct
  misc_feature 1..2829: note = Description of Artificial Sequence: Synthetic coding sequence
  source 1..2829: mol_type = other DNA
atgggccccgagcggaccggcgccgcccccctgcccctgctgctggtgctggccttgtcacagggcatcctgaactgctgcctagcctacaacgtgggcttacctgaggcaaagattttttctggtccatcaagcgaacagttcgggtacgctgtgcagcaatttatcaatcctaagggcaattggctgctcgtggggagtccatggagtggttttcctgaaaacagaatgggcgatgtttacaaatgtcctgtcgatctgagtacagcaacctgcgagaaactcaatctccaaacctcgacctccattccaaacgtaactgagatgaagacgaacatgtccctcggtttaattcttactagaaatatgggaaccggcggattcctcacctgcggaccactgtgggcacagcagtgcgggaatcagtattacacaacaggcgtttgttcagacatctcacccgactttcaactgtcagcaagtttctcgcccgccacacaaccctgtccctcccttattgacgttgtagtggtatgcgacgagagcaattctatttacccttgggacgctgtgaaaaactttctggagaaatttgtccagggactcgacatcggccctactaaaacacaggtcggcctaattcagtatgctaataatcctcgtgttgtgttcaatctgaacacgtataagacaaaagaagagatgattgtggctactagccagacctctcagtacgggggagacttaactaacacctttggcgcgattcagtacgctcgtaagtacgcgtattcagctgcaagtggaggccggcggtctgccactaaagtcatggtagtcgtgaccgatggagaaagccacgatggatctatgctcaaggctgtgatcgatcaatgcaaccacgacaacattttacgcttcgggatcgcagtactggggtatctgaaccgaaacgccttggatacaaaaaacctcataaaagagatcaaagccatcgcgtcgatccctactgagcggtactttttcaacgtaagcgatgaggccgctctcctggaaaaagctgggaccttgggcgagcagatattctctatagagggtactgttcagggcggcgataactttcagatggagatgtctcaggtgggattttccgctgactattccagtcagaatgacatcctcatgctgggggccgtcggagctttcggttggagcggcacgattgtgcagaaaacgagtcatggacacctgatcttccccaagcaggcttttgatcaaattcttcaagaccgaaatcacagctcatatcttggatacagtgttgccgctatctctactggcgaatcaacgcatttcgtagcaggcgccccaagagcgaattacacaggtcagattgtcttgtacagcgtgaacgaaaatggaaatatcacggtcattcaagcccaccgtggtgaccaaatcggctcctactttggcagcgttttatgcagtgtcgacgttgacaaggatacaattacagatgtgcttcttgtgggggctcctatgtacatgagcgatctgaagaaggaggagggacgagtctacttattcactatcaaagaggggatcctgggacaacatcaattcctggagggacccgaggggatcgaaaacacccggtttggcagcgcaattgccgccttgtccgatattaatatggacggcttcaatgacgtcattgtggggagcccactcgaaaatcagaacagtggagccgtttacatctacaatggacaccaggggaccatcagaactaaatacagccaaaaaatattaggctcggacggagcgtttagatcccacctccagtacttcggccgcagtttggatggttatggagatctgaacggcgactcaataaccgatgtgagcattggcgccttcggccaggtggttcagctttggagccaaagcatagctgatgtagctatcgaagcgtctttcacgccggaaaagattacgcttgtgaacaagaatgctcagatcatattgaaactctgctttagcgcaaagtttcggcctaccaaacagaataatcaggtagctatcgtttataatattacactcgacgcagacggcttctcgagccgggtgacgtccaggggtctctttaaggagaacaatgagagatgcctacagaaaaatatggttgttaaccaggcccaatcctgcccagagcacatcatctacattcaagagccgagcgatgtagtgaacagtctggacctgcgagtggacatcagcctagagaaccctgggacctcccccgctctggaggcatactccgaaactgctaaggtgtttagtatccccttccacaaagactgtggtgaggacggactgtgtattagcgatctggtgttagacgtaaggcaaattcctgctgctcaggaacagccgtttattgtctccaaccagaacaaaagacttacattttctgtgactttgaagaataagcgtgagtcagcctataatacaggaattgtggtggatttctctgagaatcttttcttcgccagtttttctcttcctgtggacggaacagaagtcacatgccaagttgctgcaagtcagaaaagcgttgcatgtgatgtgggttatcctgctctgaaaagggaacagcaggttacattcaccataaattttgacttcaacctgcagaacttgcaaaatcaagcaagtctgtcgttccaggccctgtcagaatctcaggaggaaaacaaggccgataacctcgtgaatctgaagattcccttgctgtacgatgctgaaatacaccttacccgatag

SEQ ID NO: 191558 - DNA, 3120 bp, synthetic construct
  misc_feature 1..3120: note = Description of Artificial Sequence: Synthetic coding sequence
  source 1..3120: mol_type = other DNA
atggcccgggccctgtgccccctgcaggccctgtggctgctggagtgggtcttattgttgctgggtccttgtgctgcccccccagcgtgggccctcaatctcgatccagtgcagcttacgttttatgctggccccaatggatctcaattcggcttctccctggactttcacaaagacagtcacggtcgggtggccatcgttgtgggcgccccacgcactctaggcccctcccaagaggaaactggcggtgtcttcctttgcccttggcgggctgaaggcgggcagtgtccgtccctcctgttcgatttacgcgacgagacacgcaacgttgggtctcagacactgcaaacctttaaggcccggcagggtttaggcgcatcagtcgtcagctggtccgatgtgattgtggcatgcgcgccttggcagcattggaacgtcttggaaaaaacagaagaagcagaaaagactcctgttggctcatgcttccttgcacagccagaatcaggaagacgtgcggaatacagtccgtgtagaggaaatactctcagccggatctatgtcgagaacgatttctcgtgggacaagcgttactgcgaggcgggcttctcttccgtagtgacccaagccggagagctcgtactcggggctccaggcggttactacttcttagggctcttagcccaggctccagtcgccgacatttttagtagctatcgtcccggaatcctgctgtggcatgttagctcacagagtctctccttcgactcctccaatcctgaatactttgatggctactgggggtattcggtggcagtgggggagttcgatggagatctcaacactactgaatatgtcgtcggggctcccacatggtcctggactctgggagcggtagaaatcctggattcctactaccaacggcttcaccggctgcgaggagagcagatggcctcttattttggccactcagtcgccgtcactgatgttaacggggacggccgtcacgaccttctggtgggcgcacccctatatatggagtccagggctgacagaaaactcgccgaagttggcagggtctatcttttcctgcagcccagagggccgcatgccctgggcgccccctcccttctcctgaccggtacccaactctatgggcgttttgggagcgccattgcacctctgggtgacctggatagggatggttacaatgacattgcggtggccgcaccttatggaggcccaagcggacgcggccaggtcctcgtgtttctgggacaatcagaaggcctgcgatccagacctagtcaggtcctagattccccttttcccaccggcagcgcttttggcttttctttaagaggggccgtggacattgatgacaatggttatcctgatctaattgtgggcgcctatggggcaaatcaggttgctgtatatcgagcccaacccgttgtgaaagcctctgttcagctgctagtacaggacagtttaaaccccgcagtcaagtcttgtgtgctgccgcagacaaaaacacccgtgtcatgctttaatatccagatgtgcgtgggtgccaccgggcataacattccgcagaaactgtcactcaatgccgagctacagctggaccgtcagaagcccagacagggcagacgtgtactcctgctgggctctcagcaggcaggtacaacacttaaccttgaccttggtggcaaacacagccctatctgccacaccacaatggcattcctcagagatgaggcagactttcgagataagctcagtccaatcgtgttgagtctaaatgtcagcctgccgcccaccgaagctggaatggctcctgcggtcgtgctgcacggtgatacccatgttcaggagcagactcgcattgtgctcgactgtggagaggatgatgtgtgtgtgcctcaactccagctgaccgccagcgttaccggaagccctttactggtaggagctgataacgtcttggaactccaaatggatgctgccaacgagggcgaaggtgcatatgaagctgagctggctgtccacctgccacagggagcccattacatgagggccctctcaaacgtggaaggcttcgaacgcttaatttgcaaccaaaagaaagagaatgaaacccgggtggtcctctgcgagctgggcaaccccatgaagaagaatgcccagattggaattgccatgttggtgtcagttggcaacctagaagaggccggagaaagcgtgagctttcagctgcagattcggtctaaaaattcccagaatcccaatagtaagattgttttgctcgacgtgcctgttagagccgaggcccaggtggaactgcgtggcaactccttcccggcatcgctcgtggtcgccgcagaagaaggggagcgcgagcagaacagcctggatagctgggggcctaaagtggaacacacctacgagctgcacaacaatgggcccggcaccgtcaacgggttgcatttgagcatccacttacctgggcaatcacagccaagcgaccttctgtacatcctggacattcagccgcagggggggctccagtgttttccgcagcctccagtcaatcctctgaaggtggactgggggttgcccatcccatcgcctagccccatacaccccgcgcatcataaacgcgataggcgacaaatctttctgccagaaccagagcaaccttcgaggctccaggatcccgtgttggtcagttgtgactcggctccatgtaccgtggttcaatgcgacctgcaagaaatggcgagaggccagcgtgccatggtgactgtgttagcctttctctggctccccagcctttaccagaggcctcttgaccagtttgtactgcagagtcacgcttggtttaatgtatctagccttccatacgccgtaccacccctgagcttgcctcgaggcgaagcccaggtgtggacccagcttcttcgggccctagaggaaagagctataccaatctggtgggtcctggtgggggtactggggggtctccttctactaaccattttagtgcttgctatgtggaaagtaggcttctttaagcgcaaccggcccccacttgaagaggatgacgaggaaggggaatag

SEQ ID NO: 191559 - DNA, 3018 bp, synthetic construct
  misc_feature 1..3018: note = Description of Artificial Sequence: Synthetic coding sequence
  source 1..3018: mol_type = other DNA
atggcccgggccctgtgccccctgcaggccctgtggctgctggagtgggtgctgctgctgctggggccttgtgcggccccaccggcatgggccttaaatttagatcctgttcagcttaccttctatgccgggccaaatggatcgcagttcggcttctccctcgatttccataaagattcccacggtcgggtcgccattgtcgtcggcgctcctcgtacactcggaccatctcaggaggaaacaggcggcgtgtttctgtgcccctggagagccgagggggggcagtgccctagcctgctgttcgatcttcgcgacgagactagaaatgttgggtcacaaaccttgcaaacttttaaggcccggcaaggacttggagcatcagtcgtctcatggagcgatgtgattgtggcgtgtgcaccatggcagcactggaatgtcttggagaagactgaggaagcagaaaaaacccctgtcggtagctgctttctggctcagccagagagtggaaggagagccgaatattccccttgtcgtggtaatacactcagtcgaatttatgtggaaaatgacttttcatgggacaaacggtactgcgaggctggcttcagcagcgtagtgacacaggccggagagctggtcctcggtgccccaggtgggtattacttcctgggactgttagcacaggcacccgtagccgacatcttctcctcttacagacccgggattttgctgtggcatgtgtcgtcccagtccctttcctttgacagctccaatcccgagtatttcgatggctactggggatactctgttgccgtgggtgagttcgacggagatcttaatactacggaatatgtggtgggagctccaacctggtcttggactctgggagccgttgagatcctggatagttattatcagaggttacatcggctacgcggggagcagatggcatcgtactttgggcatagcgtcgctgtgacggacgtcaatggcgacggccggcacgacctcctcgtgggggcccctctgtatatggagagtcgtgccgatagaaagctcgctgaagtagggcgggtgtacctttttctgcagcctcgaggcccacacgctctgggtgccccaagcctcctgctgacaggaacccagctttacggacgcttcgggagcgctatagcacccctcggtgatctagaccgggacggatataatgacatagctgtagcagcaccatacggaggcccgagcggtcgagggcaggtcctcgtcttccttgggcaaagtgagggactgcggtcccggccctcgcaggtccttgactcacctttcccaaccggatctgctttcggtttcagtctgcgtggggccgtcgatattgacgacaatggatacccggatttaattgtgggggcctacggcgccaaccaagtcgcagtatatagggctcagccagttgtcaaagcctctgtgcagctcctggtccaagactcactgaatcccgccgtgaagtcatgtgttcttccccagactaaaactccagtgagttgcttcaatattcaaatgtgtgtgggcgctacaggccacaatattccacagaagctgtcattgaatgcagagttacagctggacaggcaaaaaccacgccagggacgcagagtgttactactcggatcccaacaggcagggactacacttaacctggatcttgggggcaagcattctcctatttgccacaccactatggctttccttcgagatgaagctgacttccgggacaaactgtccccaattgtgctgagcctcaacgtttcactgcccccaaccgaagccggcatggccccggccgtagtcctccacggcgacactcacgtccaggagcagactagaatagtactggactgcggcgaggatgatgtgtgcgttcctcagcttcagctgaccgcttccgttacgggatcgcctttgttagtgggcgcagataatgtgctggagctgcagatggatgctgcgaacgaaggagagggcgcctacgaagcagagctcgccgtccatctgcctcagggcgcccattatatgagagctctgagcaacgtcgagggctttgagcggctcatttgcaatcaaaaaaaggaaaacgagaccagagtcgtcctctgtgagctagggaatcccatgaagaagaacgcacagataggaattgcgatgttagtctctgtgggaaacctggaagaagccggggagtccgtaagctttcaactccagattcgatctaaaaacagccagaatcccaactcaaaaatcgtactgctggatgtgcctgttcgcgctgaggctcaggtcgagttgaggggcaacagcttccctgcaagcttggtggtggcggccgaagagggcgaacgcgagcagaatagcctggacagttggggccccaaagtggaacatacctacgaactccataacaacgggcctggcactgtgaacggcctacacctgagtatccatttgccaggccaaagtcagccgtcggacttactttatatcctagacatacagcctcagggaggcctgcagtgcttcccgcagcccccagtgaatcccctgaaggtggactggggtttgcctattccatctccaagtccgattcacccagcgcaccataagcgggatagacgacagatcttcttgcccgaacccgagcaacccagtcgactgcaggaccccgtgctggtgagttgcgattcagcgccttgcacagttgtgcaatgcgacttgcaggaaatggcacggggacagcgcgcgatggtaaccgtgcttgcattcctgtggctaccgtcgctctaccaggtgtggacacagttgctgagggccctggaagaacgggcgatccccatatggtgggttctcgtgggcgtcctgggcgggctgctccttttgactatcctcgtactcgccatgtggaaggtcggatttttcaagcgaaatcgtcctcctctggaggaggacgatgaggagggagaatag

SEQ ID NO: 191560 - DNA, 660 bp, synthetic construct
  misc_feature 1..660: note = Description of Artificial Sequence: Synthetic coding sequence
  source 1..660: mol_type = other DNA
atggccagctacttcggccacagcgtggccgtgaccgacgtgaacggggacgggcgtcacgatctcttggtcggcgctccgctgtacatggaatcccgagccgaccgaaagctcgccgaagtgggaagggtttatctgttcctacagccacgcggcccccacgccctgggtgccccgtccctactgttgacaggcactcagctttatggaaggttcggctctgcaattgcacctctgggcgatcttgaccgggacggctacaacgatatagccgtggctgcaccctatggggggccctctgggcgcgggcaggtactggtttttctaggacaatccgaaggcctccgatctaggcctagccaggtgttagactccccctttcctaccgggtccgcattcgggttttccctacgcggcgcggtcgacatcgatgacaatggatatcctggtgcactcgattgtctacaactggagatgccgaaaaaaggaccatggactttcgcaggttcagccaaacggcacggtcagggcctgatgcctggacttgtcagtcactacggcctcccggaggggttgggtgaaaccagctccggtggtggaggtgttggcaacccttgggaggacgagatgagaataccttgtcctaaccgacagttctag

SEQ ID NO: 191561 - DNA, 3201 bp, synthetic construct
  misc_feature 1..3201: note = Description of Artificial Sequence: Synthetic coding sequence
  source 1..3201: mol_type = other DNA
atgggccccggccccagccgggccccccgggccccccggctgatgttgtgtgccctagctcttatggtggctgcaggcggatgtgtcgtaagcgcctttaatctggacaccaggttcctggtcgtgaaagaggcagggaatcctgggtcacttttcggatatagtgtggcgttacacaggcagacagagcggcagcaaagatacctactgctcgccggagcccctcgcgagctcgcagtgcctgacggatatactaatcgcacaggcgcagtgtatctttgccctctgaccgcacataaggacgactgcgagcgtatgaacattaccgtgaagaacgaccctggtcaccacatcatcgaggacatgtggctgggagtcaccgtcgcctcacaaggtcccgccgggcgggtgctggtgtgcgcgcatcgctacacccaagtactgtggagcgggtcagaggaccagaggagaatggtcggaaagtgttacgtcagaggaaatgacctggagttagactcatccgacgattggcagacctatcataacgagatgtgtaactctaacacagattacctggagacaggcatgtgccagcttggcacaagcggcggcttcactcagaacacggtgtacttcggcgctcctggcgcttacaattggaaaggcaactcatacatgatacagcgtaaggaatgggacctgtctgagtacagctataaagatcctgaggatcagggcaatctctacattgggtacacgatgcaggtgggaagttttatcctgcaccccaagaatattactatagtcacgggcgctccgcgacacagacacatgggcgccgtttttctgcttagtcaagaagccgggggggacctacggagaaggcaggtcctggagggaagtcaggtcggggcttatttcggcagtgctattgcactggccgacctgaacaacgatggctggcaagatctgctggtgggcgccccgtattatttcgagcgtaaagaggaagtcggtggtgctatatatgtgtttatgaatcaggccggaactagtttccccgctcatccctctttgctactccacggccctagcggcagtgccttcggtctgtcagtggcgtccattggggacatcaaccaggatggcttccaggatattgcggtaggtgctcccttcgaagggctggggaaagtttatatataccacagtagcagcaagggcttgttgcgacaaccacagcaggtaatacatggggagaagctcggcctgcctggcctggctacctttggctattccctgtcaggccagatggatgttgacgagaacttttacccggatctgttggtggggtccctgtccgatcatattgttttgctgagggcgcggcccgttattaatattgttcacaagacactggtgccccgacccgccgtgttggacccagcactgtgtactgccacaagttgcgttcaggtggaactatgcttcgcctacaatcaatccgccggaaatcctaattaccggcgtaacataacccttgcttacacccttgaggccgacagagacagacgcccccccaggctgagattcgccggatctgagtctgcagtttttcatggctttttctccatgcctgagatgcgctgtcagaaactcgagctcctgcttatggataatttacgggacaagttgcgacccataattatctcaatgaactattctttgcctctccgcatgccagacaggcccagactgggcttgcggtcactggatgcttatccgatcctgaatcaggcccaggctctagaaaatcacacagaggtccagttccagaaggagtgcggtccagataataaatgcgaatctaacctgcaaatgcgagccgcctttgttagcgagcagcaacagaaattaagtcgtcttcagtacagtcgcgatgttcgcaaactcttgctatccataaatgttacgaacacacggacgagtgagcggagtggggaggatgcacacgaggccttgttgactctggtggtacctccagccctgctgctgtcttccgtgaggccccctggcgcctgccaagccaatgaaaccatcttctgcgaacttgggaacccgtttaagaggaatcagcgcatggaactcctgattgccttcgaagtgattggcgtcactctgcacacacgtgacctacaagtccagctgcagctttcaaccagcagccaccaggataatctgtggcctatgattctgaccctgctcgttgattatacactgcagacctcactaagcatggtgaatcacaggctgcagtctttcttcggcggcacagttatgggggagagcggcatgaaaacagtggaggatgtcggctcccctctcaagtacgaatttcaagtgggccctatgggagaggggctggtgggcctcggcaccctggttcttggcttggagtggccatacgaggtgagcaacggcaaatggttgctgtatcccacagagatcaccgtgcacgggaatggctcctggccttgcaggcccccgggcgatttgattaacccactgaacctgaccttgtccgatccaggtgatcgtccaagcagcccccagaggcggaggcgccagctggacccgggcggcggccagggcccgccccccgtgaccctggccgccgctaagaaggcgaaaagcgaaacagttctaacatgcgcaacaggccgcgcccactgtgtatggcttgaatgccctataccggacgccccggtggtgacaaatgtaacggttaaggcccgtgtttggaacagcacctttatagaagactacagagacttcgatagggttagggttaatggttgggctacactttttcttcggacgagcatcccaacaattaacatggaaaataaaaccacctggttcagcgtggacatcgacagcgagttagtggaagaattaccagccgagatcgagctgtggctggtgctggtcgccgtgggcgctggcctgttattactgggcctgattattttgctgttatggaaatgtgacttcttcaaaagaactagatattaccaaatcatgccgaagtaccacgcggtcagaattcgtgaggaggagcgctacccaccacctggcagcactctccccaccaagaagcactgggttacttcctggcagacacgcgaccagtattattag

SEQ ID NO: 191562 - DNA, 3156 bp, synthetic construct
  misc_feature 1..3156: note = Description of Artificial Sequence: Synthetic coding sequence
  source 1..3156: mol_type = other DNA
atgggccccggccccagccgggccccccgggccccccggctgatgctatgcgcactggccttgatggtcgcagctggcggctgcgttgtatctgctttcaatctggatacaagatttctggtggtcaaggaagccggcaacccagggagcctgtttggctattccgtcgcgcttcacaggcagaccgaaaggcagcagcgatacctcctgcttgccggggctcccagggaactggctgtcccggacgggtatacaaaccggacgggcgccgtgtacctctgtccattaactgcacacaaggacgactgcgagagaatgaacattacggtgaagaatgaccctggccatcatataatagaagacatgtggctcggcgtgaccgtggcttcacaaggccctgccggtagggtgttagtctgtgctcacaggtatacccaggtgttatggtcagggagtgaagatcagcgaaggatggtggggaaatgctacgtcagaggcaacgacctagagctggactcctcggacgattggcaaacatatcacaatgagatgtgcaattccaatactgactacctggaaacagggatgtgccagctcggtacttccggaggttttacccagaacactgtgtatttcggcgcccccggggcctataactggaaaggcaacagttacatgatccagagaaaggagtgggatttgtctgagtattcttataaagatcccgaggaccaaggcaacctttatataggctacaccatgcaggtcggaagtttcattctgcaccccaagaacattacaattgtgactggcgctcctcggcatcgtcacatgggggctgtctttcttctttctcaggaagccggcggtgatctgcgccgcaggcaggtgttggagggctcacaggtcggagcctatttcgggtccgcaattgcgttggctgacctgaataacgacggctggcaggacttactcgtaggagccccttattactttgagcgcaaggaggaagtggggggcgctatctatgtctttatgaaccaggccggtactagtttccctgcgcatccctccctgttgttgcatggaccgtccggaagtgcatttgggctgagtgtggcatccataggagatatcaaccaggacggctttcaagatattgcggtcggcgccccctttgaaggattaggcaaagtttacatctaccacagctcctctaagggtctgttgagacagccccagcaggtgatccatggcgaaaagctggggctacctgggttggcgacatttgggtacagtctgtccgggcaaatggatgttgacgaaaacttttacccagatcttttggtcgggtctctgagcgatcacattgtcttgcttagagcccggccggtgatcaatatcgtgcacaagacccttgtacccaggcctgcagtgctagacccagctctctgcaccgctacaagctgcgtccaggtcgagctttgctttgcttacaatcagtccgccggcaatcccaattacagaaggaatatcaccctcgcttacacactggaagcagatcgcgatcggaggccaccgaggttacgattcgcgggttctgagtctgccgtgttccacgggttcttttcaatgcccgagatgcgttgccaaaagctcgagttactgctgatggataatctccgtgacaagcttagacctataattatcagtatgaactactctctgccactgcggatgccggatcgtccaaggctagggctgaggtccctcgacgcttaccccatcttgaatcaggcccaagccctggaaaaccacacagaagtacagtttcagaaagaatgtggtccagacaacaagtgtgagagcaatcttcagatgcgagctgctttcgtgtctgagcaacagcaaaagttaagtcgcttacagtattctagggatgtaaggaagttgctgctgagtattaacgtcacaaatactcgtacaagtgaacggagcggcgaagatgcacatgaggcacttcttactctggtggttcccccagccctgctgctaagttctgtccgacctcctggagcctgccaggctaacgaaaccatattttgcgagctgggaaatcctttcaaaagaaaccaaagaatggagctgttaatcgcgtttgaggtgatcggcgttacccttcacacacgggatttacaggtgcagctgcagctgtcaacctcatctcaccaggataacctgtggcctatgatactgacgctccttgtcgactatacgcttcagaccagcctgagcatggtcaaccaccggttgcagagctttttcggtggtactgtgatgggcgagtcaggtatgaagacagtcgaggacgttgggtcacccttgaagtacgagtttcaggttggaccgatgggcgagggcctcgtcggtttaggcacgcttgtgctaggacttgaatggccatacgaagtgtccaacgggaagtggctgctctatccaacagagataaccgtccacgggaatggcagttggccttgcagaccaccaggggacttaatcaaccctctcaacctcaccctgtcagacccaggggacagaccgtccagcccccagaggaggaggcggcagctggatcccggggggggacaggggcctcctcctgtgaccctcgcggccgcgaaaaaggctaaatccgaaacagtcctgacctgtgccactggtagagcccactgtgtgtggctggagtgcccaatcccagacgcacctgttgttacaaacgtcactgtgaaggctagagtgtggaactcaacatttattgaggattatcgggatttcgatagagtgagagtgaatggctgggccactctctttctgagaacctctatcccgactattaacatggagaataagacaacctggttttcggtagacattgatagtgagttagtcgaagagctgcctgccgaaatagagctgtggcttgtgctggtggctgtgggcgcgggtctgttgctgcttggcttgatcatacttctgctgtggaaatgcggattctttaaacgcgcgcgaacaagagctttatacgaagcgaagcgtcaaaaggccgagatgaagtcgcagccaagcgaaacagaacggttgaccgatgattactag

SEQ ID NO: 191563 - DNA, 3114 bp, synthetic construct
  misc_feature 1..3114: note = Description of Artificial Sequence: Synthetic coding sequence
  source 1..3114: mol_type = other DNA
atgctgtgcgccctggccctgatggtggccgccggcggctgcgtggtctcggcatttaatttagacacacggtttttagttgtaaaagaagcggggaacccagggagtctgtttggctactctgtggccctccataggcagacggagcggcaacagagatacttgcttttagccggcgcgccccgggagttggccgtccctgatggttataccaatcgcacaggcgctgtgtacctgtgtccccttactgctcacaaggatgactgtgaacgcatgaatattacagtaaagaatgacccagggcaccacataatcgaggacatgtggcttggcgtcaccgtcgcttcccagggccccgctggtcgtgtgctggtgtgcgcccaccggtatacgcaggttctctggtctggatccgaggatcaacgacgcatggtcgggaagtgttacgtgagagggaatgacttggaattggactcctctgatgattggcagacttatcacaacgaaatgtgtaactcaaacacagattacctagaaacaggcatgtgccagttgggtactagtggcgggttcacacagaacactgtctattttggtgcccctggcgcatataactggaaggggaactcatacatgatacaaaggaaggagtgggacctgtctgagtattcctacaaggacccagaagaccaagggaatctttacataggctataccatgcaggttggatcctttattctacaccccaaaaacatcaccatcgtgactggggctccccgccacagacacatgggtgcagtcttcctgcttagccaagaagccggaggcgacctgcgcaggcggcaagttctggagggctcacaagtgggagcctattttgggtccgccatcgctctcgctgatctcaacaacgacggctggcaggatctactggtaggggccccatattacttcgaaaggaaagaagaggtgggcggagcaatttacgtattcatgaatcaagctgggacctctttcccggcgcatccaagcctgttacttcacggtccatctggctccgcattcgggctcagtgtagctagcatcggagacatcaaccaggatggctttcaggatattgctgtgggcgccccatttgaaggcctgggcaaggtgtatatatatcactcctcatcgaagggtctgctgcggcagccccagcaggtaattcacggcgaaaagctaggattgcctggactggctacatttggttattcactctccggtcagatggatgtggacgaaaacttctatccagacttactggtcgggagcctcagtgaccatattgtgctcttaagggcccgcccagtgatcaatatcgttcataaaacgctggtccctcgtccagcagttctcgaccccgctctgtgcaccgccacaagctgcgtccaggtggaactgtgcttcgcatacaatcagtctgctggcaacccgaactacaggagaaatataaccttagcatatacactcgaggctgaccgagataggcggccaccccggctgcgtttcgcagggtccgaaagcgccgtattccacggctttttctccatgccagagatgaggtgtcagaaactggaattattactgatggataacctcagggataagctgcggccgataataattagcatgaattacagcctgccgttacgcatgccagaccgtcccagactgggtctgcggagcttagacgcctatcccatccttaatcaagcacaggccctagaaaaccataccgaggtgcaatttcagaaagagtgtgggccagataataaatgtgagagcaacctgcagatgcgcgccgctttcgtctcagagcagcaacagaagctctcccgactccagtatagccgtgatgtgagaaaactgctgctgtcaattaacgttacgaacacacggacctccgaaaggtccggagaagacgcacacgaagctcttctgaccctggtggtgcctccggcattgctcctgagctccgttcgacctcccggggcttgtcaagcaaacgagacaattttttgtgaactaggcaaccccttcaagcgcaaccaacgcatggagttacttatcgcattcgaagtgattggggttactcttcacacgcgggacctacaggtgcagttgcaactctccacgtccagccaccaagacaatttatggcccatgatactcaccctgctcgtggattatacactgcagaccagcctatcaatggttaaccatcgcttgcaaagctttttcggtgggacagtgatgggcgagtccggtatgaaaactgtggaggatgtggggagccctctgaaatacgaatttcaggtgggacctatgggcgaaggactggtgggtctgggtaccctggtattaggcttggagtggccatacgaggtgagtaatggcaagtggcttctgtacccaactgagataaccgtgcatggcaacggatcatggccctgtaggccccctggtgacctgataaacccactgaaccttacactctcggacccaggagacagaccgtcctccccgcagaggcgaagacgacaacttgatcccggggggggccaaggacccccccctgttaccttggcagccgctaaaaaagcaaagtcagagaccgtgttgacgtgcgcaaccgggcgcgcccattgtgtgtggcttgagtgcccaattcccgatgcacccgtcgtgaccaacgtgaccgtaaaggctagagtctggaacagcaccttcatcgaggattacagagactttgacagggtgcgggtgaatggatgggccaccttgtttctccgaacaagtatcccaaccatcaatatggagaataaaacaacatggtttagtgtcgatattgattcggagctcgtggaggaacttcctgctgagattgaactctggctggttctggtcgcagtcggagctgggctgcttctgctgggcctgattatattgctgttatggaagtgtggattctttaagcgggcccgaacccgggccctctacgaagcaaaacggcagaaggccgagatgaagagccagccaagcgagaccgaacggctcaccgacgactactag

SEQ ID NO: 191564 - DNA, 885 bp, synthetic construct
  misc_feature 1..885: note = Description of Artificial Sequence: Synthetic coding sequence
  source 1..885: mol_type = other DNA
atgatccagcggaaggagtgggacctgagcgagtacagctacaaggacccagaagaccagggaaatctatatatcggttatactatgcaggtgggatccttcatcctgcatcctaagaatattactattgtcaccggtgcaccgaggcatcgccacatgggcgcggtgtttctgttgagtcaagaggccggaggcgatctcagacgccgccaagtgttggagggtagccaagtgggcgcctattttggatctgctatcgccttagctgatctcaataacgacgggtggcaggacctcctggtgggcgcaccttactattttgagcgaaaggaggaggtcgggggcgccatctacgtattcatgaatcaggccgggaccagttttcccgcccacccatcactgctacttcacggcccatccggatccgccttcggacttagcgtggccagcattggagatattaatcaggacggcttccaggatatcgcagtaggggctcctttcgaaggcttgggcaaggtgtacatatatcacagcagctccaagggtcttctacgccagccccagcaggtgatccacggagagaaattagggttgcccggactcgcaacttttggatacagtctgagcggacagatggacgtagacgagaatttctatcccgatttgctggtcggtagcctgtccgaccacatagtgctgttaagggctcgaccagtaattaacatcgtgcacaagacgctggtgccacgccctgcggttctggaccccgctttatgtacggctacatcctgtgttcaagttgagctttgcttcgcctataaccaatccgctggaaaccccaattatcgaagaaacatttcggagtgctggggtgcggcttag

SEQ ID NO: 191565 - DNA, 3108 bp, synthetic construct
  misc_feature 1..3108: note = Description of Artificial Sequence: Synthetic coding sequence
  source 1..3108: mol_type = other DNA
atgggcggccccgccgccccccggggcgccggccggctgcgggccctccttctggctctagtggtcgccgggatccctgccggagcctataacctagatccccagcgccctgtccacttccagggccctgccgatagcttctttggatacgcggtgttggagcacttccatgacaacaccaggtgggtgctcgtgggagcccccaaagccgactccaagtatagccccagcgtcaagtcacccggcgccgtttttaaatgtagggtgcacaccaatcctgatcgacgatgcacagaactggacatggccaggggaaagaaccgcgggacatcttgcggtaaaacctgccgggaagatcgagacgacgagtggatgggcgtgagcctggccagacaacccaaggctgatgggagggttcttgcatgtgctcaccgctggaagaatatctattacgaggcagatcatatcttgcctcatggcttctgctacatcattccgagtaatctgcaagctaaggggagaactctaattccctgctatgaagaatataaaaaaaaatacggtgaggaacatggcagctgtcaggccgggatagccggattcttcacagaagagctagtggtcatgggcgccccaggtagcttttattgggccggaacaattaaggtgctgaacttaaccgataatacatatctcaagctgaacgatgaggttatcatgaacagacggtatacgtatctcggttatgcggtcaccgccggacattttagtcatccaagcacgatcgatgtggtgggcggtgctccacaagataaggggatcggtaaagtgtacatctttcgggccgaccgaagatctggaacactgatcaagatctttcaggcttcaggaaagaagatgggtagctactttgggtctagcttgtgcgctgtggacctgaatggcgacggcctgagcgatctgctggtgggagcaccaatgttctcagagatcagagacgagggccaagtgaccgtatatattaatcgcggtaatggggctttggaagagcagttggcgctcacaggagacggggcctataatgcacactttggcgaaagcattgcgtccttggacgatttggataacgatgggtttcccgatgtagctattggagctccgaaggaggacgattttgctggggcagtgtatatttaccatggggacgcgggcggcatagtgccccagtacagcatgaagctgagtggccaaaagatcaatcctgtcctgagaatgttcggtcagtcgatcagcggcggcatcgacatggacggtaacgggtaccctgatgtgaccgtgggagctttcatgagcgattccgtggtgctcctaagagcaagaccagtaatcacagtggacgtgtccatattccttcctggctccattaatatcacggcacctcagtgtcatgacggccagcagccggtgaattgcctgaacgtgactacttgctttagctttcacggaaagcacgtcccgggcgaaataggactgaactacgtacttatggctgacgtggcaaaaaaggaaaaaggccagatgccccgcgtctacttcgtgctgctgggggaaacgatgggtcaagtgactgaaaagctacagctaacctacatggaagaaacatgccggcactacgtcgcacacgtcaaaagaagggtccaagatgttattagtccgatagtttttgaggctgcttattctctcagtgaacacgtgactggcgaggaagagcgggagctccctcctctgaccccagtccttaggtggaagaagggccaaaaaattgcccaaaagaaccagacggtgtttgagcgtaattgccggtccgaggattgtgcggctgatctacagttgcaaggtaagctcttgcttagcagcatggacgagaagacattatacctcgctctcggggctgtgaagaatatttccctgaacatcagcatctctaaccttggcgacgatgcgtacgatgccaatgtgtccttcaatgtgagcagggagttattcttcattaacatgtggcagaaggaagaaatgggtatttcctgcgagttactcgaatcagattttttaaaatgctccgtgggatttccattcatgcgcagtaaatcaaagtacgaattttccgtgatcttcgataccagccacttgtcaggggaagaagaggttctctcttttattgtgaccgctcagtccggaaataccgagagatcagagagcctgcacgataatactctggttctgatggtacccttgatgcacgaggtggataccagtataaccggtattatgtcgccgacgagtttcgtatatggtgaatctgtggatgccgccaattttatacagctagacgatctggagtgccatttccagcctataaacattacgctgcaagtgtataacacggggccctcaactctcccaggctcctctgtctcaatctcctttcccaacaggttatcttctggcggggccgagatgttccatgttcaagaaatggtcgttggccaagagaagggcaattgcagcttccaaaaaaaccctacgccttgtattattccacaagagcaggaaaatatcttccacactatcttcgccttcttcaccaagtcgggacgcaaagtgctcgactgtgagaaaccaggcatatcatgtctcacagcgcattgtaatttctctgccctggccaaagaagaatcacgaacaatcgacatctacatgctactcaacacagagatactgaaaaaagattcttcgtccgtcattcagttcatgtctcgagcaaaagtgaaggtagaccctgcactccgggtcgttgagatagcccacggcaaccccgaggaggttaccgtggtttttgaggccctacacaacttggagccaagagggtatgtggtgggatggattattgctatttcgctcctagtgggcatactaatattcttgctgctggccgtgctgctttggaagatggggtttttccgacggagatacaaggaaatcatcgaggctgagaaaaaccgcaaggagaacgaagattcttgggattgggtgcagaaaaaccaatag

SEQ ID NO: 191566 - DNA, 696 bp, synthetic construct
  misc_feature 1..696: note = Description of Artificial Sequence: Synthetic coding sequence
  source 1..696: mol_type = other DNA
atgtgccagcccccccccaccgcccccggcagctggcccgtggcccgcccttgtacagaatccgtcgggcgcacccacactcagcgcgtgcctgcaagctgctgggcccgggccggacgatcatctcgccaatcccccacccctcgacagtttgctctgatgcagtacagtaacctgctgaaaatccatttcacattcacacagtttcgaacttctcctagccaacagtctttggtggaccctattgtccagctgaagggcttaacctttactgctaccggtattttaacagtggtgactcagctcttccatcacaagaatggggccagaaagagtgccaagaagatattaattgtcatcaccgatggccaaaagtacaaagatccacttgagtacagtgacgtgatcccccaggcggagaaggccggaatcattcggtatgctattggggtcaggctcttctttacccctgccccgggaagcgcttgtatatcctttagatgctctgccgcgggattgatcctgttagggtgtctgtccgcagctggggggacacgcttccccggtacacactgccaggctggcgccgagtatcatcagctatccgctagtgccggcccacgggtgcaaggagggcagttgtgcagcccttggcagcatcccgaagcagccgcaggagaggacttgtgcagttag

SEQ ID NO: 191567 - DNA, 3486 bp, synthetic construct
  misc_feature 1..3486: note = Description of Artificial Sequence: Synthetic coding sequence
  source 1..3486: mol_type = other DNA
atgaccttcggcaccgtgctgctgctgagcgtgctggccagctaccatggcttcaacctcgacgtggaagagcccaccatcttccaagaagatgctggggggtttggccagtcagtcgtgcaatttggcggaagcagactcgtggttggcgccccattggaggtggtggccgctaaccagaccgggcgcctgtatgattgtgcggcagccaccggaatgtgccagccgatccccttacacatccgcccagaagccgtgaacatgtctctcggactgacactggcagcctccaccaacgggagtcggctgcttgcctgtggtcctactctgcatcgggtgtgtggggagaattcctattccaagggtagttgtctgcttctaggctcccgatgggaaattatccagactgttcccgacgccactccagagtgtcctcaccaggaaatggacattgtctttcttattgatggcagcgggtctatagatcaaaacgactttaaccaaatgaaaggtttcgtgcaggcagtgatgggacaatttgaggggaccgacacgcttttcgcactgatgcagtactctaaccttctgaagattcattttaccttcacacagttcagaacttccccaagccagcagtccctggtcgatccaattgtccagctcaagggcctgaccttcaccgccactggcatcctaacagttgtgacacagctgttccaccataagaatggcgctcgaaagtctgccaagaaaatcttgatagttatcacagatggccagaagtataaagaccccctagaatattccgacgtgataccccaggcagagaaagctggaattatcaggtacgcaatcggagtgggtcacgcctttcagggcccaactgctcgccaggagctaaatacgattagtagcgctccacctcaagaccacgtcttcaaggtggacaacttcgctgctctgggttccatccagaaacagcttcaagagaagatctacgcagtagaaggaactcaatctcgagcgtcatcatctttccagcacgaaatgtcccaggagggattttctaccgctcttactatggacgggctgtttctcggggcggtaggaagcttctcttggtcaggcggcgccttcctctatccccccaatatgtctccaacttttattaacatgtcgcaggaaaacgttgacatgcgagattcctatctggggtattctacggagctggcgttatggaaaggggtccagaacctcgtactcggtgcgccacggtatcagcacaccgggaaagcggtcatctttactcaggtctcccggcagtggcgaaaaaaggctgaagtgacaggcacccaaatcggcagctatttcggggcctccttgtgtagtgtggatgtggatagcgatggatccaccgatctcattctgatcggtgcgcctcactattacgagcagacacgaggcggacaggtttctgtatgccccctgcccagagggagggtccaatggcagtgtgacgcagtgctgagaggtgaacaaggtcatccctggggcaggttcggtgcagccctgacagtccttggagacgtcaatgaggacaagctgatcgacgtcgccattggggccccaggtgaacaggaaaaccggggggctgtatacctgttccatggcgctagtgagtccggaataagtcctagccattctcaacgaatagcctcgtcccagctctcaccacgactgcagtatttcggtcaggctctgtctgggggacaggacctcacccaggacgggctgatggacctcgccgtgggagctaggggtcaagtcctcctgctgagatcactgccggttctcaaagttggagtagccatgaggttctcacctgttgaagtggctaaagcggtgtaccgttgttgggaagagaaaccaagcgctctcgaggcgggggatgctacagtatgtctcaccattcagaaatccagcctggaccagctgggcgatatccaatcatctgtgagatttgacctcgcactggacccgggcagactcacgtccagagctatctttaatgaaactaagaatccaacacttacaaggaggaagaccttaggcctcggcatccactgcgaaactctcaaactgctcctgccagattgcgtggaagacgtggttagccctataattctgcaccttaactttagcctggtgcgagagccaatcccaagtcctcagaatttacgccctgttttagctgtgggaagtcaggatttgttcacagctagccttccttttgaaaagaactgcggtcaggatgggctgtgcgaaggcgatctaggcgtcacattgtccttctctggactccagaccctcacagtcggctcaagcctggagcttaatgtcattgtgacagtctggaacgcaggcgaggattcctatggtaccgtggtgtccctctattatcccgccggattgagtcaccgaagggtctccggcgcgcagaagcaaccacaccagtccgccctgaggcttgcttgtgagactgtgcccaccgaagatgagggtctgcggagctctagatgcagcgttaaccacccgatttttcacgaggggtcaaacggcaccttcatcgttactttcgatgtgtcttataaagcgacgctcggcgataggatgcttatgcgagcatccgcctctagtgagaataataaagcatccagctcaaaggctaccttccagctggaacttccggtgaagtatgccgtgtacactatgatctccaggcaggaggaatccactaagtacttcaatttcgcaacaagcgacgagaaaaagatgaaagaagccgaacacaggtaccgggtaaataatctgtctcaacgggacctggcaatttccatcaatttttgggttcccgtcctgctgaacggagtggctgtttgggacgttgtgatggaagccccatctcagtcactgccttgtgtgtctgaaaggaagcccccgcaacactccgattttctaacacagatcagccgctctcccatgctcgactgctccattgcagactgccttcagtttcgctgtgatgtcccaagtttcagtgtgcaggaggagctagattttacactgaagggcaatctcagctttggctgggtaagggaaactctccagaaaaaagtgttggtggtgagcgttgcggagattacgtttgacactagcgtttactctcaactacctgggcaggaagcgttcatgagagcgcaaatggaaatggtgttagaggaagatgaagtctacaatgctataccaatcattatgggctcaagcgtgggcgccctgctgctgctggccctgatcacagccacactctacaagctcggctttttcaaacggcactacaaggagatgctggaagataagcccgaggacactgccacgttctccggagacgattttagttgtgtggcacccaatgtcccactgagctag

SEQ ID NO: 191568 - DNA, 3534 bp, synthetic construct
  misc_feature 1..3534: note = Description of Artificial Sequence: Synthetic coding sequence
  source 1..3534: mol_type = other DNA
tgcgccctgagccccaccttccacttccccagcacccggtgcagcgggatgaccttcggtactgtgctcctgttaagtgtcctcgcctcgtatcacgggttcaacctagatgtagaggagcccaccatttttcaggaggatgctggaggctttggtcaatccgtcgttcaatttgggggctcgaggctcgtggtgggcgcccctctggaggtggttgcagctaatcagaccggaaggctgtatgattgtgcggcagccacaggaatgtgccaacctattcctctgcatatccgaccagaagcagtcaatatgagtctcgggctgactctcgccgcgagcactaatggaagcaggctgttagcctgtggcccaactctgcatagggtgtgtggcgaaaacagctactccaaaggcagctgcttgctgttgggctcacggtgggaaataatccagacggtccccgacgccacccccgagtgtccgcaccaggaaatggatatagtgttcctgattgacggctcggggtctatcgaccagaatgacttcaaccagatgaaaggctttgtgcaggccgtcatgggacagttcgaggggacggacaccctgttcgctctaatgcaatactccaatctgctgaagatccatttcacgttcacccagttcaggactagtccaagccagcagagtctcgtggacccaattgttcaattgaaaggactgacgtttactgccaccggaatcttgacagtcgtaacacagttgtttcaccataagaatggtgccagaaaatctgccaagaagattctgatcgtgatcacggacggacagaagtataaagaccccctagaatactccgacgttattccccaagcagagaaggcgggtatcattagatatgcgattggtgttggtcatgcatttcaggggccaacggcacgccaggagctgaacacgatcagctctgccccaccccaagatcacgtcttcaaggtggacaacttcgcggccctgggcagtatccagaagcagctgcaggagaaaatctatgccgtggagggtacccagagtcgcgccagttcatcctttcagcacgaaatgtcccaggagggattcagcactgctctgacgatggatgggctgtttctcggggcggtcggcagcttcagttggtcaggaggggccttcctgtacccaccaaacatgtcccctactttcataaacatgagccaggaaaacgtggacatgagggattcctatctgggttactccacggaactggcgttatggaaaggggtgcagaacctcgttttgggtgcaccaaggtaccagcataccggaaaagccgtgatcttcacacaagtttcacggcagtggcgaaaaaaagccgaagtgacaggcacccagatcggcagttatttcggagccagcctgtgttccgtcgacgttgacagcgacggcagcaccgatctgatcttgatcggcgctcctcattactatgaacagacgaggggtggccaggtgtctgtgtgccccctgccaagaggtagagttcagtggcagtgtgacgccgtcctgcgaggcgaacaaggccatccctggggccggttcggcgcagccctgaccgtactgggtgatgtgaacgaggacaagttgatcgatgtggccataggagcccctggtgaacaggagaacagaggcgctgtatatctcttccatggtgcaagtgagtcgggaattagccccagccacagccagcgcatcgcaagtagccagctttcgccacggcttcagtactttggacaggccctctcgggaggtcaggacctgacccaggacgggctgatggacctcgcagtgggggcacgtggccaggtacttctgctgagatctctgcctgtgctcaaggtgggggtggccatgcgcttctcaccagtagaggtggcgaaagctgtgtatcgttgttgggaagagaaaccttccgccctggaggccggtgatgccaccgtgtgtctgaccattcagaaatctagtctggatcagctgggggacatccagagctctgtccgcttcgaccttgccctagatccggggcgcctgactagcagagccatatttaatgagaccaaaaaccccactctaacccgacggaaaacattgggcctggggattcattgcgaaacactcaaattactcctccctgactgtgtggaggatgtggtgagccccattatcttacacctcaattttagtcttgtaagggagccaataccctcgcctcagaaccttcggcccgtgctagccgtgggaagccaagatttatttacagcatcactcccattcgaaaaaaattgcggccaggacggactgtgcgagggagacttgggtgtgaccctttcattcagcgggctccagacactgaccgtgggatcttcactagaactcaatgttatagtaactgtgtggaacgccggggaggacagttacggaaccgtggtctctctatactacccagccgggctgagccataggagggtgtctggcgcgcagaagcagccccaccagtccgcactcaggctggcctgtgagactgttcccacggaagatgaaggcctgagatcctcacgatgctcagttaatcatccgatttttcatgagggctccaatgggactttcatcgtgacgtttgacgtatcttacaaagctacgctgggcgatagaatgctgatgcgggcatccgctagctccgagaacaataaggcttccagctctaaggctacctttcaactggagttgcccgtaaagtatgcagtgtacacgatgatctcacgtcaggaggaatccactaaatatttcaacttcgccacaagcgacgagaagaagatgaaagaagccgaacaccgctatagagtgaacaatctgagccagagggatttagcaatcagcataaacttctgggtacccgtgctgctgaacggcgtggccgtttgggatgtggtgatggaagccccctcgcagtccctcccttgtgtgtccgagaggaaacctccacagcacagcgactttctgacccagatctccagatcccccatgctggattgttcgatcgctgactgcctccagttcagatgtgacgttccttccttttccgtgcaggaagaactggatttcacgttaaaaggaaaccttagtttcggatgggtgcgggaaacattgcagaaaaaggtgttagtggtgagtgtggctgagatcacatttgatacttcagtttactcccaactacccggacaggaagcttttatgcgggctcagatggaaatggtgctggaagaagacgaagtctacaatgccatcccaataattatggggagctccgtgggcgctttacttttgctggcgttaatcaccgcgactctctacaaactggggttttttaaacggcattataaagaaatgttggaagataaaccagaggacactgccaccttctccggcgatgacttttcctgtgtggcacccaacgtacctcttagttag

SEQ ID NO: 191569 - DNA, 3513 bp, synthetic construct
  misc_feature 1..3513: note = Description of Artificial Sequence: Synthetic coding sequence
  source 1..3513: mol_type = other DNA
atgaaggacagctgcatcaccgtgatggccatggccctgctgagcggatttttttttttcgccccggctagtagttataacctcgatgtccgaggagctcgcagtttctctcccccgcgcgccgggcgccatttcggatacagggtcctacaggtcggcaatggggttatcgtcggagccccaggcgaaggcaactcaacaggatctttataccaatgtcagtcaggcacgggccattgtttgcctgtcaccctgcgtggaagcaactatacctcaaaatatctcggtatgaccttggctacagaccccactgatggaagcatcctagcctgcgatccggggctcagtaggacctgcgatcagaatacatacctgtcaggcctgtgttatctctttaggcaaaacctgcaggggcctatgctgcaaggtaggccaggctttcaggaatgtatcaagggaaatgttgaccttgtttttctcttcgatggcagtatgagccttcagcctgacgagtttcagaagattctcgatttcatgaaggacgtgatgaagaagctgtctaatacttcataccaatttgctgcggtacagttctcgacatcttacaaaacggaattcgacttctccgattatgtaaaacgaaaggatcccgacgctctgctcaaacacgtcaaacacatgctgctgttgacaaataccttcggtgccatcaattacgttgccacggaggtgtttcgggaggagttaggtgcaaggcctgatgcgacaaaagtactcataataatcacggatggagaggcaactgacagcgggaacattgatgccgccaaggatattatacgctatatcatcggaatcggaaagcatttccaaaccaaggaaagtcaggaaactctccacaaatttgcatctaaacccgcctccgagttcgtcaaaatcctggatacattcgagaagctgaaggacttatttaccgagctgcagaagaagatttacgtaatagaaggaacttcaaaacaggatctaacatcattcaatatggagctgtctagctccggaatctctgccgacctgagccgaggccacgctgtggtgggggcagtgggggctaaagattgggcgggcggttttctggacctcaaagccgatttgcaagatgacactttcataggtaacgaaccacttactcccgaagtgcgcgcaggctacctcgggtacaccgtgacctggctgcccagccggcagaaaaccagtctcctggcctctggagcaccacgttatcagcacatgggacgagtactcctctttcaggagccacagggcggaggtcactggtcccaggtgcagacaattcatggtacccaaattgggagctattttggtggtgagctctgcggtgtggacgtggatcaggacggtgaaacagagttgctgctaatcggggcacccctcttctatggtgagcagcgcgggggacgagtttttatctaccagagacgccagcttgggtttgaagaggtttccgagctacagggggatccagggtatcctctgggacggtttggtgaagctatcacagctctgactgatattaacggcgacggccttgttgacgtcgccgtcggcgcgcctctggaagagcaaggggctgtttacatttttaatggcagacatggcggattgtccccccagccatctcagcgcatcgaggggacgcaggttctttcaggaattcaatggtttggacgaagtattcacggagtgaaggatctggaaggcgacgggcttgctgatgtagcagttggcgcagagtcccagatgattgtgctatcctctcgacctgtggttgacatggttactctgatgagcttctcccctgctgagatccccgtgcatgaggtggagtgctcttatagtacctccaacaagatgaaagaaggtgttaacattacgatctgtttccagattaagtctctgattccccagtttcagggacgcctggtggccaatttgacgtacaccctgcagctggatggccataggacacgccgccgtggtttgttccctggggggaggcacgaacttagaagaaatatcgccgtcactacctctatgtcttgcacagacttcagtttccatttcccagtgtgtgtccaggatctgatcagtcccatcaacgtgtcccttaacttctcattgtgggaggaggagggaacaccccgcgatcagagggcccaggggaaagatattccacctattctgcggccatctttacatagcgagacttgggaaattcctttcgaaaaaaactgcggtgaagacaaaaaatgcgaggccaacctcagggtgtcattctcccctgcccgttcccgtgctctccggctgacagccttcgcttcactctccgtcgaactatcactgtctaatctcgaggaggatgcctactgggtgcagctggatctccattttccccctggactcagtttccggaaggtcgaaatgctcaagccacatagtcaaatcccagtgtcctgcgaggagctaccggaagagagccgcctgctttcccgcgcactgtcatgcaatgtgtcgagtccaatttttaaggcaggacattctgtggctttacagatgatgttcaataccctcgtgaactctagctggggcgattccgttgaactgcacgctaacgtgacctgcaataacgaggattctgatctacttgaggataactccgcaaccacaatcatccccatcctctatcccataaatatcctaatacaggaccaagaagacagcaccctctacgtgtcttttacccctaaggggcctaaaattcaccaggtgaaacacatgtaccaggttcgcatacagccatcaatccatgaccacaacattcccacactagaggcagtagtcggagtgcctcagccaccgtccgaaggacccatcactcaccaatggtctgtgcagatggagcccccggtgccgtgccattacgaggatctagagaggctgcccgacgcagctgagccatgcctcccaggcgctctgttccggtgtcccgttgtgttcaggcaggagatcctggtacaggtgattggaaccctggagttggtcggagagatcgaggctagctctatgtttagcctctgttcatctctaagcatatcatttaacagtagtaagcacttccacctatatggcagcaatgcctcactggcccaggtagtgatgaaggtcgatgttgtttatgaaaaacagatgctgtacctgtacgtgttaagcgggattggcgggctgctgctgctgctgttgatctttatcgtgctctacaaggtcggcttctttaagagaaacttaaaggagaaaatggaggccggtagaggcgtccctaacggcatcccagctgaggatagcgagcaactggcgagcggccaggaggcaggagacccgggctgcctgaagccgttacacgaaaaggattccgagtcaggaggtggcaaagactag

SEQ ID NO: 191570 - DNA, 3261 bp, synthetic construct
  misc_feature 1..3261: note = Description of Artificial Sequence: Synthetic coding sequence
  source 1..3261: mol_type = other DNA
atgaaggacagctgcatcaccgtgatggccatggccctgctgagcggcttcttcttcttcgcacctgccagctcatataatctggacgtgcgaggggcgaggtctttctctcctcctagggccgggcgccattttggctacagagttctccaagtcgggaacggagtgattgtgggtgcccctggcgagggcaactctaccggttccttgtatcagtgccagagcggaactgggcactgcctgccagtgaccttgcgaggcagcaactatacaagcaagtatctcggaatgaccctggctaccgaccccaccgacggatcaatcctctttgccgctgtgcagttttctacatcatataagactgaattcgacttcagtgattacgtgaagagaaaggaccccgacgccctgcttaagcacgtcaaacacatgctgctcctgacaaacacttttggagctattaattatgtagctactgaagtgttccgagaggagctgggagcccgaccagatgccactaaggtgttgattattattactgacggagaggctaccgactcaggtaacatcgacgctgcaaaggatatcatccgctatatcatcgggattggcaagcattttcaaactaaggaatcccaggaaacgctgcacaagttcgcatccaaacctgcttcggagttcgtaaagatcctggacactttcgagaaattaaaggacctgtttaccgaactccaaaagaaaatttacgtcattgagggcacttccaagcaggatctaacttcttttaacatggagctctcgagtagcggaatctctgctgacttatctagagggcatgctgtggtaggcgcagtgggcgcgaaggattgggctggggggtttcttgacctaaaagctgatctccaggatgatacttttatcgggaatgagcctctaactcccgaagtgcgtgccggttacctggggtacacagtcacttggctccctagccgccagaagacctctctgttggcctctggcgccccgcggtaccagcacatgggtagggtgctcctgtttcaggagccccaaggcgggggccattggagccaagtccagactattcatggcactcagattgggtcgtactttgggggcgagctgtgcggagtggacgtggaccaagacggcgagacagaactgcttctgattggcgcccctctcttctatggcgagcagcggggtgggcgtgtgttcatctatcagagaaggcagcttgggttcgaggaagtatcagagctccaaggagatcctgggtacccactgggtcgctttggagaggccattacggccctgacagacattaatggggacgggctcgtagatgtcgcggtgggtgccccactggaagagcagggcgccgtttacatctttaatggtaggcacggcggcctttcgccccagcctagccaaagaatcgagggtacccaggtgctttccggaattcagtggtttggcaggtccatccacggagtgaaagacctcgaaggcgacgggctggccgacgtggcggtcggcgcggagtctcaaatgattgtgcttagctcccggcctgtcgtggacatggttacactgatgtctttttcccctgctgagattccagtgcatgaagtggaatgtagctatagcactagtaacaaaatgaaggaaggtgtgaacatcaccatctgttttcagatcaaatcgctgatcccgcagttccagggtcgcctcgtcgctaaccttacttacactttgcaactcgacggccatcgaaccagacgccgagggctgttcccaggcggaaggcacgaattgcgtcgcaacatcgcagttacaacctctatgtcttgtacagacttctcttttcattttccggtgtgcgtgcaagatctgatcagtccaatcaatgtatccctcaatttttccctatgggaagaagaggggactcccagggatcagagggctggtaaggacattccgccaatcctgaggccatccttgcacagtgaaacgtgggagatcccgttcgagaagaattgtggcgaggacaagaagtgtgaggccaatttgagggtgagcttcagcccggctaggtcgcgtgcgctccgcctcaccgccttcgcctctctatctgtcgagttaagcctcagcaatcttgaggaagacgcatactgggtgcagctggacctacacttcccgcccggacttagcttcaggaaggttgaaatgctgaaaccacacagccagatccccgttagctgtgaagaactcccagaggagagcaggctactctcccgcgcactcagctgtaatgtcagcagccctatcttcaaagccggacacagtgttgcattgcagatgatgtttaacacgctcgtaaacagcagttggggtgactccgtagagctccatgctaatgtcacctgtaataacgaagatagtgacctcctggaggacaatagtgcgaccaccatcatacccattttgtacccgattaacatattgatccaggatcaagaagacagtaccctttatgtctctttcacaccgaagggcccaaaaatccaccaggtcaaacatatgtaccaggtccgtatccagccgagtattcatgaccataatatcccaacactggaagctgtcgtcggcgtacctcagccaccgtcggaaggcccaataactcaccagtggtctgtccagatggaacccccagtcccatgccattacgaagatctggagcggctcccggacgctgcagagccatgcctgcccggagcactgttcagatgcccagtggtgttcagacaggagatactggttcaagttatcgggaccctcgagctggtcggagagatcgaggcgagcagcatgttctccctgtgtagctccctgtcaatctccttcaactctagcaaacacttccacctgtatggaagtaacgcaagcctagctcaggtggtgatgaaagtagacgtagtatatgaaaagcagatgctttacttatacgtacttagcggaatcggtggacttctgctgctgttgctcatttttattgtactctacaaggttgggtttttcaaacgtaacctaaaggagaaaatggaagcgggaagaggagttcccaatggcattcctgccgaggactctgaacaattggctagcggacaggaggccggcgaccctggatgcttaaagccactccatgagaaggattctgagtctggcgggggaaaagattag

SEQ ID NO: 191571 - DNA, 1215 bp, synthetic construct
  misc_feature 1..1215: note = Description of Artificial Sequence: Synthetic coding sequence
  source 1..1215: mol_type = other DNA
atgaaggacagctgcatcaccgtgatggccatggccctgctgagcgggttcttcttcttcgcacctgcgtctagttacaacctggatgtgcgcggggcgaggtctttttccccccccagggcgggtcggcattttgggtacagagtactgcaaatcaagtcactgattccgcagttccaaggaaggctggtagcgaacttgacttacaccctccagctggacggtcatagaactaggcggcgtggtctgttccctggcgggcggcacgagttgagacgcaacattgccgtgacgacgtccatgagctgcaccgacttttctttccacttcccaatgatgttcaataccctggttaacagttcttggggcgactctgtggaacttcacgcaaacgtgacctgcaataatgaagactccgaccttctcgaagacaacagcgctactactatcatcccaatcctttacccaattaacattctaattcaggatcaggaggattccaccttgtacgtgtcattcacaccgaaagggcccaaaatccaccaagtgaaacatatgtatcaggtgcgcatccagccatcaattcacgaccacaatatcccaacactcgaagcagttgtcggagtgccgcagcccccctcggaggggcccatcacccatcagtggagtgtgcagatggaacctccggtcccgtgtcactatgaagatctggagagactgcccgacgctgctgagccctgccttcctggagcactgtttcgctgtcccgtggtgttccgccaggagatcctggtgcaggtgattggtacactagaactagtgggagaaatcgaggcttcttcaatgttcagtttatgttctagcctttctatctctttcaatagttcaaagcattttcacctttacggaagcaacgctagcctggcccaagtggtgatgaaggtagacgttgtgtatgaaaagcagatgctgtacttgtacgtactgtcaggcataggaggactcctcctactgttgttaatatttatcgtgctgtataaagttggattcttcaagcggaacctgaaagaaaagatggaagcagggcggggcgtgccgaatgggattccggccgaagatagtgagcagctcgcctctggacaggaggccggtgacccagggtgtctcaagccactgcatgagaaggacagcgaatccggaggcggtaaagactag

SEQ ID NO: 191572 - DNA, 489 bp, synthetic construct
  misc_feature 1..489: note = Description of Artificial Sequence: Synthetic coding sequence
  source 1..489: mol_type = other DNA
atgaaggacagctgcatcaccgtgatggccatggccctgctgagcgggttcttcttctttgcgcctgcttcctcatataatctggacgtccggggcgctcggtcttttagtcctcccagggcaggtcggcattttggatatagggtgctgcaggtcggaaacggggttattgtgggggcaccgggagagggtaattcgacgggctctctataccagtgccagtctggaaccggacactgcctgccagtaacccttagggggagcaactacacctcaaaataccttggaatgactctggctaccgatcctaccgacggttccatcttagcatgcgacccaggcctcagtcggacctgcgaccagaatacctatctgagcggactgtgctatctgttcagacagaatctacaggggccaatgttacaaggcaggcccggcttccaggtttgttgttgcagtgtgtttcacaagctgcaaaatcggatatag

SEQ ID NO: 191573 - DNA, 3459 bp, synthetic construct
  misc_feature 1..3459: note = Description of Artificial Sequence: Synthetic coding sequence
  source 1..3459: mol_type = other DNA
atggccctgcgggtgctgctgctgaccgccctgaccctgtgccacggttttaatctggacaccgaaaacgcaatgacattccaggaaaatgcccgggggttcggtcagagcgtggttcaactacagggaagcagagtggtagtgggggccccccaggagattgtggctgcgaaccagagggggtcattatatcagtgcgactatagtaccgggtcttgcgagccaattagattacaggttccagtggaggctgtgaacatgagcctgggactctcactggcggccaccacttcccccccccagctgttagcatgcggccccaccgtccatcagacttgctctgagaacacctatgtcaagggcctctgttttctgttcggtagtaatctgcgccagcagcctcaaaagtttccggaggcccttagaggatgccctcaggaagatagcgatattgccttcctgatagacggatccgggtcaatcatcccacatgactttagaaggatgaaggagttcgtgagcaccgttatggagcagcttaaaaagagcaagaccctcttctccctgatgcaatacagtgaggagttcagaatccacttcacttttaaggagtttcaaaacaatcctaatccacggtctcttgtgaaaccaataacacagttgctcggcaggacgcataccgctacaggcatacggaaggtggtgcgagagctgttcaacattaccaacggcgcccgaaagaatgcattcaagatcctggtggttatcactgacggagagaagttcggagatccactcggctatgaggatgtgataccagaggcggatagagaaggggtaatccgttatgttatcggggtgggtgatgccttcaggtctgaaaagagccgtcaggaactcaacaccatcgccagcaaacccccccgcgatcacgtatttcaggtgaataatttcgaagcactcaagactatccaaaatcagctgcgcgagaagattttcgctattgaaggtacacagaccgggtccagctccagtttcgagcatgaaatgtcccaagaaggtttctctgcagctataactagtaatggcccgttattaagtactgtgggttcctacgattgggcagggggagtctttttatataccagcaaagagaaaagtacttttatcaacatgactcgggtggactccgatatgaatgacgcatatctcggatacgcggctgccatcatactccgcaatcgagtgcaatctctggtcctcggggcaccacgctatcagcacataggccttgttgctatgttccgccagaacacaggcatgtgggaaagtaatgccaatgtgaagggaacccagattggagcttacttcggcgcttccctctgctcggttgacgttgactcaaacggttccactgatctggtcctgatcggagccccccactattatgagcagacccgaggcgggcaagtctccgtgtgtcccttgccaaggggcagagccagatggcagtgcgacgctgtcctgtacggcgaacagggacaaccatgggggaggttcggcgccgctttgacagtgcttggggacgtaaacggcgataaactgaccgacgttgccatcggcgccccaggcgaagaggataataggggcgcagtgtacctttttcacggcacttctgggtccggcatatcgccctctcattcacagcgaattgccggctctaagttgtcaccacggctccagtacttcggacaatcactatctggcggccaggatcttacaatggacggccttgtggatctcacagtgggagctcagggccacgtactgttgcttcgatcacagccagtgctcagggtgaaggccatcatggagttcaacccaagagaagtggcacgtaatgtattcgaatgcaacgatcaggtggtaaagggcaaagaagccggtgaggtgcgagtctgccttcatgtgcagaaatccacccgggaccggcttagagaaggacagatccagagcgtggtgacctatgacttggctctagactctggccgtccacactctcgcgccgttttcaacgagacaaaaaactctacccgccgtcagactcaagttctgggcttgacacagacgtgtgagaccctgaagttacagctccctaattgcattgaggaccctgtgtctcctattgtgttgcgcctgaacttttcacttgtgggtactccgctgagcgctttcgggaacttgcgtcccgttctggcagaggacgcgcagcgcctttttaccgcattgtttcctttcgaaaaaaattgtggcaacgacaacatttgtcaggatgacctgtccataacctttagctttatgagcttggactgcttggtggtggggggaccccgggagtttaacgtcaccgtcaccgttcggaatgacggcgaggattcttatagaacacaggtcacattttttttcccgctggatctctcttaccgcaaagtgtctacactgcagaatcagcgctcccaacgatcatggaggttagcttgcgagagcgcctcatccacagaggtgtcaggggcacttaagagcacaagttgtagcataaatcaccccatttttcctgaaaacagcgaagtgacatttaacatcaccttcgacgtggacagcaaggcttccttgggaaataaactccttttgaaagcaaacgtaacaagcgagaacaatatgcctaggactaacaaaacagagtttcaactcgagctgcctgtgaagtatgccgtctacatggtcgttacatcgcatggtgtatctactaaatacctcaactttacggctagcgaaaacacttctagggttatgcagcaccaatatcaagtgtcaaatttgggccagcgatcgttgcctatctctctcgtgttcttggtacctgtgcgtcttaatcagacagtgatatgggacaggccccaagtcacctttagcgagaacctgagcagtacctgtcatacaaaagagaggctgcctagtcacagtgacttcctggcagaactgagaaaagctcctgtggtgaattgttcgattgcggtctgccagcgtatccaatgcgacattcccttcttcggcattcaggaggagtttaacgccactttgaaaggtaatctcagtttcgattggtatattaaaacgtcccataaccatcttttgattgtgtcgacagccgagatactattcaatgacagcgtgtttaccctgttacctggtcagggggcttttgtgaggagccaaactgagacgaaggtcgagccttttgaagtgcccaacccattaccactgatcgttggtagcagcgtcggaggactgctgcttctggcactaattaccgccgccctgtacaagttaggcttcttcaaaagacaatacaaggatatgatgtccgaaggaggcccccccggcgcagaacctcaatag

SEQ ID NO: 191574 - DNA, 3462 bp, synthetic construct
  misc_feature 1..3462: note = Description of Artificial Sequence: Synthetic coding sequence
  source 1..3462: mol_type = other DNA
atggccctgcgggtgctgctgctgaccgccctgaccctgtgccacggtttcaacctggatacagagaatgccatgacctttcaagagaacgctagggggttcggccagtccgtcgttcagctccagggatcacgggtggtggtgggggcccctcaggagattgtagctgctaatcaaagggggtctctctatcagtgtgattactcaacgggatcatgtgagcctattagactgcaggtgccagtggaagccgtaaatatgtccttgggactcagcctggctgcaactaccagcccccctcaacttttagcttgtggcccgacagtgcaccaaacctgtagcgaaaatacatacgtcaaggggctgtgttttctgttcggctccaacctgcggcagcagccgcaaaaattcccggaagctcttcggggatgcccacaggaggactctgatatcgcttttttgattgacgggtccggttctattatacctcatgactttcggcgcatgaaggagtttgttagtaccgttatggaacaactgaaaaagagtaaaacgctcttttctctgatgcaatattcagaagaattccgtatccactttacatttaaggagttccaaaataatcccaacccaaggtccctggtgaaaccaattacccagctgttgggccggacacatacggctacgggaatacggaaggtggtgcgcgagctgttcaatatcaccaatggcgctcggaagaatgcatttaagattctcgtggtgatcactgatggagagaagttcggtgatcctctgggttatgaggatgttattccagaggccgaccgggagggagtgatacgctacgtgattggcgtaggagacgcatttcggtccgaaaaatcccgccaggagctgaatacaattgcatctaagccccccagggatcatgttttccaggtgaacaacttcgaggccctgaaaactattcaaaaccagctccgtgaaaaaatattcgccatcgagggtacacagaccggatcctcaagttctttcgagcatgaaatgtcgcaggagggtttctccgccgccatcacgtccaatggtcccctcttatcaacagtgggtagctacgactgggctgggggggtattcctctatacatctaaggagaaatctacttttatcaatatgacccgcgttgattccgacatgaacgacgcgtaccttgggtatgccgcggctattattcttcgtaatagagtgcagtctctcgttctgggcgccccaagataccagcacataggcctggttgcaatgttccggcagaacactggtatgtgggaatccaatgccaacgtgaaaggaacccagattggagcctacttcggagccagcctgtgctccgttgatgtggacagcaacgggtctaccgatctggtcctcataggtgccccacattattacgagcagacaagaggaggacaggtgtcggtgtgccctttgcccaggggccagcgagcccgctggcagtgcgatgccgtcctctatggggaacagggacagccatggggacgattcggggctgcattgacggtgttaggtgatgtgaacggagataagctcaccgatgtcgcaataggggcgccgggggaggaagataaccgcggagcagtatacctgtttcatgggacttctggctccggcatctcgccatctcattcacaacggatcgcagggtcgaaattatccccaaggctgcagtacttcggtcaaagcctctctggtggtcaggatctgacgatggatggcctggtcgatctgactgttggcgcccagggacacgttctgctcctgcgatcacagcctgtcttgcgtgtgaaggctattatggagtttaaccctagggaggtggccagaaacgtatttgagtgcaatgaccaggtcgtcaagggcaaggaagccggagaagttcgtgtttgccttcatgtacaaaaatcaacacgggatcgcctgcgagaagggcagatccagtctgtggtcacatacgatttggcgctggactcaggcagaccacatagtcgagccgtattcaatgaaaccaagaatagcaccaggaggcagacccaggtactcggccttacccagacttgcgaaacactgaaattacaactcccaaactgcatcgaggatccagtgtctcctattgtgctgcgcctgaatttctctcttgtgggcacaccactgtccgcgtttggcaatctgcgccccgtgctggcagaggatgcacagagattgttcacagccttgtttccctttgaaaaaaattgcggaaacgacaatatttgccaggatgatttgtccatcacgttcagttttatgagccttgattgtctcgttgttggcggccctagggagtttaatgtgacagttaccgtgagaaacgacggcgaggacagctaccgcactcaagttaccttcttctttcccctcgacctctcgtatagaaaggtatctacactgcaaaaccagcggagccagaggtcatggagactcgcgtgtgaaagtgcttcctcaaccgaagtgagtggtgccctgaaatccaccagctgctccattaaccatccaatctttccagagaattctgaggtaacgtttaatataacgtttgacgtcgattccaaggcatcgctgggaaataagctattactgaaagctaacgtgacttcagagaacaatatgcccaggacaaataagacggagttccaattggagctaccggtaaaatatgctgtatacatggtggttactagccatggagtttctactaagtatctcaacttcactgctagcgagaatactagccgagtcatgcagcatcagtaccaggtgagcaaccttggccagcggtccctgcctattagccttgtgtttcttgtgccggtgcggcttaatcaaactgtgatctgggataggccacaggtgactttttccgagaacctgtcaagcacttgccacacaaaggaaaggctgcccagtcactccgactttctggctgagctccgtaaggccccagtcgtcaactgcagcatagctgtttgccagaggattcagtgtgacatcccatttttcggtatccaggaagaattcaacgccaccttaaagggcaatctgtctttcgactggtacatcaagaccagccataatcatttgctgatcgtcagtacagccgagatcctctttaacgactctgtttttactctgctgccagggcaaggggctttcgtgcggtcgcagactgaaaccaaggtcgagccctttgaggtgcctaatcccctgccactcatagtcggtagttcagtaggcggtctgcttcttctagctctgattacagccgctctctacaaactcggtttctttaagcgtcagtacaaggatatgatgagcgagggcggcccacccggagccgaacctcaatag

SEQ ID NO: 191575 - DNA, 3492 bp, synthetic construct
  misc_feature 1..3492: note = Description of Artificial Sequence: Synthetic coding sequence
  source 1..3492: mol_type = other DNA
atgacccggacccgggccgccctgctgctgttcaccgccctggccacttccttggggttcaaccttgacacggaagaacttaccgcttttcgtgtcgatagcgccggctttggtgactccgtagtgcaatatgctaactcatgggttgttgtaggagccccgcagaaaataacagcagccaatcagacaggaggtctgtaccagtgcgggtacagcaccggcgcttgtgagccaataggactgcaggtcccaccggaagccgtcaacatgtctctgggactttctctggccagtacaaccagcccatcccagctgcttgcttgcgggcccactgttcatcatgaatgtggaaggaatatgtaccttaccggactttgctttctgctgggccctacccagcttacacagcgcttgccagtgtcaagacaagaatgtcctaggcaggagcaggacatcgtttttttgattgatgggtccggcagtatctcctccaggaactttgcgaccatgatgaactttgttcgtgctgtgatttcacagttccagcgcccttctactcaattcagcctgatgcagttttccaacaagttccagacacactttacttttgaggaattccgccggagctccaaccctctgtccctgcttgcaagcgtgcaccagttgcagggcttcacttacacagccacagccatccagaacgtcgtacaccgactctttcatgctagttatggcgcccgccgtgacgccgccaaaattcttattgtcataacggacggcaaaaaagaaggcgacagcctcgattataaagacgttattcctatggccgatgctgcaggaattatcagatatgcgatcggagtgggcttggcctttcaaaacaggaatagctggaaagagcttaatgacattgccagcaaacccagtcaggagcacatcttcaaggtcgaggattttgatgctctgaaggacattcagaatcaactcaaagagaaaatctttgccatcgagggcacagagaccacctctagcagttccttcgagctggagatggcccaggaaggattctccgccgtttttactcctgacggcccagtactgggagcagttggaagttttacctggagtggtggtgccttcctttaccctccaaatatgagcccgacgtttataaatatgtcccaagagaacgttgacatgcgcgacagctatttggggtactcaactgagctcgcgctctggaagggtgtacagagtcttgtgctcggggcccccaggtaccaacacaccggcaaggcagtgattttcacacaggtgtcacggcagtggcgcatgaaggctgaggtgaccggtacccaaatcggctcctactttggagcatcactgtgtagtgtcgacgttgactccgacggcagtaccgatctagtgctcataggggcgccccactactatgagcaaaccaggggaggtcaggtaagcgtgtgtcctctgccccgcggctggaggagatggtggtgcgatgctgtgctttacggggaacaaggacacccgtggggccggtttggcgctgctctcaccgtgttaggtgacgtgaacggggataaattgaccgatgttgtcataggtgcgccaggcgaggaggagaaccggggcgcagtctatttatttcacggcgttcttgggccatctatttcaccatcacactcccagagaatcgccgggagccagttatcaagccggcttcaatacttcggtcaggccttatccggaggccaagaccttacgcaggacggtctcgtggatctggccgtgggcgctcgtggacaggttttgctcctgcgcacaaggccggtgttgtgggttggagtcagcatgcagtttattcctgcagagattcctcggtcagctttcgaatgcagagagcaagtggtgtcggaacagactttggtacagtccaatatttgcctgtacatcgacaaacgctctaagaatctacttggctcaagagacctgcaatcatcggtaacactcgacctggccctggaccccgggaggctgtcacctcgggcaacgttccaagaaactaagaatcggagcctatcccgagtgagggtgttgggcctcaaagctcactgtgagaacttcaaccttcttctgccctcctgcgttgaagatagtgtgacccccataactctgcggctcaactttacccttgtggggaagcctctgttggcctttcggaatcttagacctatgttagccgctgatgctcagcggtattttaccgctagtctgccattcgagaagaattgtggggctgatcatatatgtcaggataacctgggcataagctttagtttccccggcctaaagtccctcctcgtgggttcaaacctggagcttaatgctgaggtaatggtctggaatgatggagaggactcctatggcactactataacattctctcatccggcgggcctttcctatcggtacgtcgcagaagggcagaaacaaggccagctgagatccctgcacctgacctgtgacagcgcaccagtggggtcccaggggacctggagcacaagctgcagaataaaccatctgatcttcagaggaggtgcacagattaccttcctggcaacgtttgatgtgagccccaaagctgtcttgggtgaccgcctattgctgacagcaaatgtgagttccgagaacaataccccacggacctccaagacaacctttcaattggagctgccagttaagtatgcagtgtatacagtggtcagttcacacgagcagttcaccaaatatctcaacttttctgagagcgaagaaaaggagtctcatgtggcaatgcaccgctaccaggtgaataatctgggtcagcgagatctcccggtttccatcaacttttgggttcccgtcgagctgaaccaggaggccgtttggatggatgtggaggtgtctcatccgcagaatcctagcctgaggtgttccagcgagaagatcgcaccacctgcctccgactttctcgcacatattcagaagaaccctgtgctcgattgttctatcgcgggatgcctccgattcaggtgcgacgtccctagtttcagtgtgcaggaagagctggactttaccctgaagggaaacctgagctttggttgggtcagacaaatacttcagaagaaagtctcagtggtctctgttgcagagataacatttgatacttctgtgtattcacagttgcccggccaggaggcattcatgcgggctcagacgacgaccgttctggaaaagtataaggtgcataatcccaccccgttgatagtgggctcaagtattgggggcctactgcttttagctttgattaccgcagtgctatataaggtaggtttctttaaaaggcaatacaaagaaatgatggaggaagccaatggccagattgcgcctgaaaatgggacccagacaccttcaccaccctcagaaaagtag

SEQ ID NO: 191576 - DNA, 5469 bp, synthetic construct
  misc_feature 1..5469: note = Description of Artificial Sequence: Synthetic coding sequence
  source 1..5469: mol_type = other DNA
atggccggcccccggcccagcccctgggcccggctgctgctggccgcactgatctctgtcagcctgtcgggcaccttggcaaatcggtgcaagaaggccccggttaagtcttgtaccgaatgcgtaagagttgataaggactgcgcctactgcaccgatgagatgtttagagatagacggtgtaacacacaagcagagctgttggctgctggctgtcagcgggaatccatcgtggtgatggagtcatcattccaaattacagaggagactcaaattgacactactctaagacgcagccaaatgagcccccagggattacgagtcaggttaagaccaggtgaggagcggcatttcgagctcgaagtcttcgaacccctcgaaagtcctgttgacttgtacattcttatggatttcagcaatagcatgagtgacgacctggataacctgaagaaaatgggccaaaacctcgcaagagtcctatctcagttgacatcagattataccattggattcggaaaattcgtggacaaagtgtccgttccccagaccgatatgagacctgagaagcttaaagagccatggcccaacagcgaccctccattttctttcaagaacgtaatcagcttgaccgaagacgtggacgaattccgaaacaagctccaaggggaacgaatttcaggcaatcttgatgcgcccgaggggggatttgacgcgattttacaaaccgctgtctgcacgcgggacattggctggcgacccgacagcacccacctgttagtattttctactgaatcagccttccactacgaagctgatggggctaatgtgttggccggtattatgtctaggaacgatgaacggtgccatttggacacaaccggcacctatacccagtatagaacacaggactatcctagcgttcccaccctggttcgtctccttgctaagcataacattataccaatcttcgctgttactaactacagttattcatattacgagaagcttcatacctatttccctgtctcatcccttggcgtgctgcaggaggatagcagcaacatcgtcgagctccttgaggaggcatttaatcggattagaagtaacctggatatcagagccctggacagcccaaggggcctgagaacagaagtgacttctaagatgttccagaaaacccgcacaggctccttccatataagaagaggagaagtaggtatctaccaagtccagttaagagccctcgagcatgtcgatggcactcacgtgtgtcagctgccggaagaccaaaaagggaatattcacttgaagcctagtttttctgatggactcaaaatggacgcgggcatcatctgcgacgtctgtacatgcgagttgcagaaggaggtgcggagcgctcggtgctcttttaacggagatttcgtctgtggccagtgtgtctgttccgaaggatggtccgggcagacctgtaactgcagcacaggaagcctctccgatatccagccctgcctgcgcgaaggcgaggataaaccatgttccggccgaggggagtgtcagtgtggtcattgcgtctgttatggtgagggcagatacgaaggacagttttgtgaatacgacaattttcagtgtccgcgtacttctgggttcctgtgcaacgacagaggtaggtgctctatgggacagtgcgtgtgtgaaccaggttggactgggccatcgtgcgactgccccctatctaacgccacatgtattgacagcaatggtgggatctgtaatggccggggccattgcgagtgtggaagatgccattgccaccagcagagcctgtacacagatacaatctgcgaaatcaattatagtgcaatccaccctggcctctgtgaagacctgcgctcatgtgtgcagtgtcaggcctggggcacgggcgagaaaaaggggaggacctgtgaagagtgcaattttaaagtgaagatggtggacgaactgaagcgcgctgaagaagtggtggtgcggtgctccttccgagacgaagacgatgattgtacatactcctatactatggaaggggatggcgcccctggaccgaactcaaccgtgctggtacacaaaaagaaagattgtccccccgggtccttttggtggctgattccactccttctgttgctcctgcctctgcttgctctgctcctgttgctgtgctggaagtactgtgcctgttgtaaggcctgtctggcgctgctgccctgctgcaatcgtggacatatggtgggcttcaaggaggatcattacatgttaagggaaaacttaatggcatccgatcaccttgacactcccatgcttagatcaggcaatttaaagggaagggacgtagtcaggtggaaagtaactaataatatgcaaagaccaggcttcgccacgcacgctgcctccattaatcccacagaattagtgccctacggcctctccctcaggttggcacggctgtgcaccgagaacttgctcaagcctgatacgagagaatgcgcccagctccgacaggaggtggaggaaaacttgaatgaggtgtacaggcagataagcggcgtccataagctccagcagacgaagttccgtcagcagcccaacgcaggcaaaaagcaagaccacacgattgtggacactgtgctgatggcccctcgcagcgctaaacccgccctgctaaaacttaccgaaaaacaggtggaacaacgagcattccatgacctgaaggtggccccaggatactacactttgacagcagaccaagacgcacgcggaatggtagaattccaagagggcgtcgaattagtggatgtaagagtccctctgtttatccggccagaggatgacgacgagaagcagttgttagtcgaggctattgacgtgccagccggtactgctactctaggtcgcaggttggttaatatcaccatcattaaagaacaggcgcgggacgtggtgagttttgagcaacctgagttctccgtgtccagaggggaccaggtggccaggattcccgtaattcgcagagtgctggatggggggaagtctcaggtgagttatcggacccaggacggtactgcacagggaaacagggactacattcccgtggagggcgaactgctgtttcagcctggggaggcctggaaagaactgcaggtgaaactcctggagctccaggaggtcgatagcctgctacggggacgccaggtacgtaggtttcacgtccagctcagcaaccccaagttcggcgcacatcttggacagcctcatagcacgacaataatcatacgcgaccccgacgaactcgaccgcagttttacgtcccagatgctgagttcccaaccccctccacatggcgatctgggagcaccacagaacccaaacgctaaagcggctggatccagaaaaatacattttaattggcttccccctagtggcaaacctatggggtatcgggttaaatattggatacagggagacagcgaatctgaggcccacttgttagacagcaaggttccgtctgtcgagctcactaacctttatccttactgcgactatgaaatgaaggtgtgtgcatatggggcccagggagagggcccctattcctccctggtttcctgtaggactcaccaggaggtaccttcagaaccaggtcggttagcatttaacgtcgtttcctccaccgttacacagctcagctgggccgagccagccgagactaacggagagatcacggcgtacgaggtgtgctacggtctggtgaatgacgacaatcgccccatcggaccaatgaagaaagtcctcgtggacaatccgaaaaaccgaatgctcctgattgagaacctccgcgagtcacagccctaccgctatactgttaaggccagaaacggagcgggttgggggcctgagcgcgaagccatcattaacctggccacccagccgaagagacccatgagtatcccaatcatccccgatattcccatagtcgatgctcaaagcggcgaagattacgattcattcctgatgtacagcgatgatgtgcttcggtctccttcaggatcacagcgcccaagcgtctcagacgataccgggtgtggttggaagtttgagccattgcttggagaggaactggatcttaggagagtgacttggcggctcccacccgaacttataccgcggttaagtgccagctccgggcgtagtagcgatgcggaggctcctcacggccctccggacgacggaggagccggaggaaaagggggaagccttcccagaagcgccacccctggtcccccaggcgaacacctcgtgaacggtcggatggatttcgcatttcctgggagtactaacagtctccaccggatgactacgaccagtgcagcagcttacggtacacatctgtccccacacgtgcctcaccgggttctgtccaccagctctaccctcaccagggattacaattctctgacccgctcagaacacagccatagcacaacactgcctcgagattatagcactcttacctctgtgagctctcacgactctagactgacagccggggttccagacaccccgacgcgccttgtcttttcggctctgggacccacttccctccgcgtttcctggcaggagccccgatgtgagcgacctctgcagggctactctgtggaataccaactgctgaacggcggagaactccaccgcctgaacatcccaaaccctgcccaaacttctgtcgtggttgaagatctgctcccaaatcactcttacgttttcagagtcagagcccagtcccaggaaggatgggggcgtgaacgggagggcgttattaccattgagtcccaagtccaccctcagtcccctctatgtcctctcccaggctcggcatttaccctgtctacccctagcgcccccggacctctcgtcttcactgctctgagtcctgattccctacagctcagctgggaaagacctcgacgccccaacggcgatattgtggggtatctagtcacttgcgagatggcccagggcggaggaccagccacagctttcagagtggacggggattcccctgaatcaaggctcactgttccgggcttatctgagaatgtgccctacaaattcaaggtgcaggcccgcacaacggagggatttgggcccgagcgagaaggcattatcacaattgaatctcaggatggagggccattcccacagctcggatcacgggcagggctgttccagcaccctttgcagagcgaatattcttcgattactacaacgcacacatccgccactgaaccctttctggtggacggattaacactaggagcccaacacctcgaggccggaggatccttgacgaggcatgtgacacaggaattcgtcagtaggacgctcactacttcgggcaccctttcgacccatatggatcagcaattctttcaaacgtag

SEQ ID NO: 191577 - DNA, 5418 bp, synthetic construct
  misc_feature 1..5418: note = Description of Artificial Sequence: Synthetic coding sequence
  source 1..5418: mol_type = other DNA
atggccggcccccggcccagcccctgggcccggctgctgctggccgcattaatttccgtctcactctccgggactctagccaatcgttgtaaaaaagcccctgttaaatcatgcacagagtgtgtcagggtggataaggactgtgcctattgcacagacgaaatgttccgtgaccgccgctgcaacacacaggccgaactgttagcagccggctgccaacgtgagtccatcgtggtgatggagagttcctttcagattaccgaggagacgcagattgacacaaccctgaggcgcagccagatgtcaccccaggggttacgggtccggttgcgtcccggtgaggaaaggcattttgagctcgaggttttcgagccattagaatccccggttgatctgtacatcttgatggacttcagtaactccatgtccgatgacttggataatctaaaaaaaatgggccagaaccttgctagagtgctttctcagctgacttccgattacactatcgggtttggcaaattcgtggacaaagttagcgttccccagacagacatgcgccccgagaagctcaaggagccctggcctaactccgaccctcctttctcttttaagaatgttatctccctgactgaggatgtggatgagtttcggaacaagttgcagggcgaaagaattagcggcaatctggacgcccctgagggcggattcgacgcgatcctacagaccgccgtctgcactcgcgacatcggatggcggcccgattcaactcacttgttggtcttctccacagagagtgctttccactatgaagctgacggggcaaatgttctggcgggtatcatgagtcgcaacgatgaacggtgtcacctcgacacaaccggcacctacacacagtacaggacacaagattatccctcagtgccaaccttggtgcgccttctcgcaaaacataatatcattccgatatttgccgtgacaaactatagctactcctattatgagaaactgcacacttatttccctgtgtcttcactcggcgtgttacaagaagactccagcaatattgtggaattgctggaagaggctttcaatcgcatacgcagcaacctggatatccgggcactcgactctccccggggactgcgtaccgaagttacgagtaagatgttccagaaaacacgcactggcagctttcatatcagaagaggcgaggtaggcatttatcaagtgcagctacgggcattggagcatgtagacggtactcacgtgtgtcagctcccggaagatcaaaaaggcaatattcacttaaagccgtcattttcagatggactgaaaatggacgcggggatcatatgcgatgtgtgtacttgcgagctccagaaggaggtgaggagcgcacgctgtagcttcaacggggattttgtatgtggacagtgcgtgtgtagtgaaggctggtccgggcaaacttgcaattgttctacgggcagcctgtccgacatacaaccttgcttgagagaaggagaggataagccctgctccgggagaggggagtgccagtgcggacactgcgtctgttacggggaggggcggtatgagggtcaattttgtgagtatgacaattttcagtgccctaggacgagtggctttctctgtaacgacaggggccgctgcagtatgggacagtgtgtgtgcgagcctggctggactggccctagctgcgattgtcccctgagcaacgccacatgtatagacagcaacgggggcatctgtaacggccgtggccattgcgaatgtgggagatgccactgccatcagcagtctctttatacggatactatttgcgagatcaactacagtgccatccatcctggtctgtgcgaggatttacgcagttgcgttcagtgccaagcgtgggggactggagaaaaaaagggtagaacatgcgaagagtgcaattttaaggtgaaaatggtagacgagcttaagagggccgaggaggtggtggtgagatgcagcttcagagatgaggacgatgactgtacatattcctacaccatggagggcgatggtgcccctgggcccaactccaccgtcttagtccacaagaaaaaagattgtccccccgggtctttttggtggctgatacccctacttctgttgctcttgccattgttggctcttctgttactgctgtgctggaaatactgtgcttgctgtaaagcatgtctggcactactaccatgttgtaaccgcggccacatggtgggttttaaggaggaccattacatgctgcgagaaaatctgatggccagtgatcacttagacaccccgatgttaagaagtggaaacctgaagggaagggacgtcgtgaggtggaaggtgaccaataacatgcaacggcctggattcgcgacccacgcggccagcattaatcccaccgaactcgtaccctacggtctgtcattgcgactggccagactgtgcaccgagaaccttctcaagcccgatacccgcgagtgtgcccaactgagacaggaggtcgaggagaatctgaacgaggtttacagacagattagtggggtccataaactgcagcagactaagtttaggcagcagccaaacgcagggaaaaagcaggatcacacaattgttgatactgttctcatggctccaagatcggccaagcctgcgctcctcaaactgactgagaaacaagtggagcagcgggcctttcatgatcttaaggtagccccaggctattatacacttaccgcggaccaggatgcgcgaggcatggtggagtttcaggagggcgtcgagctggttgatgtgcgggtgcccctttttattagaccagaggatgatgatgaaaaacagttgttggtagaagccatcgacgtcccagccggaaccgccactttgggccgtcgcctggtgaatatcacaataattaaggaacaagcccgagatgtcgtgtcctttgagcaaccagagttctcagtgtctcgcggcgaccaggttgctaggattcctgttattcggcgcgttttagacggtgggaagtcacaagtatcttacagaacccaagacggtactgctcaaggaaacagggactacataccggtcgagggagaacttctcttccagccaggagaagcttggaaggaactgcaggtaaaactgttggaattacaggaagttgacagccttctacgaggaagacaggtgagaaggttccacgtccagttatccaaccctaagttcggagcacatcttggacagccacattcaacaactatcatcatccgggatccagatgagttggacagaagttttacatcccagatgctgtcgtcacaacctccaccacacggagatcttggtgcacctcagaacccaaatgctaaggcagcagggtcgaggaaaattcactttaactggttgcctccgtccggtaaacccatgggatatcgagtgaaatactggatccaaggcgattccgagtctgaggcgcatctgctggattcaaaggttcctagtgtggagctcactaacctctacccctactgcgattatgagatgaaggtctgtgcctatggcgcacagggggaggggccctatagctccctggtgtcttgtcgaactcaccaggaggtgcctagtgaaccgggaaggctagccttcaatgtggtgtcctcaactgtgactcagctctcctgggccgagcccgccgaaactaatggagaaatcaccgcctatgaggtatgctacggacttgtcaacgacgataacaggccgataggccccatgaagaaggttctggtggacaatccgaaaaatagaatgctgctcattgaaaacctcagagagtctcaaccctatagatacaccgttaaggctagaaacggcgccgggtgggggccagagagggaagcgataatcaacttggcaacccagccaaaacgccccatgtcaatcccgattatccccgatatcccaattgtggacgcccagtcaggagaagactacgattctttcctgatgtattctgatgatgtcttgaggagtcccagtggctctcaaaggcctagcgtatcagatgataccgaacacctcgtgaatgggaggatggatttcgcttttcccggctcaaccaacagcttgcataggatgactactactagcgctgctgcttatggaacacatctaagtcctcatgtgccacaccgggtcctctctacaagctcaacactgacccgtgattacaattcactcacaagaagtgagcactctcacagtaccacactgcctagagactactcaacacttacttcggtttcttcacatggattacctcctatctgggagcatggacggagtcgactacccctcagttgggcattaggctccaggtcccgtgcccaaatgaaaggttttccccccagccgcggcccccgtgattccatcatcctggcaggcaggcctgctgccccctcatggggtcctgactctaggctgactgccggcgtgcctgatacccccactcgtctggtcttctctgccctgggaccgacatctctcagagtgagttggcaagagcccagatgcgagcggcctcttcaaggctactcagttgagtatcaactgctgaatggaggagagctccaccgccttaatatccccaatcccgctcaaactagtgtggttgttgaggacctgttaccaaaccactcgtatgtgtttcgggtgagagctcagagtcaggagggctggggaagagagagggagggcgtgattacgattgagtcccaagtacacccgcaaagcccactgtgcccgctgccagggtctgcctttacactgtccacaccttctgcccccggccctctcgtgttcactgccctgagccctgactcactgcaactcagctgggaaaggccgaggcggccaaacggggacattgtcggctatctagtaacctgcgaaatggcccagggagggggtcccgcgaccgcttttagagtggacggcgactcgcccgagtcaaggctgactgtgcccgggttgagcgagaacgtgccatacaagttcaaagtgcaagcgcgcaccaccgaagggttcggccccgagagagagggcattataaccatcgaatcacaagatgggggtccctttccgcagcttggtagcagggccgggctgttccagcacccactacagtcagaatacagcagtatcaccacgacccacacatccgcaacagagcccttcttggtggacggcctaactttaggggcgcagcatcttgaagccggcggctctctgacccggcatgtgacccaggaattcgtcagccgaaccttgacaacctcaggcacactgtcgacacatatggatcagcagtttttccagacctag

SEQ ID NO: 191578 - DNA, 5418 bp, synthetic construct
  misc_feature 1..5418: note = Description of Artificial Sequence: Synthetic coding sequence
  source 1..5418: mol_type = other DNA
atggccggcccccggcccagcccctgggcccggctgctgctggccgccctaatcagtgtgtctttgtctgggaccctcgctaatcggtgcaagaaagcgcccgtgaagtcatgcacagagtgcgtaagagttgacaaggattgtgcatattgtaccgacgaaatgtttcgggacaggcggtgtaatacacaggcagaactgctggcagcaggatgccaacgcgagagcatagtcgttatggagtcctcattccagattacagaggaaacacagatagacaccactcttagacgatctcagatgtctccacaaggcctcagggtacggctccgccctggtgaggagcgacactttgaactggaggtgtttgagccccttgagtctcctgtggatttgtacatactgatggacttctccaattccatgtccgatgacctggacaacctgaaaaagatggggcaaaacctggcccgggtgttaagccagctcacttctgactataccatagggtttggaaaatttgtggacaaggttagcgttccacagaccgatatgcgaccggagaagctgaaagaaccatggcccaacagcgatccgcctttctccttcaagaacgttatctccttaactgaggacgtggacgaattccgaaacaaactgcagggtgagagaatttccgggaatctcgatgctcctgaaggcggcttcgatgccatactgcagacggcggtctgtacgagggacataggctggcgccccgattccacgcatctgctggttttctcaaccgagagtgcattccactacgaagcggacggggccaatgtactggctgggatcatgtctcgcaatgacgagcgctgtcacctcgataccacgggaacatatacccagtaccgaactcaagactaccccagtgtgcccacattggtgcgattactggctaaacataatattatacccatctttgctgtgacaaactattcatattcatactacgagaagctccatacgtatttcccagtaagcagcttaggagttttgcaggaggatagttccaatatagtagaattgctggaagaggcatttaacagaatcagatctaatttagacatacgcgccctggattcgccacgaggccttcggaccgaggtaacaagtaagatgtttcagaagacgagaaccggcagctttcacattagacggggagaggttggtatttaccaggtccagctgcgggcgctggaacacgtcgatggaactcacgtatgtcaactgcccgaagatcagaaaggaaatatccacttgaaaccgtccttcagcgatggccttaagatggatgctggcatcatatgtgacgtgtgtacatgcgaactgcaaaaagaagtgcggtctgctagatgctcgttcaatggtgactttgtctgcggacagtgcgtttgcagtgaaggctggagtgggcagacatgtaactgttccacgggatcactgagtgatatccagccatgtcttcgcgaaggcgaggacaagccgtgctccggccggggcgaatgccagtgcggccattgcgtatgttacggggagggcagatacgaagggcaattctgcgaatacgacaacttccagtgccctagaacgagcggatttctttgcaatgacaggggccgctgctctatgggccaatgcgtatgtgagcccggatggaccggaccttcttgcgactgtcctcttagcaacgcaacatgcatagacagcaatggcggcatttgcaatggaaggggccattgcgaatgcggacgttgtcattgtcatcaacaatctctctataccgacaccatttgtgagataaactacagtgccatccacccgggtctctgtgaggatctgcgctcctgcgtgcaatgccaggcctggggtaccggagagaagaaagggcgtacttgcgaggagtgcaatttcaaggtgaaaatggtggacgagcttaagcgcgcagaagaagtggtggttagatgttccttccgcgacgaagacgatgattgtacctactcctataccatggagggagatggggccccaggccccaattcaaccgtgctagtccacaagaaaaaagactgtcctcccgggtcattctggtggctaattcccctgcttttactgctgctgccgctgttagcacttctgctgctcctttgctggaaatactgtgcatgttgtaaggcctgcctcgccctgctaccttgttgcaaccgcgggcacatggtgggattcaaggaggaccattatatgctaagggaaaatttgatggcaagtgaccacctcgatactcctatgcttcgctcaggtaatttaaagggccgcgatgtggttcggtggaaggtgacaaacaatatgcaaaggcccgggttcgccactcacgcggcctctataaacccaaccgaattggtaccatacggactgagcctaaggctggcgcgtctgtgcacagaaaacctactgaaacctgacacccgggagtgcgcacagctgagacaggaggtcgaggaaaatctgaacgaggtgtacagacagatcagcggggtccataagctgcagcagacaaagtttaggcagcaacccaatgccgggaagaagcaggaccacacgattgtggacacagtgctgatggctcctcggtcagccaagccggccctgctgaagctgaccgagaagcaggttgagcaaagagcttttcatgacctcaaggttgcgccgggatactacaccctgaccgctgatcaggacgctcgaggcatggtggagttccaggaaggggtcgagctggtcgacgtgcgggtcccactgttcattcggccagaagacgacgatgagaagcagctactcgtcgaggcgattgatgtgccagccggcaccgcaacgcttggtaggagactggtcaacattaccattattaaagagcaggccagagatgtcgtgtccttcgagcagcccgagttctctgtgtctcgaggggaccaggtggcaaggattcccgtgatccgacgagtactcgacggcggaaagtcacaggtgtcctatagaactcaggacggaactgcccaaggcaaccgggactacatccctgtggagggagagcttctattccagcctggggaggcctggaaggaattgcaagtgaaactgttagagctgcaagaggttgatagccttttgcgcggaaggcaggtgcggcggtttcatgtacagctctctaacccgaagttcggtgcccaccttgggcaaccacattcaacgaccataataattcgtgatccggacgagcttgatcggtcatttacatcacagatgcttagcagccagcctcccccgcacggggacctgggcgctcctcagaatcccaacgccaaggccgccggttccagaaagatccactttaattggctgcccccatcgggcaagccaatgggttatagagtgaaatactggattcagggcgactccgagagcgaagctcacttgctggactctaaggtgccgagcgtggagctgaccaatctctatccctactgcgactacgagatgaaagtgtgtgcctacggcgcccagggggaagggccgtactcctccttagtcagctgccgaacccaccaggaggtgccttctgagcccggccgactggccttcaatgttgtgagcagtacagttacacagctgagctgggctgagcctgccgagaccaacggggagattaccgcatacgaggtgtgctacgggttagttaatgacgataacaggccaatcggccccatgaagaaggtactcgtggacaatccaaaaaaccgaatgctactgatagagaatcttagagagtctcagccatataggtacacggtgaaggcccgcaatggtgccgggtggggcccggagcgcgaagccataattaatctagcaacccaacctaagaggcctatgtcaatcccgattatccccgacattccaattgtcgatgcacagagtggtgaggattacgattcatttctgatgtattcagatgacgttctaaggtcacctagcggttcccagagaccaagtgtatcagacgatactgaacaccttgtgaacggccggatggacttcgcatttcccggctccactaattctttgcaccgaatgacaacaaccagcgcagcagcatacgggacccatctaagtcctcatgtaccccaccgggtactgtctactagctccaccctgaccagggactacaactccctcacgcggtctgaacactcccatagtacgacactgccaagggactactccaccctgacaagcgtatcaagccatggccttccacctatctgggagcacggaagatcacgcctgccgctttcttgggcccttggttctagatcgagggcacagatgaaaggtttccccccctcaaggggccccagagactctatcatactggctggcagaccagcagcaccttcttggggcccagatagccgtttaacggcaggcgtgcccgacacccctactagattagtgttcagtgccctaggccccacaagcctgcgggtctcctggcaggagccccgatgtgaacgcccactgcagggctatagtgtcgaataccagttactgaacggcggtgaactgcatcgcctgaatattcctaacccagcccagacatcagtcgtcgtggaggacctacttcccaatcatagttacgtttttcgggtgagagcacagagccaagagggatggggccgtgagcgggagggagtcataaccatcgagagccaagtacacccccagtcccctctttgtccattgcctgggagcgctttcaccttgtcaacgccctccgcccctgggcccctggtgtttaccgctcttagtccagactcgctccagctgtcttgggaaagaccccggcgcccaaacggagacatcgtgggctacctcgtcacctgcgaaatggcacagggaggcggtcccgccactgcgtttcgtgtcgacggcgattcccctgagagcagactgacggtcccggggttgagcgaaaatgttccatataaatttaaggtgcaggcccgcaccacagaaggttttggccctgaacgagaagggattatcacaattgaatcacaggacggggggcccttccctcagctcggaagcagggctggcctcttccagcacccactgcagtctgaatattcctccatcaccacaacacatacatccgccaccgagcctttcctggtcgatggattaactcttggcgcccagcatctggaggctgggggaagcctaacccgtcatgtgacacaggaattcgtgagccggacgttgacaacttctggcaccctctcaactcacatggatcagcagttcttccagacttag

SEQ ID NO: 191579 - DNA, 1932 bp, synthetic construct
  misc_feature 1..1932: note = Description of Artificial Sequence: Synthetic coding sequence
  source 1..1932: mol_type = other DNA
ggcggcatcgaggagacccagatcgacaccaccctgcggcggagccagatgagcccccagggattgcgggtgaggctgaggccaggggaagagagacacttcgagctggaggtgttcgagcctttggaatcaccagtagacttgtatattctgatggattttagtaattccatgtcagatgatctggacaacctgaaaaagatgggccagaatctagccagagtcttgtcacagcttacatctgactacacaatcgggtttggtaaattcgtggacaaggtgtccgtgccgcagacagatatgcggcccgagaagctgaaagaaccatggcccaactcagaccctccgtttagcttcaagaatgtcattagtctgacagaggacgttgacgaattccggaacaaacttcagggagaacggatctctggcaacctcgacgcccccgaaggcgggttcgatgcaatcttgcaaaccgccgtgtgcaccagggacatcggatggagacccgactccacccaccttctggtgtttagcaccgagtctgccttccactatgaggcagatggggctaacgtgctcgctggtattatgtccagaaatgatgagcgctgccatctggatacaacgggaacttacactcagtaccgcacgcaggattatccatcagtgcccactctagttaggctactggctaagcacaacatcattccaatctttgccgtgaccaactactcttacagttattacgaaaagctccacacttacttccctgtctcatctcttggcgtgcttcaggaggactcatcaaatatagtagagctgctcgaagaggcctttaatcgtattagaagcaatctcgatattcgtgctctggattcccctagaggacttcggaccgaggttaccagcaagatgtttcagaagacaaggactggctcattccacatccgccgaggagaggtcgggatctaccaggttcagctccgagccctcgagcacgtggatggcacacatgtgtgtcagctgcccgaagaccagaagggaaacattcacctgaaacctagtttcagcgatggactgaagatggatgcaggaattatttgcgatgtgtgcacttgcgagttgcagaaggaggtgagatccgcccgctgctcattcaatggtgattttgtgtgtggccaatgtgtatgctcagagggctggtctgggcagacctgcaattgtagtaccgggagccttagtgatatccagccttgcctccgagagggtgaagataagccttgcagtggtaggggagagtgccaatgtggacactgcgtgtgctatggtgaaggccgatatgaggggcaattttgtgagtacgataacttccaatgtcctagaacaagcggattcttgtgcaatgacagggggcggtgcagcatgggccagtgcgtgtgcgaaccaggatggacaggcccgtcctgcgactgccctcttagtaatgcaacctgcatcgatagcaatggcggcatatgcaacggccggggccactgcgaatgcggccggtgtcattgccatcaacagagtttgtacacagacacaatatgtgagatcaattacagcgccatacaccctggtctttgcgaggatctgcgatcctgcgtgcagtgtcaagcctggggcactggcgagaaaaaaggcagaacctgcgaggagtgtaatttcaaggtgaaaatggttgacgagctgaagagggccgaagaggttgtagttcggtgcagctttcgagatgaagacgatgattgcacctactcttacacgatggagggcgatggagcaccaggacccaacagcacagtgctggtgcacaagaaaaaagactgccctcctgggagcttctggtggctcattcccctcctactacttctactacctctgctggcactttag

SEQ ID NO: 191580 - DNA, 2367 bp, synthetic construct
  misc_feature 1..2367: note = Description of Artificial Sequence: Synthetic coding sequence
  source 1..2367: mol_type = other DNA
atgggcatcgagctgctgtgcctgttcttcctgttcctgggccggaacgatcatgtccagggcggatgtgcactggggggagccgagacctgtgaagactgtctcctcatcggtcctcagtgcgcctggtgcgcccaggaaaattttacgcatcctagcggagttggtgaaagatgcgacacgcccgccaacttactagctaagggatgccagttgaactttattgagaatccagtaagccaggtcgaaatactcaaaaataagcctctgtcagttggacggcaaaagaactcttcagatatcgttcaaatcgccccccagtccttgattttgaaactgcgaccaggaggagcccagaccctgcaggtgcacgtgcgccagaccgaggactacccggttgatctgtattatctgatggacctgagtgcctctatggacgatgatctgaacacgataaaagaactaggctcccgcctgagcaaggagatgagtaagcttacctccaatttcagactcggatttggctctttcgtcgagaagccagttagccccttcgtcaagacgacacccgaggaaatagccaacccctgctcaagtatcccatatttctgtctccctaccttcggcttcaagcacattctacctcttaccaatgatgctgagcgtttcaatgagatagtcaagaatcagaaaatttctgcaaacattgacacgccagaaggcggattcgacgcaattatgcaggcagctgtgtgtaaggagaagatcggctggcgcaatgattcactgcacctgctggttttcgtctccgatgcagattcccattttggaatggactctaaattggcaggaatagtgatacccaacgatggactgtgtcacctggactccaagaacgagtattccatgtccacagtcctggagtacccaaccattggccaacttattgacaagttagtccagaataacgtattactaatcttcgccgtgacacaggaacaggtacatctgtacgagaactacgctaagctcattcccggggccaccgtgggactcctccagaaagacagcggcaacatcctgcagctgatcatatctgcctatgaggaactgagatcagaagttgaacttgaggtgctgggcgacaccgagggcttgaacctaagctttaccgctatctgcaataacggcacactgtttcagcaccaaaagaagtgttcccacatgaaagtcggggatacagctagcttcagcgtgactgtcaatattcctcattgcgaaagacgctctcgccacataattatcaaacccgtaggtcttggcgacgctctggaactgctggtcagtccagaatgcaattgtgattgtcagaaggaggtcgaagtaaactcaagcaaatgccaccacggcaacggtagctttcagtgtggagtgtgtgcctgccatccaggacacatggggcctcgctgtgagtgcggggaggacatgctaagcacagattcctgcaaagaagcccctgaccacccatcttgttccggcagaggcgattgctactgcgggcagtgtatttgccacctctcgccctacggcaatatatatgggccttattgtcagtgtgacaactttagctgcgtgcgacacaagggccttttatgtggaggcaacggcgactgcgactgtggtgagtgtgtctgtagaagcggctggaccggtgagtactgtaattgtacaacttccacggatagctgtgtgagcgaggatggggttttgtgcagcggacgaggggactgcgtgtgcggtaagtgcgtgtgtaccaatccaggcgcgtccggcccaacttgcgagaggtgtcctacatgtggcgacccttgcaatagtaagcgaagctgtatcgaatgccacttgagcgcagccggccaggctagagaagagtgcgtggacaaatgcaagctggctggggctactatttctgaagaagaggattttagcaaagatggcagcgtgagttgcagcctccagggagaaaacgagtgtctgattactttcttaataaccaccgacaatgaaggcaaaacaatcatacacagcataaatgagaaggattgtccaaaacccccgaacattcctatgataatgctcggtgtcagtctagctattctgctgatcggtgtggtgctgctgtgcatttggaagttactggtgtctttccatgaccggaaagaagtagcaaagttcgaagcggagcgatctaaggctaaatggcagacgggaaccaatccgctgtataggggctctaccagcaccttcaaaaacgtgacttataaacaccgagagaaacagaaagtcgacctcagcaccgattgttag

SEQ ID NO: 191581 - DNA, 2367 bp, synthetic construct
  misc_feature 1..2367: note = Description of Artificial Sequence: Synthetic coding sequence
  source 1..2367: mol_type = other DNA
atgggcatcgagctgctgtgcctgttcttcctgttcctgggccggaacgaccatgtccaaggaggatgtgccttagggggtgctgagacatgcgaggattgcctgctgatcggcccccaatgtgcttggtgcgcacaggagaatttcactcaccccagcggggtaggggagcgctgtgatacccccgccaatttactggccaaaggctgccaactcaactttatcgagaaccctgtctcacaggtggaaatactcaagaataagcctctctccgtcgggcggcaaaagaattcaagcgacatagtacagattgctcctcagagcctaatcctgaagcttcgtcccggcggggcccaaacattgcaagtgcatgtgcgacagaccgaggactaccctgtagatctgtattaccttatggatctttctgcctctatggacgacgacctgaacactatcaaggagttgggcagcaggctctctaaagagatgtcaaagctgaccagtaatttccggttagggtttgggtctttcgtagagaagcctgtgagcccattcgtgaagactacacccgaggagatagccaatccttgcagctccattccttatttttgcttgcctacttttgggttcaagcacatcttgccactgacaaacgatgctgaaaggtttaacgagatagtcaaaaaccagaagatctcagcaaatatcgacacacccgaaggagggtttgacgcaataatgcaggcggctgtttgcaaggaaaagattggatggagaaacgatagcctccatttactggtattcgtcagtgatgccgatagtcatttcggaatggatagcaaactggcaggcatcgtgatcccaaacgacggcctgtgtcacctggattcgaagaatgaatacagtatgtctaccgttctcgaatatcccactattggtcaactcatcgacaagctcgtgcagaataacgtgttgctaattttcgccgtgactcaggaacaggtgcatctatacgagaactatgccaaattaatacctggtgcgacggtgggacttttacaaaaggatagtggtaatatccttcaattgattatctctgcatatgaggaactgagatcggaggttgaactcgaggttctcggcgacaccgagggcctgaatctgtcattcaccgcgatctgtaataatggcaccctattccagcaccagaagaaatgtagccatatgaaggtgggcgacaccgcgagtttcagcgtcaccgtcaatattccacattgtgagagacgctccagacatataattataaagccagtgggtttaggtgacgcgttggaacttctggtgagccctgagtgcaactgcgattgtcaaaaggaggtggaagtgaatagctccaagtgtcaccatggaaacggatcattccagtgtggcgtctgcgcgtgtcaccctgggcatatgggcccccggtgtgagtgtggagaagacatgctgagcaccgatagctgtaaggaggccccagaccatccatcttgttccggcagaggcgattgctattgtggccagtgcatttgtcatttatccccctatggcaatatttacggaccatattgccaatgcgataacttcagttgtgttcggcacaagggacttctctgtggagggaatggcgattgtgattgtggggagtgcgtgtgccggtccggttggacgggagagtactgcaactgtactacctcaaccgacagctgcgtgtctgaggacggcgtactgtgcagcggacggggcgactgcgtctgcggcaagtgcgtctgtacaaatccaggagcctctggccctacatgtgagagatgtcccacttgtggcgacccctgcaattccaaaagaagctgtatagagtgccacctgtcggcggcgggtcaggccagagaggagtgcgtcgataagtgcaaattggccggtgccacgatcagtgaagaagaggatttctcgaaagatggcagcgtgagttgtagtttgcagggtgaaaacgaatgtttaataacattccttataaccaccgacaacgagggcaaaaccattatccacagtatcaacgaaaaagattgtccaaaacctcctaatatccctatgattatgttaggcgtgtcgctggctatcctcctaatcggcgtggtcttgctgtgtatttggaagctacttgtcagttttcatgataggaaagaagtggccaagtttgaagccgagcgcagtaaggctaaatggcagactggcaccaacccgctgtatcgcgggtctacttccaccttcaagaatgtgacatacaaacatcgggaaaagcagaaggtggatctcagtactgactgttag

SEQ ID NO: 191582 - DNA, 2397 bp, synthetic construct
  misc_feature 1..2397: note = Description of Artificial Sequence: Synthetic coding sequence
  source 1..2397: mol_type = other DNA
atggtggccctgcccatggtgctggtgctgctgctggtgctgagccgcggtgagtccgagctggatgctaagatcccttctactggagacgctacagagtggaggaatcctcacctgagtatgcttggctcttgtcagcccgctccttcttgtcaaaaatgcatattaagccacccgtcgtgcgcctggtgtaagcagctcaatttcacggcatctggagaggctgaagcccggcgatgtgcacgtcgggaagaactgctggcaaggggctgtccactagaagagctagaagaaccaaggggccagcaagaggtcttgcaggatcagcctctctcccagggcgcaaggggggaaggcgctacacagttagccccccaacgagttcgagtgacgctccgcccaggcgaaccacaacaattgcaggtgcgcttcctgagagctgaggggtaccccgtagacttatattatctcatggatctgagctattccatgaaagatgacctggagagggtccggcagctggggcacgcactgcttgtccggctgcaagaagtaactcattccgtgaggatcgggtttggtagttttgtggacaaaactgtcctgccttttgtttcaacagtccccagcaaacttagacacccgtgcccgactcggctggaacgatgccagtcaccattctcgttccatcacgtgctctctctgaccggcgatgcgcaggccttcgagcgggaggtgggcagacaatctgtatccggcaatctggactctcccgagggggggttcgacgccatcctccaggctgccctatgtcaagagcagataggctggcgcaacgtgtctaggctgctggttttcactagcgatgatacattccacactgcaggcgacggcaaacttggggggatctttatgccttccgacggtcactgtcacctggatagtaatggcctatattctcgctctaccgaatttgattacccatccgttgggcaggtcgcccaggctctcagtgcagcaaatatacagcctatctttgccgtgacctccgcggccttgccagtgtatcaggagctgagcaagctgatccctaagtccgcggttggggaactctccgaggacagtagcaatgtcgtccagttgataatggatgcttacaattccctgagctccacagttactctcgagcattcttctctccctccgggcgtccacattagctacgagagccagtgtgagggtcctgagaaaagagaaggcaaagccgaggatagaggtcagtgcaatcacgttagaataaatcagaccgttactttttgggtctccttgcaggccactcactgcctcccagaaccacatctgttgcgcctgagagccctaggcttcagcgaggaactgatcgtggaactacacacactctgtgattgtaactgcagtgatacccaaccccaggcacctcactgcagtgacggacagggccatcttcaatgtggtgtgtgttcctgtgccccaggtcggctcggacgcctctgcgaatgcagcgtggccgagctcagttcaccagatctggaatcaggttgcagagccccaaatgggacagggcccctctgctctggaaagggacattgtcagtgcgggagatgtagctgcagcgggcaaagctctggtcacctgtgcgaatgtgatgacgcatcctgcgagaggcacgagggcattttgtgtggcggcttcggtcgatgtcagtgcggggtatgccattgtcatgcaaatcgtaccgggagggcctgcgaatgctctggcgatatggactcctgtatttctcctgagggtggcctttgttcgggccacggaaggtgtaaatgcaacagatgtcagtgcctggacggctactacggggccctctgcgaccagtgcccaggctgtaagacaccgtgtgaacggcatcgcgattgtgcagaatgcggagcgttccggacaggccccctggccacgaactgcagcacagcatgtgctcacactaacgtgaccctcgctctggctcccatactcgacgatgggtggtgtaaggaacggacccttgacaaccaacttttcttctttttggtggaagacgacgcccgaggcacagtcgtacttcgggtgcgcccgcaggagaagggggccgatcatacccaggctatcgtactgggctgtgtgggcggcatcgtcgctgtgggcctgggcctggttttggcgtacagactgtcagtggagatctatgataggcgggaatattcaagattcgagaaggaacagcagcagctaaattggaaacaggactccaatcccctctacaagagcgcaataacaactaccatcaacccgagattccaggaggcagactcacctactctttag

SEQ ID NO: 191583 - DNA, 1953 bp, synthetic construct
  misc_feature 1..1953: note = Description of Artificial Sequence: Synthetic coding sequence
  source 1..1953: mol_type = other DNA
atggtggccctgcccatggtgctggtgctgctgctggtgctgagcagaggtgaatctgaactggatgctaagatcccatccactggggatgcaacagaatggcgtaacccacacctttccatgctgggttcttgtcagccagcccctagttgtcaaaagtgcattctgtctcacccctcttgcgcctggtgcaaacagctgaacttcacagctagcggcgaagccgaggctagacgttgcgccagaagggaggaacttctagcccgtggctgcccccttgaggagctcgaggaacctcgtggtcagcaggaagttctgcaggatcagcctctgagccaaggcgcccggggagagggggcaacccagctagcccctcagcgggtgcgcgtcacactgagacctggagagcctcagcagctccaagtgcgcttcctgagggccgagggctaccccgttgacctttactatctgatggatctcagctactcgatgaaggacgatctggaacgggtacgccagctcggtcacgcccttctggtgcggcttcaggaggtcactcattccgtgcgtatcggctttgggagcttcgtggataagacagtactcccctttgtgtcaacagtgccttcgaaacttaggcacccctgcccaacccgtctagagagatgtcaatctcctttttcctttcaccatgtgttgtcgttaaccggagacgcccaggccttcgagcgagaagtagggcgccaaagcgtgtctggaaacttggatagcccagagggcgggttcgacgctatcctccaggccgcattatgtcaggaacagataggctggcggaacgtgagtaggctgttggtatttacttccgacgatacgttccataccgccggcgatggcaagctcggcggcatctttatgccaagcgatggtcactgccatttggatagtaatggcctttactcaaggagcactgagtttgattacccctctgtaggccaggtcgcgcaggctctgtcagccgccaatatacagccgatatttgcagtgacatccgctgccctaccagtgtaccaggagctaagcaaactgattccaaagtccgcggtcggtgagctgtctgaggatagcagtaacgtcgttcagttgatcatggatgcctacaatagcttgagctccacagtgacgctggagcattcttctttgccaccgggggtgcatatctcctatgagtctcagtgtgaggggccggaaaaaagagaggggaaggcagaggatcgcggccagtgtaaccacgttagaatcaatcagactgtaaccttctgggtctctctgcaggcaacccactgcctgccagaaccgcacttgctcagattgcgtgcactgggcttcagcgaggagctcattgttgaacttcatacactttgcgattgtaattgcagcgacacccaaccacaagctccccactgtagcgacggtcagggccatctgcagtgcggtgtttgtagagattgtgcagagtgcggggcgttccggaccggtccactagccaccaattgtagtactgcctgcgcacacacaaacgttactcttgccctggctcccatcctggatgacggctggtgcaaggagaggacgctggacaaccagttgtttttcttcctggtggaagatgatgcccgtggcaccgtggttcttcgtgtgcgcccgcaagaaaaaggagctgaccatacacaggccattgttctcggctgtgtggggggcatcgtcgcggtgggacttggactggtgctcgcctatcggctatcagtcgagatttatgaccgccgtgaatattccagatttgaaaaagaacagcagcaactgaattggaagcaggatagcaatcctctgtacaaaagcgccatcactacaaccatcaaccctcgcttccaggaggctgatagccctaccttgtag

SEQ ID NO: 191584 - DNA, 2397 bp, synthetic construct
  misc_feature 1..2397: note = Description of Artificial Sequence: Synthetic coding sequence
  source 1..2397: mol_type = other DNA
atggtggccctgcccatggtgctggtgctgctgctggtgctgagccggggcgagagcgaactcgacgctaagattccatccactggcgatgccaccgagtggcgcaacccacacctcagtatgctgggtagctgccagccagcccctagctgtcaaaagtgtatattgagccaccccagctgtgcttggtgtaaacagctgaacttcaccgcatccggcgaagccgaagccagaaggtgcgccaggagggaggaactgcttgcaagggggtgccctctggaggagttggaggagcctcgtggccagcaggaggtcctccaggaccagcctctttctcaaggggcccgtggagagggtgctacccagctcgcccctcaacgcgtccgcgtgacacttcgacctggggagccacagcagctgcaggtacggtttcttcgtgcagaaggctatcccgtggacctttactatcttatggacctcagctactctatgaaggatgaccttgagcgcgtgcgccagctgggccacgcactgctcgttcgtttgcaggaggttacacattcagtgcgcatcggttttggcagctttgtggacaaaactgtcttgcctttcgtgtccacagtcccgagtaaactccgacacccttgtcccacaaggctggagagatgtcagagcccattcagctttcatcatgtgctctccctgactggcgacgcccaggcatttgagcgagaggtgggaagacaatccgtgtcaggcaacctggatagtcccgagggggggttcgatgccatactgcaggccgcactatgccaggagcagattggttggaggaacgtttctagactgctggtcttcacatcagacgacacatttcatacagccggagatggaaagctcggaggcatatttatgccttctgacgggcactgccatctggacagtaacggtctgtactcacggtcaaccgaattcgattaccctagtgtgggtcaggtggctcaggcactgagcgctgccaatattcaaccaatatttgctgtgacctctgctgcacttccagtgtatcaagaactgagtaaactgattcccaagtcagcggtgggagaactgtctgaggactcatcaaatgtcgtgcaactgatcatggacgcgtacaacagtctttcatcaactgtcaccctggagcacagttctctgccaccaggtgttcacatcagctatgagtcccaatgtgagggccccgagaagcgggagggaaaagccgaggatcggggccagtgtaaccatgtccggattaaccagactgtaactttttgggttagcttacaagccacccactgcctgccggaacctcacctgctccgtctgagagcccttgggttctcggaagagctcattgtggagttacataccctctgcgactgcaattgttcagacacacagccgcaggccccacactgcagcgatggacagggacatctgcagtgcggagtgtgttcctgtgctcccgggcgcctgggacgcctgtgcgaatgcagcgtcgccgagctcagctcgcccgatctggagtccggatgtcgggcaccaaatggtactgggccgttgtgcagtggcaagggtcactgtcaatgcgggagatgctcttgctccggtcaatcctctggtcatctgtgtgaatgtgatgatgcctcttgtgagaggcacgagggcatattgtgcggaggctttggtaggtgccagtgcggcgtgtgtcactgtcacgcaaataggacaggccgggcttgcgagtgttccggggatatggacagctgcatcagtcccgagggtggactgtgctctgggcacgggcggtgcaaatgtaaccggtgtcagtgcctggatgggtattacggggctctgtgtgatcagtgcccggggtgtaagaccccgtgtgagaggcacagggactgtgccgagtgtggcgcgtttcgaacaggaccactggccacaaactgcagtaccgcctgcgctcatactaacgtaacattagcactggcgcccatattagatgatggatggtgtaaagagcgcactttggataatcagctgtttttctttttggtcgaagatgatgctcggggcactgtggtgctgcgcgtgcgtccccaggaaaaaggcgccgatcatacccaggcaatcgttctgggctgtgtgggcggcatcgtggcagtgggcctgggcttggttcttgcatacaggcttagcgtcgaaatttatgaccgccgcgagtactctcgatttgagaaggagcaacagcaactgaattggaagcaggatagcaacccactttacaaatctgctatcaccacaacgatcaaccccagattccaagaagctgatagcccgactttgtag

SEQ ID NO: 191585 - DNA, 1206 bp, synthetic construct
  misc_feature 1..1206: note = Description of Artificial Sequence: Synthetic coding sequence
  source 1..1206: mol_type = other DNA
atgaacctggtggccgtgatgggcgccttcaacaagggccacggcaaatgcgactgtggaaaatgtaagtgcgaccaaggatggtacggggatgcctgccagtatcccacgaattgcgatctgacaaaaaagaaatcgaaccagatgtgtaaaaactctcaggacatcatatgttccaacgcagggacgtgtcattgtgggcgctgtaagtgcgacaattctgacggctccggccttgtatacggcaaattctgtgagtgcgatgacagggaatgcatagacgacgagaccgaagaaatctgtggcgggcacggcaaatgctattgtggcaactgctactgcaaggccgggtggcacggtgataagtgcgaattccagtgcgacatcaccccttgggagagtaagaggaggtgtacctccccagatggcaaaatctgttctaaccgcggaacttgcgtatgcggtgagtgcacgtgtcatgacgtggacccaacaggagactggggagatatacacggcgatacttgtgagtgcgacgagagagactgtagagccgtgtatgaccgttactccgacgatttttgctccggccatggacaatgcaactgcgggcgctgcgactgcaaagcgggctggtacgggaagaaatgcgaacacccccagtcctgcactctctcggcggaagaaagcatacgcaagtgtcagggaagttcagatctcccatgctccggacgtggcaaatgtgagtgcggcaaatgtacctgttaccctccaggggacagaagagtctatggtaagacatgtgagtgtgatgaccggaggtgcgaggacctggatggagtcgtgtgtgggggccacggcacctgcagctgtggtaggtgtgtgtgcgaacggggctggttcgggaaactgtgtcagcacccacggaaatgtaatatgacagaggaacagagcaagaacctgtgtgagtctgccgatggcatcctgtgctccggcaaggggtcatgtcactgtgggaaatgtatatgttctgcagaagaatggtatatcagtggcgaattctgcgattgtgacgaccgagactgcgacaagcacgacggccttatctgcacggggaacggtatttgttcatgtggcaactgtgagtgctgggatggttggaacgggaatgcttgtgagatttggctgggttctgaatacccctag

SEQ ID NO: 191586 - DNA, 1485 bp, synthetic construct
  misc_feature 1..1485: note = Description of Artificial Sequence: Synthetic coding sequence
  source 1..1485: mol_type = other DNA
atgcggccccccggcttccggaacttcctgctgctggccagcagcctgctgtttgccggcctgtctgctgtgcctcaatcctttagtccctcactgagatcctggccgggggctgcctgcaggctaagtcgtgccgagagcgagagacggtgcagggcccctgggcagccacccggcgccgctctctgtcatggacgtggaagatgtgactgcggggtgtgcatttgccatgttaccgagcctggcatgttctttgggcctctgtgcgagtgccatgagtgggtttgtgagacttatgacggctcaacctgtgctggccatggaaaatgcgactgtgggaagtgcaagtgtgaccaaggctggtatggagacgcgtgtcaatatcccaccaattgcgacctgacaaagaagaagtcaaaccaaatgtgtaagaattctcaagacattatatgctcaaatgctgggacatgtcattgtggaaggtgtaaatgcgataacagcgacgggagcggactagtgtacggtaagttctgtgaatgtgatgacagagagtgcatagacgatgaaaccgaggaaatttgtggtggacatggtaaatgctattgcggcaattgctactgcaaggctggatggcacggtgacaaatgtgagttccagtgcgatatcactccctgggagagtaagagacggtgcacttctcccgatggaaagatttgcagcaacaggggaacttgtgtatgcggggagtgtacttgccatgatgtggatcccactggcgattggggagatattcatggagacacctgtgaatgcgacgagcgggactgcagggccgtctatgatcggtacagcgacgacttctgtagtggacatggtcaatgcaactgcggtcgctgcgattgcaaagcggggtggtatggaaagaagtgcgaacatcctcagagctgtacactctctgctgaagagtctatccgtaagtgccagggatcttcagatctcccctgctctgggcgtgggaagtgtgaatgcggcaaatgtacctgctatccccctggcgatcgaagagtgtacggcaagacctgcgagtgcgatgatcgccgttgtgaggatctggatggcgtggtgtgtgggggacacgggacatgtagctgcggacgctgtgtttgcgagagagggtggttcggaaagctctgtcagcatcctaggaaatgtaacatgactgaggagcagtccaagaatctgtgcgagtctgccgatgggatactttgtagcggaaaaggctcttgccactgtggaaagtgcatttgcagtgcagaagagtggtatatctcgggagaattttgcgactgcgatgacagggattgcgacaaacacgatgggcttatttgcacagggaatgggatctgttcctgcggaaactgcgagtgttgggacggctggaacggaaacgcatgcgaaatctggcttggaagcgaatatccctag

SEQ ID NO: 191587 - DNA, 1209 bp, synthetic construct
  misc_feature 1..1209: note = Description of Artificial Sequence: Synthetic coding sequence
  source 1..1209: mol_type = other DNA
atgagcggctgcgcccggcccaccaccggcgcccccgtgcaggccatggtctccgtaacgggtaagtgcaagtgtgatcaagggtggtacggagacgcctgtcagtaccccactaactgcgacctgaccaaaaagaaatccaaccaaatgtgtaagaacagtcaggatattatttgtagtaacgccggcacctgccattgcggaaggtgtaagtgcgataacagcgatggatccggactggtctatggtaagttttgcgagtgcgacgacagggagtgtatcgacgatgagaccgaggaaatttgtggaggacatggcaagtgctattgcggtaattgctactgcaaggcgggctggcacggcgacaagtgtgaattccaatgcgatatcaccccctgggaatcaaaacgaagatgcaccagccctgacgggaagatctgttcgaaccggggaacttgcgtttgcggtgagtgcacatgtcatgacgtggacccgactggagactggggcgatatccacggagacacctgtgaatgcgatgagagagattgccgggccgtgtatgaccgctattcggacgacttttgttcaggccacggccagtgcaattgcggacgctgtgactgcaaggctggttggtatggtaagaagtgcgagcatccacaatcctgcaccttgtcggcggaggagtccattagaaagtgtcagggttccagcgacctcccttgctctgggcgtgggaagtgcgaatgtggcaagtgcacttgttatcccccaggggatcgacgggtctatggcaagacgtgtgagtgcgatgaccgccggtgcgaggatctggacggagttgtctgtggcggccacggaacttgctcttgcggcagatgcgtttgcgagcgcgggtggttcggcaaactgtgccagcacccacgcaagtgtaatatgacagaggaacaatctaaaaacctgtgtgagagcgccgatggtatcctgtgcagtggaaagggtagctgccattgcgggaaatgtatctgttcagccgaggagtggtacatatcaggggaattctgcgattgtgatgatagagactgcgacaagcacgacggattgatctgtacaggcaatggcatatgtagttgcgggaactgtgagtgttgggacggttggaatgggaatgcctgtgagatttggctgggctctgagtacccatag

SEQ ID NO: 191588 - DNA, 1062 bp, synthetic construct
  misc_feature 1..1062: note = Description of Artificial Sequence: Synthetic coding sequence
  source 1..1062: mol_type = other DNA
atgtgcaagaacagccaggacatcatctgcagcaacgccggcacctgccattgtggcagatgtaaatgtgataattctgacggatctggacttgtgtacggcaaattttgcgaatgcgatgatagagaatgcatcgatgacgaaaccgaggaaatttgcggtggccacggtaagtgctattgcggcaattgttattgtaaagccgggtggcatggggataaatgcgagtttcaatgcgacatcacaccatgggagtctaaacgcaggtgcacctctcccgacggtaagatctgttccaatcgaggtacatgcgtgtgtggcgagtgtacctgtcatgacgttgacccaaccggcgattggggtgacatccacggagacacatgtgagtgcgacgaaagagactgtcgtgcagtgtacgataggtatagtgacgacttttgcagcggccatgggcagtgtaactgtgggagatgcgactgtaaagcaggttggtatggcaagaagtgcgagcatcctcagtcatgcactctctccgcagaagagtcaatcaggaaatgccagggaagttctgatctgccatgcagcgggcgaggcaaatgcgagtgcgggaaatgcacatgttatcctccgggcgatcgccgggtctacgggaaaacatgcgagtgcgatgaccgtaggtgcgaggaccttgacggggtagtgtgtggggggcacgggacctgcagctgcggacgttgcgtttgtgaacgaggatggtttggcaaactttgtcaacacccaaggaagtgtaacatgacagaggagcagagtaagaatctctgtgaatctgccgatggcattctgtgttctggcaagggtagctgccactgcggaaagtgtatttgcagtgctgaagaatggtatatatctggagaattctgtgactgcgacgatcgcgattgtgacaaacacgatggactgatctgcactggaaacggcatctgcagttgtgggaattgcgaatgctgggacggctggaacggtaacgcgtgtgagatttggctgggttccgagtacccttag

SEQ ID NO: 191589 - DNA, 1062 bp, synthetic construct
  misc_feature 1..1062: note = Description of Artificial Sequence: Synthetic coding sequence
  source 1..1062: mol_type = other DNA
atgtgcaagaacagccaggacatcatctgcagcaacgccggcacctgccattgtggacgctgtaagtgcgataatagcgatggatccggcctggtgtatggaaagttctgtgaatgcgacgatagggaatgtatcgacgatgaaacagaagagatttgtggaggtcatggtaagtgttattgtggcaactgctactgtaaggctggttggcacggagacaagtgtgagttccagtgcgacataacgccgtgggagagtaagcgacgctgcaccagtcctgacggcaagatctgttcgaatcggggaacttgcgtctgcggggagtgcacatgccacgacgtggaccctaccggtgactggggcgacatacacggcgatacttgtgagtgcgatgagagagactgtagagcagtgtacgaccgttactcagacgatttttgttctggtcacgggcagtgcaactgtggtagatgcgattgcaaagccgggtggtacggtaaaaaatgtgaacatccccagagctgtacacttagcgccgaggaatctataagaaaatgtcagggatcaagcgatcttccctgctccggtagaggcaagtgtgagtgcggaaagtgcacttgttaccctccaggagataggagagtttacggtaagacatgcgagtgtgacgacagacgatgtgaagatctggatggcgttgtctgtggcgggcacggcacatgtagttgtgggcggtgcgtgtgtgagagagggtggttcgggaagctttgccagcacccccggaagtgtaatatgactgaggagcagtcgaagaatctatgcgagtccgccgatggcatactctgctccgggaaagggagctgtcattgtggcaagtgcatttgcagcgcggaagaatggtacatcagcggggaattttgtgattgtgatgacagagattgtgataaacacgatggcctgatatgcaccggtaatgggatttgttcatgtgggaattgtgaatgttgggatggatggaacggcaacgcctgcgaaatttggcttggtagtgagtacccttag

SEQ ID NO: 191590 - DNA, 903 bp, synthetic construct
  misc_feature 1..903: note = Description of Artificial Sequence: Synthetic coding sequence
  source 1..903: mol_type = other DNA
atggccaactgcgagttcagccccgtgagcggcgacaagccctgctgccggctgagtaggcgcgctcagctctgcctgggtgtctccattctcgtgttgattctagtggtcgtccttgctgtagttgtccccagatggcgtcaacagtggtcggggcccggaacgactaaacgctttcctgagacggtcctggcccgttgcgtcaaatacacagagatccaccccgagatgcgtcacgtggattgccagtcagtttgggatgcctttaagggggcatttatctctaagcacccgtgtaatattactgaggaggactaccagcccctgatgaaactaggcactcagacagtcccttgtaataagatactgctgtggtccagaataaaggatttagctcatcagtttactcaggttcagcgggacatgtttacgctggaggatacgttattggggtacctggccgacgacctgacgtggtgcggagaattcaatacatccaagatcaattaccagagctgtcccgattggcgcaaggactgttcaaataacccagtttccgttttctggaagactgtctccaggcgtttcgcggaagctgcatgcgacgtggtgcacgtgatgctgaatggttcccggtctaaaatcttcgataagaattcaaccttcgggtccgtggaagtccacaacctccagccagagaaagtccagacattggaggcatgggttatccacggcgggagagaggacagccgggacctgtgtcaggaccccacaataaaggaactggagagcatcatcagtaaaaggaacattcaattctcatgtaaaaatatctataggcccgataagtttctgcagtgcgtaaaaaatcctgaagactcgtcgtgcaccagcgagatctag

SEQ ID NO: 191591 - DNA, 942 bp, synthetic construct
  misc_feature 1..942: note = Description of Artificial Sequence: Synthetic coding sequence
  source 1..942: mol_type = other DNA
atgaaccagctgagcttcctgctgttcctgatcgccaccacccggggctggagcacggatgaagctaacacttacttcaaggaatggacatgctccagttccccctctcttccaagaagttgcaaggaaatcaaagatgagtgtccctcagcctttgacggactgtacttcctccggacagagaatggcgtgatctaccagaccttttgcgatatgacttcaggcggaggcgggtggactttggtggccagcgtgcatgaaaacgacatgcgcggcaaatgtaccgtcggggaccgctggtcctcacaacagggaagcaaggccgtctatcctgaaggcgacgggaattgggcaaattataacacctttgggagtgcagaagcagcgacaagcgatgactacaagaaccccggatattacgacatccaggccaaggacctgggtatctggcatgtgccgaacaaatctcctatgcaacactggagaaattcctctcttctccgatataggacagataccggatttttgcaaacactgggacacaatcttttcggcatttatcagaagtacccggtaaagtacggggaaggaaagtgctggactgacaacggtcctgtaattcctgttgtgtacgattttggcgacgcccagaagaccgcttcttactacagcccttacggccaaagggaatttacggccggctttgtgcagttccgggtgttcaataatgagcgggcagctaacgcactttgcgcaggaatgcgagtgaccggatgcaacaccgaacaccattgcatcggaggaggtggatacttcccagaggctagcccgcagcagtgtggagactttagcggatttgattggagcggttacgggacacacgtgggctacagttcttctcgggagattacagaagccgcagtactgctcttttacagatag

SEQ ID NO: 191592 - DNA, 978 bp, synthetic construct
  misc_feature 1..978: note = Description of Artificial Sequence: Synthetic coding sequence
  source 1..978: mol_type = other DNA
atgctgagcatgctgcggaccatgacccggctgtgcttcctgctgttcttctctgttgctaccagcggttgctccgccgccgcagcttccagcctcgagatgctcagtcgggagttcgagacctgtgctttctctttcagttccctccccagatcctgcaaggagatcaaagagagatgtcattcagccggagatggcctgtattttttgcggaccaaaaacggagtcgtgtaccagacgttctgtgacatgacttctggaggcggcggctggacgctggtggcatctgttcatgagaatgacatgaggggaaagtgcactgtaggggaccgctggtctagtcagcaggggaataaggccgattatccagagggtgatggtaactgggctaactataatacatttgggtcagctgaggctgccacgagtgatgattataaaaacccaggatactatgacattcaagccaaggacttgggaatctggcacgtcccaaacaagagccctatgcagcactggagaaactctgctttactgcgttaccggactaatactggttttttgcagcgcctgggacacaacttgtttggcatctatcagaagtaccctgtgaagtaccgcagtggtaagtgttggaacgataacggtcctgccatacccgtggtgtatgacttcggagacgcaaaaaagactgcttcatactatagtccttacggacaacgggagttcgtggctggatttgtacagttcagggtgtttaataacgaaagggcagctaatgctctatgcgctggcattaaggttaccggatgcaatacagagcaccactgtatcggcgggggagggtttttccctcaggggaaaccacgtcagtgcggggattttagcgcatttgattgggatggatatggaacccacgtgaaatcctcttgctccagagaaattacagaagccgctgttctgttgttctatcggtag

SEQ ID NO: 191593 - DNA, 2736 bp, synthetic construct
  misc_feature 1..2736: note = Description of Artificial Sequence: Synthetic coding sequence
  source 1..2736: mol_type = other DNA
atggacggcgccatgggcccccggggcctgctgctgtgcatgtacttggtcagcctgctgatattgcaggccatgccagccctgggaagcgctacaggcaggtcgaagagcagtgaaaagcgacaggccgtcgacaccgccgtagatggagtgtttattagatccttgaaggtcaattgtaaagtgacaagcagattcgcccactacgtggtcacttcacaagtggtgaatacagcgaacgaagccagggaggtggcatttgacctggaaatacctaaaactgcattcataagcgattttgctgtgactgcggacgggaatgctttcatcggcgacataaaagacaaagtgaccgcctggaagcagtatcggaaggccgccatcagcggtgagaatgcaggcctcgtaagggccagtggtaggactatggagcagttcaccatccaccttactgtcaaccctcaatccaaggtgacatttcagctaacttacgaagaagtcctgaaaagaaaccacatgcagtatgaaatagtgattaaagttaagcctaaacagttggtccaccacttcgagatcgacgtcgatatattcgaaccccagggaatttcgaaactagacgcacaggcctcctttctaccaaaggagctcgctgcgcaaactattaagaagtccttttccggtaaaaaaggtcatgtgctgtttaggcctacagtttctcagcagcagtcgtgcccaacatgctccaccagcctgcttaatgggcattttaaggttacgtatgatgtgagtcgcgataagatctgcgatcttttggtcgcaaacaaccacttcgctcatttttttgctcctcagaatctgacaaatatgaataagaacgtcgtattcgtcatagatatctctggatcaatgcgcggccagaaagtcaaacaaaccaaagaagcactgctgaaaatcctgggcgacatgcagccaggcgactacttcgatctggtacttttcggaacccgggttcaatcttggaagggatccctggtgcaggctagcgaagcgaacctgcaggcagcacaggattttgtgcggggattttccctggacgaggctactaacctcaacggaggtctgttgcgcggaatcgagatactcaatcaggtgcaagaatcacttccagagctgagcaaccacgccagcatcctgattatgttgaccgacggcgaccctaccgagggcgtgaccgaccggagccaaatactgaagaacgtacgcaatgctatccgcgggcgatttcccctttataaccttggttttggacacaacgtcgacttcaacttcttggaagtcatgagcatggagaataatgggcgggcgcaacgaatctatgaggatcatgacgccacacagcagctgcagggattctattctcaggtcgccaaacccctcctggtcgatgtcgacctgcaatatccccaagacgctgtgctggcactgactcaaaaccaccataaacagtactatgagggatcggaaattgtagtggccggtagaatcgcggacaataagcagtcatctttcaaggctgacgtgcaggcacacggtgaagggcaggagttttcgattacatgccttgtggatgaggaagagatgaaaaagctgctgcgcgaaagaggccacatgctggagaaccatgtcgagagactgtgggcttacctcaccatccaggagctgctagccaaacggatgaaagtggacagggaggaacgggcgaatctcagtagtcaggccctgcaaatgtccctggactacggattcgtgactcctctgacttcaatgtccataaggggaatggctgatcaggacggactgaaacctacaattgacaagccatccgaggatagccccccactcgaaatgttgggacccagacgcaccttcgtcctgtcagcgctgcagccttcgcccacacactcatccagtaacacccagaggcttcctgaccgtgtgaccggcgtggacacagaccctcacttcattatccatgtaccccagaaggaagacacactgtgcttcaatataaatgaagaaccaggggttatactgagtctggtgcaggatcctaataccggattctccgtaaacggacagttgataggaaacaaagcccgctcacccggccagcacgacggcacgtattttggccgtctcggaattgccaatccagccaccgatttccagctcgaagtgacaccccagaatataacattaaatccaggattcggcggaccagtcttctcctggagggatcaagcagttcttcgacaggatggagtggtcgttacaattaataagaaacgtaacctggtggtgtcagtggatgatggtggtacattcgaagtcgtcctccaccgtgtctggaaagggtccagcgtccatcaggatttcctgggcttctacgtacttgacagccatcgaatgagtgcccggacccacggactgttgggtcaattctttcaccccatcgggtttgaggtgtccgacatacatcccggttccgacccaaccaagccagacgccaccatggtggtcaggaacaggcgcctaacagtgactcgcgggcttcagaaagattactccaaggatccttggcatggagccgaggtcagctgttggtttatccataacaacggagcgggactcatcgacggtgcatataccgactacatcgttccagatatattctag

SEQ ID NO: 191594 - DNA, 1872 bp, synthetic construct
  misc_feature 1..1872: note = Description of Artificial Sequence: Synthetic coding sequence
  source 1..1872: mol_type = other DNA
atgaacaagaacgtggtgttcgtgatcgacatcagcggcagcatgagaggtcagaaggtcaaacagacaaaggaagctctgctgaagatcttgggcgatatgcagcctggagactacttcgacctggtcttattcgggaccagggtgcagagctggaagggatccctcgtgcaagccagcgaggcaaacctgcaggccgcacaagactttgtacgcgggttctccctggacgaggccaccaatcttaatggggggctgctccgcggaattgagatcctgaatcaggtgcaggaatcactcccggagctgtctaatcacgcttcaatcctgataatgctgactgatggcgatccgacagaaggcgtcaccgatagatcccaaatactgaaaaacgtgaggaacgctatccggggtaggttccccctgtacaatttaggattcggacataacgtggacttcaactttcttgaggtgatgtccatggagaacaacggacgggctcaaagaatttatgaagatcatgatgcaacccaacaattgcaaggtttttatagccaggtggccaagcctctgctcgtggacgtcgatctccagtatcctcaggacgcggtcctggcactcacgcaaaaccatcacaagcaatactatgaggggtccgaaattgtggtggctggccggatagctgacaacaaacagtcctcatttaaagctgacgttcaggctcatggggagggacaagaattttccattacctgcctcgtcgatgaggaggaaatgaagaaattgcttagggaacggggacacatgctggagaatcatgtagagaggctgtgggcttacctaactattcaggagctgctggccaaaaggatgaaggttgaccgcgaggagagggcgaatcttagtagccaggccttacaaatgtcactggattatgggtttgtcactcctctcacctcgatgagtattcgagggatggcagatcaggatgggcttaaacccactattgataagcccagcgaagactccccacccctcgagatgttgggcccccgcaggacttttgtactttccgctctgcaaccgtcaccaacacattcttccagcaatacccagaggttgcccgaccgtgtgacgggtgttgacacagacccccacttcattattcatgtgccccagaaggaagacactctgtgtttcaacatcaacgaagagccaggggtcatcctttctttggtccaagatcccaatactggcttttcagtgaatggccagcttattgggaataaagcaagatcacctggacagcacgatgggacttacttcggacgcctcggaatcgctaatcccgccactgacttccaacttgaagtcaccccccagaatattactcttaatcctggttttgggggcccagtgttctcctggagggatcaggctgtgctgagacaggacggagttgtggttaccatcaacaaaaaacggaacctggtagtctctgtagatgatggaggaacatttgaagttgtgctccaccgcgtttggaaagggtcctctgtgcaccaagactttctcggattctatgttctggactcgcatagaatgtcagcccggacacacggcttgctggggcaattctttcaccctattggcttcgaagtgagcgacatccaccccggtagcgaccctacaaagcccgatgccaccatggtggttagaaaccgaagacttacagttactagaggcttacagaaagattactccaaggacccctggcacggtgccgaggtgagctgttggttcatccataacaatggggccgggttaatagacggcgcctacactgattatatagtgcccgatattttttag

SEQ ID NO: 191595 - DNA, 2310 bp, synthetic construct
  misc_feature 1..2310: note = Description of Artificial Sequence: Synthetic coding sequence
  source 1..2310: mol_type = other DNA
atggagcagttcaccatccacctgaccgtgaacccccagagcaaggtcacgtttcagttgacctacgaagaggtgctcaaaaggaatcacatgcagtacgaaattgtgatcaaggttaaacctaaacagctagtgcaccacttcgagattgacgtggacatctttgagccccaggggatttccaagttggacgcgcaagcctcattcctcccaaaggagctagctgcccagacaataaagaaaagtttttccgggaagaaaggccacgtgctgtttcggcccaccgtatctcagcagcagtcatgccccacatgctcaaccagcttgctgaatggacacttcaaggttacctatgatgtcagtcgagataagatttgtgatctgctggttgccaataatcacttcgcccactttttcgcccctcagaatctgacaaatatgaataagaacgtggtgttcgtcatagacatttccgggagcatgaggggccagaaagtgaaacaaaccaaagaggcgttgctgaaaattctgggggacatgcaacccggcgactatttcgacctggtgctcttcggaacaagggttcagtcctggaaaggttctcttgtccaggcaagcgaggctaacctgcaagcagcgcaagacttcgtgcggggttttagtctagacgaggccacaaatttaaacggaggcctgctgaggggaatcgagattttgaaccaggtccaggaatcactccctgaactgtctaaccatgcctcgatacttataatgctaactgatggggaccccactgaaggagtaacagatagaagtcagatcctaaagaacgttcgtaatgctattcgcggaaggtttccactttataacttggggttcgggcacaatgtcgacttcaatttcctggaggttatgtcaatggaaaataacggaagggcccaaagaatttacgaagatcacgatgctacccagcagctgcaaggattttactcccaggttgcaaaacccctcttggtggatgttgatctgcagtatcctcaggatgcagtattggccttaacccagaatcaccataagcagtattacgagggatcggagatcgtagtggccggccgcatcgcagataacaaacaatccagttttaaggcggacgtccaggcacacggagagggtcaggaattcagcataacgtgtctcgtggacgaagaggagatgaagaagttgctgcgggaaagaggtcatatgctggagaaccacgtagaacgactttgggcttacctgacaatccaggaactgctggccaaacgaatgaaggtcgaccgcgaggagcgtgcaaacttgagcagccaagccctgcaaatgtccctcgactacggattcgtgacccctttaacgtcaatgtctatcagaggcatggctgatcaggatgggctcaagcccactatcgataaaccctccgaggattctcctcccttggagatgctcggccctcgccgcaccttcgtgctttcagctctgcagccaagtccaacccactcttctagcaacacccagaggctgcccgatcgtgtgacaggagtggacacggatcctcattttatcattcacgtaccacagaaggaggacaccttgtgtttcaatattaatgaagaacctggggtgatactgagcttggtgcaagatccaaatactggattttctgtgaatggacaattgatcgggaataaggctagatcccctggacaacacgatggaacctacttcggccggctgggcattgctaatccggccacagattttcaacttgaggtcaccccacagaacattaccctgaatcctggctttggcgggccagtgttcagctggcgcgaccaggccgtcctgcgacaggatggagtagtcgtcacaattaataaaaagagaaatctggtcgtctcggtggacgatgggggcacctttgaggtcgtgctgcaccgcgtgtggaaaggctcttcagtgcatcaagatttcttgggtttttacgttctggacagccatcgcatgagcgctagaacgcacggactgttggggcagttttttcaccccattggcttcgaagtttcagatatccacccgggtagcgaccccaccaaaccagatgccaccatggttgtgaggaatcgaagacttacagttaccaggggcctgcagaaggactactcaaaagatccgtggcatggtgcagaggtctcttgctggttcatccataataatggtgccggccttatagacggtgcctatacggactatattgtgcccgacatcttctag

SEQ ID NO: 191596 - DNA, 1938 bp, synthetic construct
  misc_feature 1..1938: note = Description of Artificial Sequence: Synthetic coding sequence
  source 1..1938: mol_type = other DNA
atggacggcgccatgggcccccggggcctgctgctgtgcatgtacctggttagtctgctgatcttgcaagcaatgcccgccctagggtccgccacaggccggagcaaatcgtcggagaagcggcaggcagtggacacggcggtggatggggtatttatacgcagcctgaaggtcaactgtaaagtgacgtccaggttcgctcattatgtggtaacgtctcaggtcgttaacacagctaacgaggcccgcgaggtcgctttcgacctggagattcctaagactgcctttatctctgacttcgccgtgacagctgatggaaacgcttttatcggggatatcaaagacaaagtcacagcctggaaacagtataggaaggccgccatatctggagagaacgctggactagtgagggcatctggtcgtacaatggagcagttcactattcacctgacggtgaatcctcagtcgaaggtcacctttcagttgacatacgaggaggttttgaagcgcaaccatatgcagtatgagatcgttataaaagtgaagcccaagcagctggtgcaccatttcgaaatagacgtagatatctttgaaccccaaggaatctctaaactggacgctcaagcatcgttcctgcccaaggaactggccgctcagaccatcaagaaatcctttagtggtaagaagggccatgtgctttttcggcctacagtgtctcagcagcagagctgtccaacttgttccaccagcctgctcaacggccacttcaaggttacttacgatgtctctagagataaaatatgtgaccttctggttgctaacaaccactttgcccatttcttcgcacctcagaacctcaccaatatgaacaaaaatgtggtgttcgtgatcgacataagtggttctatgagaggccagaaggtcaaacagacgaaggaagctctccttaagatactgggggatatgcagcccggggactactttgatctcgtactgtttggtacgcgcgtgcagtcatggaaggggtcattggtgcaggctagcgaggctaacctgcaggccgctcaagactttgttcgcggattctctctggacgaggccacaaacctcaacggcgggcttctaaggggcatcgaaatcttgaatcaggttcaggaatcacttcccgagttgtcaaaccatgccagcatactgatcatgctcacagatggagatcccacggagggagttacggataggtcccagattcttaagaacgtacggaacgccatccgtggaaggttcccactgtacaatctaggatttggccacaatgtcgatttcaatttcctggaggtcatgtccatggaaaataatggccgggcacagaggatctacgaggatcacgatgctactcaacagttgcagggattctactcccaggtggctaagcctctgttggtggacgtggacctacagtatcctcaggatgcggtgctcgcactgactcagaatcaccacaaacagtactatgaggggagcgagatcgttgttgccggcagaatcgccgataataagcagagctcgtttaaagctgacgttcaggcgcatggcgagggtcaagaattttctataacctgcttggtcgacgaggaggagatgaaaaaattgcttcgagaaagggggcacatgttggagaaccacgtcgagcggctttgggcttacctcactatacaggagctacttgcaaaacggatgaaagtggacagggaggaacgtgctaatctttccagccaggcactgcagatgagcctggactatggctttgttacaccattaacctccatgagcattcgagggatggccgatcaggatggcctcaagccaaccattgacaagccaagtctgcatcacccacgagcccccgagcggggccacccagtcctacaacaccagtag

SEQ ID NO: 191597 - DNA, 2841 bp, synthetic construct
  misc_feature 1..2841: note = Description of Artificial Sequence: Synthetic coding sequence
  source 1..2841: mol_type = other DNA
atgaagcggctgacctgcttcttcatctgcttcttcctgagcgaggtgagtgggtttgagatccccattaatgggctttcagaatttgtggattacgaggatttagtagagctcgccccaggcaagttccaactggtcgccgagaaccgcaggtaccaacgctctctaccaggggagtccgaggaaatgatggaggaggtggatcaggttactctttattcctataaagttcaaagcacaattaccagccgcatggccaccacaatgatccagagcaaggtggtcaacaactctcctcagcctcagaatgtggtattcgacgtgcaaatacccaagggcgctttcattagcaatttcagcatgactgtcgacggaaagacattcaggagtagcattaaagaaaaaactgtaggccgagccctttatgctcaggctcgcgccaagggaaaaaccgccggactggtgcgatcatcagctctagatatggaaaatttccgcactgaggtcaacgtacttccaggcgccaaagtgcagtttgagctgcattatcaggaagttaaatggcgcaaacttgggagctacgaacaccgtatctatctgcagcctggcagattagcaaagcacttggaagtggacgtgtgggtgatagagccccaaggtctgcgattcttacacgtgccagacacgttcgaaggacacttcgacggagtgccggttataagcaaagggcagcagaaagcacatgtaagtttcaagccaactgtcgcccaacagaggatctgcccgaattgcagggagaccgcagtcgacggagagctagtagtcctctatgacgtgaaacgagaagaaaaggccggtgagttagaggtgtttaatgggtacttcgtgcactttttcgcccccgataacttagaccccatccctaaaaacatcctgttcgtcattgatgtctccgggtctatgtggggtgtgaaaatgaagcagacagtagaagctatgaagaccatccttgacgatttaagagctgaagaccacttcagcgtaatcgattttaaccagaatatccggacgtggagaaacgacctcatctcagccacaaaaacccaagtcgctgacgctaagaggtatatcgaaaagatacaaccttccggcggtaccaacatcaacgaggcactcctgcgtgctatctttatcctcaacgaggctaataacctgggccttttagatccaaacagtgtgagtctgataatccttgttagtgatggcgaccctaccgtcggagaacttaaactgtcaaagattcagaagaatgtgaaagaaaacattcaggacaacatctctctgttttctttgggtatggggtttgatgtggactacgacttcctcaaacgcctttccaatgagaaccatggcatcgcccagcgaatctacgggaatcaagacacctcttcccaactgaaaaaattctataaccaagtaagcaccccactgctgaggaatgtgcaatttaattacccacatacaagcgtcacagatgtgacccagaataactttcacaattactttggcggttctgaaatcgtggtggctggaaaattcgatcctgccaagctggaccaaattgaatccgttatcacagctactagcgcaaacactcaacttgttctggagaccctggctcaaatggacgacctgcaggattttctctccaaggacaagcatgctgatcccgacttcactcggaagctgtgggcatatctcactatcaatcagctgcttgcagagcgaagcctcgccccaacggccgcggcaaagcggcggataaccagatctatccttcagatgagcttggaccaccatatcgtaaccccacttacgtctcttgttattgagaatgaggcgggagacgagagaatgttagccgacgcaccccctcaggacccatcttgctgcagtggggccctatattatggttcaaaggtggtgccagactcaacaccttcctgggccaatccatcccccacgccagtaataagcatgctagcacagggatcccaggtgcttgagagcacccccccaccacacgttatgcgagtggagaacgatccacattttatcatttatcttcccaagtcccagaagaacatatgttttaacatcgactctgaacccggtaagatactcaaccttgtcagcgatcccgagtccggcatcgtcgtgaacggccagctggtgggcgccaagaaaccaaacaacgggaaactttcgacctacttcggcaagctgggcttttacttccagagcgaggatattaaaattgagatttccaccgagacaattactctgagtcacgggagttcaacattcagcctcagctggagcgatacagctcaagtaactaaccagcgcgtccagatttccgtgaagaaggaaaaggttgtcactataaccctggacaaagagatgtcattttctgttctcctgcatagagtatggaagaaacaccctgtgaatgtagacttcctgggcatctacatcccaccaactaataaattctctcccaaagcacatgggctgattggccagtttatgcaggagcccaaaatccatatctttaacgagcggccagggaaagaccctgagaaacctgaggctagcatggaagtgaagggacaaaagctcatcataacccgcggactgcagaaagactatcggacagacctggtctttggcacggacgtgacttgttggtttgttcacaactcgggcaagggcttcatagatggacactataaagactactttgtccctcagctttactccttcttgaaaaggccctag

SEQ ID NO: 191598 - DNA, 2658 bp, synthetic construct
  misc_feature 1..2658: note = Description of Artificial Sequence: Synthetic coding sequence
  source 1..2658: mol_type = other DNA
atggtggccctgagccacctgggcagcgccctgcagctgggcagcctgttccccagaagcccctttagactgctgggaaagcggagcctgcccgagggagtggccaacggcatagaagtgtactcaacaaagatcaattcaaaagtgacctctaggttcgcccataatgttgttaccatgagagccgtgaaccgcgctgacaccgccaaggaggtctcgttcgatgtggaactcccgaagaccgccttcataactaactttaccctgaccattgatggcgtgacatatcctggaaatgttaaggagaaggaagttgcaaagaaacagtacgaaaaggcagtgtcccaggggaagaccgcagggcttgtgaaagcgagcggccgcaagttggaaaaattcactgtttccgtgaacgtggctgctggtagcaaagtgaccttcgaactgacatatgaagagcttttgaagcggcacaagggcaaatacgagatgtatctcaaagttcaaccaaagcagctcgtgaaacactttgagatcgaagtagatatatttgaaccacagggtatttctatgctcgatgcagaagcgagctttatcaccaatgacctgctgggttcggcccttacgaaaagtttttcaggtaagaagggtcacgtgtctttcaaaccttccctggatcaacaacggagttgtcctacgtgtaccgactcgctcctgaatggtgactttacaattacatatgacgttaacagggagtccccagggaatgttcagatcgtgaatggctatttcgtgcatttttttgcacctcaggggttacctgtggttcctaaaaacgtggcgttcgttatcgacatatcgggcagcatggcgggcagaaaacttgagcagaccaaggaggccctgttaaggatacttgaagatatgcaggaggaggactacctgaattttatcctattctctggagacgtctctacttggaaagaacatcttgtacaggcaacgcccgagaacctgcaggaagcaaggacattcgtgaagtcgatggaagacaagggcatgacaaatatcaatgacggactcctgcgggggatcagtatgctgaataaagcacgcgaggaacaccgaataccagagcgatccacatcaattgtcattatgctgacagacggagatgccaacgtaggcgaatccagacctgaaaagatacaagagaacgttcgcaatgcaataggtgggaagtttccactgtacaatctggggtttggcaataatctgaattacaacttcctggagaatatggccctggagaaccatggtttcgccaggcgcatctatgaggactccgacgccgatctgcagctgcagggcttttatgaagaagtggccaacccgttactgaccggtgtcgaaatggaataccccgagaatgccattttggacttaacccagaatacctaccagcatttttatgacggtagcgagatcgtagtagctggccgtctagtggatgaggatatgaattcattcaaagcggatgtgaaaggccacggcgccaccaacgacctaactttcactgaggaagttgacatgaaagaaatggagaaagctctccaggagcgcgactacatttttggcaattacatcgaacgtttatgggcttatttaacaattgagcaattgctggagaaacgcaaaaacgcacatggggaggaaaaggagaacctcaccgctagagccttggacctgtcactcaagtaccattttgtaaccccactgactagcatggtcgttaccaagcctgaagacaacgaagatgaacgtgccatagccgacaagccaggcgaggggttttcagccacccccgtttctccggctatgagctacctgacctcctatcagccccctcagaacccgtactactacgtcgacggtgatccacacttcattattcaaatacccgaaaaggacgatgcactgtgtttcaacatcgacgaggcccccggaacagtgctgaggcttatccaggacgcagtcacaggtttgaccgtcaacgggcagatcacgggcgataagcgaggcagccccgatagcaagacccgtaaaacctattttggaaagctcggcattgcgaacgcacagatggattttcaggtggaggtcactacagagaagattaccctgtggaaccgcgccgtgccatccacattctcctggctggataccgtgacagttactcaggatggactgagtatgatgataaataggaaaaatatggttgtctcattcggagacggagtgacatttgttgtagttttgcaccaggtctggaagaaacacccggttcatcgcgactttctaggattttacgtggttgatagccatagaatgtctgcccagacacacggtctgttgggccagtttttccagcctttcgacttcaaggtaagtgacatccgcccgggctcggatccgactaaaccggatgcaaccctggtagtaaagaatcaccagctgatcgtgacccgcgggtcccaaaaagattacagaaaagatgcctcaattggcacgaaagtcgtgtgttggttcgtccataacaacggagaaggactaattgatggggttcatacagattacatagtgcctaaccttttctag

SEQ ID NO: 191599 - DNA, 2013 bp, synthetic construct
  misc_feature 1..2013: note = Description of Artificial Sequence: Synthetic coding sequence
  source 1..2013: mol_type = other DNA
atggccttcgcctggtggccctgcctgatcctggccctgctgagctctctggccgctagtggtttcccccgctctccttttagactactcgggaaaagaagtctgccggagggcgtggccaatggcattgaggtgtacagtactaagattaattccaaggttacatccagatttgcccacaacgtggtgaccatgcgtgcggtcaaccgtgcagatacggccaaggaagtctctttcgatgtggaactccctaaaacagccttcatcaccaattttacgttaaccattgacggtgttacctaccccggaaacgttaaggagaaagaggtcgcaaagaagcaatatgaaaaggccgtctcccagggtaagaccgccgggctggtgaaggcatcaggaaggaaactcgagaagtttacagtgagtgttaacgtggcagctggcagcaaggtgacatttgaactgacatacgaggagcttctcaaaaggcataagggcaagtacgaaatgtatttgaaagtgcagccaaagcagctcgtgaaacatttcgagattgaagtggatatcttcgaacctcaggggatatcgatgctcgacgctgaggccagttttatcacaaacgatctcttgggctctgcgctaaccaagagcttcagcggcaagaaggggcacgtctccttcaagccaagtctggatcagcaaagatcttgccccacttgcaccgactccctccttaacggcgatttcacgattacctatgacgtaaacagggaatctccaggcaacgttcaaatcgtgaatggatactttgtccacttctttgctccccagggcttgccagtagtgccaaagaacgttgcttttgtcatcgatatcagcggttcgatggccggtcggaagctggagcaaactaaagaggccctgctacgcattctggaagatatgcaggaagaagattacctcaactttatcctattctcgggcgacgtatctacgtggaaggagcacctggtgcaggcgactccagaaaacctgcaggaagcgagaacctttgtgaagtccatggaagacaaagggatgaccaacatcaacgatggactcctccgtggcatcagtatgctcaataaggctagggaggagcaccggattcccgagcgaagcacgtctatagtgatcatgctgaccgacggtgacgcaaacgtgggtgagagccgccctgagaaaattcaagagaacgtccgtaatgccatcggtggcaaattccccctgtacaatctgggatttggcaataacctgaactacaacttcttggagaacatggctctggaaaaccatggttttgcccgcaggatttacgaggacagcgatgcagaccttcaactgcaagggttttacgaggaggtggccaacccactgctgaccggagtcgagatggaataccccgagaacgcaattttggatcttacacaaaatacttatcagcatttttacgacgggtccgagattgtcgtcgcgggcaggctggtcgacgaggatatgaactctttcaaggctgacgtgaagggacatggcgcaactaacgatttgacgttcacggaggaagtggatatgaaggaaatggaaaaagctttgcaggagagagattatatctttggaaactacatcgagagattgtgggcttatctcacaatagaacagttgctggagaagaggaagaatgcacatggggaggagaaagagaacttaactgcccgcgccttggacctcagccttaagtatcattttgtgactccacttactagcatggtggtgaccaagcctgaagataatgaagacgagcgggcaatagctgataagccaggcgaagggggtgacagtcacactggcgaacctagacacgtcctgcccgaccagctccccgcttcctcaaaaccactcttgttgtgcggacgcggctcacccctccatcaccctaacagtggggagaggcggtgtccactccttcagcaccgctag

SEQ ID NO: 191600 - DNA, 2673 bp, synthetic construct
  misc_feature 1..2673: note = Description of Artificial Sequence: Synthetic coding sequence
  source 1..2673: mol_type = other DNA
atggccttcgcctggtggccctgcctgatcctggccctgctgagctccctggccgcgtcagggttccctcggtctccattccgcctgctggggaagcgctcattaccggagggggtggctaacggaattgaggtttattctacgaagattaacagcaaggtaacgagtcgctttgcacataacgtcgtcacaatgcgcgccgtgaatcgagcggacaccgctaaggaggtgtctttcgacgtggagctgccaaagacagccttcatcaccaattttacactgacaatcgatggagtcacctaccccggcaacgtcaaggaaaaggaggttgcaaaaaagcagtacgaaaaagctgtgtcgcagggaaagaccgccggtctggtgaaggcaagcggtagaaagttggagaaattcacagtctcagtcaacgttgccgctgggagcaaagttacatttgagctgacttatgaagaactgctcaagcggcacaagggaaaatatgagatgtacctaaaggtccagcccaaacagttagtgaagcacttcgaaatcgaagtcgacatcttcgagcctcagggcatctctatgctggatgcggaggcctcatttattacaaacgatcttctgggctcagctcttacaaaaagcttttccggaaagaagggccacgtgagcttcaaaccctcacttgatcagcaaagatcgtgccccacatgtaccgattcacttctgaacggagattttacaatcacctatgacgtcaatcgggagagtccaggtaatgtccagattgtgaatggctactttgtgcatttctttgctccccaaggactccccgtcgtgcctaaaaacgtggcattcgtgattgacattagtggtagcatggcaggccggaaattagaacagaccaaagaggctctcctcagaattctggaggatatgcaggaggaggattatctgaatttcattcttttttccggggatgtctctacctggaaagagcacctcgttcaagccacgcctgagaatctacaagaagctcgaacgtttgtgaagagcatggaggacaaaggaatgacaaatatcaacgacggccttcttcgtggcattagtatgctgaataaagcgcgcgaggagcacaggattcctgagcggtccacttcaattgtgattatgctgacggacggcgacgcgaacgtaggcgaatccagacccgaaaaaatacaagaaaatgtgcgcaacgcgatcggaggcaaatttcccttgtataatctgggctttggcaataacttaaactataatttccttgagaacatggccctggagaatcacggattcgctcggcggatctatgaggacagcgacgctgacctgcagctgcaagggttttatgaagaggtagcaaatcctctcttgaccggtgtcgagatggagtacccagagaacgcgatccttgacctcactcagaatacttaccagcacttctatgacggaagcgagatcgtggtggctggacgtttagttgatgaggatatgaactccttcaaagctgatgtcaaggggcatggtgccacaaacgacctgacctttacggaggaggttgatatgaaagaaatggagaaggctcttcaggaaagggactatatcttcgggaactatatcgagagactgtgggcatatctaaccatagaacaactgctcgaaaagaggaagaatgcacatggcgaagagaaggagaatcttacagctcgcgccctagacctctctttgaaataccactttgtgactccactgactagtatggtggtgaccaaaccagaggataatgaggatgaacgggcaatagctgataagcctggggaggacgcagaagccaccccagtaagccctgcaatgtcctatcttaccagctatcagcccccccaaaatccgtactattacgtggacggcgatccccactttattatacagattccagagaaagacgatgcgctgtgtttcaacatcgacgaggcccccggaaccgtattgcgactcatccaagatgcagtgactggtttgacggtgaatgggcaaattactggtgacaagcgcgggtcacccgactctaaaacgcggaagacttactttggtaagctagggattgccaacgcacagatggatttccaggtggaagtcactaccgagaagatcacattgtggaacagggccgttcctagcacctttagttggctggatactgtcactgtgactcaggacgggctgagtatgatgattaatagaaagaacatggtggtgagtttcggcgatggggtaactttcgtagtggtgctgcaccaagtatggaagaaacatcctgtgcacagagattttctaggcttctacgttgttgacagccacagaatgtccgctcagactcacgggcttctcgggcagttcttccagcctttcgacttcaaggtgagcgacatccgccccggctcagaccccaccaaaccagacgctacgctcgtcgtcaaaaatcaccagttaattgtaacgaggggatcacagaaggattaccggaaggacgcctcaatcggcaccaaagtagtgtgctggttcgtgcacaacaacggagaggggttgatagacggggtccatactgattacatagttcctaacctgttttag

SEQ ID NO: 191601 - DNA, 1977 bp, synthetic construct
  misc_feature 1..1977: note = Description of Artificial Sequence: Synthetic coding sequence
  source 1..1977: mol_type = other DNA
atggccttcgcctggtggccctgcctgatcctggccctgctgagctcgttggcagcatcgggcttccctcgctcaccgtttcgacttttaggtaagcgttccttaccagagggcgtagcgaacgggattgaggtgtactctacaaagatcaactcaaaagtaacaagtaggttcgcccataatgttgttaccatgagagcagtgaaccgggctgatacagctaaggaggtatcattcgatgtggaactcccaaagaccgcctttattacaaattttactctcactatcgacggagttacataccccgggaatgtaaaagagaaggaagtggctaaaaaacagtatgagaaggctgtgagccaaggtaagacggcaggcctggtcaaggccagcggccggaaactggagaagttcactgtttccgtcaacgtggcagccggatccaagcgccacaaagggaaatacgagatgtacctgaaagtccagccaaagcagctggtgaagcactttgagattgaggtcgacatctttgagccccagggcatctctatgttagatgcagaggcctccttcatcaccaatgaccttctgggaagcgccctgacgaaaagtttctccgggaaaaaaggacacgtctcctttaagcccagcctcgaccagcagcgttcatgcccgacatgtacagactccctccttaatggtgatttcacgatcacttacgacgtgaacagagagagtcccggaaatgtgcagatcgttaacggctactttgtgcacttcttcgcccctcaaggcctgccagtggtccctaaaaatgtcgcttttgttatcgatatcagcggtagtatggcggggcggaaactcgagcagaccaaggaagccttgctgcgaatcctggaagatatgcaggaggaagattatctgaactttattctgttttccggcgacgtgtcaacctggaaggagcatcttgtacaggctacaccagagaacttacaggaggccagaacctttgtgaagtcgatggaggataagggcatgaccaatattaacgacggtctgctccgaggaatctccatgctgaacaaggcaagggaggagcataggattcccgaacggtccacctctatcgtcatcatgttgactgatggagacgcgaacgttggcgagtcacgtcctgagaaaatccaggagaacgtgcgcaatgcaatcggcggcaagttccccttgtacaatctggggtttggcaacaacctgaattacaatttcctcgagaacatggcactggaaaaccacggcttcgcgcggcgtatctatgaagactccgatgccgacctgcagctgcaggggttctacgaagaggtggcaaatccattgttgactggcgtggagatggagtatcccgaaaatgccatcctggacctgacgcagaacacctaccaacacttctatgatggttccgaaatagtggtggctgggcgccttgtagatgaggatatgaatagctttaaagcagacgttaaaggtcatggcgccacaaatgacctgacctttaccgaagaggtagatatgaaggagatggagaaagcactgcaggaacgcgattatattttcggcaattacattgagcgcctgtgggcttacctgactattgagcagctcttggaaaaacgcaagaacgctcacggggaggagaaggagaaccttactgctagagcacttgatttaagtttaaagtaccacttcgttacacccttgaccagcatggttgtgaccaagcccgaggacaacgaggacgagcgggccatcgcagacaagcccggagaggggggagatagccatactggcgagccacgccatgtcctgcccgaccagttaccagcctcctccaagccacttcttctttgtggcagaggttccccactccatcaccccaattccggcgagcgcagatgccctctgcttcaacaccggtag

SEQ ID NO: 191602 - DNA, 2793 bp, synthetic construct
  misc_feature 1..2793: note = Description of Artificial Sequence: Synthetic coding sequence
  source 1..2793: mol_type = other DNA
atgaagcccccccggcccgtgcggacctgcagcaaggtgctggtgctgctgagccttctggcaatacatcagaccacaactgccgagaagaatgggatagatatttacagccttacagtggactcacgtgtgagctcccgcttcgctcacaccgtggtcacctcacgggtggtgaaccgggctaatacagtacaggaggccaccttccaaatggaacttcctaaaaaggcatttattacgaacttctcgatgattattgacggcatgacttatcccggaattattaaggaaaaggctgaagcccaggcgcagtattccgctgcggtggccaagggaaaaagcgcggggctggttaaagcaactgggaggaacatggagcagttccaggttagcgtctccgtcgcgccgaacgctaagataacctttgagttggtatacgaagaactgctgaaacgccgcctcggggtctacgaattgctgttgaaggttcggccacagcagctggttaagcacctgcaaatggatatccacatttttgagccgcagggtatcagttttctggagaccgagtctacatttatgaccaaccaacttgttgatgctttaacaacttggcaaaataaaaccaaggcccatatccggtttaagccgaccctctcacagcagcagaagagtccagaacagcaggaaacagttctcgacggcaacttgatcatcaggtacgatgttgatcgtgcgatttcgggtgggtctattcaaatagaaaacggatatttcgtgcactatttcgcacctgagggccttactaccatgcccaagaacgtggtgttcgtcatagataagtctggctcaatgagtggccgcaagatccagcagaccagggaagcattaatcaaaattctggatgatctttctccgcgagatcagttcaatcttatcgttttttctacggaagcgacccagtggagaccaagtctagtcccagcaagcgcagagaatgtaaataaagccagatcttttgcggctggtattcaagctttaggggggactaatattaacgatgcgatgctgatggccgtacagctcttagatagttcgaaccaggaagaaagactgccagagggctctgtttccctcatcattctgttaaccgacggcgaccccaccgtgggcgaaacaaaccctcgttccatccaaaataacgtgcgtgaagctgtgagcggtcgatacagccttttttgtctcgggtttggtttcgatgtgtcttacgcctttctggaaaaactagcactcgataacggcggcttggcccgaaggatacacgaagatagtgactctgctttacagctccaagacttctaccaagaggtggccaatccattactgactgctgtgaccttcgagtaccctagcaacgctgttgaggaggtgactcagaataatttcagattacttttcaaaggatctgaaatggtggtcgctggaaaactgcaggacagaggtcctgacgtcctcaccgctacggtttcaggcaaactgcccacccaaaacattacattccagactgaaagcagcgtcgccgaacaagaggctgagttccagtcacccaagtacatattccacaatttcatggaaaggctgtgggcctatttgacgattcagcaactcctcgaacaaacggtaagcgctagcgatgctgaccagcaggccctgcgaaatcaggctttaaatttgagcttggcgtactcattcgtcactcccttgaccagcatggtcgttaccaaacctgacgatcaagaacagtctcaagtggcagagaaacctatggagggcgagagcagaaatcgaaatgtgcattccggtagtacttttttcaagtactaccttcagggggctaagatcccaaagccggaagcctccttttcacctaggagggggtggaatagacaggctggcgcagctggatcacgaatgaattttaggccgggcgttctaagcagccggcagctaggacttcccggcccacccgacgtaccagaccacgcagcataccacccctttcgacgcctggcaattctaccagccagcgctcctcccgccacttccaatccagacccggcagtatctcgagttatgaatatgaaaatagaggaaaccaccatgaccacccaaacgccggctccaatacaggcgccaagtgctattctgcctctacctggccaatctgtggagcgtctttgcgttgaccccaggcacagacaaggaccggtgaatttgcttagtgatccagagcagggtgttgaagtcacaggccagtacgagcgagaaaaggccggattctcgtggatagaagtcacattcaagaaccctctagtgtgggttcatgcgagtccggaacatgtcgtggtaaccaggaacaggaggagctccgcatacaaatggaaagaaaccctgttctctgtcatgccaggcctaaagatgacaatggacaagactggattactattgttgagcgaccctgataaagtgaccattggcttactattctgggacggaaggggcgagggattacggctactgcttagggacaccgaccgttttagcagtcacgtgggcggcacacttggccaattttaccaggaagtactgtggggatctccagctgcgagcgacgacggccgacgaactctccgtgtgcagggtaacgatcactccgctacgagggagagacgtctggattaccaggagggccccccaggggtggagatctcttgttggagcgttgaactatag

SEQ ID NO: 191603 - DNA, 2745 bp, synthetic construct
  misc_feature 1..2745: note = Description of Artificial Sequence: Synthetic coding sequence
  source 1..2745: mol_type = other DNA
atgaagcccccccggcccgtgcggacctgcagcaaggtgctggtgttgctgagcctgctggccatccatcaaacaacaacagctgaaaagaacgggattgacatctattccttgaccgtagatagtagggtatcctcacgtttcgcacataccgttgtcacgagtagggttgtgaaccgggccaacacggtgcaagaggctacctttcagatggaattgcccaaaaaagctttcataaccaatttttctatgatcatcgatgggatgacctatccagggattattaaagagaaggctgaggcacaagcacaatacagtgcggctgtggccaaggggaaatcagccggtctggtgaaagccactggacgaaacatggagcagttccaggtcagtgtgtccgtcgctccaaatgctaagatcacattcgaattagtttatgaggagcttcttaaaaggagactgggcgtctacgaactgttgctaaaggtgcgaccacagcagctggtgaaacaccttcagatggacattcacatctttgagccccaggggatcagcttcctggagacagagtccacctttatgacaaatcagctggtcgatgccctgaccacctggcagaacaagaccaaagcccatattcgctttaaacctaccttgtcccaacagcagaagtcccctgagcagcaggagactgttctcgatggaaacctgattattcgatacgacgtggatcgagcgatctcaggcggctccatacagattgaaaatggatacttcgtgcattacttcgcgccagagggcttaaccacaatgcccaaaaatgtagtatttgttattgataagtcaggatctatgagcggccgaaaaatccagcagacgagagaagcactgataaaaatcctcgatgatctcagtccccgagaccagttcaacctgatcgttttctccacagaagccacacagtggaggccaagcctcgtcccagcttcagcagaaaatgttaacaaggctcggtccttcgccgccggtattcaagccctcggagggacaaacatcaacgacgcgatgctgatggccgtgcagctattagatagcagtaaccaagaggaaaggctcccagaggggagtgtgtcactaatcattctgctcacagatggcgatcccactgtgggtgagaccaaccccaggagcatacagaacaatgtgcgtgaggcagtgagcgggagatactccttgttttgcctggggttcggttttgacgtcagttacgccttcttggagaaactggcgcttgacaatggtgggctggcccgtaggattcacgaagatagcgacagcgcactgcaactccaggacttttatcaagaggttgccaaccccctcctgaccgccgtgaccttcgaatacccatccaatgctgtcgaggaggtgacccaaaacaacttcagactgctgtttaaggggagcgaaatggtggtcgctggcaaactgcaggatcgaggtcccgacgttctgacggcaactgtgtcagggaaattgcccacccagaacatcacctttcagacggaatccagtgtcgctgagcaagaggcggagtttcagtcccctaaatatatcttccacaactttatggagagattgtgggcctatttaactatccaacaactgttggaacaaaccgtgtctgcctcggatgccgaccagcaggccctccggaatcaggcactcaatttgtctctggcctactcctttgtgactccactcacatctatggtcgtgactaaaccagatgaccaggagcagtcccaggtggcggagaagcccatggaaggagagagcaggaataggaatgtgcattcggctggagctgccggttctcgcatgaatttccggccaggtgttctgagctctaggcagctgggccttcccgggccgcccgatgtccctgaccacgcagcttaccacccctttcggcgtctagctatcctgcccgcatccgctccgcccgcgactagcaaccctgatcccgccgtgtccagagtgatgaatatgaagatagaggaaacaaccatgacgacccagactcccgcgtgcccctcatgctcaaggtccagggccccagcagttccggccccaatccaggctccctctgccatactgccactcccaggacaaagtgtggagagactttgtgttgatcctagacatcgccaaggcccagtgaatcttctgtcagatcctgaacagggcgtagaagtaactggacaatatgaacgggagaaagcaggattttcgtggattgaagtgactttcaaaaacccactagtgtgggtgcatgcgagcccggaacatgtagtagttacccgaaatagacgctcttctgcttataaatggaaggaaacattattcagtgtgatgcccggcctaaagatgaccatggataagaccggcttactactgctgtctgatcccgataaggtgactataggactgctgttctgggatggaaggggtgaaggccttagactcctgttgagggatacagatcgtttcagctctcatgtcggcgggactctagggcagttttaccaggaggtactatggggttctccggcggctagtgacgatggccggcgtacccttagggtgcagggtaatgatcatagcgccacacgggagaggcggctggactaccaggagggtccgcctggagttgaaatttcctgctggtctgtggaactatag

SEQ ID NO: 191604 - DNA, 2703 bp, synthetic construct
  misc_feature 1..2703: note = Description of Artificial Sequence: Synthetic coding sequence
  source 1..2703: mol_type = other DNA
atgaagcccccccggcccgtgcggacctgcagcaaggtgctggtgctcttaagcttactggccatccaccagacgacaacagcagagaaaaatggtatagacatatatagcctgactgtggacagccgtgtcagctcaaggttcgcacacaccgttgtcacttccagagttgtgaaccgtgccaacactgtgcaggaggctactttccagatggaactgcctaagaaggcattcatcaccaacttcagtatgataatcgacgggatgacctaccctgggatcatcaaggagaaagctgaggcccaggcgcagtacagcgcagcagtggcgaaaggaaagagcgcgggactggtgaaggcaacagggcggaatatggagcaatttcaggtttcggttagcgttgccccgaatgctaagataacatttgagctagtttatgaggagttgctgaaacgccgactgggggtatatgagttgctgctgaaagtgaggcctcaacagctggtgaagcacctacagatggacattcacattttcgaacctcagggtataagcttcctggagaccgagagtacctttatgacgaaccagctggtggacgcactgaccacttggcaaaacaaaacaaaagcccatattcgattcaaaccaactctttctcaacagcagaagtcacccgaacagcaggagactgtccttgacggaaaccttattatacgttatgacgtagatagggcgatatcagggggctcaatacagattgagaacggctactttgtgcattactttgccccagagggacttaccactatgccaaagaacgtggtcttcgtcattgacaaaagcgggagtatgagtggccgcaagatacaacagacaagggaagcccttatcaaaatattggacgacttgtcacccagagaccagtttaacctcattgttttctcaactgaggccacccagtggagacccagcctcgtaccagcctcagctgagaatgtaaataaggcccgctcatttgccgccggcatccaggcgctgggtggaactaatattaatgacgcgatgttaatggccgtgcaactgctggacagtagcaatcaggaggagagactcccagagggtagtgtgtccctcatcattctgctgacagacggcgatccaacagtcggtgagacgaatcctcgctcaatccaaaataatgtgagggaagcagtttcagggcgttattccctgttctgtctgggctttggtttcgatgtgagctatgcttttcttgaaaaactagcgctggataacggcggcctggctagaaggatccacgaggatagcgatagtgccttacaactccaggacttctatcaagaggtggctaaccctttactcacagcggtcaccttcgagtatccttcaaatgctgtggaggaggtgactcagaacaatttccggctgttgttcaagggatccgaaatggtcgtggcaggaaagctacaggacagagggccagacgtgttgaccgctacagtaagtggtaaactcccgactcagaatattacgttccagaccgagtcgtccgtggctgaacaggaggccgaattccaatcaccaaagtatatttttcataattttatggagcgtctttgggcctatttgactatccaacagctcttagaacaaaccgtctctgccagtgacgcggatcagcaggctttgcgcaatcaggccctgaacctgagtctggcgtatagcttcgtgacgcctctgaccagtatggtggtgactaaacccgatgatcaagagcaatcccaggtggcagaaaagcccatggaaggcgaatcgcgaaacagaaacgtacatagtgctggggccgctggcagccgcatgaattttagacccggtgtgctctcaagccgtcagcttggtctgccgggccctccagatgtcccggatcacgcagcctaccacccgtttaggcgcctggctatactcccagcctctgctccacccgcaacttctaaccccgaccccgccgtaagcagggtcatgaacatgaagatcgaggagactacaatgaccactcaaaccccagccccgatacaggcgccgtctgccatcttgccacttcctggtcagtcagtggagcgcctgtgtgtcgaccctcgacacaggcaaggcccggtaaacttactatcagaccccgaacagggagtggaggtaactggccaatatgaacgcgaaaaggccggattctcttggattgaagtaacctttaaaaatccactagtatgggtgcacgctagtccagagcacgtggtcgtgacacgaaaccgtcgtagttcagcttataaatggaaggagacactgtttagtgtgatgcccggcctcaagatgactatggacaaaacagggttactgctgctcagcgatccagataaagtgacaattggtctactgttttgggatgggcgcggggagggcctgcgcctactgttgcgcgataccgaccggttcagctcacacgtcggcggcaccctgggccagttctaccaggaggtgctttggggaagtccggccgcctccgatgatggaaggcggactctccgggtccaggggaacgaccattctgcaactagggagaggcgactcgactatcaagaaggtccgcctggtgtggagatttcctgctggtcagtggagctttag

SEQ ID NO: 191605 - DNA, 1683 bp, synthetic construct
  misc_feature 1..1683: note = Description of Artificial Sequence: Synthetic coding sequence
  source 1..1683: mol_type = other DNA
atgacctaccccggcatcatcaaggagaaggccgaggcccaggcccagtattcagccgctgtggctaagggcaaatctgccggcctggttaaagccaccggccgaaatatggagcagtttcaggtctccgtgtctgtggctcccaatgctaagattacattcgagctggtttacgaagagctcctgaagaggcgcttgggggtgtacgagctactgttaaaggtccgcccgcagcagttagtcaagcatttgcagatggacatccacatttttgagccacagggcatatcattcctggaaaccgagtcaaccttcatgacaaaccagctggtggatgcccttaccacctggcagaacaaaaccaaggctcacattcgcttcaaaccgaccttgtctcaacagcagaagtctcctgagcagcaggagaccgtactggatggaaatctaattattagatatgatgttgacagggccatctccggcggctcaattcaaattgaaaacgggtatttcgtgcattacttcgctccagagggactgaccacaatgccaaagaatgtcgtttttgtgatcgataaaagtggtagtatgtcgggaaggaagattcagcagacgagagaggcattaatcaagatcctggacgacctgagtcctagagatcaatttaatcttattgtgttttcaacggaggccacccagtggcggccttctcttgtgccagcttctgctgagaatgtcaataaagccagatcgttcgccgctggaattcaggctctcggtggcaccaacattaatgacgctatgctgatggctgttcagctgctcgactcatccaaccaagaggagagactaccagaaggttccgtttcactgatcatcttgctcacagacggcgacccgactgttggcgaaactaacccccgatcaattcagaataacgtcagagaggccgttagcggacggtacagcctcttttgcctcggatttgggttcgacgtgagctatgccttcctggagaaactggcattggacaatggcggcttagcgaggcggatccacgaggatagcgattctgccctccaactgcaagatttctaccaggaggtcgccaatcctctgttgacggcggtgacattcgaatatccctcaaacgccgtcgaggaagtcacccaaaataactttagacttctgttcaaagggagtgagatggtcgtggcaggcaagttacaggacagaggcccagatgtgctgactgccaccgtcagtgggaagctgcctacccagaacattacttttcagactgagagttctgtcgccgagcaagaggccgagtttcagagccccaaatacatctttcacaatttcatggaaaggttatgggcttatctgactatacagcaactcctcgaacagactgtctcggcaagcgatgcagaccagcaggcactccgcaatcaggctctgaatctctctctggcttactccttcgtcacacccttgacatccatggtagttacaaagcccgacgatcaggagcaatcccaagtggcagaaaagcctatggagggagaatcccgtaatagaaacgtccatagtggctctacctttttcaagtactacctgcagggagcgaaaatccctaaaccgggggataaggtgggcgggggagggcgtggggattag

SEQ ID NO: 191606 - DNA, 2667 bp, synthetic construct
  misc_feature 1..2667: note = Description of Artificial Sequence: Synthetic coding sequence
  source 1..2667: mol_type = other DNA
atgaagcccccccggcccgtgcggacctgcagcaaggtgctggtgctgctgtcactcctcgcaatacaccagactaccaccgccgaaaagaacgggattgatatctattccctgaccgtggactcacgcgtgagtagccgctttgcccataccgtggtgacgtccagggtggtgaacagagcaaatacggtacaggaggccaccttccaaatggaattgcccaagaaagcattcatcacaaatttttccatgataatcgatggtatgacctacccagggatcatcaaggaaaaggcggaagcccaagctcaatacagcgccgcagtggctaagggcaaatctgcaggtcttgtaaaagccacggggcggaatatggagcagtttcaggtcagcgtgtcagtcgcgcccaatgcaaaacggagactgggagtgtatgaactgcttctgaaagttaggccacagcagttagtgaagcatctgcaaatggatattcatatctttgaaccacaaggtattagttttctagagacagagagcacttttatgacaaatcaactcgtcgatgctttgactacatggcagaacaagaccaaggcccacatccggttcaagcccacactgtctcagcagcaaaaatctcctgagcaacaggagaccgttctggacggcaacctcattattcggtacgacgttgaccgggcaatctcgggtggctccatccagatcgaaaatggctactttgtccattatttcgcacctgaaggacttacaacaatgccgaagaatgttgtcttcgtgatcgacaagtctggcagtatgtccgggaggaaaatacagcagactcgtgaagccttaatcaagatactggatgatctgtctcctagggaccagtttaacctgattgtgttctcaaccgaggcgacccagtggcggcccagtttggttcctgccagtgccgagaacgtgaacaaagcccgctcatttgccgctggaatccaggcgctgggtggcacaaatatcaacgacgctatgctcatggcagtccaattgctggatagctcaaatcaggaggagaggttacctgaggggagcgtgtcgctgattatactcctgaccgatggagatcctacagtcggcgaaaccaaccctcgctccatccagaacaacgtgagagaagccgtgtccggacgctactcactgttctgtctaggttttggcttcgacgtaagctatgcttttctcgaaaaactggctctcgataatggtggcctagccagaagaatacacgaggactctgatagcgcactgcagctgcaagacttctatcaggaagttgccaatcctttgctgaccgccgtgaccttcgagtacccttctaacgccgtagaggaggtcacccagaataatttccggcttctgttcaagggcagcgagatggtcgtggcggggaaactgcaggaccgtggcccagacgtcctgacagcgactgtctcaggcaagctgcccactcagaatataacctttcaaactgagtcatccgtggcggagcaggaggcggaattccaatccccaaaatacatctttcacaacttcatggagcgactctgggcctaccttactatccagcagctgctggaacagacggtttcagcaagcgacgcagaccagcaggcccttcgcaatcaggccctgaacctcagcctggcctacagctttgttacaccgttgaccagcatggtggtcaccaaaccagatgatcaggaacaaagccaggtggctgaaaagcccatggagggagagtctcggaaccggaacgtgcatagcgcaggggccgcaggcagccggatgaatttcagaccaggggtactctccagtagacagctgggacttcccgggccgccagatgtgcctgatcacgccgcatatcacccattcagacggttggccattttgccagcaagtgctcctccggcaacttctaaccctgatcctgcagttagtagagtgatgaacatgaaaatcgaagaaacgactatgaccactcaaactcctgcacctatccaggctccgagtgctattctaccccttcctggtcagagtgtcgagcgcttgtgcgtggacccacgacaccgccagggcccagtgaacttgttgtccgaccctgaacagggcgttgaagtcactggacaatatgagagagaaaaagccggattttcctggattgaggtaacgttcaaaaaccccttagtatgggttcatgccagccctgagcacgtggtggttacaagaaaccggcgctcctcagcgtataagtggaaggaaactctgttttccgtgatgcctggactcaaaatgaccatggacaaaactggcctgctcctgctgagcgaccctgacaaagtaacaattggcttactgttttgggatggacgaggcgaggggcttcgcctcctactccgcgacaccgaccggttctcatctcacgttggaggaacactcggccaattctatcaagaagtgctgtggggatcccctgctgcctccgatgacggccggcggacgcttagagtccagggtaatgaccattccgccacgcgggagcgacgtctggactaccaagaaggcccccccggcgttgagattagttgctggtccgtggagttgtag

SEQ ID NO: 191607 - DNA, 2871 bp, synthetic construct
  misc_feature 1..2871: note = Description of Artificial Sequence: Synthetic coding sequence
  source 1..2871: mol_type = other DNA
atgctgctgctgctgggcctgtgcctgggcctgagcctgtgcgtggggtcgcaggaggaggcacaatcctgggggcattctagcgagcaggatggtctcagagtcccccgtcaggtaagactgctgcagcgcttgaaaaccaaacctctcatgacagagttctcagtgaaatccaccatcatctctagatacgcctttaccaccgtttcatgccggatgctcaatcgagcatccgaggaccaggacattgagtttcaaatgcagattcctgccgctgcatttattacaaacttcactatgctgatcggtgacaaggtctatcagggagaaatcaccgagcgagaaaaaaagagcggagaccgagtaaaggagaagaggaataaaacgactgaggaaaatggcgagaagggtactgaaatcttccgagcctccgccgtcatcccctcaaaggacaaggccgccttcttcttgagctatgaggagctgctccaacggagattaggaaagtatgagcattcaatctccgtccgcccacagcagttgtccggccgcctgagcgtggacgtaaacatccttgagtctgccggaatagcctcacttgaagtgctgcccctccataactccagacagcgcggctccggtaggggggaggacgattctggccccccacccagcacggtgattaatcaaaacgagacattcgcaaatattatttttaagccgactgttgttcagcaggccagaatcgcccagaacggtattcttggcgatttcataatcaggtacgatgtgaatagggaacagtccatcggcgacatccaggtgttgaatggctatttcgtgcactacttcgcacctaaggacctgccccctttgccaaaaaatgtagtgttcgttctcgatagctccgcaagcatggtggggactaagctccgccaaacaaaagacgccctttttaccatcctgcatgatctccgaccccaggaccgttttagtatcatcggtttttcaaaccggatcaaagtgtggaaggaccacctgattagcgtaacgccggatagtataagggacggtaaagtttacatacatcatatgtcacctacaggtggtaccgacattaatggtgcgctccagcgcgcgatcagactcttaaataagtacgtagcacattcagggattggcgaccggagtgtgtctctgatcgtctttttaacagatgggaagcccacagtaggtgaaacccacactctcaaaatactcaataacactagagaagccgctcgcggccaggtgtgtatttttaccattggtatcgggaacgacgtagattttaggcttcttgaaaagctctctttggagaattgcgggctgacgaggagagtccacgaggaagaagatgctgggtctcagctgatcggattttacgacgagataagaacccctctgctgtcagacattaggattgattacccaccctcatccgtggtgcaagcgacaaaaaccctattcccgaattactttaatgggagtgagattatcattgctggcaagttagtcgaccggaagctggaccaccttcacgtggaggtcactgcttccaattcaaagaagtttatcattttgaaaaccgatgtacctgttcggccccaaaaagcgggaaaggacgtgactggatccccaagaccgggcggcgacggggaaggggacactaaccatattgagcggctgtggtcctatctgaccacaaaagaacttcttagttcctggttgcagagtgatgacgagcctgagaaggagaggttgaggcaacgcgcccaggctctcgccgtctcttaccgctttctgaccccgttcaccagcatgaagttgcgtgggcccgtgccacggatggatggcctagaggaagcccacggtatgagcgctgctatgggtcctgaacccgtggtgcagagcgtgcgcggtgcaggtactcagccgggccccctattgaagaaaccttaccaaccacgcatcaagatttcaaagacaagcgtggacggtgacccccacttcgtggtggactttcccttgtcaaggctgacggtttgtttcaacatcgacggacagccaggagacattctgagacttgtctctgatcaccgagattcaggcgtcactgttaacggggagctgatcggggcacccgccccacccaatggtcacaaaaaacagcgcacctatctaagaactatcacaatccttattaacaagccagagaggagctatcttgaaattactcctagtcgcgtgatcttggacggtggcgataggctcgtcctcccctgcaatcaatcagtggttgttggtagctgggggcttgaggtgtcagtgagtgcgaatgctaacgtcaccgtgacaatccagggctcaatagctttcgtgatactaattcacctttataagaagcctgctcccttccagagacatcatctgggcttttacatcgcgaatagtgagggtctttcttccaattgccatggactcctggggcagttcttgaaccaggacgctaggctgaccgaagatcccgccggtccctcccagaacctgacacatcccttactcctgcaggtcggtgagggcccagaagccgtgctgacagttaagggccatcaagttcccgtcgtgtggaaacagaggaagatttacaacggtgaagaacaaatcgactgctggtttgcccgcaataacgctgccaagctcatcgacggcgagtacaaggactatctcgcatttcacccgttcgatacaggcatggacacttggccagggaacgtccagggcgcacttaaacttgccgccttaaaaatgcaggtgcacgagggccaatag

SEQ ID NO: 191608 - DNA, 2229 bp, synthetic construct
  misc_feature 1..2229: note = Description of Artificial Sequence: Synthetic coding sequence
  source 1..2229: mol_type = other DNA
atgcggaactacgacagcggccccccccccagcaccgtgatcaaccagaacgagacctttgccaatatcatcttcaagccaaccgtcgtgcaacaagcacggattgcccagaatgggattcttggtgactttatcattcgctatgacgtaaaccgagaacagagcatcggtgatatccaggttttaaacggctattttgtccactattttgcgcccaaggacttaccgcccctccccaaaaatgtggttttcgtgctcgacagttccgctagcatggtaggaaccaagctccgacagaccaaggatgcactattcaccatcctgcacgacttgcgtcctcaggaccggttttccattatcggatttagtaaccgcataaaagtttggaaagaccacctgatatccgtaaccccagatagcatccgggacgggaaagtgtatatccaccatatgtctccaactggcgggacagacattaacggtgcgctacagcgcgctatccgcttgttgaataagtatgttgcgcactcaggaattggggacaggtccgtctcactcattgtttttctgacagacggtaagccaacggtcggagagactcacactttgaaaatcctgaacaacacaagggaggccgcgcggggacaggtgtgcatattcaccatcgggattggcaatgacgttgacttccgcctcttggagaagttatctttggagaattgtggccttacgcgacgcgtccacgaagaggaggacgccggaagccaactgataggcttttacgatgaaataaggactcctctgctatcagatattcgaatcgattatccgcccagcagcgtagtacaggcaacaaaaaccctgtttcctaattacttcaacggctcagagatcatcatagccggcaaactggtggaccgcaagctggaccatctccacgtggaggtgaccgcctccaatagcaagaaatttatcattttgaagaccgatgtgccagtccggccacagaaggcgggaaaggacgtgacagggagtcccaggcctggtggcgacggtgaaggtgacaccaatcacatcgaacgactgtggagctacttgacaaccaaagaattgctcagcagctggctacaatctgacgatgaaccagagaaggaacggttgcgtcagagagcccaggccttagcagtgtcctatcgattcctgactcctttcacatccatgaaattgcgcggtccagtcccacgaatggatggtcttgaagaagcccacggcatgagcgcagccatggggcccgaacctgtagtccagtctgttagaggcgccggaacccagcctggaccactgctgaaaaagccgtaccagccgcgaatcaaaatctccaaaaccagcgtcgacggtgacccacattttgtggtggattttccactctcacgcctgactgtctgttttaatattgatggccagccaggagatatcctgcgcttagtgagtgaccatcgcgattccggtgtgacagttaacggagagcttattggcgccccagccccaccaaacggacataagaagcaaagaacctacctgcggactatcaccatactgataaataagcccgagcggagctatctcgagataaccccctcccgagtgatcttggatggaggagaccgcctcgtattaccgtgcaaccaaagcgtggtggtggggtcttgggggctggaggtctccgtgtctgccaacgctaatgtgacagtgactattcagggctccattgctttcgtgatcctcatccacctttacaagaaaccagctccctttcaacgccaccacctggggttttacatcgcgaactccgagggtctgtcatcaaattgtcatggccttctgggccagttcctgaaccaggacgcccgtcttacagaggatcctgccggcccttctcaaaacctgacacatcccctgcttctccaggtaggggaaggccctgaggctgtcctgacagtgaaaggacatcaggtgccagtggtgtggaagcaaaggaagatctataacggagaagaacagatcgattgttggtttgctagaaataacgccgcaaagctcatcgatggcgagtacaaagattatctagcttttcacccattcgatacgggcatggacacctggcccggaaatgtgcagggcgctctcaagctggctgctctcaaaatgcaagtgcatgaaggccagtag

SEQ ID NO: 191609 - DNA, 2109 bp, synthetic construct
  misc_feature 1..2109: note = Description of Artificial Sequence: Synthetic coding sequence
  source 1..2109: mol_type = other DNA
atgctgctgctgctgggcctgtgcctgggcctgagcctgtgcgtgggaagccaagaggaggcccagtcatgggggcattcaagtgaacaagatggtcttcgggtgccacggcaggtgcgtctcctgcaaagactgaagaccaaacctctgatgaccgaattttctgtcaagtctacaattatcagccgatatgcgtttacaactgttagctgccgcatgttgaatagggcgagcgaggatcaagacatcgagtttcagatgcagattcctgcagcagccttcataaccaacttcaccatgctgattggcgacaaagtctatcagggggagattacagagagggagaagaagtccggagaccgcgtgaaggagaagcgcaataagactacggaggaaaatggcgaaaaaggaacagagattttcagagccagtgctgtgatcccctccaaagacaaagccgccttctttctgtcctatgaagagctgttgcagcgccgtctgggaaagtacgaacacagcatctctgtgaggccacagcagctcagcggtagactgtctgttgacgtaaatatcctagaaagcgcagggattgcctcactggaagtcctgcccctgcacaactctcgccagagaggctcgggcaggggcgaggatgactccggacctcccccaagtaccgtgattaatcagaatgagacttttgccaacattatttttaagcctaccgtcgtgcagcaagcccgcatagcccagaatggaatccttggggattttattatccggtatgacgtgaaccgagaacagtccattggcgacattcaagtgctgaatggttatttcgtacactacttcgctccaaaggatttgcctcctctccccaagaacgtggtgttcgtgcttgatagtagcgcatctatggtgggtacaaaattacgacaaacgaaagacgccctgttcacaattctgcatgatctcagaccacaggacaggttctccataattggattctccaataggataaaggtgtggaaggaccacctcatatcagtcactcccgattccatccgagacggcaaagtatacatccaccacatgtcccccacaggcggaactgacattaatggagctctgcagagagcgattagactcctgaataagtacgtggcccactcaggcatcggggacagaagtgtgtccctgattgtgttcctcactgacggcaaacccacagtgggtgaaacacacacattaaaaattctaaacaatacccgggaggcagcaagggggcaggtgtgcattttcacaattgggatcggaaacgacgtagactttcgcttactggaaaaacttagcctcgagaattgtggactgacacgtcgagtccacgaagaggaggacgccggcagccagctgattggattctacgatgaaatccgaacaccattgctgtcagatataagaatcgactatccaccgtccagtgtcgtgcaggcgacaaaaacgcttttcccaaactacttcaatggatcagaaattatcatcgcaggcaagctcgttgacaggaagctggatcaccttcacgtggaggtgactgcatctaactcaaaaaagtttatcatcctgaagaccgacgttccggtgagaccgcagaaggctggtaaggacgtcacggggtcacctcggccaggaggcgatggagagggagacactaaccatatagaacgattatggagctacctgactaccaaagagctcctttcctcctggttgcagtcagatgacgaaccagaaaaagaaagacttagacaaagagcccaggccttggccgttagctatagatttttgaccccatttacgagtatgaagttaagaggcccagtgcctagaatggatggcctcgaggaagcccatggaatgtcagccgcaatgggccctgagcccgtggtccaaagtgtgcgtggtgcaggtacacagccaggtcctctgctgaagaagccctatcagccaaggatcaagatttccaagacatctgttcgggggttcagacgcgaagaacagatattcagtaatgtaatgaagttcccgttcgctagtatcctagaactgtag

SEQ ID NO: 191610 - DNA, 2088 bp, synthetic construct
  misc_feature 1..2088: note = Description of Artificial Sequence: Synthetic coding sequence
  source 1..2088: mol_type = other DNA
atgctgctgctgctgggcctgtgcctgggcctgagcctgtgcgtgggttcccaggaggaagcacagtcatgggggcatagttctgagcaggacggcctgcgggtgccgagacaggtccgtctgttacagaggctgaaaaccaaaccactcatgaccgaatttagcgtgaagagtaccattatttccagatatgcgtttacgaccgtttcttgccgcatgctcaatcgcgcgtcagaggaccaagacattgagttccagatgcaaataccggctgccgcattcattactaatttcaccatgctcattggggataaggtgtatcaaggagaaataacagaacgagagaagaagtctggagatcgcgtgaaagagaaaagaaataagaccaccgaagaaaacggtgaaaaaggaacagaaattttccgggctagtgccgttatcccaagtaaagacaaggctgctttctttttgagctatgaggaacttctccagagaagactggggaagtacgagcactccatatccgtccgaccacagcagctgtcagggcgactgtctgtggacgtaaatatactcgagtccgccggcatcgcttcactcgaggtgttgccactgcacaattcccgtcagcgtggttccggcagaggcgaggacgatagtggaccacctccatccaccgtaatcaatcagaatgagactttcgccaacataatctttaagcccaccgttgtccagcaagcccgaatagcccagaatggcattttaggagatttcatcattcggtatgacgtgaatagggaacagagtatcggtgacatccaggtccttaatggctacttcgttcattattttgcacctaaggatttgcctcctctcccaaaaaacgttgtctttgtgcttgactctagcgcatccatggtgggcactaaacttaggcagacaaaagatgccttgttcactattcttcacgacttaagaccccaagatagattcagcattatcggattttccaataggatcaaggtctggaaagatcacctgatctctgtgacccccgattccattcgggacggcaaggtttacatccatcatatgtcccccactgggggaacggacatcaacggtgccctacaacgtgccatccggctgcttaacaagtatgttgcccactccgggattggcgatcggagcgtgtccctgatcgtctttctaacggatggaaagccgactgtgggggagacccatactctaaaaattctaaacaacacccgtgaagccgcgcggggacaagtgtgtatttttacaattggaatcggcaacgatgtagatttccgcctcctggaaaaactctccctagagaactgcgggctgacacggcgagtgcacgaagaggaggacgccggaagtcaactgatcggtttctatgatgagatcagaaccccgctgctgagtgacattaggatcgattatcccccttcttctgtcgtgcaggcgaccaagacccttttccccaattactttaatggcagcgaaattatcatagccggtaaacttgttgatcgcaaattggaccatctgcatgtggaggtcactgccagcaattccaagaagttcattatcctgaagacagatgttcccgtgcgaccccaaaaagctggtaaagacgtgactggttcaccaagacccggtggtgacggtgaaggggacacaaaccatattgagaggttatggagttacctgacaaccaaggaactgctctcctcttggctgcagtccgacgatgagccagaaaaggaaagactgcgccagcgtgcccaggcccttgcagtgagttaccggttccttactccctttacgagcatgaagctccgggggcctgtgccacgaatggatgggctggaggaggcccacgggatgagtgccgcaatgggccctgaacctgtcgtgcaatcagtgagaggggcgggcactcagcctgggcccctgcttaaaaaaccccctaacagcgtcaaaaaaaagcagaacaagacgaagaaacgacatggccgggacggagttttccccttgcaccatctgggtataaggtag

SEQ ID NO: 191611 - DNA, 2172 bp, synthetic construct
  misc_feature 1..2172: note = Description of Artificial Sequence: Synthetic coding sequence
  source 1..2172: mol_type = other DNA
gacagcggccccccccccagcaccgtgatcaaccagaacgagacctttgctaatattattttcaaaccgaccgtggtgcagcaggctaggattgcacagaatgggatcctgggcgattttatcataagatatgatgtcaatagagaacagtcaataggtgacatccaggtgctgaacgggtactttgtgcactacttcgcacccaaggatctcccaccactgcctaagaatgtggtgtttgtgctcgatagtagcgcctctatggtcgggactaagctgcgacagacaaaagatgctcttttcactatactgcatgatctgcggccacaagatcgattctctattataggattttccaaccgcatcaaagtctggaaagatcacctgattagtgttactcctgatagtattagagacggtaaggtgtacatccaccatatgtctccaaccggaggcacagatatcaatggtgcgctgcaaagggcaattaggctcttgaacaaatacgtagcccactcaggaatcggcgacaggtccgtgagcctgattgtgttcctgacagatggaaaacctaccgttggagagacccacaccctgaagatcctgaataatactcgcgaagccgcacgcggccaggtttgtatctttacaattggaatcggaaatgacgtggatttcaggctactagagaaactcagcctggagaattgcggcctgactagacgggttcatgaagaggaggatgccgggtcacagttgataggattctacgatgaaattcgaacccccctgctgtcagacatacggattgattaccccccctcctcggtggtgcaagccactaagacactgtttccaaactatttcaacggctctgagattatcattgctggcaagttggtcgacaggaagttggaccacctccacgtggaggtgacagcatcaaacagtaaaaagttcattatcctgaagactgatgtcccggtgcgcccccagaaggcaggcaaggatgtgacagggagtccccgcccaggaggggatggcgaaggagatactaaccatatcgagcggctgtggtcttacctgactacaaaggagttgctgagcagttggctacagtccgacgatgagccagaaaaggagcgtctgcgtcagagagcccaggcacttgctgtctcctacaggtttctaaccccgttcaccagcatgaagcttagggggccagtgcccagaatggacggcctcgaggaggcccacggaatgtctgctgctatgggccccgagcctgtcgtgcaatcagtccgcggtgccgggacccagcccggacctcttctcaagaagccctaccagcctcgtataaagatatctaagactagcgtcgatggagacccccactttgtcgtggactttcctctgtctcgtctgaccgtctgcttcaacatagacggtcaaccaggtgacatcctgcgcctggtgagcgaccaccgagattccggagtaactgtgaatggagaactgatcggagcgcctgccccaccaaacggacacaagaaacaacggacttacttgcggaccatcaccattctgattaataaaccggaaagatcctaccttgaaattaccccgagtcgtgtgattctagacggaggtgaccggttggtcctgccctgtaaccaatctgtggtggttggctcatggggcctggaggtatccgtatcggctaatgccaacgtgacagtcaccatccaggggtccatcgcttttgtgatactgattcacctttacaaaaagccggccccttttcaacggcaccaccttggcttctacattgccaattctgaagggttgtccagcaactgtcacggactcctgggacagttcctgaaccaagacgcgaggttgaccgaggacccagccggcccctcacagaatctgacccaccccttgcttttgcaggtgggtgaaggtcccgaggcagtcttgacagtcaaaggtcaccaggttcccgttgtgtggaagcagagaaaaatctataatggcgaggagcagatcgactgctggttcgcccggaacaacgcagcaaaactaattgacggtgaatacaaggattaccttgcatttcacccttttgatactgggatgttggggagagggatgtcaagagagttgtag

SEQ ID NO: 191612 - DNA, 1599 bp, synthetic construct
  misc_feature 1..1599: note = Description of Artificial Sequence: Synthetic coding sequence
  source 1..1599: mol_type = other DNA
atggcccccagcagcccccggcccgccctgcccgccctgctggtgcttttaggagccctgtttccaggccctggaaatgctcagaccagcgtgtctccatcaaaggtgattcttcctcgaggaggctccgtccttgtgacctgcagtacaagctgtgatcaaccaaaactcctgggcatcgaaacccccctgcccaaaaaagagctccttctgcccgggaacaaccggaaggtgtacgagttatccaacgtccaggaagatagtcagcctatgtgctacagtaactgtcccgatggccagtcaacagccaagaccttcttaaccgtgtactggacccccgagcgagtcgaattggcccctttaccttcctggcagcctgtcggcaaaaatcttacgttacggtgccaggttgagggaggggcccctcgggcgaatttaaccgtggttctgttgaggggggagaaggaactcaaacgcgagcctgccgtgggagagccggccgaagtcactaccactgttctggtccgcagggaccatcacggagcgaatttcagttgtcggactgaactggatttgagaccacaaggtctggagctgtttgaaaatactagcgcgccataccagttacagacctttgttttgcccgccactcctcctcagcttgtgtctccccgcgtgctggaagttgacacacaaggcacagtggtgtgttccttggacggattattccctgtgagtgaggcgcaggtccacctggcattgggtgatcagcggctaaatcccacagtgacctacggcaacgactctttttctgctaaagcatccgtgtctgtcaccgcggaggacgagggcacacagcgcctgacctgcgcagtcattctgggtaaccagtcccaagagacccttcaaacagtgacaatttactccttcccagcccccaacgtgattcttactaagcccgaggtgtctgagggcacggaagtgactgtgaagtgtgaagcacacccacgggcaaaggttacgctgaatggagtgcccgctcaaccactcggccctagggcacagcttctcctgaaagcaacgcctgaagataatggtaggagtttctcttgcagtgcgacactggaggtcgccggccagttgatccacaaaaaccagacccgcgaactgagggtgctctacgggcctcgtctagatgagcgtgactgcccagggaattggacttggcccgaaaactctcaacagaccccaatgtgccaagcttggggcaatcccctcccagagctgaagtgcctgaaagacggcactttcccactcccaatcggtgaaagcgttaccgtgacacgtgaccttgagggtacttatctttgtagggccaggtcaacccagggtgaagtgactcggaaagtaaccgtgaacgtgctctcccctagatatgagattgtaatcattacagtggtcgctgcagcggtgatcatgggaaccgctggactgagcacgtatctgtataacagacagaggaagattaaaaagtaccgactgcagcaggcccagaaggggacacccatgaagccaaacacacaagctactccgccttag

SEQ ID NO: 191613 - DNA, 933 bp, synthetic construct
  misc_feature 1..933: note = Description of Artificial Sequence: Synthetic coding sequence
  source 1..933: mol_type = other DNA
atggcccccagcagcccccggcccgccctgcccgccctgctggtgctgctgggtgcattattccctgtttctgaagctcaagtccacctggcattaggggatcaaagacttaacccaaccgtgacctacgggaacgatagtttctccgccaaagcctccgtgagcgtcacagctgaggatgaaggtacccagagactcacgtgcgctgttatcctaggaaatcagtctcaggagactctccaaacggttacaatttactcattccctgcgcctaatgttattctgactaaacctgaagtcagcgaaggaaccgaagtgactgtcaagtgcgaggcacaccctagggctaaggtgactctgaatggcgtgccagcccagccactgggtcctagggcccagctcctcctcaaggcaacaccggaggacaacgggcgatcattctcctgtagcgcaacgcttgaggtcgcaggtcagctgatacacaagaaccagacaagagagcttcgagtgctgtatggcccacgactcgatgagcgtgattgccccggaaattggacttggccagaaaactctcaacagaccccaatgtgccaggcttggggtaatccattgcctgagctgaaatgcctgaaagatggtactttcccgcttcccatcggcgaatcagttaccgtcacacgcgacctcgaagggacctatttatgtcgcgcgagatccacgcagggggaagtgacccggaaagtcaccgtgaatgtcctcagcccacgctacgaaatcgtcatcataaccgtggtggccgcagctgttattatgggcacagccggattgagtacctacttgtacaaccgacagagaaaaattaagaaatatagattgcaacaggctcagaaggggaccccaatgaagcctaacacccaggccactcccccttag

SEQ ID NO: 191614 - DNA, 828 bp, synthetic construct
  misc_feature 1..828: note = Description of Artificial Sequence: Synthetic coding sequence
  source 1..828: mol_type = other DNA
atgagcagcttcggctaccggaccctgaccgtggccctgttcaccttgatctgctgccccgggtccgacgaaaaggtgttcgaagtccatgtgcgcccaaaaaagctggcggtggaaccaaagggcagtttagaggtcaattgcagcacaacctgcaaccagcctgaagtgggcggcctcgagacctctttagacaaaattctattggatgaacaggcacagtggaaacactatctagtgtctaacatctcccatgacactgtcttgcagtgccatttcacctgctcgggcaaacaagaaagtatgaattctaatgttagtgtctatcagccacctcgccaagtgattctcaccttgcagcctaccctggtggccgtcggcaagtcattcacaattgagtgccgtgtgccaactgtcgagcccctcgacagtctgactttatttctctttagggggaacgagacgctgcactatgaaaccttcggcaaagccgcccctgcacctcaagaggccaccgccacatttaatagcacagcggatcgcgaggatggacataggaatttcagctgtctcgccgttttagatctcatgtctcgcggcggtaacatatttcataaacatagtgccccaaagatgctggagatttatgaacctgtgtcagattcccagatggtgattattgtgactgtggtctcagttctcttaagcctctttgtgacctcagtgcttctctgcttcatcttcgggcagcacctgaggcagcagcgtatgggtacatatggagtcagggccgcctggcgcagacttccccaagcctttcggccgtag

SEQ ID NO: 191615 - DNA, 828 bp, synthetic construct
  misc_feature 1..828: note = Description of Artificial Sequence: Synthetic coding sequence
  source 1..828: mol_type = other DNA
atgagcagcttcggctaccggaccctgaccgtggccctgttcaccttgatatgctgccctggctccgacgagaaagtgtttgaggtgcacgttcgcccaaagaagctggcagtggagccaaagggatccctcgaggtaaactgttccactacctgcaatcaacctgaggtgggagggttggaaaccagcctggacaagattctcctggacgagcaagctcagtggaagcactatctggtttctaacataagccacgataccgtactccagtgtcattttacctgctccgggaaacaggagtccatgaattcaaacgtctccgtgtaccaaccgccaaggcaggtgatcctcacactacagcctactttggtggcagtgggcaaatcttttaccatagagtgccgggtgcctacagtggagccactggacagtctgacattatttttgtttcgaggcaacgaaactctgcattatgagacattcggaaaagcagccccagcaccgcaagaagcgacagctacatttaactctaccgcagaccgagaagacggccaccgaaatttcagctgcctcgcagtcctggatttaatgagtagaggggggaacatcttccacaaacacagcgctcccaaaatgctggagatctatgaacctgtttcagatagccaaatggtgataattgtaactgttgtttccgtcctcctctcactttttgttacctcagtactgctatgcttcatttttggccaacacctccgccagcagaggatgggtacatatggggtgagggccgcctggcgacggctgccccaggcttttcgcccttag

SEQ ID NO: 191616 - DNA, 828 bp, synthetic construct
  misc_feature 1..828: note = Description of Artificial Sequence: Synthetic coding sequence
  source 1..828: mol_type = other DNA
atgagcagcttcggctaccggaccctgaccgtggccctgttcaccctcatttgttgccccggcagcgacgaaaaggtcttcgaagtgcatgtgcgacctaaaaagctggccgtggaacctaaaggctcactggaagttaactgttctactacgtgtaatcagcctgaagttggaggactcgagacttctctggataagattctgttggacgaacaggctcaatggaagcattatctggtgagcaacatttctcacgacaccgtactccagtgccattttacttgtagcggaaaacaggaatcaatgaattcaaacgtcagtgtttaccagcctccccgacaggtcattctgacccttcaacccacattagtcgcagttggcaagagttttactattgaatgtagggtccccactgtggagccactagatagcctcaccttgtttctgttcaggggcaacgagacactgcattatgaaacctttgggaaggcagcgccagcccctcaggaagccactgccaccttcaacagcacggcagaccgggaggatgggcataggaacttctcttgtctggctgtgctcgacctgatgtccagaggaggaaacatattccataagcatagcgccccgaagatgcttgagatttacgaaccggtctcagattcccaaatggtcatcatcgtaacagtggttagcgtgctgttaagtctgtttgtgactagcgttcttctgtgctttattttcgggcagcatctgaggcagcagcgaatgggcacttacggtgttagggcggcctggaggaggctacctcaagcattcagaccctag

SEQ ID NO: 191617 - DNA, 828 bp, synthetic construct
  misc_feature 1..828: note = Description of Artificial Sequence: Synthetic coding sequence
  source 1..828: mol_type = other DNA
atgagcagcttcggctaccggaccctgaccgtggccctgttcaccctgatctgctgccccgggagtgatgaaaaggtgtttgaagttcacgtgaggccaaagaaactcgcagttgaacccaagggatctttggaagtcaattgctccactacatgcaaccaaccagaagtgggtggtctggaaacaagtctagacaaaattcttttagacgaacaggcccaatggaagcattacctggtgagcaatatctcacacgacacggtgctccagtgtcacttcacatgctccggaaagcaagaaagcatgaacagcaacgtgtccgtttatcagcctccacgacaggtcattctgacgttgcagccaacacttgtcgctgtcggtaaatccttcactattgaatgccgggtccccacagtagagccccttgattcactcactctatttctgttcagaggcaatgaaaccctgcattatgaaacttttggtaaagcagcacctgctcctcaggaggctaccgccacattcaactcgaccgctgatcgggaggacggtcacagaaatttctcatgtttggctgtactggacctcatgtcccggggaggaaatattttccacaaacacagtgccccaaagatgttggagatttatgaacctgtgtctgatagtcaaatggttatcatagtgactgtcgtatcagttctgttatctcttttcgtgacctcggtgttgctctgcttcatcttcggccagcatctacggcagcagaggatggggacatacggtgtgcgcgccgcttggcggcgtctgccacaggccttcagaccctag

SEQ ID NO: 191618 - DNA, 828 bp, synthetic construct
  misc_feature 1..828: note = Description of Artificial Sequence: Synthetic coding sequence
  source 1..828: mol_type = other DNA
atgagcagcttcggctaccggaccctgaccgtggccctgttcaccctgatatgttgccccggcagcgatgaaaaggtgttcgaggtacacgtgcggcccaagaagctcgccgtggagcccaagggctccctagaggtcaattgctccacaacatgtaaccaacccgaggttggtggacttgagacatctctggacaagatcttactcgacgagcaggcacagtggaagcattatttggtctctaatatctcccatgataccgtactccagtgccactttacctgtagtgggaagcaggaaagcatgaactccaacgtctcggtgtaccaaccccccagacaggtgatactgacattgcagcctaccctagtagcagtggggaagagcttcacaattgaatgcagggtgcctaccgtggaacccctcgactcactgacgctctttttgttcagaggcaatgagaccctgcactatgagaccttcggcaaggcagctccagctcctcaggaagccacggccacattcaacagtaccgcagacagggaggacggccaccgcaacttttcttgcctggcagttctggatctgatgtcccggggagggaacatttttcacaagcattctgctcctaaaatgttggagatatatgaaccagtaagcgacagccaaatggttatcatcgtcacggtggtgtctgttctcctctcgttgttcgtaactagtgtacttctgtgcttcatcttcggccagcacttgcgccagcagagaatgggcacatacggcgtccgtgcggcatggcgtagactgcctcaggcttttaggccttag

SEQ ID NO: 191619 - DNA, 1644 bp, synthetic construct
  misc_feature 1..1644: note = Description of Artificial Sequence: Synthetic coding sequence
  source 1..1644: mol_type = other DNA
atggccaccatggtgcccagcgtgctgtggccccgggcctgctggacactgctggtgtgctgcttactcacccctggggtgcagggacaggaatttctcttgcgagtggagccccaaaatcccgtactgtccgcaggcggttcgctcttcgtgaactgctccaccgactgtccttcctccgaaaagatagcgctggagacgtctctgagtaaagagctagtggcttctgggatgggttgggccgcttttaatctgagcaacgtgactggcaattccaggattctctgctcagtgtactgtaacgggagccagattaccggcagtagcaatatcactgtataccggctgccggaaagagtggaactggcgccactgccgccgtggcaacctgtgggccagaacttcacccttcgatgccaagtggaagacggaagtccgcggacgtcactcacggtcgtgctcttgcggtgggaagaggagctgtcacgacagcccgcggttgaggagcctgccgaagtcaccgcgacggttctcgctagtagagatgatcacggtgctccattcagttgcaggacagaactggatatgcagccgcaggggctcggactgtttgtcaatacaagtgcaccacgacaattgcgcactttcgtgttacctgtgacgccaccaaggctggttgctcccagattcttagaagtcgaaacctcatggccagttgactgcaccctggacggtttgttccctgctagcgaggcacaggtatacttggccctgggggaccagatgcttaacgccaccgtgatgaaccatggcgatactctgactgccacagccacagcaaccgcacgggctgaccaggagggagctcgcgaaattgtttgcaatgtgactctgggcggcgaacgcagagaagctagagagaacctgaccgtcttttctttccttggacctattgtaaacttatcagagcccaccgctcacgagggaagcaccgtcacagtgtcatgcatggccggggctcgcgtccaggttacccttgacggagtccctgccgccgcccccggccagcccgcacaactacaactgaatgccactgagtcagatgacggacgaagcttcttctgctcagccacactcgaggtcgacggggaattcttacacagaaacagctctgtacaactccgggtgctctacggtccaaaaattgatagggcaacctgtcctcagcacctaaagtggaaagataagacccggcacgtgttgcagtgtcaagcacgcggtaatccttacccagaacttcgatgtctgaaggagggctcaagccgagaggtgcccgttggcatcccattcttcgtaaacgtaacccacaacgggacttatcagtgccaggcctcgtcaagccgcggcaaatacaccctggtcgtggttatggacatcgaagctggatcctcccactttgtcccagtgttcgtggctgtcttgctgaccctgggggtagtcactatcgtgctcgctctaatgtatgtgtttcgcgagcatcagcgttcaggtagttatcacgtgcgtgaagaaagcacttatctgccactcacaagcatgcagcccaccgaggcaatgggggaggaacccagtcgcgccgagtag

SEQ ID NO: 191620 - DNA, 819 bp, synthetic construct
  misc_feature 1..819: note = Description of Artificial Sequence: Synthetic coding sequence
  source 1..819: mol_type = other DNA
atgggcagcctgttccccctgagcctgctgttcttcctggccgccgcttatccaggagtagggtccgccctgggaagaaggaccaaaagggctcaaagcccaaaaggatcccccctggcccctagcgggacgagcgtgcctttttgggtccgcatgagtccagagttcgtagccgtgcagcctggcaaatcagtacagctgaactgctcaaattcatgtccgcagccgcagaatagttccctgagaactcctttacggcagggaaagaccctccgaggcccaggctgggtctcctaccagcttctggacgttagggcctggtcctctttagcccactgtctggtgacctgtgcgggaaaaactcgttgggcgactagccgcattaccgcatattccgtacccgggggcctcctgggaggcgacccagaggcttggaagccgggccacttatttcggaaaccaggagctttacataggcctgggtctgggcagcgggacctggacttgcgagtatgttgttggaccccgagattacttgccgcccgcgacctaccccgcgctccacagtcccggagaccaggcgggcctcagcagctcggcacacattataccgacgccagactggagccaagagcacattctttcggcctgagattccacaggtgcccctgcagagatccacctcactgtggccggtgtgtcccaatgcaggtgccctcatatgaggtgcccggcgtgaaaggcgatgtgctctgccgcctgagtgaaaagaagagaaatatgaagcagtctggagagatggccatccacggtggttag

SEQ ID NO: 191621 - DNA, 816 bp, synthetic construct
  misc_feature 1..816: note = Description of Artificial Sequence: Synthetic coding sequence
  source 1..816: mol_type = other DNA
atgggcagcctgttccccctgagcctgctgttcttcctggccgccgcctatcccggggtgggctctgccctggggaggcgcactaaacgggcccagtctccgaagggatcccccctagcgccctctggaacttccgtgcccttttgggtgcgcatgtcccccgaattcgttgcagtccagcccggaaaatccgttcagctcaattgttccaatagttgtccccaaccacagaacagttctctgaggacgccgctgcggcagggaaaaacattgcgcgggccgggatgggtgtcctaccagctgctggacgtgcgggcctggagcagcctcgcacattgcctggtgacatgcgcaggtaagacccggtgggctacaagtagaattactgcttacaaacccccacactctgtgatactggagcctccagtgctgaaaggccgaaagtataccttaaggtgtcacgtgactcaggttttcccagtgggctacttagtagtgacacttagacacggcagtagagtcatttattccgaaagcttagagcgctttactgggttagatctcgccaacgtcacacttacatacgagttcgctgcgggtcctagggacttctggcaacctgtcatctgccacgctcggctgaatctggacggattagtggttcggaattcctcggccccgattacactaatgctggcgtggtcccccgcgcccaccgcgcttgcttccggatcaattgcagccttagttgggatcctcctgacagtcggagcggcatatctctgtaaatgcctcgcaatgaaaagtcaggcgtag

SEQ ID NO: 191622 - DNA, 714 bp, synthetic construct
  misc_feature 1..714: note = Description of Artificial Sequence: Synthetic coding sequence
  source 1..714: mol_type = other DNA
atgggcagcctgttccccctgagcctgctgttcttcctggccgccgcgtatcctggtgtaggctcagctctcggccgtcggactaaaagggcacaatcaccaaagggatccccacttgccccctcaggaacatccgtgcccttctgggttaggatgtcacctgaattcgttgccgtacagcccgggaaatccgttcagctcaactgcagcaactcctgcccccagccccaaaattcgtcactgagaacccctctgaggcagggaaagactctgagaggcccaggatgggtctcataccagcttttagacgtgcgcgcttggtcctccctagcccattgtctggtcacctgcgcggggaagacaaggtgggccacaagccgtattacagcttataaacccccccactcggtgatcttggaacccccagtactgaaaggacgaaaatacacccttcgatgccacgttactcaggttttcccggtgggctatctggttgtcacactacggcatgggtccagagtcatttatagcgaatcccttgagagatttaccgggcttgatctggccaacgtgaccctgacttatgagtttgcagcaggaccgcgcgacttctggcagcctgtgatttgccatgctcggcttaatttggacggattggtggtcagaaacagttcagcgcctatcacactgatgttaggggaggctcccttatag

SEQ ID NO: 191623 - DNA, 498 bp, synthetic construct
  misc_feature 1..498: note = Description of Artificial Sequence: Synthetic coding sequence
  source 1..498: mol_type = other DNA
atggagctgtgccggagcctggccctgctgggcggcagcctgggccttatgttttgtctcattgcgctgtccaccgacttctggttcgaagctgtgggcccaacccacagtgctcacagcgggttgtggcccaccggtcacggagacatcattagtggctacattcacgtgacccaaaccttcagtattatggcagtcctgtgggccctcgtgagcgtgagctttcttgtcctgtcatgcttcccttctcttttcccacctgggcatggacccctggtgtccactacagctgcgtttgcggcagcaattagcatggtggttgcaatggcagtctacaccagcgagagatgggaccagcctccccacccccagatccagacatttttcagttggtccttctacttggggtgggtgtccgcaattctcctgctgtgtactggggctctatctttgggggctcactgcgggggcccacggccaggctacgaaacgctctag

SEQ ID NO: 191624 - DNA, 1674 bp, synthetic construct
  misc_feature 1..1674: note = Description of Artificial Sequence: Synthetic coding sequence
  source 1..1674: mol_type = other DNA
atgatggtggtgctgctgggcgccaccaccctggtgctggtggccgtggccccgtgggtccttagcgcggccgcggggggtaaaaacttaaaatcaccacagaaggtcgaggtggacatcatcgacgacaactttatactcaggtggaaccgttccgatgaatctgtcggtaacgtgaccttttcatttgactatcagaagaccgggatggataactggattaaactcagcggatgccaaaacatcacttccaccaagtgcaattttagcagcctcaagcttaacgtgtacgaggagatcaagttgcggatccgcgccgaaaaggaaaatacttcttcctggtacgaggtggatagcttcacccccttccgcaaagcacaaatcggcccaccagaggtacatctggaggctgaagataaagctatagtaatacacatctccccaggcacgaaggattccgtcatgtgggctttagatgggctgtcattcacctactctctggttatttggaaaaattcttccggcgtagaggagagaattgagaatatttatagtcgccataagatttacaaactttctcctgagacgacctattgtctcaaggtgaaagcagctctgttaactagctggaaaattggggtctatagcccagtgcattgcataaagacaactgtagaaaatgagttaccgcctcccgaaaatatcgaggtaagtgttcagaaccagaactatgtgctaaaatgggactatacttatgcgaatatgaccttccaggtccagtggcttcacgcttttctgaagcgtaatcccggtaaccatctgtataagtggaagcagatccccgactgcgaaaatgtaaagactacccagtgcgtgttcccccagaatgtctttcaaaaaggaatctacttgctcagagtccaggctagtgatggcaataacacatctttttggtcggaagaaataaagttcgataccgaaatccaggcattcctgctgccaccggtgtttaacatccgtagtctctccgattcttttcatatttatatcggggctcctaagcagagcggcaacacccctgttatacaagactatccactgatttacgagatcatcttctgggagaacacctccaatgctgaacggaagatcatcgagaagaaaacagacgtcacagtgcccaatctcaagcccctcactgtttattgtgtcaaggctagggcgcacactatggatgaaaagctcaataaatctagtgtgttttctgacgcagtatgcgagaagacaaagcctggcaacacctcgaaaatttggctgatcgtaggcatctgcatagccctatttgcgctgcctttcgtgatttacgccgctaaagtttttctgcggtgtatcaattatgtcttttttccatctctgaaaccaagctcttcaatagacgaatattttagcgagcagccactgaagaacctgttgctgtccacgtctgaagagcagattgaaaaatgcttcataatcgaaaatatctcaaccatcgcgactgttgaagagacaaatcaaaccgacgaggaccacaagaaatatagttcacagactagccaggactcgggcaactactcaaatgaggatgagtctgaaagcaaaacatcagaagagctccagcaggatttcgtctag

SEQ ID NO: 191625 - DNA, 1467 bp, synthetic construct
  misc_feature 1..1467: note = Description of Artificial Sequence: Synthetic coding sequence
  source 1..1467: mol_type = other DNA
atggacaactggatcaagctgagcggctgccagaacatcaccagcactaagtgcaacttttcctccttaaaacttaacgtctatgaggaaatcaagctgcgtattagagccgagaaggaaaatactagcagttggtacgaggtagacagcttcacacctttccgcaaagcccagatcggccctcctgaggtgcacttagaagccgaggataaggctatcgtgatacacattagccccggcactaaggactctgtcatgtgggcattggatggattatccttcacttattcgctcgtgatctggaaaaacagtagcggagttgaggagagaatagaaaacatctacagccgacacaagatctacaaattgtcgcccgaaacaacttactgcctgaaggtcaaagcagccctgttaaccagctggaaaataggcgtttacagtcccgttcattgcattaagacaactgtggagaacgaactcccgccaccagagaatatcgaggtgagcgtccagaaccagaattacgtcctaaaatgggactacacctatgccaacatgacttttcaggtccagtggttacacgccttcctgaaaaggaaccccggcaaccacctgtacaagtggaagcaaatacctgactgcgagaacgtcaagaccacgcaatgcgttttccctcagaatgtgttccagaagggaatttatctgcttcgcgtccaggcttccgacggaaataacacatctttttggtccgaggagattaaatttgacactgaaattcaggctttcctgctgccccccgtgtttaatattcgatcattaagcgacagctttcatatttatatcggcgctcccaagcagtctggcaacactcccgtgatacaagactaccctttgatttacgaaattattttttgggagaacacatccaatgcagaacgtaagattattgagaaaaaaacagatgtgaccgtgcctaaccttaagccacttactgtgtactgtgtaaaagccagggcccacaccatggatgaaaagcttaacaagtctagcgtgttcagcgacgctgtctgcgagaagacaaagcccggcaacacctctaaaatctggctcatcgtgggcatctgtatcgcactctttgccctcccctttgtgatctatgcagccaaggtgtttctccgctgtatcaactatgtgttttttcctagccttaagccaagttcctcaatagatgagtactttagcgagcagccactgaagaatctactgctgagcacgtcggaggagcaaattgagaagtgcttcataatcgagaatatttcaacgattgccaccgttgaagagactaatcaaaccgacgaggaccacaagaagtattcaagccagacttctcaagactccggtaactatagcaacgaggatgaatctgaaagcaaaacatcagaggaactgcagcaggattttgtctag

SEQ ID NO: 191626 - DNA, 1491 bp, synthetic construct
  misc_feature 1..1491: note = Description of Artificial Sequence: Synthetic coding sequence
  source 1..1491: mol_type = other DNA
atgatggtggtgctgctgggcgccaccaccctggtgctggtggccgtggccccatgggtgttgtctgcagcggcaggggggaaaaaccttaagagcccccagaaggtggaagtggacatcatcgacgacaactttatactgcggtggaataggtcagatgaaagtgtcgggaacgtgacattcagcttcgactatcagaagacaggaatggacaattggatcaagctgtctggatgccagaacatcacttccaccaagtgcaatttttcgtcactgaagttaaatgtttacgaggaaatcaagctgcgcataagagccgagaaggagaacaccagttcctggtacgaagtggactctttcactccatttcggaaagcacagatcggtcctcctgaagtgcacttggaggcagaggataaggccattgtgatccatatttcgccaggaacaaaggactcagtcatgtgggccctggacggcctgtcattcacatattcccttgtgatctggaaaaattcatctggcgttgaagagcggatcgaaaacatttattcacgacataaaatctacaaacttagccctgagaccacatactgcctcaaggtcaaagccgctctgctgaccagttggaaaatcggcgtttatagtccagtccactgcataaagaccaccgttgagaacgaactccccccgccggaaaatattgaggtatcggtccagaatcaaaattacgtgctgaaatgggattacacttacgccaatatgacattccaagttcagtggcttcacgcattccttaaacgtaatcctggcaatcacctatataagtggaagcaaatcccagactgcgaaaacgtgaagaccacacagtgtgtcttcccacaaaacgtatttcagaagggcatatatttgctgcgagtgcaggcgtcggatggaaataacacttcattttggtccgaggagatcaagtttgataccgagatacaggccttcctgctgccaccagtttttaatatccggtccctttctgatagtttccacatctacatcggggctcccaagcaatccggaaatacaccagtgatccaggactatccacttatttatgagatcatattttgggagaatacatcaaacgctgaaagaaaaatcatcgaaaaaaagactgacgtgaccgtccccaacctgaaaccactaaccgtgtattgcgtgaaagcaagggcgcacaccatggatgagaacgacgccgtgtgcgaatacttcagcgaacagcctctcaagaatctactactctccacatcagaggaacaaatcgagaaatgctttataattgaaaatatcagcaccatcgccaccgttgaggagaccaaccagaccgacgaagatcataaaaaatacagctcccagactagccaagattctggcaattattccaatgaggacgagtctgagtcgaaaactagcgaggagctccagcaggacttcgtctag

SEQ ID NO: 191627 - DNA, 1548 bp, synthetic construct
  misc_feature 1..1548: note = Description of Artificial Sequence: Synthetic coding sequence
  source 1..1548: mol_type = other DNA
atgctgctgagccagaacgccttcatcttccggagcctgaacctggtgctcatggtctacatttcattagtcttcggcatctcttacgacagtcccgactatactgacgagagttgcactttcaaaattagcttaaggaatttcagatccattcttagttgggaactcaagaaccattctattgtgccaactcattatacacttctgtatacaatcatgtctaaacctgaggatctgaaggtcgtgaagaattgtgcgaataccaccaggagcttttgtgacctgaccgacgagtggcggagtactcacgaggcctacgtgacagtactcgaagggttttccggtaatactactctgtttagctgctcccacaatttttggcttgccattgatatgagttttgaacctcctgaattcgagatcgtaggtttcacaaaccatatcaacgtcatggtaaaattcccttccatcgtagaggaggaactgcagtttgacctgagccttgtgatcgaagagcagtccgaggggattgtaaaaaaacataagcccgaaataaaaggaaatatgagtgggaacttcacctatatcatcgacaagctaatacctaataccaactactgcgtgtctgtctacctcgaacattccgacgagcaggctgtgataaagtcgcccctcaagtgtacccttctcccgcccggccaggagtccgagagtgctgaatcggctaagatcgggggcattataacagtgttcttgatcgccctggtactgacctccacaattgtaacactaaaatggatcggctacatatgcctaaggaacagcctgcctaaggtccttaatttccacaactttttagcttggcccttccctaatctgcctccactagaggccatggacatggtagaagtcatttacattaatcgaaagaagaaagtgtgggattacaactatgatgatgaaagcgactccgatacagaggcagctcctcggacatcagggggaggctacacgatgcacgggcttactgtcagacctctcggccaggcaagcgccacgagtaccgagagtcaactcattgatccagagagcgaggaggaacctgatttacctgaggttgacgtggagcttccgaccatgcctaaggattcaccacaacaactggagcttctctctggcccttgtgagcggcggaagagccctctgcaggatccttttcctgaggaagactattcaagcactgagggatctggcggccggatcacatttaatgtcgaccttaatagcgtatttctgagggttctggatgatgaggactctgatgacctcgaagcccctctgatgctgtcatctcatctggaggagatggtggaccccgaggacccagataacgtccaaagtaaccacctgctggccagcggcgaagggactcagccaacttttccatccccctccagtgaggggctatggtctgaagatgccccatccgaccaatctgacacatccgagtccgacgtggatctgggggacggatacatcatgcggtag

SEQ ID NO: 191628 - DNA, 1548 bp, synthetic construct
  misc_feature 1..1548: note = Description of Artificial Sequence: Synthetic coding sequence
  source 1..1548: mol_type = other DNA
atgctgctgagccagaacgccttcatcttccggagcctgaacctggtactcatggtttatattagtcttgttttcggcataagctacgattccccagattatacagatgagagttgcacctttaaaatatccctgcggaactttagatccatcttgagctgggagctcaagaaccactcaattgtccccacccattacacactcttatacacaatcatgtccaagcccgaagacctgaaggtggtaaagaattgcgcaaatactacacgctcattttgtgatctgacagatgaatggcgctcgacacacgaagcatatgtcacagtgctcgaaggcttctccggcaatacaaccctattcagctgctcgcataatttttggctcgccatcgatatgtctttcgagcccccagagttcgaaattgttggcttcacgaatcatatcaatgtaatggtgaagtttccttcaatagtcgaggaagaactacagtttgacttgtcactggttattgaggaacagtccgagggcatcgtgaagaaacataaacccgagataaagggaaacatgagcggcaatttcacctacattattgataagctgattccaaacaccaattactgcgtctctgtctatctcgagcattctgacgaacaggcggtaatcaaaagtcctctcaaatgcactttgctaccacccggacaggaatccgagtcagcagagagtgccaagattgggggcattatcacagtattcctcattgcattagtgctcacaagtacgatagttaccctgaagtggataggttatatctgtctgaggaattccctaccaaaggttctgaactttcataactttctggcctggcctttccccaacttgcccccgttggaggccatggacatggttgaggtgatctacatcaaccgtaaaaagaaggtgtgggactacaattacgacgacgaaagcgatagcgatacagaggcagcgccgaggaccagtggaggtggatataccatgcacgggttgaccgtgcgccccctggggcaggccagtgcaacctctaccgagagtcaactgatagaccctgaaagtgaggaggagcctgacctgccagaggtggatgttgagcttcctacaatgcctaaggattccccacagcagctggaactgttgtcagggccgtgtgaacgccgcaaatcaccccttcaagatcctttcccagaggaagactacagttctacagagggaagtggaggaagaatcacctttaacgtggatctaaactcagtgtttctgcgcgtgctggatgacgaggacagcgacgacctcgaggcgcctttgatgctctcctctcaccttgaggaaatggtggacccggaggaccccgacaatgtgcagtccaatcacctcctggcttccggggaagggacccaacctactttcccttctccttcatccgaaggactgtggagcgaggacgcgccaagcgaccaaagtgatacaagtgaatccgacgtggatctgggggatggctacatcatgcgatag

SEQ ID NO: 191629 - DNA, 996 bp, synthetic construct
  misc_feature 1..996: note = Description of Artificial Sequence: Synthetic coding sequence
  source 1..996: mol_type = other DNA
atgctgctgagccagaacgccttcatcttccggagcctgaacctggttcttatggtgtacatcagcctggttttcggtattagctatgattcacccgattatacagacgagtcctgcacgttcaagattagcctcaggaatttcaggtcaatactgagctgggagctgaagaaccactcgattgtacccacccactacacgctcctgtacacaatcatgagcaagccagaggacttgaaggtggtaaagaattgcgctaacacaaccagatctttctgtgacctgaccgatgagtggcgcagtacccatgaagcctacgtgacggtactggagggcttctccgggaataccacgttattcagttgcagtcataacttctggctagctattgacatgtctttcgagcctcctgagtttgagatagtggggtttaccaatcacattaacgtgatggtcaagttccctagcatcgtagaagaggagctgcagtttgacctatccctcgtgattgaggaacagtctgaaggaatcgtcaaaaaacacaaaccagaaatcaaaggcaatatgagcggcaacttcacctacataattgacaagctgatcccaaacaccaattactgcgtgtccgtatatctggagcatagcgatgaacaggccgtcatcaagagtcccctgaaatgcacgttgctccccccaggccaggagagcgagtcagctgaatccgctaaaatcggcggcatcatcaccgtttttctgatcgcccttgtgctaacatcaacaattgtcacactaaaatggatcggctatatatgcctgcgtaactctttgcctaaagtgcttcgccaaggcctggccaagggatggaacgctgtagccatccaccgctgctctcacaacgccctgcaatccgagactccagaactaaagcagagcagctgtttgagctttccctcctcatgggactataaacgagcctcactgtgcccttccgattag

SEQ ID NO: 191630 - DNA, 996 bp, synthetic construct
  misc_feature 1..996: note = Description of Artificial Sequence: Synthetic coding sequence
  source 1..996: mol_type = other DNA
atgctgctgagccagaacgccttcatcttccggagcctgaacctggtactgatggtctacattagtttagtgtttgggatcagttatgacagcccagactacaccgacgaatcctgcacatttaagatttctcttcgtaacttcagatccatactcagctgggaattaaagaaccactccatcgtacctacacattatactttactttacaccatcatgtcaaagccggaggatctgaaggtggtgaagaattgcgcgaatacaacccgcagcttctgtgatcttactgacgagtggcggtctacacacgaagcctatgtgaccgtgctcgaaggcttcagcgggaacacgactctgttctcatgctctcataatttttggctcgccattgatatgtctttcgaaccacctgagttcgagatcgtcggattcacaaatcacatcaacgtgatggtaaagttcccgagcatcgtagaggaagagttacaatttgacctctcgctggtcatcgaggagcagagcgaaggtatagtgaaaaagcacaagcccgaaataaaaggcaatatgtccggcaattttacatacataatcgacaagctcattcccaatacgaactattgcgtttccgtgtacctcgagcattccgatgaacaggctgtgatcaagagccccctaaagtgcactctcctgcctcccggacaggagtcggaaagcgctgaatcagccaagattggagggatcatcaccgtatttctcatagctctggtccttacctccacaatagtaacgttgaaatggatcggctatatctgcctccggaattccctgcccaaggttctgaggcagggcctggcaaaagggtggaatgcagtcgccatacacaggtgtagccacaatgccctgcagagcgagactcctgagcttaaacagtccagctgcctttcattcccctcatcatgggattataagagagcctcactctgtcccagcgactag

SEQ ID NO: 191631 - DNA, 561 bp, synthetic construct
  misc_feature 1..561: note = Description of Artificial Sequence: Synthetic coding sequence
  source 1..561: mol_type = other DNA
atgctgctgaagagccccgagaacagcctgctgcagttccagttcaagtatggcgtacctactccaactaacgtgaccatcgagtcatataatatgaatccgatcgtctattgggagtaccagataatgccacaagtgccagtgtttacagtcgaggtaaaaaattacggtgttaaaaacagcgagtggatagacgcctgcattaacatttcacaccattactgcaatatcagtgaccacgtcggggatccttctaacagtttatgggtgcgcgtcaaagcaagagttggccagaaggaatctgcgtacgcgaagtctgaggagtttgctgtctgccgggatggcaagattggacctcctaaattggacatcaggaaagaagagaaacagattatgatcgacatattccatccatccgttttcgtcaatggtgatgaacaggaagttgactacgaccccgagactacctgctacattcgggtttataatgtctacgtgaggatgaacgggtctgaaatcaagaggtcctgcgccttttctcttttcagttttttcatctag

SEQ ID NO: 191632 - DNA, 1470 bp, synthetic construct
  misc_feature 1..1470: note = Description of Artificial Sequence: Synthetic coding sequence
  source 1..1470: mol_type = other DNA
atggccctgctgttcctgctgcccctggtgatgcagggcgtgagccgcgccgagatgggcaccgcagatctgggacctagttctgtgcctactcccactaatgtcactattgagagctataacatgaacccaatcgtgtactgggagtaccaaataatgccccaagtgccggtattcaccgttgaagttaagaactacggagtcaagaacagcgagtggatagacgcttgcatcaacattagccaccactactgcaatatttcagatcacgtcggggatccatcaaactccctgtgggtgcgagtcaaagcccgggttggccagaaagagtccgcctatgcaaaaagtgaggaattcgctgtgtgtagagatgggaagatcggacctccaaagcttgacatacgcaaggaggaaaagcagatcatgatagacatctttcacccgagcgtgttcgtgaacggggatgagcaggaagtggattatgaccccgagaccacgtgttacataagggtgtataacgtatatgtccgcatgaacggatccgagattcagtataaaattctgacacagaaggaggatgattgcgatgaaattcagtgtcagctggcaatacctgtctcctccctgaattcacagtactgtgtttcagcggaaggcgtacttcacgtctggggtgtgaccactgagaagagcaaagaggtatgcatcacgatatttaatagctctataaagggatccctgtggattccagtcgtggctgcacttctgctgtttttggttctgtcactggtgttcatttgcttttatattaagaaaatcaacccattaaaggagaagtctatcatcctgcctaagagcctcatatccgtagtgagatccgcaaccctagagaccaagcccgagagcaagtacgtatcccttatcacgtcctaccagcccttcagcctggaaaaggaggtggtttgtgaagaacctctgtcccccgccaccgtgcccggcatgcataccgaagacaaccctggcaaagtggagcatacagaggaactcagtagcataactgaggttgtgaccactgaggagaacattccagatgtggtgcctggcagccatctcactccaattgaacgagagagtagcagtcccctatcttctaatcaatccgaaccaggatctattgccctcaattcctaccattctaggaactgctcagagtctgatcactcccgaaatggcttcgatacagatagctcttgtctggaaagccacagctccctgtccgatagtgaatttccccccaataacaaaggcgaaatcaagaccgaggggcaggaacttataaccgtaatcaaggcccccactagcttcggttacgacaagcctcacgtcctcgttgatctgttggtcgacgactcaggaaaggaatccttaataggttacagacccacagaagacagcaaagaattcagctag

SEQ ID NO: 191633 - DNA, 486 bp, synthetic construct
  misc_feature 1..486: note = Description of Artificial Sequence: Synthetic coding sequence
  source 1..486: mol_type = other DNA
atgctgctgaagagccccgagaacagcctgctgcagttccagttcaaatacggggtccccacaccgacgaatgtgactatcgagtcttataatatgaatcctatcgtgtactgggagtatcagatcatgcctcaggttccagtgtttaccgtcgaggtgaaaaattacggtgtgaaaaactccgagtggatcgatgcctgtataaatatttcccaccactactgtaacatttccgatcatgtgggggatccctcaaacagcctctgggtgagagtaaaggctcgggtgggtcagaaggagtctgcctacgcgaaatccgaggaatttgcggtgtgccgagacggaaaaatcgggcctcccaaactagacattcgaaaggaggaaaagcaaattatgattgatatatttcacccttccgtgttcgtcaacggtgatgagcaggaggtagactacgacccggagactacttgttatatccgggtatag

SEQ ID NO: 191634 - DNA, 825 bp, synthetic construct
  misc_feature 1..825: note = Description of Artificial Sequence: Synthetic coding sequence
  source 1..825: mol_type = other DNA
atggccctgctgttcctgctgcccctggtgatgcagggcgtgagcagagcagaaatgggcaccgcggacctggggccttccagtgtgcctaccccaactaacgtgaccattgagtcctataatatgaatcctattgtgtactgggagtatcagattatgcctcaggtgcctgtgtttacggtggaagttaagaactatggggtgaagaactctgagtggatcgacgcatgtatcaacatctcccaccattactgtaacatttctgaccacgtcggcgacccatccaatagtttgtgggttcgagtgaaggcccgggtgggccagaaagagtcagcttatgccaagagcgaagagtttgccgtgtgtagggatgggaaaatcggacctccaaaattagacattaggaaagaggagaagcaaatcatgatcgacatatttcaccctagcgtcttcgtcaacggagatgagcaggaagtagattatgacccagaaactacttgttacatcagggtatataatgtttatgtcagaatgaacggtagcgagatccaatacaagatcctgacccaaaaagaggatgactgtgacgagatacagtgtcagctggccattccggtttcatcattgaacagtcagtactgcgtttctgcagaaggcgtgctgcacgtctggggcgtgaccactgagaagagcaaggaagtgtgtatcactatcttcaactcctcaataaagggctccttatggatccctgtggttgccgctctgcttcttttctgtctggcttggtattcgtccgtgtttatcctgcgaaagctgattcactag

SEQ ID NO: 191635 - DNA, 633 bp, synthetic construct
  misc_feature 1..633: note = Description of Artificial Sequence: Synthetic coding sequence
  source 1..633: mol_type = other DNA
atggccctgctgttcctgctgcccctggtgatgcagggcgtgagccgagctgagatgggtactgcggatctggggccttcttccgtccccacccccacaaatgtaacaatcgagtcctacaacatgaatcccattgtgtattgggagtaccagatcatgccacaggtgcctgtgttcaccgtagaggtgaagaattatggtgtgaaggcccgggtgggccagaaggagtcagcttacgcaaaaagcgaggaatttgctgtgtgccgcgacggcaaaatcggtccccctaaactggatattaggaaagaggagaagcagattatgatcgatatattccaccctagtgtcttcgtaaatggcgatgagcaggaagtggactacgatccagagactacatgttatatcagagtctataatgtttacgtgcggatgaatggcagtgagattcagtacaaaattctcacgcagaaagaggacgattgtgacgagatccagtgtcaactggctatccccgtatccagtctcaacagccaatattgtgtgtccgccgagggagtgctgcatgtttggggggtgacgactgagaagtctaaagaagtttgtattacaatttttaacagcagcataaaatag

SEQ ID NO: 191636 - DNA, 1386 bp, synthetic construct
  misc_feature 1..1386: note = Description of Artificial Sequence: Synthetic coding sequence
  source 1..1386: mol_type = other DNA
atgcccacccccaccaacgtgaccatcgagagctacaacatgaacccaattgtctattgggagtaccaaataatgccccaagtcccagtgtttaccgtggaagtcaagaactacggcgtcaagaactccgaatggatcgacgcctgcataaatatctctcaccattactgcaacatctctgatcacgtgggagatccctcaaactccttatgggtaagagtaaaggcaagggttggacagaaagagagcgcttacgctaaatctgaggaatttgctgtctgcagggacggaaaaattggacccccgaagctcgacattagaaaggaggagaagcagatcatgattgacatctttcacccatccgtgttcgttaatggagacgaacaggaggtcgattatgacccggagacgacctgttatattagggtgtacaatgtgtacgtcaggatgaatggatcggaaatccaatataagatactgacccagaaagaagatgattgtgacgaaatccaatgtcaactggcaattcccgtgagcagcctgaattcccaatattgtgttagcgccgagggcgtgctgcacgtttggggggtgactaccgagaagtccaaggaagtgtgtattacgatctttaattcctctatcaaaggctcactgtggattcctgtggtggcggctctgctgctgttcctggttctgagcctggtgttcatttgcttttatatcaaaaagattaatcctttgaaggagaaaagtataatcctaccaaaatctctgatttctgtggtgcggagtgccactctggagactaagccagaatccaaatatgtgagcctgatcactagctaccaaccttttagtctggagaaagaggtcgtgtgtgaggagcccctgagccccgccaccgtcccagggatgcacaccgaggataatcccggaaaagtggagcacaccgaggaactgtcgagcattaccgaagtcgtgacaaccgaagaaaacatcccggacgtcgtgccaggatcacatctgacacctattgagagagagagtagctcacctctaagttccaaccagagtgagccgggttcaattgctctcaattcataccatagccggaattgctctgaatcagaccactctcgaaacgggtttgatacagattcaagctgtctggagtcacactctagcctctcagacagcgagtttccccctaacaataaaggagagattaaaactgagggacaggagctcatcaccgttatcaaagcgcctacctctttcggatatgacaagcctcacgttctcgtggacctgctggtggacgactcaggcaaggaaagcctaatcggctaccgacccacagaggattcgaaagagttctcctag

SEQ ID NO: 191637 - DNA, 1014 bp, synthetic construct
  misc_feature 1..1014: note = Description of Artificial Sequence: Synthetic coding sequence
  source 1..1014: mol_type = other DNA
atgcggcccaccctgctgtggagcctgctgctgctgctgggcgtgtttgccgctgccgcggcagcgcccccagatcctctgtcacaactgcctgctcctcagcatcccaaaatacgtttgtataatgctgagcaggtgctgtcttgggagccggttgcccttagtaatagcacgagacctgtagtataccaggtgcagttcaaatatactgactctaagtggttcacggcggacataatgtccataggcgtaaattgtacccaaataacagcaaccgagtgtgatttcacagcagcttcgccatctgccggatttcctatggattttaacgttacactcaggcttcgcgccgagctaggtgcactgcacagcgcatgggtaactatgccgtggtttcagcattacagaaacgtgaccgtaggtccccctgaaaatatagaagtcactcctggcgaaggctcactgattatcagattcagctctcccttcgatatcgcagacacatccaccgccttcttttgctattacgtgcactattgggagaagggagggatacagcaggttaaaggaccattcaggtctaacagcataagtctggacaacctgaaaccttccagggtgtactgtctacaggtacaggctcaacttctctggaataaatccaatatttttcgcgtgggacacttaagtaacatcagttgttacgagaccatggctgacgctagtaccgagctgcagcaagtgatcctgatatccgtcgggacgttcagtctgctatccgtccttgccggcgcctgcttctttctggtgctcaagtatcgggggttaatcaagtattggttccacaccccgccatccataccactgcaaattgaggaatacctaaaagatcctacgcagcccatcctcgaagccctggacaaggacagcagtccaaaggacgatgtttgggacagcgtctccataataagcttcccagagaaagaacaggaagacgtacttcagacactgtag

SEQ ID NO: 191638 - DNA, 378 bp, synthetic construct
  misc_feature 1..378: note = Description of Artificial Sequence: Synthetic coding sequence
  source 1..378: mol_type = other DNA
atgcacaaggaggagcacgaggtggccgtgctgggcccccccccctccacaattctccctagaagcactgtgattaacattcattccgagacctcagtgcctgaccacgtagtttggtccctttttaacactctgtttctcaattggtgctgtctaggctttattgccttcgcctattctgtcaagtcccgcgatcgcaaaatggtcggtgatgttacaggggctcaggcttacgcatctaccgcgaagtgcttgaatatatgggccctcatactcggaattttaatgaccataggctttatcctgctcctggtcttcggcagcgtgaccgtgtaccacatcatgctgcagattattcaagagaagcgtggctactag

SEQ ID NO: 191639 - DNA, 378 bp, synthetic construct
  misc_feature 1..378: note = Description of Artificial Sequence: Synthetic coding sequence
  source 1..378: mol_type = other DNA
atgcacaaggaggagcacgaggtggccgtgctgggcccccccccctccaccatactcccgcggagcacagtgatcaacattcactcagaaacctcagtgcccgatcatgtagtgtggagcctattcaatactctgtttctgaattggtgttgccttggatttatagcgtttgcctacagcgttaaatctagagatcggaaaatggtgggtgacgttacgggcgctcaggcctatgcctcaaccgccaagtgcctgaacatctgggccctcatccttgggatcctgatgacaatcggatttattctgctacttgtgtttggttctgtgacagtgtatcatattatgctccagatcatccaagaaaagaggggctactag

SEQ ID NO: 191640 - DNA, 300 bp, synthetic construct
  misc_feature 1..300: note = Description of Artificial Sequence: Synthetic coding sequence
  source 1..300: mol_type = other DNA
ccccagagccagaagatgcacaaggaggagcacgaggtggccgtgttggggcctcccccctcaaccattctccccagatcgaccgtgatcaacattcacagcgagacctctgttcccgaccacgttgttgttcccgtgcagcaccccctcttggaatgttgcttgggatttattgccttcgcctattccgttaaaagtagggatcggaaaatggtcggagatgttactggcgcacaggccctgcatcgtcaagtgcccgagcatttaggcccagatagcggccatcctcatgatcactag

SEQ ID NO: 191641 - DNA, 378 bp, synthetic construct
  misc_feature 1..378: note = Description of Artificial Sequence: Synthetic coding sequence
  source 1..378: mol_type = other DNA
atgcacaaggaggagcacgaggtggccgtgctgggcccccccccctccacgatcttaccaaggtcgacggtgatcaacattcatagtgagacctcagtgcctgatcatgtggtgtggtcactttttaacaccttgttcctgaactggtgttgtttagggttcatcgcattcgcttactccgtcaaatctcgggatcggaagatggtgggggacgtaactggtgcccaagcttacgccagcactgctaagtgtctgaatatttgggctttaattcttggaatcctgatgaccattggattcatcctgcttttggtttttggatctgtaacagtgtaccatatcatgctgcagatcatccaggagaagcggggatattag

SEQ ID NO: 191642 - DNA, 495 bp, synthetic construct
  misc_feature 1..495: note = Description of Artificial Sequence: Synthetic coding sequence
  source 1..495: mol_type = other DNA
atgaaccacatcgtgcagaccttcagccccgtgaacagcggccagccaccgaactacgaaatgttaaaagaggagcaggaggttgctatgctaggcgtgccgcataacccagccccccctatgtctaccgtaatccacattagatcggaaacatcggtgcctgatcacgtcgtcgttcccgtacagcatcctctgcatgagtgctgtctgggctttattgcattcgcctattctgtgaagagcagggacaggaagatggtcggcgacgtgacaggagcacaagcgctgcatcggcaagttcctgaacacctgggtccggactttggacatttgcacgatcattcggctcatcaccatccttcagtgggcaggccaggacccgccattgaccaggaagcctcattgcgacctggtgctcttcccgtcacttgcatacccagaacgctatcctcgatacctcgaccagcacctcgcggccaagaactatgcccatag

SEQ ID NO: 191643 - DNA, 399 bp, synthetic construct
  misc_feature 1..399: note = Description of Artificial Sequence: Synthetic coding sequence
  source 1..399: mol_type = other DNA
atgaaccacatcgtgcagaccttcagccccgtgaacagcggccagccgcctaactacgaaatgctgaaggaggagcaggaggtggcaatgctgggtgtgccccacaacccggctccccccatgagcactgttatacacatacgttcagaaacatccgttcccgatcacgtggtatggtctctttttaatactctattcatgaacacttgctgcctggggtttatcgcattcgcttactctgtcaagtcccgcgatagaaagatggtaggagatgtcaccggggctcaagcgtatgcaagcacagctaaatgcctcaatatttgggccttaatcctagggatctttatgaccattctgttgattatcattccagtgctagtggtgcaggcccagagatag

SEQ ID NO: 191644 - DNA, 447 bp, synthetic construct
  misc_feature 1..447: note = Description of Artificial Sequence: Synthetic coding sequence
  source 1..447: mol_type = other DNA
ccccccaactacgagatgctgaaggaggagcacgaggtggccgtgctgggagcccctcacaatccggcaccaccaacttcaaccgtcatccacattagatctgaaactagcgtccctgaccacgtggtagtgccagtgcagcaccccctgcacgagtgctgcctggggtttattgcattcgcctatagcgtaaagtcacgtgacaggaaaatggtgggggacgtgaccggcgcccaagccctccatcgccaggtgccagagcatctaggcccggatagtggccacccacacgaccacagcgcgcatagacatccatcagccgatctgccgggattgtggatcgaccaggaggcgagcctgcggcctggcgcactgcccatgacatgtatccctcgcacgccaacttccattccccgccccgctcccggcgctgaaagctgtatctag

SEQ ID NO: 191645 - DNA, 402 bp, synthetic construct
  misc_feature 1..402: note = Description of Artificial Sequence: Synthetic coding sequence
  source 1..402: mol_type = other DNA
atgaaccacaccgtgcagaccttcttcagccccgtgaacagcggccagccgccaaattatgagatgttaaaagaggagcatgaggtggctgtcctcggggcacctcacaacccagctcctcccacgtcaacggttattcacatccgctcagagacctcagtgcccgatcatgtggtgtggtccctgtttaatactctgttcatgaacccctgttgcttagggttcattgcctttgcttactcagttaagagtcgcgatcgaaagatggtgggggacgttaccggagcacaagcttacgcatccactgccaagtgtctgaacatttgggctcttatccttggaattctcatgaccattcttctgattgtcatcccagtcctgatctttcaggcctacggatag

SEQ ID NO: 191646 - DNA, 3078 bp, synthetic construct
  misc_feature 1..3078: note = Description of Artificial Sequence: Synthetic coding sequence
  source 1..3078: mol_type = other DNA
atgagcaacggctacagcaccgacgagaacttccggtacctgatctcttgtttccgggcccgcgtcaagatgtacatccaggtggagcctgtgcttgactatttgaccttcctgccagccgaggttaaggaacagatccagcgaaccgtagcgaccagcggtaacatgcaggccgttgaactgctcttgtcaacgctcgagaagggagtctggcaccttggctggacgagagagttcgttgaggctctgcgccggacaggaagtccactcgccgcccggtacatgaatcccgaacttacagacctgccaagccccagcttcgagaacgcgcatgatgaatacctccagttgctgaacttgctgcagccaaccctggttgacaagctcctggtgagggacgttctggataagtgtatggaggaggaactgctgaccattgaagaccggaatcgtatcgccgctgcagagaacaacggcaacgaatcgggagtcagggaactgctgaagaggatcgtccagaaagaaaactggttctctgcctttcttaacgtgctgaggcagaccggtaacaacgaactggtgcaggagctgactggatcagactgctcagagagcaacgcggagattgaaaatctttcacaggtggatgggcctcaggtggaagaacagctgctgtcaacaactgtgcaacctaatcttgagaaagaagtctggggaatggagaacaattcgtccgaatcctctttcgccgattcgagcgtcgtgtccgagtcggacacctctttggccgaaggatcagtaagctgcctcgacgagtctttgggccataattcgaatatgggctccgacagtggcacaatgggaagtgactccgacgaggaaaatgtcgccgccagagcttctccagagcctgagctgcagctccggccctaccagatggaggtcgctcagcctgcattggaaggcaaaaatattatcatatgcctgcctactggctctggtaagaccagggtagcagtctacatagctaaggatcatttggataagaagaaaaaggctagcgagccgggcaaagtcatcgtactcgtcaacaaagttctgctcgtggaacagttattcaggaaggagttccagcctttcctgaagaaatggtatcgagttatcggcctgtcgggagacacccaactgaagatctccttccccgaagtggtgaaatcatgcgacataatcatatccactgcacagattcttgaaaactccttgctgaacttggagaacggcgaagatgccggggtacagctgtctgatttttcactgatcatcattgatgagtgtcatcacactaataaggaggctgtgtacaacaacattatgaggcattacttgatgcagaagctgaagaacaaccgccttaagaaagaaaacaaacccgttattccccttccgcaaatactcggtctcaccgcgagcccaggggtggggggcgctaccaaacaggccaaagccgaggagcatatccttaagctttgcgctaacctggacgcctttaccatcaaaacagtcaaggaaaatctcgaccagttaaaaaaccagatacaggaaccctgtaaaaaattcgcaatcgccgatgctactagggaggatcctttcaaggaaaaactgctggagatcatgacgcgcatccaaacatattgtcaaatgagtcctatgtcagactttggcacacaaccctatgaacagtgggccatccaaatggaaaagaaggcagcgaaagagggcaaccgtaaggagagggtgtgcgctgagcatctgagaaaatacaacgaagcactccagataaacgacacaattagaatgatcgatgcatacacccacttagaaacattctacaacgaagagaaagataagaagtttgccgtgattgaagatgatagtgacgaaggcggtgatgatgagtactgcgacggcgatgaggatgaggacgatttgaaaaagcctctaaagctggacgaaactgaccggtttctgatgaccctgttttttgaaaataacaaaatgctcaagcggctagccgaaaacccagaatacgaaaacgaaaagctcaccaaactgcggaacaccattatggagcagtatacgcgaacagaggaaagcgcccgcggtatcatttttaccaagactcgacagtccgcttatgccctatctcagtggattactgagaatgagaagtttgctgaagtaggagtgaaggcgcatcacctaattggggctgggcactcatcagagtttaaaccaatgactcagaacgaacagaaagaggtgatttccaaatttcgtaccggcaaaatcaatctgctcatcgcgaccaccgtggccgaggagggcctggatataaaggaatgcaacatcgttataaggtatggccttgtaactaatgagatagctatggtgcaggccaggggacgggcccgcgccgatgagtccacttacgtcttagtcgctcactctggcagtggagtgatcgagcatgaaaccgtgaacgatttcagggaaaaaatgatgtataaagccattcattgcgtgcagaacatgaagcccgaggaatacgcccacaaaatactcgagttgcagatgcaaagcattatggagaaaaaaatgaagaccaaacgcaatatagcaaagcactataagaacaaccccagcctcatcacattcctgtgcaagaactgtagcgttctcgcttgtagtggcgaggatatccatgtaatcgaaaagatgcatcacgtcaatatgacccccgaattcaaagagctctatattgttagagagaacaaagcactgcagaaaaagtgcgccgactaccaaataaacggcgagataatctgcaagtgtgggcaggcctggggcactatgatggtacataagggcctcgatctaccatgcctgaaaatccgaaatttcgtggtagtgtttaagaacaattctaccaagaagcagtacaaaaagtgggtagagttacccattacatttcctaacctggattattccgaatgctgccttttcagcgatgaggactag

SEQ ID NO: 191647 - DNA, 666 bp, synthetic construct
  misc_feature 1..666: note = Description of Artificial Sequence: Synthetic coding sequence
  source 1..666: mol_type = other DNA
atgagcaacggctacagcaccgacgagaacttccggtacctgatctcctgttttagagcccgggtaaaaatgtacatccaggtggagcccgtgttagactatctcacctttctgcccgctgaggtcaaggagcaaattcaaagaaccgtagcaactagtggcaacatgcaggccgttgagctcctgctgtcaacattggagaagggggtatggcatctgggctggactagagagttcgtagaggccctgagacgtacggggagcccactggctgcccggtatatgaatccagaactcacagatctaccaagtccaagttttgagaatgcccacgacgagtacctgcaactgctaaatctgctccagcctaccttggtggataagcttctcgtaagggatgtgctggacaagtgcatggaggaggaattgttgactatagaggacaggaatcggatcgccgcggctgaaaacaatgggaacgagagtggtgttcgggagctgcttaagcgtatagtgcagaaagagaactggttctccgcattcctgaatgtgttgcgacaaaccggtaacaatgagcttgtccaggagctcactggcagtgactgcagcgaaagtaacgcggggatctgcaacttcaccgaggaagacagctccaatagtgcatag

SEQ ID NO: 191648 - DNA, 3078 bp, synthetic construct
  misc_feature 1..3078: note = Description of Artificial Sequence: Synthetic coding sequence
  source 1..3078: mol_type = other DNA
atgagcaacggctacagcaccgacgagaacttccggtacctgatcagctgtttccgagcgcgcgttaagatgtacatccaagttgagccagtactagactatctgaccttccttcctgcagaggtgaaagagcagattcagcgaacagtggccacttctggcaatatgcaagcggtggagctgctcctctcaaccttggaaaaaggcgtgtggcacctgggctggacacgcgaatttgtcgaggccctccgaagaaccggatccccccttgccgccaggtatatgaatcccgaactgactgacctcccttccccgagttttgaaaacgcccacgatgagtacctccaactactgaacctactgcagcccactctggttgataagctgctggtccgggatgtgctggacaaatgcatggaagaagaactgttgacaattgaagatcggaacaggattgcggccgctgaaaacaacggtaatgaaagcggggtccgggagctgttaaagagaattgtccagaaggagaactggttctccgccttcctgaacgttttgaggcagaccggcaataacgagcttgtacaagagttgaccgggagtgattgctctgagtccaatgcagaaatcgagaatcttagccaggtggacgggccccaggtggaggagcaactgctctccacaaccgtacaaccaaacctggaaaaagaggtgtggggtatggagaacaactcatctgaatcgtcattcgctgattcctctgtagtctcagaatccgacacgagccttgcagaggggagtgtgtcatgccttgatgaaagtcttggccacaactcaaacatggggtccgactcaggcacaatgggaagtgacagcgatgaagaaaacgtggctgcccgtgcgtccccagaaccagagctgcagctgcgaccctaccagatggaggtggcgcaacctgcgctcgagggcaagaacatcattatatgtctccccaccggatccgggaagactagagtcgctgtctatatcgccaaagaccatctggacaaaaaaaaaaaagcgtcggagcctggaaaagttatcgtgctggtgaataaagttctactggtcgaacagctctttcggaaagaattccagcccttcctgaagaagtggtatcgcgtcattggcttgtctggggacacacagctgaagatctcgtttccggaggtggtgaagagctgcgacattatcatttccactgcacagatcctcgagaatagtctgttgaacctcgagaacggcgaagatgccggcgtgcagctcagcgatttcagtctcatcatcatcgacgagtgccaccacaccaacaaggaggccgtttacaataatatcatgcgacattatctcatgcagaagctgaagaataatcgactcaaaaaagaaaacaagcctgtgatccccctgcctcagatcctgggccttacagcctcccctggcgttgggggggccactaagcaggccaaggctgaggagcacatcctgaaattgtgtgccaatctcgacgccttcactatcaaaacagtgaaagagaacttggatcagctaaaaaaccaaatccaagaaccatgcaagaaattcgctatcgcagacgccacaagggaagatccttttaaagaaaaactgctcgagattatgaccagaattcagacctactgtcagatgagcccaatgtccgattttggtacccagccgtacgaacagtgggccattcagatggagaagaaagcggccaaagagggcaatcggaaggaacgggtatgcgctgaacatctcaggaagtacaatgaagccctgcaaattaacgacaccattcggatgatcgatgcctacacccatctggagacattctataacgaagaaaaagacaagaaattcgccgtcatcgaggatgactctgatgaggggggggatgatgagtactgtgacggggatgaagacgaagatgacctaaagaaacctttgaaactggacgagacagaccggttcctaatgacactttttttcgaaaacaacaagatgctcaaacgtttggcggaaaaccccgagtatgagaacgagaaattgactaaactccgcaacacaattatggaacagtacacacgcactgaagaatccgcacggggaatcatttttacaaaaactcgccagagcgcttatgccctttcccaatggataactgaaaatgagaaattcgctgaggtaggcgtcaaagctcaccacctcattggcgcaggccattcaagtgagttcaaacccatgacacagaacgagcaaaaggaagttatatcgaaatttcgcaccggtaaaatcaatctgctgattgcaaccacagtcgccgaggaaggcctagatatcaaggaatgtaatatcgttatcaggtacggcctggtgactaatgagattgcaatggtccaggccagagggcgcgccagggccgacgagtcaacttacgtccttgttgcccacagcgggagcggagtgattgagcatgagacagtcaacgactttcgagaaaaaatgatgtacaaagccattcactgtgtgcaaaatatgaagccggaggaatacgctcacaagatcctggagctccagatgcagtctataatggagaagaagatgaaaacaaagcgcaatatcgcaaagcactataaaaataacccctctctgataaccttcctttgtaagaattgctccgtgctggcctgttctggggaggacatccacgttatcgagaagatgcatcatgttaatatgacaccagagttcaaagaactttatattgtccgtgagaacaaggccctccagaaaaaatgtgcagactaccaaatcaacggtgagattatctgcaaatgcggacaggcttggggtaccatgatggtgcataagggcctcgatctgccttgtctgaagatcagaaactttgtcgtagtcttcaaaaataatagcacaaaaaagcaatataaaaagtgggttgagctgccaataacatttccaaacctcgactacagtgagtgttgcctgttttccgacgaagactag

SEQ ID NO: 191649 - DNA, 1050 bp, synthetic construct
  misc_feature 1..1050: note = Description of Artificial Sequence: Synthetic coding sequence
  source 1..1050: mol_type = other DNA
atgcccgtggagcggatgcggatgcggccctggctggaggagcagataaacagcaacaccatccccgggctgaagtggcttaacaaggaaaagaaaatattccaaattccatggatgcacgcagcgcgccatggctgggacgtggaaaaggacgctcccttgttccgaaattgggccattcataccggtaagcatcagcccggagtagacaagccagaccccaaaacctggaaagccaacttccggtgtgcgatgaattccctccctgatatagaggaagtcaaggataagtcgattaagaaagggaacaacgcattccgcgtataccggatgttgcccctgagtgaacggccatcaaaaaaagggaagaaaccaaagaccgaaaaggaggacaaggtaaagcacatcaaacaggagccggtggagtcatcgctgggtctgtcaaacggcgtcagcgacctgagccccgaatacgctgtcctgacatccacaattaaaaatgaagtggacagtaccgtgaatatcatcgtggtcgggcagtcccatctggattccaacatcgaaaatcaggagattgtgaccaacccccctgatatctgccaggtggtagaagtgaccactgaaagtgacgagcagcctgtttcaatgtcagagctgtaccccttacaaatatctcctgtgagttcctacgccgagtctgaaaccacagattctgttccctccgacgaggagtccgcagagggacgcccacattggagaaaacgcaatattgaaggcaaacagtatctctccaacatggggacccgagggtcttatttgctccccggaatggccagttttgtgaccagcaacaagccggaccttcaggtcactattaaggaagaatccaaccccgtgccgtacaactccagctggccaccattccaagatctacccctttcctcctctatgacccccgctagttctagcagtcgccctgatagggagacccgcgcatcagtgattaagaagacttccgacatcacgcaagccagagtcaaaagctgttag

SEQ ID NO: 191650 - DNA, 414 bp, synthetic construct
  misc_feature 1..414: note = Description of Artificial Sequence: Synthetic coding sequence
  source 1..414: mol_type = other DNA
atgcccgtggagcggatgcggatgcggccctggctggaggagcagataaatagtaacactattcccggcctgaagtggctgaataaagagaaaaagatattccagattccctggatgcatgccgccaggcacgggtgggatgtcgaaaaggacgcaccattatttaggaattgggcaatccataccggaaagcatcagcccggagtagataagccagatcctaaaacatggaaagcgaattttcgctgcgccatgaattcactgcccgatatcgaggaggtgaaggacaaatctatcaaaaaggggaacaacgcctttagagtgtacagaatgttacccctgagtgaaaggcccagtaagaaaggtaaaaagcctaaaaccgagaaagaggataaagtgaagcatattaagtag

SEQ ID NO: 191651 - DNA, 414 bp, synthetic construct
  misc_feature 1..414: note = Description of Artificial Sequence: Synthetic coding sequence
  source 1..414: mol_type = other DNA
atgcccgtggagcggatgcggatgcggccctggctggaggagcagatcaattcgaacacgattccaggcctcaagtggctgaacaaggagaagaagattttccagatcccctggatgcacgccgccaggcacggatgggatgtggagaaggacgctccactcttccggaattgggccattcatactggcaagcaccagcccggggtggacaaaccagacccaaagacctggaaggccaattttcgctgtgcaatgaatagtctccccgacatagaagaagttaaggacaaaagcatcaagaaaggcaataacgcctttagggtttataggatgctcccactgtcagagcgcccttcaaagaaaggaaaaaagccaaagacagaaaaggaggacaaagtgaagcacattaagtag

SEQ ID NO: 191652 - DNA, 531 bp, synthetic construct
  misc_feature 1..531: note = Description of Artificial Sequence: Synthetic coding sequence
  source 1..531: mol_type = other DNA
atgcccgtggagcggatgcggatgcggccctggctggaggagcagatcaattccaacacaatccccggactcaagtggctaaacaaagaaaaaaagattttccagatcccatggatgcacgcggcgcggcatggctgggatgttgaaaaggacgcacctttgtttcgcaactgggcaatacacacggggaaacaccaacctggggttgataagcctgatcccaaaacttggaaggccaactttcggtgcgcaatgaactcactcccagacattgaggaggtcaaggacaagagtatcaagaaaggtaacaacgcttttagggtgtatcgcatgcttccattgagcgaacgaccctccaaaaaaggcaagaagcccaaaactgagaaagaggacaaagtgaagcatatcaagcaggagcctgtggaatccagcctgggactctctaacggggtgtctgatctttcgccagaatatgccgtcctgacttctaccataaagaatgaagttgatagcaccgtgaatatcatctag

SEQ ID NO: 191653 - DNA, 486 bp, synthetic construct
  misc_feature 1..486: note = Description of Artificial Sequence: Synthetic coding sequence
  source 1..486: mol_type = other DNA
atgcccgtggagcggatgcggatgcggccctggctggaggagcagattaattccaatacgatccccggacttaaatggctgaataaagagaagaaaattttccagattccttggatgcatgccgccaggcacgggtgggacgtggagaaagatgcaccactgttccggaactgggcaatccatacaggcaagcaccaaccgggcgtcgataaacccgatcccaaaacttggaaagctaactttcgctgcgcgatgaattcattgcccgacatagaggaagtcaaggacaagtctattaaaaagggaaacaacgcatttcgcgtgtacagaatgctcccactgtccgaacggccctcaaaaaaaggaaagaagcccaaaacagagaaggaagacaaagtaaaacacattaagcaggaacctgttgagtccagcctgggactgagcaacggagtcagcgatttgagtccggaatacgccgtcttgtag

SEQ ID NO: 191654 - DNA, 1284 bp, synthetic construct
  misc_feature 1..1284: note = Description of Artificial Sequence: Synthetic coding sequence
  source 1..1284: mol_type = other DNA
atgggcacccccaagccccggatcctgccctggctggtgagccagctggatctgggacaattggagggggtggcctgggttaataaatctcggacccggtttaggataccttggaagcacgggctgaggcaagacgctcagcaagaggactttggtatctttcaagcatgggctgaggccaccggcgcatatgttccaggaagggacaagccagacttgcccacttggaaaaggaatttcagatcagccctcaataggaaggagggtttgcggctggctgaagatcggtcgaaggatcctcacgacccccacaaaatttacgaatttgtgaattctggggtgggcgattttagtcagccagatacgtccccggatacaaatggtggaggctctaccagcgacacccaggaggacattttagacgaactcctgggaaatatggtgctggcaccactgcccgatcccggacctcccagtctggctgtggcgcccgagccctgcccacaaccactcagaagcccttcactggacaatcctacacccttcccaaacctaggacccagtgagaacccacttaaacgattgttggtgcccggggaagaatgggaatttgaagtgaccgcattctaccgcggaagacaagtcttccagcagaccattagctgtccggaaggcctgagattggttgggagcgaggtgggtgacagaacactgccaggctggcctgtgactttgcctgatcccgggatgtccttaacggatcgtggagttatgagctatgtccgccatgtgctaagctgtctcggaggcgggttggccttgtggcgggcaggacaatggctgtgggcccagagactgggtcattgtcacacttactgggccgtttcagaggagctactccccaactcaggccatggccctgatggggaagttcctaaggacaaggaaggtggcgtgttcgacctgggtccctttatagttgaccttatcacttttactgaaggctctggcaggtcaccacgctacgccttgtggttttgcgtgggggagtcatggccccaggaccagccttggaccaaacgcctggttatggtgaaagtagtgcccacctgtcttagggcactcgttgaaatggccagggtgggaggcgcctcctcgctggaaaatacagtcgacctgcacattagtaattctcatccactgtccctgacatcagatcagtacaaagcatatttacaggatctggttgaagggatggattttcaaggacctggcgagtcctag

SEQ ID NO: 191655 - DNA, 903 bp, synthetic construct
  misc_feature 1..903: note = Description of Artificial Sequence: Synthetic coding sequence
  source 1..903: mol_type = other DNA
atgggcacccccaagccccggatcctgccctggctggtgagccagctggatcttgggcagttggaaggagttgcctgggtgaacaagtctaggacacggtttagaatcccctggaaacacgggttgaggcaggacgcacagcaggaggacttcggcatattccaggcctgggctgaggccacaggcgcgtacgtgccagggagagataagcccgatctgcctacctggaagcggaacttcaggtctgccctgaatcggaaagaagggctgagacttgcagaggatcggagcaaagatccacacgatccacacaaaatctatgagtttgtgaatagcggcgtaggcgatttctcccaacccgacacttctccagacacgaacggaggcggaagtacatccgacactcaggaggatatactagatgagctgctgggcaacatggttctggcccccttgcctgaccccgggccacctagcctcgccgtggcaccggaaccgtgcccccagccgctgaggtctccctctctggacaacccaacccccttcccgaacctaggacccagtgaaaatcccctgaagaggctgctagtgcccggagaggacttgattacctttactgagggaagtggccggtccccccgatacgcactttggttttgcgtcggcgaatcctggccacaggatcaaccttggacaaaaaggctggtcatggttaaagtagtgcctacgtgtctgcgggcattggtagaaatggcacgcgtagggggcgcgagcagccttgagaacaccgttgaccttcatatcagtaatagccaccctttgtccctcacctctgaccagtacaaggcatatctccaggacctggtggaaggaatggacttccagggacctggcgaaagttag

SEQ ID NO: 191656 - DNA, 1284 bp, synthetic construct
  misc_feature 1..1284: note = Description of Artificial Sequence: Synthetic coding sequence
  source 1..1284: mol_type = other DNA
atgggcacccccaagccccggatcctgccctggctggtgagccagctcgacctggggcagctagaaggcgttgcctgggtgaataaaagtagaacacggttccgcataccatggaaacatgggctgagacaagatgcacaacaggaagactttggtattttccaggcgtgggctgaagcaacaggagcgtatgtccctggccgcgataagcccgacctcccgacatggaaacgaaacttcaggtcagctctgaaccgcaaggaggggttgagacttgctgaggatcggtccaaggacccacatgaccctcacaaaatctatgagttcgtgaacagcggggtcggcgatttttcccaacccgacacttcacctgatacaaacggcggaggaagcacaagcgatacgcaagaggatatactggacgagctactcgggaacatggtgctggctcccctgccagaccccggaccgcctagtttggccgttgctccggagccatgtcctcagccgctcagatcgcctagtctggacaacccaacaccttttcccaacctgggaccgtcagagaaccccctgaaaaggcttctggtgcctggggaggagtgggaatttgaagtaacggccttctatagaggccgacaagtgtttcagcagactattagttgcccggaaggactgcggctggttggcagcgaggtaggtgacagaaccctccctgggtggcccgtaaccctcccggaccctggcatgtctctgaccgaccgaggcgtgatgtcgtacgtccgccatgtcttatcctgcttgggtggaggcctggccttatggagggcaggacagtggctctgggcacaacgacttggacattgccacacgtactgggcagtgagcgaggagctgttgcccaacagcggccacggccccgacggagaagttcctaaagacaaggagggcggagtgttcgacctgggtccattcatcgtcgacctgataacattcactgagggttccggccggtccccccgctatgctctttggttctgcgtgggcgaatcatggccccaggatcagccatggactaagaggctggttatggtcaaggtggtgcccacatgcttgcgggcgctggtggaaatggcgcgggtggggggagcttctagcctggagaacaccgtggacctccatatcagtaacagccacccacttagtttaacctccgatcaatacaaagcgtacctacaggacttggtggaagggatggacttccaaggccccggcgaatcctag

SEQ ID NO: 191657 - DNA, 315 bp, synthetic construct
  misc_feature 1..315: note = Description of Artificial Sequence: Synthetic coding sequence
  source 1..315: mol_type = other DNA
atgggcacccccaagccccggatcctgccctggctggtgagccagttagatctcgggcagctcgagggtgtggcctgggtgaacaaatccagaacacgatttcgcataccttggaaacacggcttgaggcaggacgcacagcaggaggattttggcattttccaggagttaggaacctttccctcacaaacacccctgaggactcccatggtggaggccgtgttactgatccctcgcaagactttttggatgtcctactgggtgacttggtgctggccgcacagtcagatcagagatccacaggcgtggctctag

SEQ ID NO: 191658 - DNA, 846 bp, synthetic construct
  misc_feature 1..846: note = Description of Artificial Sequence: Synthetic coding sequence
  source 1..846: mol_type = other DNA
atggtgctggcccccctgcccgaccccggcccccccagcctggccgtcgcccccgagccctgtcctcagccccttagaagcccctccttggataatcctactccgtttccaaacctgggcccatccgaaaatccactgaagcgcctgctggtgccgggtgaggagtgggaattcgaagtgactgccttctaccggggccgacaggtgttccagcagactatttcctgcccagagggattacgcctggtggggtcagaagtcggggatcggaccctgccggggtggccagtcacacttccggaccccggaatgtcactcactgatcgaggcgtgatgagctatgtccgccacgttctgagttgcctgggcgggggtctggccctctggagagctggacaatggttgtgggcccagcgtttggggcattgccacacttactgggcagtctctgaggaattgctgccaaattccggccatggccctgatggggaggtgccaaaggacaaggaaggtggcgtttttgatctgggacccttcattgtggaccttattactttcacagagggttccggacgatccccgagatacgcgctgtggttctgcgtgggtgaaagctggccacaggatcagccgtggacaaaacggctcgtgatggtgaaggtggtgcccacctgtctcagagcactggtcgagatggccagagtcggcggcgctagcagtctggagaacacagtcgatctgcacatttcaaattcccatccactttccctgacttctgatcagtataaagcttacttgcaggacttagtcgaggggatggacttccaaggaccaggtgaatcctag

SEQ ID NO: 191659 - DNA, 465 bp, synthetic construct
  misc_feature 1..465: note = Description of Artificial Sequence: Synthetic coding sequence
  source 1..465: mol_type = other DNA
atggtgctggcccccctgcccgaccccggcccccccagcctggccgtggcgcctgagccgtgcccacagccattgagaagcccatccctggacaatccaaccccctttcctaatcttgggccttccgaaaaccctctaaagcggttgctagtgcccggggaagatctgatcaccttcaccgaagggtctgggaggtctccccgctatgcattgtggttctgtgttggtgagtcatggcctcaggaccagccatggacaaaaaggctcgtcatggtcaaggtggttcccacatgtctgcgcgcccttgttgaaatggccagagtagggggtgcatcctctctggaaaatacagtggatcttcacatttcaaatagccaccctctgtctctgacctcagatcagtataaggcctaccttcaggacctggtagagggaatggacttccagggacctggcgagagttag

SEQ ID NO: 191660 - DNA, 846 bp, synthetic construct
  misc_feature 1..846: note = Description of Artificial Sequence: Synthetic coding sequence
  source 1..846: mol_type = other DNA
atggtgctggcccccctgcccgaccccggcccccccagcctggccgttgcccccgagccctgcccacagcccctcagatccccctctctcgacaatccaaccccattccccaatctcgggccatctgaaaacccgctaaaacgactgctcgtccctggcgaggagtgggaattcgaggttactgcattttatcggggccgccaggtcttccaacagactatttcttgtcctgagggactccgactcgtgggctctgaagtgggggaccgaacccttcccggatggccagtcacacttcccgacccgggcatgtccctgaccgaccggggagttatgtcatatgtgagacatgtcctttcctgcctcggtgggggacttgcattgtggcgggctggtcagtggctgtgggcccagcgacttggacattgtcacacctactgggccgtgtcagaggagctccttccgaactctggccatggccctgacggcgaggtaccaaaggataaagagggtggcgtattcgacttaggcccttttatcgtggatcttatcacatttaccgaaggaagcggacgttccccacgctatgccctttggttctgtgttggggaaagctggccccaagaccaaccttggacaaagcgcctggtgatggtgaaggtagtgccgacctgtcttagagctctggttgagatggctcgggtaggtggcgccagtagtctcgagaatactgtggatctccatatctccaacagccatcccctgtctctcacaagtgatcagtataaagcgtatttgcaggacctcgtggaaggaatggactttcagggccccggggagtcttag

SEQ ID NO: 191661 - DNA, 903 bp, synthetic construct
  misc_feature 1..903: note = Description of Artificial Sequence: Synthetic coding sequence
  source 1..903: mol_type = other DNA
atgggcacccccaagccccggatcctgccctggctggtgagccagctggacctgggacagctcgaaggagtggcttgggtgaacaaatcaaggacacgcttccgaattccctggaaacacggcctccgccaggatgcgcagcaggaggacttcggtattttccaggcttgggctgaagctacgggggcctacgtccccggacgggataaaccggacctcccgacttggaaaaggaactttcggtctgctctgaataggaaggaaggactgcggctcgcagaggaccgctctaaggatcctcacgatccacataagatttatgagtttgttaactcgggggtgggagacttttcccagccggacacttcccccgataccaacggaggcggctccactagcgacacacaggaggatatcctggatgaattgctgggtaatatggtacttgctccattaccagacccgggccctccgagtttagccgtggcacccgagccatgcccccagcctctgcgctccccaagtttagataacccaacaccctttcctaacctgggccccagcgagaacccactaaagcgcctgctggtgccaggtgaggacctgatcaccttcaccgagggatctgggcggagccctaggtacgccttgtggttctgtgtgggagagagttggcctcaggaccagccgtggaccaagaggctggttatggtgaaagtcgtgcctacttgccttcgagctctggtggaaatggcccgggtgggcggcgcttcctctctcgagaacacagtcgatctgcatatatctaatagtcatccactaagcttaacaagtgaccaatacaaggcctatttgcaggacttggtagagggcatggattttcaggggccaggagaaagctag

SEQ ID NO: 191662 - DNA, 465 bp, synthetic construct
  misc_feature 1..465: note = Description of Artificial Sequence: Synthetic coding sequence
  source 1..465: mol_type = other DNA
atggtgctggcccccctgcccgaccccggcccccccagcctggccgtagctcctgagccctgcccccagccactgcgatctcccagtctggataacccaactccttttccgaatctcggcccttctgagaaccctttgaagcgcttgctggttcccggggaagatcttattacattcacagaaggatctgggagatctccacgatatgcattatggttctgcgttggggaaagttggccgcaggaccagccctggacgaaaaggctggttatggtgaaagtggttcctacgtgccttcgcgcgcttgtagaaatggctagagtgggtggcgcctcatcactggagaataccgtcgacctacacatttcaaatagccatccactcagtctcacctccgatcaatataaggcatatcttcaggatctggtcgaggggatggacttccaggggccgggtgagagttag

SEQ ID NO: 191663 - DNA, 1404 bp, synthetic construct
  misc_feature 1..1404: note = Description of Artificial Sequence: Synthetic coding sequence
  source 1..1404: mol_type = other DNA
atggccctgcacccccggcgggtgcggctgaagccctggctggtggctcaggtggacagcggactgtatcctggattgatttggttgcatagagatagcaaaagattccagatcccgtggaagcacgccacccgtcattcccctcagcaggaggaggaaaacacaatttttaaggcatgggccgtcgaaactgggaaataccaggaaggggtagacgaccccgatccggccaagtggaaggcacaactgagatgcgctctgaataagtcacgcgagtttaatttgatgtatgacggaacaaaggaggtgccaatgaacccagtaaaaatctatcaggtgtgtgacataccgcagccacaaggttccatcatcaaccctggttccaccgggtccgctccctgggacgaaaaggataacgatgtggacgaagaggacgaggaagacgagctggaccagtcccagcaccatgttccaatccaggataccttccccttcttgaacatcaacggatcaccgatggctcctgcctctgtggggaattgtagcgtggggaattgctcgcccgaggcagtttggcctaagaccgagcccttagagatggaagtgccccaggcaccaatccagcctttttacagctcccccgagttatggatctcctctcttcccatgacagatcttgacataaagttccaatacaggggaaaggaatatggccagaccatgacagtgtctaatccccaaggctgccggcttttttatggtgatctaggcccgatgcccgatcaagaggagctgttcggacccgtgagtctcgaacaggttaagttccctgggccagagcatattaccaacgagaagcagaaactctttacaagtaaactgctcgatgttatggatagaggactgatcctggaagtgtctggacacgctatctacgctattaggctgtgtcagtgcaaggtgtactggtccggcccgtgtgcgccatcactagtggcccctaaccttatcgagcggcaaaagaaagtgaaactcttctgcttagaaacattcctctccgacttaattgctcatcaaaagggccaaatcgagaagcagccaccgttcgaaatttatctttgtttcggagaggagtggcccgacggcaagcccctcgaacgcaaattaatccttgtgcaggtaattccagtcgtcgctagaatgatatatgagatgtttagcggcgactttacccgcagctttgattctggatccgtgaggttgcagatctccacaccagacatcaaggataatatcgtggctcaactcaaacaattataccgtatcctccagacgcaggaaagctggcagccaatgcagcccacacctagtatgcagctgcccccagctctaccaccccagtag

SEQ ID NO: 191664 - DNA, 831 bp, synthetic construct
  misc_feature 1..831: note = Description of Artificial Sequence: Synthetic coding sequence
  source 1..831: mol_type = other DNA
atggccctgcacccccggcgggtgcggctgaagccctggctggtggcccaggtggattcagggctttaccctgggctaatctggctgcatcgggatagcaagaggttccagattccctggaaacacgctacccgccatagtccacaacaggaggaagagaacacaattttcaaagcgtgggctgtcgaaaccggtaaataccaggagggcgtggatgaccccgatcctgctaaatggaaagctcagctccggtgtgccctcaataaatcaagagaattcaacctcatgtatgatggaacaaaagaggtccccatgaaccccgtaaagatctaccaggtttgcgatatcccgcagcctcaggggagcattatcaaccccggctccacaggatcggcaccttgggacgagaaagataacgatgttgacgaggaggatgaggaagatgagctcgatcagagccagcaccacgtgccaattcaggacacgttcccttttctaaatatcaacgggtctcctatggcccctgctagcgttggcaattgtagtgtagggaactgctcaccggaggctgtatggcccaagaccgagcctctagaaatggaggtaccacaagcgcccattcagcccttctattcctcaccagaactctggatttccagcctgcctatgactgatctcgacatcaaattccagtaccgcggaaaagagtacggccagactatgacagtgtccaaccctcagggctgtcgactgttctatggagatctcggtcccatgccagaccaggaagagcttttcggtccagtgtcactggaacaggtcaaattctag

SEQ ID NO: 191665 - DNA, 1119 bp, synthetic construct
  misc_feature 1..1119: note = Description of Artificial Sequence: Synthetic coding sequence
  source 1..1119: mol_type = other DNA
atgtacgacggcaccaaggaggtgcccatgaaccccgtgaagatctaccaagtgtgcgacattccccagccacagggttccattatcaatcctgggagtaccggctcggcgccatgggacgaaaaggacaatgacgtcgatgaggaggacgaggaagatgagctggaccagagccagcaccacgtgccaatacaagacacctttccttttctgaacattaatggctccccaatggcccctgcttcggttggaaactgtagcgtgggtaactgtagccctgaagctgtatggcctaaaaccgaacctctcgaaatggaggtgccacaggccccaattcaacccttttactcatcccctgagctgtggatctcctcactgccgatgaccgatctggacattaagtttcagtacaggggcaaagagtatggccaaaccatgacggtgagtaacccccagggctgtagacttttttacggcgacctggggccaatgccagatcaggaagagctctttggtcccgtgagcctcgaacaggttaagtttccaggtcctgagcatatcaccaatgaaaaacagaaattgttcacttccaagctcctggacgtaatggataggggattgattctcgaggtctctggccatgcgatctatgctattcgcctgtgtcagtgcaaagtatactggagcgggccttgcgctcccagcttggtagcaccaaacctgattgagagacagaagaaggtgaagctcttctgcttagaaacattcctgagcgacttgatcgcacatcagaaaggtcagatcgaaaagcaacctcccttcgaaatatacctctgcttcggtgaggaatggcccgatggtaagccccttgagcgtaaactgattctcgtccaagtgattcccgtggtagctaggatgatttacgaaatgttttctggggactttactaggtctttcgattctgggagcgtgagactgcagattagcacaccggacattaaagataacattgtggcacagctaaaacagctctataggatactgcagactcaggagtcctggcagcccatgcagcctacccccagtatgcagcttcctccagccctccctccccagtag

SEQ ID NO: 191666 - DNA, 1281 bp, synthetic construct
  misc_feature 1..1281: note = Description of Artificial Sequence: Synthetic coding sequence
  source 1..1281: mol_type = other DNA
atgtgcgaccggaacggcggccggcggctgcggcagtggctgatcgagcaaattgattctagcatgtaccctggcctaatttgggaaaacgaggaaaaatcaatgtttcgtattccatggaagcacgctggcaagcaggattacaaccaggaggtggacgcttccatattcaaagcctgggccgtttttaaggggaagtttaaagagggcgataaagccgaacccgccacctggaaaacgcgcttgagatgtgctctaaacaaatcccctgacttcgaagaagtaaccgaccgttcccaactagatatttccgagccatataaagtatatcgcatcgttcctgaagaggagcagaaatgtaagctgggtgtagccactgcgggctgtgtaaatgaagtgacagaaatggagtgtggccgtagtgagattgacgaactgatcaaggaacccagcgtggacgactatatggggatgatcaagagatcccctagtccccctgaagcgtgtaggagccagcttctgccggactggtgggcacaacagccaagtactggagtcccactcgtcactggttacacaacctacgatgcccaccacagcgccttcagtcaaatggtaatctccttctactacggtggcaaactcgtgggtcaggccaccacaacatgtcccgaaggatgtaggctgagcttaagccagccaggccttccaggaaccaaattatacggtcctgaaggcctagagctcgtccgctttccccccgcagatgcaattccttcagagcgacaaaggcaggttacccgaaagctttttggacaccttgagaggggggtgttgcttcattcttccagacaaggcgtgtttgtgaaaagactgtgccaaggccgggtattttgctcaggaaatgccgtggtatgtaaaggccggccaaacaaactggaacgcgatgaggtggtacaggtgttcgacacaagtcaattttttagagagttgcagcagttctacaactctcagggaagattgcccgacgggcgggtagttctgtgttttggcgaagagtttcctgatatggcaccgttacgaagcaaactaatcctggtgcagattgaacagctgtatgttcgccagctcgctgaggaggccgggaagtcatgtggggctggatccgtaatgcaggcacctgaagagcctccccctgaccaggtttttcgaatgtttcccgacatctgtgcctcacatcagagatcattcttcagggaaaatcagcagatcactgtgtag

SEQ ID NO: 191667 - DNA, 546 bp, synthetic construct
  misc_feature 1..546: note = Description of Artificial Sequence: Synthetic coding sequence
  source 1..546: mol_type = other DNA
atggccggcagccgggaggtggtggccatggactgcgagatggtgggattaggtccacatcgggaatcaggcctggcaaggtgtagccttgtgaacgtgcacggggccgtgctttatgataaattcattcgacccgagggggagatcacagattacaggaccagagtgtcgggagttactcctcagcacatggttggagcaacgccattcgcagtggcgcgtttagaaatccttcagctgctcaaaggcaaactagtggttggccacgacctcaagcacgattttcaggcgctgaaggaggacatgagtggttacacaatttatgatactagcaccgaccgtctactctggagggaggccaaattggatcattgtcggcgcgtaagtctgcgggtgctctcggaacgtcttctgcataaaagtatacagaacagcctgctgggtcactcatccgttgaggacgcccgggccaccatggagttgtaccagattagccaacgcataagggcaagacgggggctgccccggctcgccgttagcgactag

SEQ ID NO: 191668 - DNA, 546 bp, synthetic construct
  misc_feature 1..546: note = Description of Artificial Sequence: Synthetic coding sequence
  source 1..546: mol_type = other DNA
atggccggcagccgggaggtggtggccatggactgcgagatggtgggcttgggtccgcatcgtgaatccgggctggcacgatgttccttggttaacgtccatggggcggtgctttacgacaaatttatcagacccgaaggagaaataactgactaccgaacccgcgtgtccggcgttacacctcagcacatggtgggggctacgcctttcgcagtggcgcggctggagatcctgcagctccttaaaggcaagcttgtggtggggcacgaccttaaacatgactttcaggcgctgaaagaagacatgagtgggtataccatctacgacacctcaacagacagactgctttggcgcgaggcaaagctggaccactgtcggcgcgtgtcactgcgcgtgctcagcgaaagattactccacaagtccattcaaaattcactactaggacattcaagcgtggaagacgctagggcaacaatggagttgtaccagatcagccagagaatccgtgccagacggggtctacccagactagcggtgtccgactag

SEQ ID NO: 191669 - DNA, 1062 bp, synthetic construct
  misc_feature 1..1062: note = Description of Artificial Sequence: Synthetic coding sequence
  source 1..1062: mol_type = other DNA
atgagcaccctgctgctgaacctggacttcggcgagcccccccccaagaaagccctagaggggaacgccaagcacaggaattttgtcaagaaacgtcgcctcttggagcggcgtggcttcttgtccaagaaaaaccagccaccgtcaaaggctccgaaattgcactccgaaccctcaaaaaagggagaaactccgactgttgatggcacctggaagactcccagttttcccaagaagaaaacagcggcaagtagcaacggatccgggcagccactggacaagaaggccgcagtctcatggctgacccctgccccatcaaagaaagccgactcagttgccgcgaaggttgatctgctgggagagttccaatccgccttgcctaaaatcaatagtcaccctacaaggtcccagaagaaaagttctcaaaagaaaagtagtaagaaaaaccatcctcaaaagaacgcaccacagaacagtactcaggcccatagcgagaataaatgcagcggcgcgtcccaaaaactgccaagaaaaatggtcgccatagactgtgaaatggtggggaccggtccgaaagggcacgtttcctctctggcccgctgtagtatagtgaattacaatggagacgtgctctatgatgaatacatactccctccttgtcatatcgtggactatcgcacccgttggtcaggaatcagaaaacagcacatggtcaacgcaacaccctttaagatcgcacggggtcagatcctgaagattctcaccggtaagatcgttgtgggccacgctattcacaatgacttcaaagccttgcagtacttccaccctaaatccctgaccagagacacatcccacattcccccactgaatcgcaaagccgattgtccagagaatgccaccatgagcttgaagcacttaaccaagaagctcttaaatagagatatccaggtcgggaaatcaggccatagctctgtcgaggacgcacaagccactatggagctgtataagctggtcgaggtggagtgggaagagcatttggcacggaacccgcccacagattag

SEQ ID NO: 191670 - DNA, 1062 bp, synthetic construct
  misc_feature 1..1062: note = Description of Artificial Sequence: Synthetic coding sequence
  source 1..1062: mol_type = other DNA
atgagcaccctgctgctgaacctggacttcggcgagcccccccccaagaaggccctggaggggaatgcaaaacacaggaatttcgttaaaaagcgaaggttattggaacggagaggatttttgagcaagaaaaatcaaccaccaagcaaagcccccaaactgcactcagagccatcgaaaaagggcgaaacacctacagtcgacggtacttggaaaactcccagtttcccaaaaaaaaagaccgcggcttcgtcaaatggatcaggccagcccctcgacaagaaagccgcagtatcttggctcacccccgccccttccaagaaagccgattccgtggctgcgaaggttgacctgcttggcgagtttcagagcgccctcccaaagattaactcacacccgacaagatctcaaaaaaaaagcagccagaagaagagctctaagaagaatcatccccagaaaaacgccccacagaactcaacccaggctcactctgagaacaagtgctcaggcgcctcgcagaagctgcctagaaaaatggtggccattgactgcgagatggtgggaactggccctaaagggcacgtgtccagcttagcccgttgcagcatcgtaaattacaacggcgatgtcctctatgacgagtacattttgccaccgtgtcacatcgtggactataggactcgctggtcaggaatccggaagcagcatatggtcaacgccacaccgtttaaaatcgccaggggccagatcctgaagattctaacggggaagatagtggtgggtcatgccatccacaacgattttaaggccctgcaatatttccacccgaaatcacttacacgagataccagtcatattcccccacttaatcggaaagcggattgccccgagaacgcaaccatgtccctgaagcacctaactaagaaactcttaaatagagacatccaggttggtaaaagcggccattctagcgtggaagacgctcaggctacaatggagctctataagttggtggaagtggagtgggaggaacacctggccagaaaccctccaaccgactag

SEQ ID NO: 191671 - DNA, 360 bp, synthetic construct
  misc_feature 1..360: note = Description of Artificial Sequence: Synthetic coding sequence
  source 1..360: mol_type = other DNA
atggaggccagcgccctgaccagcagcgccgtgaccagcgtggccaaggtggtccgagtggcctccggtagcgctgtggtgctgccacttgctaggatcgctactgtggtgatcggcggagtggttgccgtgcccatggttttaagtgccatggggtttaccgccgcagggatcgcctcgagttccattgcagccaaaatgatgagtgcagctgctatcgccaacgggggcggcgtggcctccggcagcctggttgctacccttcaatcgctgggggctaccggactgagtgggttaactaaattcattctcggtagtattgggtctgccatcgccgcagtgatagctcggttctattag

SEQ ID NO: 191672 - DNA, 369 bp, synthetic construct
  misc_feature 1..369: note = Description of Artificial Sequence: Synthetic coding sequence
  source 1..369: mol_type = other DNA
atggaggccagcgccctgaccagcagcgccgtgaccagcgtggccaaggtagtcagggtggcctccggcagcgcagtggtgctacctttggccagaatcgctacggtcgtgattgggggaggggaatcagtggtggctgtaccaatggtcctcagtgcaatgggtttcactgccgccgggatagcgtcctcctccatcgccgctaaaatgatgtccgctgcagctatcgcaaatggcggcggggttgcaagcgggagcttggttgcaactttacagagcctcggtgcaactgggttatctggattgacaaagtttatcctgggtagcatcggaagcgccatcgctgccgtaatcgctcggttttattag

SEQ ID NO: 191673 - DNA, 369 bp, synthetic construct
  misc_feature 1..369: note = Description of Artificial Sequence: Synthetic coding sequence
  source 1..369: mol_type = other DNA
atggaggccagcgccctgaccagcagcgccgtgaccagcgtggccaaggtggtcagggtggcttccggctctgcagttgtgttgcctctggcaagaatcgctactgtggtgattggcggcgtggcgtccatagtggccgttccaatggtgctttctgctatgggttttacagctgctggaatcgcctcgtccagcattgctgccaaaatgatgagtgccgcggccatcgccaacggagggggggttgcctccggctccttagtagccaccctgcagtctcttggcgctacaggcttgagcggcctcactaagttcattcttggaagcatcggctcagccatcgccgcggtgatcgccaggttctattag

SEQ ID NO: 191674 - DNA, 189 bp, synthetic construct
  misc_feature 1..189: note = Description of Artificial Sequence: Synthetic coding sequence
  source 1..189: mol_type = other DNA
atggaggccagcgccctgaccagcagcgccgtgaccagcgtggccaaggttgtaagagtggccagcggcagcgcggttgttctgccacttgctaggattgccacagttgtgattggaggtgtggtagcagtgcccatggttctatccgccatgggttttaccgctgctgggattgcctcctctagctag

SEQ ID NO: 191675 - DNA, 174 bp, synthetic construct
  misc_feature 1..174: note = Description of Artificial Sequence: Synthetic coding sequence
  source 1..174: mol_type = other DNA
atggaggccagcgccctgaccagcagcgccgtgaccagcgtggccaaagtcgtgagggtcgcatcaggctccgccgtggtcctgccactcgcacggatcgcaaccgtggtgattggcggggtagtagctgtgccgatggtgctgtctgccatggggttcacggctgccgggtag

SEQ ID NO: 191676 - DNA, 360 bp, synthetic construct
  misc_feature 1..360: note = Description of Artificial Sequence: Synthetic coding sequence
  source 1..360: mol_type = other DNA
atggaggccagcgccctgaccagcagcgccgtgaccagcgtggccaaggtcgtgcgggtggcctctgggtcagccgtggtactccctctggcccgcatcgctaccgtcgtcatcgggggcgtcgtggccgtaccaatggtcctgagtgcaatgggcttcacagccgctggaattgcctcaagcagcatcgctgcgaaaatgatgagtgccgctgcaatcgccaatggaggcggtgtcgcttccggcagtctcgtggcaactctgcaaagcctgggagctacaggactatctggtctcaccaaatttattttaggctccatcggtagtgccattgctgctgtgatcgcaagattctactag

SEQ ID NO: 191677 - DNA, 123 bp, synthetic construct
  misc_feature 1..123: note = Description of Artificial Sequence: Synthetic coding sequence
  source 1..123: mol_type = other DNA
atggaggccagcgccctgaccagcagcgccgtgaccagcgtggccaaagtcgttcgcgtcgcttcgggcagcgctgtggtcctgcccttagcccggattgcaactgtcgttatagggggttag

SEQ ID NO: 191678 - DNA, 282 bp, synthetic construct
  misc_feature 1..282: note = Description of Artificial Sequence: Synthetic coding sequence
  source 1..282: mol_type = other DNA
atggaggccagcgccctgaccagcagcgccgtgaccagcgtggccaaggtggttagagtggcaagcggctcagctgtggttttacctctagccagaattgccaccgtagtgatcgggggtgtggtcgcggtaccaatggtgcttagcgccatgggttttaccgccgcgggaatagcctcttcatcaatcgccgctaagatgatgtccgctgcagcgatcgccaacggcggcggagttgctagtgggtctctggttgccaccctccagagtctgggggcctag

SEQ ID NO: 191679 - DNA, 2358 bp, synthetic construct
  misc_feature 1..2358: note = Description of Artificial Sequence: Synthetic coding sequence
  source 1..2358: mol_type = other DNA
atgggcaagaagtacaagaacatcgtgctgctgaagggcctggaggtaataaatgattatcatttccgcatggtcaagagccttctctccaatgatctgaagttaaatctgaagatgagagaagagtatgataagatccagatcgctgacctgatggaagagaaattcagaggcgacgctggtcttggaaagctgattaaaatctttgaggacatacctacgttggaggacctggccgagacactaaagaaggagaaactgaaagttaaggggccagctctgtcaagaaaaagaaaaaaagaagtggacgctacctcccccgcaccatcaacaagcagtaccgtgaagaccgagggtgctgaagccacccccggcgcccaaaaacgcaagaagtctacaaaagagaaggctggcccaaaggggtccaaggtgtctgaggagcagactcagccaccgagtcccgccggtgcggggatgtcaacagccatggggagatccccctcgcccaaaacatctctcagcgcaccccctaattcttcaagcaccgaaaaccccaagacagtagccaaatgccaggtgacccccagacgaaatgtgctgcaaaaacggccagtcattgtgaaggtactgtccactaccaaaccgttcgagtacgagacccctgaaatggagaagaaaatcatgttccatgcaactgtggctactcagacacaattcttccacgtcaaagtgttaaacacctccttgaaggagaagtttaacgggaaaaagatcattatcattagcgactatctagaatacgacagcctgctggaagtgaatgaggaaagtaccgtgtctgaagcaggccctaatcaaacatttgaggtgcccaacaaaataattaacagagcgaaagagaccctgaagattgatattcttcataaacaggcatctggaaatattgtctatggggttttcatgctgcacaaaaagactgtgaatcagaagaccaccatttacgagatccaggacgaccgagggaaaatggacgtggtcgggaccgggcagtgccataatatcccttgcgaggaaggagataagctccagctcttttgttttaggctacgtaagaagaaccagatgtcaaagctgatctcggagatgcatagtttcatccagatcaagaagaagacgaaccctaggaataacgaccccaagtctatgaaactcccccaggaacagaggcagttgccctacccttccgaagctagcacgacattccccgagtctcatttgcgcactcctcagatgccgcctacaacccctagttcttcatttttcacaaagaaaagtgaagatacgatttctaagatgaatgattttatgcgtatgcagattttaaaggagggctctcatttccctgggccgttcatgactagtattggacccgcggagtcccatccacacactcctcagatgcccccttcaaccccctccagttccttcctgaccaccaaatccgaggacaccatctcaaagatgaacgatttcatgcgcatgcaaattctaaaggagggatctcacttcccgggtccattcatgacatcgataggtcccgcagaatcccatccacacaccccgcagatgccacccagtaccccaagtagctctttcctgacaacactgaagccaagattgaagacagaaccagaagaggtttccattgaagacagcgcccagagcgatctgaaggaagtcatggtcctgaatgccactgagagtttcgtttacgaacccaaagaacagaagaagatgttccacgctaccgtcgctaccgaaaacgaagtgtttagggtcaaagtgttcaatatcgaccttaaagaaaagttcacaccgaagaagatcatcgctatagctaattatgtgtgtcgcaacgggtttctagaagtctatccctttaccctggtagcagacgtgaatgccgaccgcaacatggagatccctaaggggctgatccgcagcgcaagcgttactcccaaaataaaccagctctgcagtcagaccaaaggaagcttcgtcaacggcgtgttcgaagtgcacaagaagaacgtgcggggcgagttcacttactatgagatccaggacaacactggcaaaatggaggtcgtcgtacacggtcgtctgactacgatcaattgcgaagagggcgataagcttaaacttacttgcttcgaactggctcccaaaagcggcaacaccggagaactccgttccgtaatccactcccacattaaggtaatcaagacccgaaaaaacaagaaggatattttgaaccccgattcctctatggagacctctcccgacttttttttctag

SEQ ID NO: 191680 - DNA, 2022 bp, synthetic construct
  misc_feature 1..2022: note = Description of Artificial Sequence: Synthetic coding sequence
  source 1..2022: mol_type = other DNA
atgggcaagaagtacaagaacatcgtgctgctgaagggcctggaggttatcaacgattaccatttccggatggtgaaatcccttctgtctaatgacctgaagctgaatcttaaaatgcgcgaggagtacgataagattcagattgccgacctgatggaggagaagttccgcggggacgcgggactgggcaaactgatcaaaatttttgaggatatccctaccttagaggacctggccgagacattaaaaaaagaaaaactcaaagttaaaggcccagccctctctagaaaacgtaaaaaagaggtggatgcaacatcccctgcccccagcacatcctctacagtaaagacagaaggggccgaggcgaccccaggggctcagaagaggaagaagagcaccaaagaaaaagcaggtcccaagggctctaaagtgagtgaggagcagacccagcccccttcccccgccggcgcgggaatgagcaccgcgatgggaagatcccctagtcccaagaccagccttagcgcccccccaaatagctccagtaccgagaaccctaagactgttgcaaagtgtcaggttactccccgcaggaacgtcctccaaaagagaccggtgatcgtgaaagtcctgagcactaccaagcctttcgaatatgagaccccagaaatggagaagaaaattatgttccacgcaaccgttgccactcagacacagtttttccacgtgaaagtgctgaatacttctctgaaagaaaagtttaacgggaaaaagattatcattatttctgattaccttgaatacgacagtctgctggaggtgaatgaggagtccacagtcagtgaggcgggccctaaccagacatttgaggtcccgaataagataattaaccgggctaaggagacgctaaagattgatatacttcataagcaggcatctggcaacattgtgtacggggtgttcatgctacacaagaagaccgtgaatcagaaaactacaatttatgagatccaagatgaccgggggaagatggacgtggtaggcactgggcagtgtcataacatcccatgcgaggagggagacaaactgcagctgttctgtttcaggctgcgtaagaagaaccagatgagtaagctgatttccgaaatgcattccttcatacagattaagaagaagacaaacccccgcaataacgatccaaagtccatgaaactccctcaggaacagagacagctgccttacccgtctgaagcatctacgaccttccccgagtcccatcttcgaacccctcaaatgcctccaacaacccctagctcctcttttttcactaagctgaagcccaggctcaagacagagcccgaagaagtgagcatcgaggattccgcacagtccgacctcaaagaggttatggttctgaatgctaccgaaagcttcgtttacgaaccaaaagagcagaagaaaatgtttcatgcaacagtggccactgagaatgaggttttcagagtgaaggtcttcaatatagatctcaaagaaaagttcacccctaaaaagattatcgctatcgctaactatgtttgccgcaatgggtttcttgaggtgtacccctttaccctcgtggctgatgtgaatgccgaccggaacatggagataccaaaagggcttatccggtctgcctccgtaacccctaaaattaatcagctgtgcagccaaacaaaagggagcttcgttaatggcgtttttgaggtacacaagaagaacgttcgcggcgaatttacttattacgaaatccaggataacacgggtaaaatggaggtggtggtccatgggagactgacaaccatcaactgtgaggagggagacaagctgaagcttacatgtttcgagctcgctcccaaaagtggtaacacaggagagttgagatcggtgatccatagtcatataaaggttataaaaactaggaagaacaagaaagacatcctcaaccctgacagctccatggagactagcccggatttcttcttctag

SEQ ID NO: 191681 - DNA, 1245 bp, synthetic construct
  misc_feature 1..1245: note = Description of Artificial Sequence: Synthetic coding sequence
  source 1..1245: mol_type = other DNA
atgggcaagaagtacaagaacatcgtgctgctgaagggcctggaggtgatcaacgactatcactttcggatggtgaaatcactgcttagcaacgatctgaagctgaatctaaaaatgcgtgaggaatacgacaagatacaaattgcagacctgatggaagagaagttccgcggcgacgctgggctcggaaaactgattaagatttttgaggacatccctaccctggaggatctggccgagacacttaaaaaagagaagctgaaagtgaagggcccagcattgagcaggaagcgaaagaaagaggtagacgccacgagccctgccccctccacttcgagcacagtgaagactgagggggccgaagctacaccaggcgcacagaaaagaaagaagtcaaccaaggagaaggccggccccaagggatccaaggtgtcagaagagcaaacccagccacccagtcctgcaggtgccgggatgtcaacagccatgggacgatccccatctcctaaaaccagtctgagcgccccacctaatagttcctcaacagagaatccaaagacagtggctaagtgccaggtaacgcctcggaggaatgtgctgcagaaacgacccgtgatcgtgaaagtgttgtcaaccacaaagccgttcgagtacgaaacccccgagatggaaaagaaaatcatgtttcatgcaaccgtggccacccagacacagttcttccatgtcaaggtgctgaacacctctctgaaggagaagttcactccgaaaaagattatcgccatcgcgaactatgtgtgcagaaatggtttcctggaagtgtatccctttacactggtggccgacgtcaacgcagatagaaatatggagattccaaaaggcctgatccggagcgccagtgtgaccccaaagatcaatcagctctgtagccagacgaaagggtcctttgtgaacggcgttttcgaggtccataaaaagaatgtaagaggcgaattcacatattacgagattcaggacaacaccggcaaaatggaggtggtggtgcacggacggctgacgaccatcaactgtgaggagggcgacaagctgaagctcacttgttttgagttggcacccaagtcaggcaatacgggtgaattacgcagcgttattcattctcatatcaaggtgatcaaaactaggaagaataagaaggatatcttgaatccagattccagtatggagaccagccctgactttttcttctag

SEQ ID NO: 191682 - DNA, 2190 bp, synthetic construct
  misc_feature 1..2190: note = Description of Artificial Sequence: Synthetic coding sequence
  source 1..2190: mol_type = other DNA
atgggcaagaagtacaagaacatcgtgctgctgaagggcctggaggtgataaatgattatcactttcgtatggtgaaatctcttctgtccaacgatctgaagctgaacctgaagatgagggaggagtacgataaaatccaaattgccgatttgatggaggagaaatttagaggggatgcgggactgggaaagctaattaagatcttcgaagatatacctactctggaagatctggcagagacactgaagaaggaaaaacttaaagtcaaggggcccgcactgtccagaaagcgcaagaaggaagttgacgccacttcccccgcaccatccacaagttccacagttaaaactgagggcgctgaagctactccaggcgctcagaagcgcaagaaatcgacaaaagagaaagccgggcccaaggggagcaaagtgagcgaagaacagacgcagccacccagccctgctggcgctgggatgtcaactgccatggggcggagtccctccccaaaaaccagcctttcagccccccctaactctagttccacagaaaaccccaagaccgtggcaaaatgtcaagtgactcccagacgtaatgttctgcagaaaagacccgttatcgttaaggtgttaagtacaactaagcctttcgagtacgagacacctgaaatggagaagaaaatcatgttccatgcaaccgtggccactcagacccagttttttcatgtcaaggtcctaaatactagcctgaaagaaaagttcaacggcaaaaaaatcatcattataagtgactatctcgagtatgatagcctcctagaggtcaatgaggaatccactgtgtccgaggctggccccaatcaaaccttcgaggttcctaacaaaatcataaaccgcgcaaaagagactcttaaaattgacatcttgcacaagcaagccagcggcaacatcgtctatggagtctttatgctccacaagaagactgtgaaccaaaagacaaccatatatgagatccaggacgacagggggaaaatggatgtcgtggggaccggccaatgccacaatatcccttgcgaggagggcgataaactgcaactcttttgtttcagactgcgaaagaaaaaccagatgtcaaagcttattagtgaaatgcatagctttattcagatcaaaaagaaaaccaaccctagaaacaatgatcccaagagcatgaaactgcctcaggaacagagacagctgccataccccagcgaagcctccaccacatttcccgagtctcacctgcgaacaccacaaatgccccccaccactcccagcagttcattcttcacaaagaaatccgaagatactattagcaagatgaacgatttcatgagaatgcagatactgaaagaagggagccactttcctggacccttcatgactagcatagggccagccgaaagccatccccatactcctcagatgcctcccagcactccctcaagctcttttttgacaacgctgaaacctcgccttaagactgaacctgaggaggtgagtatagaagattccgcccagtctgatctcaaagaggtcatggtcctgaacgcgacagaatcatttgtgtacgaacctaaggaacaaaaaaagatgtttcacgctaccgttgcaactgagaatgaggtttttagagtcaaggtatttaacattgacctgaaagaaaaatttactcccaaaaagatcatcgccattgctaactatgtgtgccgaaacgggttcttggaagtgtatccctttactctcgtcgcagacgtcaacgccgaccgcaacatggaaatccctaaaggtcttatccgaagcgcctccgtgacgccgaagatcaatcagctctgctcccagacaaaggggtcatttgtcaatggtgtcttcgaagttcacaaaaagaacgtgcgtggcgagtttacatattacgaaatccaggacaatacaggcaaaatggaagtagtggtgcacggccgcctcacgaccatcaattgtgaggagggagacaaactcaaactgacctgttttgaactcgctccaaagtcaggcaatacaggcgaattgaggagcgtaatccacagtcacattaaggtgattaaaacaagaaagaataaaaaggatatcctgaaccccgactcttccatggagactagtccagactttttcttctag

SEQ ID NO: 191683 - DNA, 2190 bp, synthetic construct
  misc_feature 1..2190: note = Description of Artificial Sequence: Synthetic coding sequence
  source 1..2190: mol_type = other DNA
atgggcaagaagtacaagaacatcgtgctgctgaagggcctggaggtgataaatgactaccacttccgcatggtaaagagtttgttgagcaacgacctcaagttgaatcttaagatgcgagaagaatacgataaaatccagatcgccgatctgatggaggaaaagttcagaggcgacgctgggctggggaaactaattaagattttcgaggatatccccacccttgaagacctcgcagaaacactgaagaaggaaaagttaaaagtgaagggtccagccctctccagaaagcgtaaaaaagaagttgatgctactagccccgccccctccacctcatccaccgtgaagacagagggggctgaggccacccctggggcccagaagcgtaaaaagagcacgaaagagaaagcaggaccaaagggatctaaggtctccgaggagcagacacagcccccatctcctgcgggcgcgggtatgagtactgcaatgggaaggtcgccgtcccctaagacttccctgagcgcccctcctaattcctccagtactgagaacccgaaaaccgtggccaagtgtcaggtgaccccccggcggaatgtgttacagaagaggccagtcatagtgaaagttttgagcaccacgaagccttttgagtacgaaacaccggaaatggagaagaaaatcatgtttcatgcaactgttgctacccaaacccagttctttcatgtgaaagttctgaacacttcactcaaggagaaattcaatggcaagaagatcatcattatcagtgactacctggaatatgacagtctgctggaagtgaatgaggagtccaccgtttccgaggccggacccaaccaaacgttcgaagtaccaaacaaaattataaacagggcaaaggagacgctcaaaatcgacattctgcataaacaggcttctggaaatatcgtatacggcgtatttatgctgcacaaaaagacagtcaaccagaaaacaacaatttacgaaatccaggacgatcgggggaaaatggacgtcgtggggactgggcaatgtcataatatcccatgcgaggaaggcgacaagctccagctcttttgcttcagactacggaaaaaaaaccagatgtctaaactgatttctgaaatgcacagttttattcagatcaagaagaagaccaatccacgcaataacgatcccaagtcaatgaagctgccccaggagcagagacagctgccttacccctcagaagcctctacaacgttccccgagagtcaccttaggacaccacagatgccgcctacaaccccctcaagctccttctttactaagaagagcgaggataccatcagcaaaatgaatgacttcatgaggatgcaaatattgaaggagggttcgcatttccccggtccattcatgacttcaattggccccgccgaaagtcacccacataccccacagatgcctcctagcacccccagcagcagtttccttactacactgaaaccaagattaaagactgagcccgaagaggtaagcatcgaagatagcgcccaaagcgacctgaaggaagtgatggtgctcaatgcaaccgaaagtttcgtgtacgaaccaaaggaacagaagaagatgtttcatgctacagtcgctacggaaaatgaagtttttagggtgaaggttttcaatatagacttgaaagagaaatttactccgaagaaaataattgcaatcgctaactacgtgtgtcggaacgggtttctggaagtgtatcctttcacactcgtagccgacgtgaatgccgaccgcaacatggagatccctaagggattgatacgttctgcgtcggttacaccaaagataaatcagttatgtagtcagaccaaagggtcctttgtgaacggcgtgtttgaagtacataagaagaacgtgcggggcgagtttacatattatgagattcaagataataccggaaaaatggaggtggtcgtgcatggtcggctgaccaccattaactgtgaggaaggagacaagcttaagctcacctgctttgaactcgcacccaaatcgggcaacactggagagttgaggagtgttatccactctcacattaaagtgattaagacacgcaagaataagaaagatatattaaatcctgacagcagcatggagacctcgccagactttttcttttag

SEQ ID NO: 191684 - DNA, 384 bp, synthetic construct
  misc_feature 1..384: note = Description of Artificial Sequence: Synthetic coding sequence
  source 1..384: mol_type = other DNA
atgggcaagaagtacaagaacatcgtgctgctgaagggcctggaggtgataaacgactaccactttcgaatggtcaagagtttactgtctaacgacctcaagctgaacctgaagatgcgcgaggaatacgataaaatccagatcgcggaccttatggaggaaaagtttcggggtgacgcaggcctagggaagctgattaagatttttgaggatattcctaccctcgaagacctggctgagaccctgaaaaaggaaaagctcaaagtgaagggacccgctctctcaagaaaaaggaagaaggaggtcgacgcgacttcccccgctcctagcacgagctccaccgtaaagacggaaggagcagaggcgactccaggcgctcagtag

SEQ ID NO: 191685 - DNA, 2202 bp, synthetic construct
  misc_feature 1..2202: note = Description of Artificial Sequence: Synthetic coding sequence
  source 1..2202: mol_type = other DNA
atgagcgtgaagatgggcaagaagtacaagaacatcgtgctgctgaagggtctggaggttatcaacgattatcactttcggatggtgaagagcctgctgtccaatgatctgaaattgaacctgaagatgcgcgaagagtacgacaagattcagatagctgatctgatggaggaaaaatttcgcggggatgcaggcctgggcaaactaataaagatcttcgaagatatacctaccttggaggatcttgcagaaaccttaaaaaaagagaaattaaaagttaaaggcccagccctgagcagaaagagaaagaaagaggtggatgctaccagccccgcccccagtacgtcatctactgtgaagactgaaggtgccgaagccacccccggggctcagaatccgaagaccgtagctaagtgtcaagtcactccgaggagaaatgtgctgcagaaacgcccagtgattgtgaaggtgctttccacgaccaaacctttcgagtacgaaacccctgagatggaaaaaaagatcatgttccacgcgactgtcgccactcagactcagttctttcacgttaaagtgttgaacaccagtttgaaggagaagtttaacggaaaaaaaattattattattagcgactatctcgagtatgacagcctgctcgaagtcaacgaggaatctaccgtttccgaagccgggcccaatcagacatttgaagttccgaataaaataataaatagagccaaagaaacactgaaaatcgatattctccataagcaggctagtggtaatatcgtgtatggcgtttttatgctgcacaagaaaaccgtgaatcagaagacaacaatctatgaaatccaggatgatcgcggaaaaatggatgttgtaggaactgggcagtgccataacattccttgcgaggagggggataagttgcagttattctgctttcgactgcgaaagaaaaatcagatgagcaaacttatctccgaaatgcacagtttcatccaaattaaaaagaagactaacccccgaaacaatgatcccaagtctatgaagctccctcaggagcaaaggcagctcccatacccttcagaagcttccaccaccttccccgagtcacacctgcgcacccctcaaatgccaccgacgaccccttcctcaagctttttcactaaaaagtcagaagataccatctcaaaaatgaatgacttcatgaggatgcagatccttaaagaaggctctcactttcccgggccctttatgacaagcataggccccgcagagtcccaccctcacaccccccaaatgcccccatctaccccaagctcctcctttcttacaaccaaaagcgaagatacaatttctaagatgaacgactttatgcggatgcagatccttaaagagggcagccactttccaggaccatttatgactagtattgggccagctgagagccacccccacacgcctcagatgcctccttcgactccaagctcctctttcctgacaacactgaaaccaagactgaagactgagcccgaagaagtatcgattgaagactccgcccagtccgatctgaaagaggttatggtgctgaatgcaacagagtcttttgtgtacgaaccaaaagagcagaagaaaatgtttcatgctaccgtcgctactgagaatgaggtgtttagggtgaaggtgtttaacatcgacctgaaggaaaagttcacaccgaagaagataattgctattgctaactatgtgtgtcggaacggtttcttagaagtttatccatttacactggttgctgacgttaacgctgatcggaacatggaaatcccaaaaggtcttataagatcagccagtgtcacacccaagattaaccaactgtgcagccagactaaaggttccttcgtgaatggtgtgttcgaggtccacaaaaagaacgtgaggggtgaatttacctactacgaaatacaggataatacgggaaaaatggaggtggtagtccacggaagactcaccacaatcaattgtgaggagggcgacaagctgaaactgacttgttttgagctggccccaaagagcgggaacaccggggagctccggagtgtgatacactcccatattaaagtcattaagaccagaaaaaataaaaaagatattctgaatccagactcctcgatggagaccagtccggacttctttttttag

SEQ ID NO: 191686 - DNA, 543 bp, synthetic construct
  misc_feature 1..543: note = Description of Artificial Sequence: Synthetic coding sequence
  source 1..543: mol_type = other DNA
atgggcaagaagtacaagaacatcgtgctgctgaagggcctggaggtcatcaatgactaccacttcaggatggtgaagagcttactgtctaacgacctgaaactcaacctgaaaatgcgtgaagagtacgacaaaatacaaatcgccgatttaatggaagagaagttccggggtgacgctggtttgggcaaactcattaagattttcgaggatattcctaccctcgaggacctggccgagactctcaagaaggagaagcttaaggtgaagggccccgcgctctccaggaaacgaaagaaagaggtagatgccacaagtcctgctcccagcacatcaagcactgtcaagaccgaaggcgccgaggccactcctggtgcgcagaaaagaaagaagagtacaaaagaaaaagcagggcctaaagggtccaaggttagcgaggagcagacccaacctccgagcccagccggggccgggatgagcaccgctatgggccggagccccagccccaagaccagcttatcagcacctcccaacagctcatag

SEQ ID NO: 191687 - DNA, 1485 bp, synthetic construct
  misc_feature 1..1485: note = Description of Artificial Sequence: Synthetic coding sequence
  source 1..1485: mol_type = other DNA
tgaagcaccgagaaccccaagaccgtggccaagtgccaggtgacccctcggcgcaatgtcctccagaaaagacctgtcatcgtgaaggttctctcaaccacaaagccgtttgagtatgaaacccccgagatggagaaaaaaattatgtttcacgccacagtagcaacacaaacacagttcttccatgtaaaggtgctcaacacgtccctgaaagagaagttcaatggcaagaagatcataattatatctgattacctcgagtacgactcactgctagaagtcaacgaggaaagcactgtttccgaagccgggcccaatcagacattcgaggtccccaacaaaatcatcaacagggccaaggagactctcaaaattgatatcctccataaacaggcctctgggaatatcgtttacggggtgtttatgctccacaagaagaccgttaatcagaagacaaccatatatgaaatccaggatgaccgcggcaagatggacgttgtgggtacaggacagtgccacaacattccgtgcgaagagggagacaagctgcaacttttttgcttcaggttacggaaaaagaatcagatgtccaagcttatatccgaaatgcactcctttattcagattaaaaaaaaaaccaacccacgcaacaatgacccgaaaagcatgaaacttccccaggaacagcggcagctcccttatccaagtgaggcttcgaccacatttccagagagccacttgcgtaccccccagatgccgccaacaacaccctcgtctagtttcttcacaaagctgaaaccccggttaaaaacagaacccgaagaagtgagtattgaggatagtgcacagagcgacctcaaggaggtgatggtcctcaacgctacagagagcttcgtgtatgaacctaaagagcagaagaaaatgttccacgcaaccgtcgccaccgagaatgaagtgtttcgggtgaaagtgtttaatatagatttgaaggaaaagttcacacctaagaaaataatcgccattgctaattacgtatgtcgaaatgggtttttggaagtgtacccgttcaccttggtggctgacgtaaacgccgatcgcaacatggaaatccccaaggggttgataagaagcgcttcggtcactcctaaaataaaccagctctgcagccagaccaagggctctttcgtgaacggtgtgtttgaggttcacaaaaagaatgtgcgtggcgagttcacttactatgagattcaggacaataccggcaaaatggaggtggtggtgcacgggcgcttgaccacaattaattgtgaagaaggcgacaagctgaaacttacctgctttgaactggctcccaaatctgggaatactggggaactccgaagtgtgatccactcccatatcaaggtgatcaagactcggaaaaacaagaaggatatcttgaaccccgacagcagtatggagacctcccctgatttctttttctag

SEQ ID NO: 191688 - DNA, 753 bp, synthetic construct
  misc_feature 1..753: note = Description of Artificial Sequence: Synthetic coding sequence
  source 1..753: mol_type = other DNA
atgaccctgagccccctgctgctgttcctgccccccctgctgctgctgcttgatgtgcctactgcggccgtacaggccagccctctgcaggctctggatttttttggtaatgggcccccagtgaattataagaccgggaatttgtatctgagagggccgctgaagaaatccaatgctcctttggtgaacgtgactctatactacgaagccctgtgcgggggttgtagagccttcttaattagggagctgttcccgacatggttattggtcatggagatacttaacgtgacgcttgtcccttacgggaatgcccaagagcagaacgtctccggcagatgggagtttaagtgccagcacggcgaggaggaatgcaagtttaacaaagttgaagcctgtgtgttggacgagctcgatatggaactcgcttttttgaccatagtgtgcatggaggagttcgaagatatggaaagaagcctgcctctgtgcctgcagttatatgcccccggcctgtcacccgacacaatcatggaatgtgcaatgggcgatcggggaatgcagctgatgcacgctaacgcccaacgaacagacgcgttgcagcctccacacgagtacgtaccttgggtcaccgtaaacgggaagcccctagaagatcagacacagcttttgacattagtctgccagctgtaccagggcaagaagccagacgtttgcccgtcttcaaccagctctcttcgctcagtttgctttaaatag

SEQ ID NO: 191689 - DNA, 588 bp, synthetic construct
  misc_feature 1..588: note = Description of Artificial Sequence: Synthetic coding sequence
  source 1..588: mol_type = other DNA
atggccctgctgttccccctgctggccgccctggtgatgaccagctactctcccgtcggcagtttagggtgtgacctcccccagaaccatggtctgctcagcagaaatactttggtcctcctgcaccagatgcgcagaatcagtccattcctgtgcctgaaggaccgaagagacttcaggttccctcaagagatggtgaaaggaagtcaacttcaaaaagcccacgtcatgtccgtgttgcacgaaatgctacagcagatattctccctgttccacactgagcgctccagtgcagcctggaacatgaccctcttggatcaactacacacaggcttgcatcagcagctacagcaccttgaaacctgcctcttgcaagtggtgggggagggtgagtccgccggagccataagctcacccgcattaactctgcgccgctattttcaaggcattagggtttatctgaaagagaagaagtacagcgattgtgcttgggaagtggtacgaatggaaattatgaagagtctattcctgagtacaaacatgcaagaaagactgcgttcaaaagatcgagatctagggtctagctag

SEQ ID NO: 191690 - DNA, 861 bp, synthetic construct
  misc_feature 1..861: note = Description of Artificial Sequence: Synthetic coding sequence
  source 1..861: mol_type = other DNA
atgagcgcccccctggacgccgccctgcacgccctgcaggaggagcaggctcgtctgaagatgaggctgtgggacctccagcaacttcgaaaggagttaggtgattctccgaaagacaaggtgccgttcagtgtgccaaagattcctctagtgtttaggggacacacccagcaggatccggaagtgcccaagtcattagtcagtaatcttaggatccactgcccattgctggcaggaagcgccctcataacttttgatgaccctaaagtggcagagcaggtgctgcagcaaaaagaacataccataaacatggaggaatgccgtttacgagttcaggtccagccactagaacttcctatggtgacgacaattcagatgagcagccagctaagcggcaggagagttcttgttaccgggtttccggccagcctcagacttagcgaagaagagctcctggataaactggagatctttttcggtaaaacacgaaatgggggcggtgatgtagacgtcagggaactgcttcccggctccgtgatgctgggtttcgcacgcgacggcgtggcccagagactgtgtcagatcggacaatttacagtgccacttggcggtcagcaagtgccgctgagggtcagcccatatgtgaacggtgagatacaaaaagctgagatccgaagtcaacctgttccccgaagtgtcctcgtgctgaacatcccagatattctcgatggccccgagctccatgatgtgctagagattcactttcaaaagcctactagaggcggaggggaggtggaagcgctgactgtcgttccccagggccaacaaggactggcggttttcacaagcgaatctggatag

SEQ ID NO: 191691 - DNA, 867 bp, synthetic construct
  misc_feature 1..867: note = Description of Artificial Sequence: Synthetic coding sequence
  source 1..867: mol_type = other DNA
atgagcgcccccctggacgccgccctgcacgccctgcaggaggagcaggccagactcaaaatgcgactctgggacttgcagcaactgaggaaagaactcggcgatagccccaaagataaggtacctttcagcgtgccgaagattccccttgtcttcagagggcatacacagcaggatcccgaggttccaaagtcattagtatctaacctcagaatccattgcccgttattggccggatctgcccttatcacgttcgatgaccccaaggtggccgaacaggtgctccagcagaaggaacatactatcaatatggaggagtgtaggctccgggtacaggttcagccgttggaactccccatggtcacaaccattcaggtgatgatgtccagccaattaagcggtcgtagagtccttgtcacggggttccccgcaagtttgcggttgagtgaagaggaattgttggacaaactcgaaatcttcttcggtaaaacccggaacgggggcggagacgtagatgttcgagaacttctgccagggagcgttatgttggggtttgcccgcgatggagtggctcagagattgtgccaaatcgggcaattcactgtgccgctgggaggccaacaagtacccctgagagtcagcccctacgtgaacggagagatccagaaggctgaaatcagatcccagcccgtccctaggtctgtattagtcttgaatattcctgacatcctggatggtcccgaattgcatgacgtcctcgaaatccactttcaaaaaccaacacgaggcggcggcgaagtggaagctctcacagtggtcccgcagggccaacaaggcctcgctgttttcacttctgagagcggatag

SEQ ID NO: 191692 - DNA, 1335 bp, synthetic construct
  misc_feature 1..1335: note = Description of Artificial Sequence: Synthetic coding sequence
  source 1..1335: mol_type = other DNA
atggccgtgaccacccggctgacctggctgcacgagaagatcctgcaaaatcacttcgggggtaaacggctgtctctactgtacaagggatctgtacacggcttccgcaacggggtcctcctggatcgatgctgtaaccagggtccaactctaactgtgatctatagcgaggaccatatcataggggcttatgcggaggagtcataccaagaggggaagtatgcctccattattctcttcgccctccaggataccaaaatctccgagtggaaactcggcctttgcactcccgaaaccctgttttgttgtgacgtgactaaatataattccccaactaattttcagatcgatgggagaaaccgcaaggttataatggatttaaaaactatggaaaacctcggcctcgctcagaactgcaccatcagtatacaggactatgaggtctttcggtgtgaagattctctggatgaacgaaagatcaaaggggttattgagctgcgaaagtcattgttgtctgccctgcggacatatgagccatacggaagcctcgtacagcaaattcgtatcctgctgctaggccctatcggagctgggaagtcaagctttttcaatagcgtccgatcagtgtttcaaggccacgtgacccaccaggcactggttggtaccaatacaacaggaatatctgaaaagtatcggacatacagcattcgcgacgggaaggatgggaagtacttgcctttcatcctgtgcgattccctaggactcagcgagaaagagggcggtctgtgccgagatgacattttctatatcctgaacggcaacatccgtgatagataccagttcaaccccatggagagcatcaagctaaatcaccacgattatatcgacagtcccagtctgaaggataggatccattgtgtggccttcgtcttcgatgcgtctagtatccagtatttctccagccagatgatcgtcaaaatcaagcggattcggcgcgaactcgtaaatgcaggcgttgtgcatgttgcattgctcacgcacgtcgattcaatggatttgatcaccaagggcgacctgattgagatcgaaaggtgcgaaccagtccggagtaagctggaagaggtccagcgcaaactgggcttcgcgctctcggatattagcgttgtcagcaattattcatctgagtgggagctcgacccggtgaaggacgtcctcattctgtcagctcttagaagaatgttgtgggctgcagacgatttcctggaggacttgccgtttgaacagattggaaatctaagggaggaaattatcaattgcgctcaggggaaaaagtag

SEQ ID NO: 191693 - DNA, 588 bp, synthetic construct
  misc_feature 1..588: note = Description of Artificial Sequence: Synthetic coding sequence
  source 1..588: mol_type = other DNA
atggacctgaagaccatggagaacctgggcctggcccagaactgcaccatctccattcaagactatgaggtctttaggtgtgaggattctctcgacgagaggaagataaaaggcgtaattgagctcaggaagagcctgcttagcgccttacggacatatgaaccgtacggtagcctcgtccagcagatccgcatactcctgcttggaccgatcggggctgggaaaagctcttttttcaattctgtgagatcagtgtttcaggggcacgtcacacaccaggcgctggtgggcactaacaccacagggatcagcgaaaaatacagaacttactccatacgggacggaaaggacgggaagtacctgccatttattctttgtgattcgctaggtttgtctgaaaaggaaggggggctttgtcgagatgacattttctatatcctcaacgggaatatacgagataggtaccagttcaatcccatggagtctatcaagctcaaccaccacgattacatcgatagcccatccctaaaagatcggatacactgtgtcgccttcgtgtttgacgcgagcagcatccagtacttctag

SEQ ID NO: 191694 - DNA, 231 bp, synthetic construct
  misc_feature 1..231: note = Description of Artificial Sequence: Synthetic coding sequence
  source 1..231: mol_type = other DNA
tgactgagcgacatcagcgtggtgagcaactacagcagcgagtgggaacttgacccggtcaaagacgttctgattctttccgccctgcgcaggatgttgtgggcggccgatgacttcttagaggacctaccatttgaacagatcggccgttggttcggcggggtggaggcctggaagcgctctggaaatctccgagaggaaattataaattgcgcccaggggaagaaatag

SEQ ID NO: 191695 - DNA, 390 bp, synthetic construct
  misc_feature 1..390: note = Description of Artificial Sequence: Synthetic coding sequence
  source 1..390: mol_type = other DNA
atggagagcatcaagctgaaccaccacgactacatcgacagcccctccctaaaggacaggatccattgtgtggccttcgtcttcgacgcatccagcatccagtacttcagcagtcaaatgatcgtcaaaatcaagcggataagaagagagctggtgaacgcaggcgtggtgcatgtggccctcttgacccacgtcgactccatggacctgatcactaaaggagatctgattgagattgagcggtgtgaaccagttaggagtaaagtcatgaatgatgcgctgcgtaaacatatcttttgggggatgttgcttcagtctcataccagtgtctacaagaataaaaacaaacaactgctgggcctgagacgcataacgaaattattgaaatag

SEQ ID NO: 191696 - DNA, 585 bp, synthetic construct
  misc_feature 1..585: note = Description of Artificial Sequence: Synthetic coding sequence
  source 1..585: mol_type = other DNA
atgctgtgcgacaccatgggcctggacggcgccgagggcgccggcttgtgtatggatgacatacctcacatactcaaaggatgtatgccagatcgttaccagttcaacagtcgcaaaccaatcacgcctgaacacagcactttcatcacatcgcccagtctgaaggaccgcatccattgcgtcgcgtacgtactggatataaattcaatcgacaacttatactcgaagatgcttgccaaggtcaagcaggtgcataaggaggtgctgaattgtggtatcgcctatgttgcactgctcaccaaagtagatgactgcagtgaggtgttacaagataattttctgaacatgtctagatcaatgacatcacagagccgcgtcatgaatgtccacaagatgttgggcataccaatttctaatattctcatggtcggaaattatgcctcggatctggagcttgatccaatgaaagatatactcatcctctccgctctgagacagatgcttagagctgccgacgactttttggaggatctgccactggaggaaacgggagccattgagcgtgcgctccagccatgtatctag

SEQ ID NO: 191697 - DNA, 1359 bp, synthetic construct
  misc_feature 1..1359: note = Description of Artificial Sequence: Synthetic coding sequence
  source 1..1359: mol_type = other DNA
atggaggtgaccacccggctgacctggaacgacgagaaccacctgcggaagctgcttggcaacgtgagcctctcactgctctacaagagcagcgtacatggcggatccattgaggacatggtggagcggtgctcgcggcaaggatgtaccattactatggcctacatagattataatatgattgtggctttcatgctcggcaactatattaatttgcacgaatcctcaaccgaaccaaatgatagcctgtggtttagcctgcagaaaaagaatgacaccacagagattgaaactttgttgctaaatactgcccccaagatcattgacgagcagctggtctgtcgactatccaagaccgacatttttatcatttgtcgtgataataagatctacttggataaaatgatcacacggaacttaaaactgagattctatgggcatcggcagtaccttgaatgtgaggtctttcgcgtggagggaatcaaagacaacctggacgatatcaagagaattataaaagctagggaacaccggaatagattgttagctgatattcgcgattatcgaccctacgcggatttggtgagcgaaatacgcattctcttagtggggcctgtggggagtggaaagagtagcttttttaactctgtgaagagcattttccatgggcacgtgactggacaggcagtggtcggcagcgatattacttcaattaccgagaggtacagaatttactccgtaaaggacggaaagaacggaaagagtctgccatttatgctttgtgatacaatgggacttgacggcgcagaaggagctgggctttgcatggacgatatacctcatattctcaaaggctgtatgcccgataggtatcaattcaactcccgaaaacccatcactcctgaacattctaccttcattacctcaccgtcactcaaagacagaatacactgtgttgcctatgttcttgacattaactccatcgacaacttgtactcaaaaatgctagccaaggtcaagcaggtgcataaagaggtgctgaattgcggcatagcttacgtggccttgttgactaaggttgacgattgctctgaggtcctccaggataacttcctcaatatgtctcgctccatgacctcacagtccagagttatgaacgtacataaaatgcttggcatccctatctcaaacatcctgatggtgggtaattacgctagcgatctagaactcgatcctatgaaagacatcctgatcctgtccgccctccgtcagatgctgagggcagccgatgatttcctcgaagacttaccccttgaggaaaccggcgcgatcgagcgagcgctgcagccatgtatctag

SEQ ID NO: 191698 - DNA, 294 bp, synthetic construct
  misc_feature 1..294: note = Description of Artificial Sequence: Synthetic coding sequence
  source 1..294: mol_type = other DNA
atggaggtgaccacccggctgacctggaacgacgagaaccacctgcgcaagcttcttggtaatgtcagcttaagcttgctgtacaaatcgtccgtgcacggaggatccattgaagatatggtcgagaggtgtagcagacaaggttgtacaatcacaatggcctacatcgattacaacatgattgttgcattcatgcttggaaattacataaacttacatgagtcgagcacggagccaaatgattcactttggttttccttgcagaaaaagaacgacaccaccgaaatcgaatag

SEQ ID NO: 191699 - DNA, 1437 bp, synthetic construct
  misc_feature 1..1437: note = Description of Artificial Sequence: Synthetic coding sequence
  source 1..1437: mol_type = other DNA
atgagcaccaacggcgacgaccaccaggtgaaggacagcctggagcagctgaggtgtcacttcacttgggagctgtcaatcgatgacgacgagatgcccgatctcgaaaaccgggtgctagatcagattgagttcctggatacaaagtattccgttgggattcataacctgctcgcatacgtaaaacacctgaaggggcagaatgaggaggcgttgaaaagtctcaaggaggcggaaaatttgatgcaggaggagcacgacaatcaggctaacgtacggtccctggtaacctggggaaatttcgcctggatgtattaccacatggggaggctcgccgaagcgcaaacctacctggacaaagttgagaatatatgtaaaaaactgtcgaacccgtttcgctaccggatggagtgccctgagatagattgcgaggagggatgggctctgctgaaatgcggaggcaagaattacgaacgggctaaagcatgcttcgagaaagtcttagaagtggatccggagaaccccgagtccagtgccgggtatgcaatctctgcgtatagactcgatgggtttaaactggcaactaagaaccataaaccattctcactcttgcctctgcgccaggctgtgcgcctgaacccggataatggatacattaaagtgctgttggccttgaaactgcaggacgagggacaggaagccgagggagagaaatacatcgaagaggccctggcaaatatgagttcacagacctatgtattcaggtatgccgctaagttctatcgtcggaaggggagtgtggataaggcgctcgagctgctgaagaaggccctgcaggagacgcctacttccgttttgctgcaccaccagatcgggctctgttacaaagcacagatgatccaaataaaggaagccactaaaggccagccacgaggccagaacagagagaagctagacaagatgatacggtcagccatctttcattttgagtctgcagtggaaaaaaaacctacctttgaagtggcgcaccttgacctggctcggatgtatatcgaagcgggaaatcaccgcaaagctgaggaaaatttccagaaactcttatgtatgaaacctgttgtcgaagaaaccatgcaggacatccatttccactatggaagattccaggagtttcaaaaaaaatctgacgtcaatgcaatcattcattacctcaaagctattaaaattgagcaggcctccctgacacgcgataaatctattaactcccttaagaagcttgtgctccgcaaactacgccgtaaggcgttggatctggagtccctcagtctgctggggtttgtgtataaactagaggggaatatgaatgaggcgctggagtactacgagcgagcactgagattggcagccgatttcgaaaattcggtgcgccagggcccctag

SEQ ID NO: 191700 - DNA, 1344 bp, synthetic construct
  misc_feature 1..1344: note = Description of Artificial Sequence: Synthetic coding sequence
  source 1..1344: mol_type = other DNA
atgcccgacctggagaaccgggtgctggaccagatcgagttcctggataccaagtactcagtcggcattcataatctgctggcgtatgtgaaacacctcaagggccaaaacgaagaagcgttgaagagcttaaaagaagcggagaacctgatgcaggaggagcatgacaaccaagctaacgtccgctccctggtgacatggggcaatttcgcttggatgtactaccatatgggtcgcctcgctgaggctcagacctatcttgacaaggttgagaatatttgcaagaaattatcaaaccctttcagataccggatggagtgccctgagatcgattgtgaggagggatgggcattacttaaatgcgggggcaaaaactacgaacgtgccaaggcttgttttgagaaagttctggaggtggaccccgagaaccctgagagttcagcaggatatgcaattagcgcatatcgtttggacggctttaaactagcgacaaagaaccacaaaccatttagtttattaccactgagacaggccgtgcgactcaaccctgataatggctacattaaggtcttgctagcacttaaattacaggatgagggccaagaggccgagggagagaagtacattgaggaagctctggcaaatatgagctcccagacttacgtctttaggtatgctgctaaattttacagacggaaggggtccgtcgataaagcactggaactgctgaagaaggctctgcaggagacacccaccagcgttctgctccaccaccaaatagggctttgctataaagcacaaatgatccagatcaaggaggctacaaaaggtcagccgagaggtcaaaatagagaaaagctcgacaagatgatccgcagcgctatttttcactttgagtccgcagttgagaaaaaacccacattcgaggtcgctcatttggaccttgccaggatgtatatcgaggcgggcaatcaccgcaaggctgaagaaaatttccagaagctcttgtgcatgaagcctgtggtcgaggaaaccatgcaggacattcactttcactacgggaggttccaggaattccagaaaaaatccgatgtgaacgcgatcattcactatctcaaagctatcaagatagaacaagcaagtttgacacgagacaagtctattaatagtctcaaaaagctcgtactccgaaagctcaggaggaaagccctagacttagagtccttgagcctgctcggctttgtgtacaagctcgaaggtaacatgaacgaggcccttgagtattatgaacgtgccctgcgcctggccgctgattttgagaacagcgtgcggcagggaccttag

SEQ ID NO: 191701 - DNA, 1419 bp, synthetic construct
  misc_feature 1..1419: note = Description of Artificial Sequence: Synthetic coding sequence
  source 1..1419: mol_type = other DNA
atgagcgagaacaacaagaacagcctggagagcagcctgcggcagctcaaatgccatttcacgtggaacctgatggagggagagaactccttagacgactttgaggataaagttttctacaggaccgaattccagaatcgcgagttcaaggcaacaatgtgcaatctgctcgcttacttaaagcacctgaagggacagaatgaagcggctctagagtgcctgaggaaggctgaagaactgatccagcaagagcatgctgaccaggccgagatcagatctctcgtgacatggggaaactatgcttgggtgtactatcacatggggagactgtccgacgttcagatttacgtcgacaaagtgaagcacgtttgcgaaaagttctccagtccctataggatcgagtcgcctgaactggattgcgaggaaggctggacacgcttaaagtgtggggggaatcagaatgagagggcaaaggtttgtttcgagaaggcgctggagaaaaaacctaaaaacccagaatttacaagcggacttgctattgcttcgtatcggctcgataactggcctccctctcaaaatgccatagatcctctgcgccaggccatcaggctgaaccctgacaaccaatacctgaaagtcctgctagccctgaaactacacaaaatgcgggaggagggtgaggaagaaggagagggggaaaaactagtggaggaggctctcgaaaaggcacctggagtgactgacgtgttgagatcagccgctaaattctaccggagaaaagacgagcccgataaagctattgaactgttaaagaaggctttagagtatatccctaataacgcttacttgcattgccagattggctgttgctacagagctaaagtctttcaggttatgaacttgcgcgaaaacggaatgtatggcaagcggaaattactggagcttattggccacgccgtcgcccacctcaaaaaagctgacgaggcgaatgacaatctgttcagagtgtgctcaatcttggcctctctccacgctttggccgaccagtacgaggacgcagagtactatttccaaaaggagttctcaaaggagcttaccccagtggccaagcagttactgcacctacgatacgggaactttcaattgtaccagatgaagtgtgaagacaaggctattcaccacttcattgagggggtaaagataaaccagaaaagcagagagaaggagaaaatgaaggataagctccagaaaatagcaaagatgcggctgagcaaaaatggcgccgatagcgaagcattgcatgtgctggcctttcttcaggagctgaacgagaagatgcagcaggccgatgaggattctgagcgaggcctcgagagtggttcccttattcctagtgccagtagctggaatggtgaatag

SEQ ID NO: 191702 - DNA, 1356 bp, synthetic construct
  misc_feature 1..1356: note = Description of Artificial Sequence: Synthetic coding sequence
  source 1..1356: mol_type = other DNA
atgcccaagaacaagaagcggaacaccccccaccggggcagcagcgctggggggggtgggtctggagccgctgcggccaccgctgctacagctggagggcaacaccggaacgtgcagcctttttccgatgaagacgccagtattgagaccatgagccattgctctgggtactccgatcccagtagtttcgccgaggacgggcctgaggtgctggacgaggagggaacgcaggaagacctagaatacaaactgaagggcttgattgacctaacactcgataaaagcgccaaaacgaggcaggccgcacttgagggcattaaaaatgctctggctagcaagatgctgtacgaatttattctcgagagaagaatgacgttgactgacagcatagaaagatgcctgaaaaaaggcaaaagcgatgaacagagggcagccgcagcactagccagtgtgctctgcatccagctgggaccaggaattgagtcggaagagatacttaagaccctaggccctatcctgaagaagatcatttgtgacggcagtgccagcatgcaggccagacaaacctgcgctacttgctttggagtgtgctgttttatagcaacagacgatatcaccgagttgtatagtacgctcgaatgcttagaaaatatcttcaccaaaagctatttaaaggagaaagatacaacagtgatttgtagcacccctaacactgtattgcacatttcttccctcttagcgtggaccttactcctgacaatatgcccgatcaatgaggtgaagaaaaaactggagatgcacttccataaattaccaagtctcctaagttgtgatgatgtgaacatgagaattgccgctggtgagagtctcgcgctactgtttgagctggcaagaggaattgagtctgatttcttttatgaggacatggagagtttaacgcagatgctgcgcgccctggccaccgatggaaataagcaccgagcaaaagtagacaaacgcaaacagaggagtgtgtttcgcgatgtactgagagccgtggaagaacgcgactttcccactgaaaccatcaaattcggccccgagaggatgtacattgattgttgggttaagaagcacacatacgacacattcaaagaggttttggggagtgggatgcagtatcatctgcagtcgaacgagttcctgaggaatgtgtttgaactgggtcctccagttatgctggacgcagctaccctgaaaactatgaaaattagtagattcgagcgacacctctacaactcagctgcttttaaggctagaaccaaagcgcggagcaagtgtcgcgacaaaagagcagacgttggagagtttttttag

SEQ ID NO: 191703 - DNA, 1356 bp, synthetic construct
  misc_feature 1..1356: note = Description of Artificial Sequence: Synthetic coding sequence
  source 1..1356: mol_type = other DNA
atgcccaagaacaagaagcggaacaccccccaccggggcagcagcgcaggaggcggagggtctggcgcagctgccgctactgccgccactgccggcggtcagcacagaaacgtgcaacctttcagcgatgaggatgctagtattgagacgatgagtcactgcagcggttactctgatcctagtagcttcgccgaagacggccccgaagtgcttgatgaagaaggtactcaggaggaccttgagtacaagcttaaagggctgattgatttgaccctcgataagagcgccaagacaaggcaggccgccctggaaggaatcaaaaatgcgctggcttcaaagatgctgtacgagtttattttagaaaggcgaatgacattaaccgactctattgagagatgcttgaaaaaagggaagtcagacgaacagcgagctgcggctgccctggcgtcagtgctgtgcattcagttgggacctggtatcgagtctgaggagatcctgaaaactttgggacctatcctaaaaaaaattatatgcgacggatcggcatctatgcaggcgagacagacctgcgcaacctgctttggagtttgctgctttatcgccaccgacgacataacggagttatactcaaccctcgagtgcctggaaaacatctttactaagagctacttgaaagaaaaagatactaccgtcatttgttcgacccctaatactgttctccacattagcagcctgctagcttggacattactgctgactatctgccccattaatgaggtgaagaaaaaactggagatgcacttccacaagcttccctcgcttctttcatgcgacgacgtgaatatgagaatcgccgccggcgaatcccttgctctgttatttgaattggctaggggaattgaaagcgactttttctatgaagacatggagtcactgacacagatgttaagagcactggcaacggacggtaataagcacagagctaaagtggacaagagaaagcagcgcagtgtattccgagatgtgttgcgggctgtagaggaacgtgattttcctacagagaccatcaagtttggcccagaacgtatgtatatcgactgctgggtgaagaagcatacctacgatacttttaaagaagttctcgggtctggcatgcagtaccatctgcagtcaaacgagttcctccggaacgtgtttgaattaggcccccctgtgatgctggatgcggccactcttaagactatgaagatctcacgctttgaacggcacctttacaactcagcggccttcaaggcccgcacaaaggcacggagcaagtgtcgcgacaaaagggcggatgttggcgaattcttctag

SEQ ID NO: 191704 - DNA, 57 bp, synthetic construct
  misc_feature 1..57: note = Description of Artificial Sequence: Synthetic coding sequence
  source 1..57: mol_type = other DNA
atgcccaagaacaagaagcggaacaccccccaccggggcagcagcgcgggcggatag

SEQ ID NO: 191705 - DNA, 96 bp, synthetic construct
  misc_feature 1..96: note = Description of Artificial Sequence: Synthetic coding sequence
  source 1..96: mol_type = other DNA
atgcccaagaacaagaagcggaacaccccccaccggggcagcagcgctggcgggggcggaagtggtgctgccgccgcaactgctgctacagcttag

SEQ ID NO: 191706 - DNA, 189 bp, synthetic construct
  misc_feature 1..189: note = Description of Artificial Sequence: Synthetic coding sequence
  source 1..189: mol_type = other DNA
atgcccaagaacaagaagcggaacaccccccaccggggcagcagcgccggcgggggcggttcgggagccgccgcggctacggcagctacggctggaggacagcatcgaaacgttcagccattttctgatgaagacgcatcaatcgagacaatgagtcattgcagtgggtattccgaccctagcagttag

SEQ ID NO: 191707 - DNA, 1206 bp, synthetic construct
  misc_feature 1..1206: note = Description of Artificial Sequence: Synthetic coding sequence
  source 1..1206: mol_type = other DNA
atgagccactgcagcggctacagcgaccccagcagcttcgccgaggacggcccagaagtgctagacgaggagggcacacaggaggatctggagtataagcttaaaggccttatcgacctaacactcgataagtcagcaaaaactaggcaggctgctctggagggaattaagaatgctctggcaagcaaaatgctatacgagttcatcctggagcgtaggatgaccctgacagacagtatcgagaggtgcctgaaaaaagggaaatcggatgagcagcgagcagccgccgccctagctagcgtgttatgcatccagttggggcccggtattgagagcgaagagatcttgaagactctcggaccaatactcaaaaagattatctgcgacggaagcgcttctatgcaagctaggcaaacctgtgccacttgctttggcgtctgctgtttcattgctacggatgacatcacggaactctatagcacactagagtgtctggagaacattttcaccaagtcttacctcaaggaaaaggatactacagtgatctgttcaacgccaaatactgtgctacacatttcatccctcctcgcctggactcttttgctaaccatctgcccgatcaacgaggtaaagaagaaactggagatgcattttcacaaactcccgtcacttcttagctgtgacgacgttaatatgagaatcgcggcgggagaatctctcgcccttctgtttgagctcgccagaggcatcgaatcggacttcttttacgaagatatggaaagcctgactcagatgctgcgagcacttgccactgacggaaataagcatcgcgccaaggtggataagaggaaacaacgatccgtgttccgcgacgtcctccgagctgtggaggaacgagacttccccacagagaccatcaagttcggcccagagcggatgtacatcgactgttgggtgaaaaaacacacttatgacacgttcaaagaagtcttgggaagcgggatgcagtatcatttacagtccaatgaatttctcaggaacgtgttcgagctcgggcctccggtgatgctggatgctgccacccttaagacaatgaagatctccagattcgaacggcacctctacaattctgcagcttttaaggccagaactaaggcccggagcaagtgccgcgataagcgggcagacgtcggcgagttcttctag

SEQ ID NO: 191708 - DNA, 474 bp, synthetic construct
  misc_feature 1..474: note = Description of Artificial Sequence: Synthetic coding sequence
  source 1..474: mol_type = other DNA
atgcacttccacaagctgcccagcctgctgagctgcgacgacgtgaacatgcgcatcgccgccggtgagtcactggcattattatttgagctggcccgcggcatagagagcgatttcttctatgaggacatggaaagcctgacacagatgctgcgggccctggcgactgacggcaataaacatcgagctaaggttgataagcgcaagcaacgcagcgtgttccgcgatgtgctgagagccgttgaagaacgggactttcccacggaaactatcaagtttggcccggaacggatgtatatcgattgttgggtcaaaaagcacacttatgacaccttcaaggaagtcctcggttcaggtatgcagtatcacttgcagtcaaatgagttcttacggaatgtgtttgaactgggcccaccagttatgctggatgctgctacgctaaagaccatgaaaatctctagatttgaacggtag

SEQ ID NO: 191709 - DNA, 1827 bp, synthetic construct
  misc_feature 1..1827: note = Description of Artificial Sequence: Synthetic coding sequence
  source 1..1827: mol_type = other DNA
atgggccccaagaagagctggcggagccacttcttccccctgcccgaggtatggcttctgcttctcctgtcccaggcactgagcccgtcacacgggccacagacccaggcgggagtagggctggtctggagtgtcccactgccatcagctcttagaagtcaaagttgcctgggggccccactgagggatgctagtgagcttaccacggtgcatctatttcctacaagagggtggggggcgaggcgcgctctttgggtgcatagcagtgccagcgcctcctctgccgcgagccgcaggaggctgagagcccaggcctccggcatctcgagcttttcattggtcgacggaggggcacctagagaagatgggggagcgcgcggagtctggctgccttccagcggtcaggtgtccgctcagcgaacaggtcgccgtctggtcggcctggagcctacccctaccgggagtttgacaccgcggccacctagacccgtgcccggaatgccccgcgccaggaaggggaatacactgagaaagggcggacagagacggggcggtggggcacgttctagtgctcaggcggatagtggtagttccgatgacgaggctgcttccgaagcgagatctacagcatcagagtgccctagcctcctttctacaaccgctgaagactccctaggcggcgacgtcgtggacgagcaaggacagcaggaggatctcgaagagaagctgaaagaatatgtggattgccttacagacaagtccgcgaagacaagacagggagcactcgaaagcctgcggctcgcactggcatcgcggctccttccagactttctgttggagcgccggttgacactggccgatgcactggagaaatgtctgaaaaagggaaaaggcgaagaacaggccctggctgccgccgttcttgggcttttgtgtgtccagctggggcccggacccaagggagaagaattgttccatagtctgcagccccttctggtgtccgtactttcggacagtactgcatcacccgccgcccggttacactgcgcctcagcactcgggttgggatgttatgtggccgccgccgacatccaagacctcgtctcttgtctcgcctgcctcgagtctgtgttttctaggttctacggacttggaggcagttctacgagccccgtcgtgccagcttccctccacgggctattgtcagcagcactgcaagcatgggccttactgttaaccatctgcccctctactcagatcagccacatcctggacagacaactccccaggctcccccagctacttagcagtgaatctgtcaatcttcgcattgcagccggggaaaccattgcactcctctttgagctcgccagagatctcgaagaggagtttgtgtacgaagatatggaggcactgtgctccgtcctacgcaccctcgctacagattctaacaaatacagggcaaaggccgatagacgtaggcagagatctactttccgggctgtgctgcatagcgtagaggggggagagtgcgaagaggagatcgtgcgcttcggtttcgaagtactgtatatggactcttgggctcgccacaggatctacgcagcgttcaaagaggttctgggttcaggcatgcaccatcacctccaaaacaacgaactccttcgcgatatcttcggtctgggtcctgtcctgctgctggatgcgacagctctgaaagcatgtaaggtgccaaggttcgagaagcacctttataatgccgcggcctttaaggcaagaaccaaggcccgctcaagagtacgcgacaagcgcgctgacatcctgtag

SEQ ID NO: 191710 - DNA, 1329 bp, synthetic construct
  misc_feature 1..1329: note = Description of Artificial Sequence: Synthetic coding sequence
  source 1..1329: mol_type = other DNA
atgccccgggcccggaagggcaacaccctgcggaagggcggccagcgccgtgggggcggtgcccggagtagtgcacaggctgactctggctcctctgacgacgaggccgcaagtgaggcccgtagtacagcctccgaatgcccttcccttctcagcaccactgctgaggatagtctgggtggcgacgtggtggatgagcagggacagcaggaagatctagaggaaaagctcaaagaatacgtggactgcctcaccgataaatctgcaaaaacacggcagggtgccctagaaagtctgcgcctggccctggccagcaggctgctccccgacttcctcctcgagcgtcggctgaccctggcagacgctctcgagaagtgcctcaagaagggcaagggagaggagcaggcacttgccgctgctgtgctggggttattatgtgtacaactggggcccgggcctaagggtgaggagctctttcactctttacaacctctgttggtaagtgtgttatccgattctacggcatccccagccgcaagacttcattgcgcgtcagccctgggcctcggatgctatgtagcagcggctgacattcaggacctggtttcctgtctggcatgtctcgagagcgtgttttcacgtttctacggcttaggcggaagctccaccagtcccgtggtgcccgctagcttacacggccttctgtctgctgcgcttcaggcctgggccttactgttgaccatctgcccgtctacccaaattagccatatcctggaccggcagctgcctagacttccccaacttctgtcaagtgagtcagtgaatctgagaatcgcagccggtgagactattgcattgctgtttgagctcgcgagagatttggaagaggaatttgtttatgaggacatggaagccctgtgctccgtgctccgcactttagccaccgactcaaacaagtatcgcgctaaggcagatcggaggcggcagcgctctacctttcgtgctgtactccactctgttgaaggcggcgagtgcgaagaagaaatcgtccgttttggctttgaggtgctctatatggactcctgggctcggcatagaatatatgccgccttcaaagaagtgctgggctcagggatgcatcatcatttacagaacaacgagctgcttcgcgatatattcggtctgggtcctgtgctgctcttggatgctactgctttgaaagcttgcaaagtgccaaggttcgagaagcatctctataacgccgctgccttcaaggctaggaccaaggctcgtagtcgggtaagagataaaagggcagatatactctag

SEQ ID NO: 191711 - DNA, 1521 bp, synthetic construct
  misc_feature 1..1521: note = Description of Artificial Sequence: Synthetic coding sequence
  source 1..1521: mol_type = other DNA
atggcctggaacagccccagccggcggcccgtgtggcagggcggcgctcctagggaagacggcggcgccagaggcgtgtggctcccgtcttctggccaggtgtccgctcagcgaacgggcagacgacttgtcgggctagagcctacccctactggttcactgacgccacgcccccctagacccgtccccggcatgcctagggccagaaaaggaaacaccctcagaaagggtgggcagaggcgaggggggggcgcccgtagcagcgcgcaagcagattccggtagcagtgacgacgaggccgcatctgaggctaggtctaccgccagcgaatgcccatctctgttatcaactacagccgaagacagtctcggtggtgacgtggttgacgaacagggccagcaggaagacctggaggagaaactgaaggagtacgtggactgtcttaccgataagtctgccaagacaagacaaggcgcacttgagtcccttcgactcgcccttgcaagtaggctgctgcctgacttcctcctagaacgccgtctgaccctggccgatgccctggagaaatgcctcaagaaggggaagggtgaagagcaggccctggccgccgccgtcctgggccttctgtgcgtccaacttgggccaggcccaaaaggtgaggaactctttcactcgttacaacctctgcttgtttctgtgttgagcgattctacagcgagcccggcagcccggctgcactgcgcaagcgctctagggttgggatgctacgttgctgctgctgacatacaggacttggtgtcctgtcttgcctgccttgaaagcgtcttttctcgattctacggactgggagggtcatctacctccccagtggtccccgcgtcattgcacgggctgctgtccgcagctctccaggcctgggcactcctcctgactatttgcccttctactcagatctcccacatcctggaccgccaactcccccggctcccgcagctactcagctctgaatcagtgaacctgaggattgccgccggcgaaactatcgccctattgtttgagctggcccgagacctggaggaggaatttgtttacgaggacatggaagcactctgctccgtgctgcggacacttgcaaccgattcaaataaataccgcgctaaagccgacagacgacgccagaggagcacattcagggccgtgctacactccgtggaagggggcgagtgcgaggaagaaatcgtgagattcggctttgaggtgctttatatggactcctgggctaggcacaggatatacgcagcctttaaggaggttctgggaagcggaatgcatcatcacctgcaaaataacgagttgctgcgcgacatattcggcctgggaccggtcttgctgctggatgcaacagcgctgaaagcatgtaaggtgccaagatttgagaagcatctctacaacgctgcagcattcaaggcacgcacgaaggccagaagtagagtgagggataagcgggcagacatactctag

SEQ ID NO: 191712 - DNA, 1329 bp, synthetic construct
  misc_feature 1..1329: note = Description of Artificial Sequence: Synthetic coding sequence
  source 1..1329: mol_type = other DNA
atgccccgggcccggaagggcaacaccctgcggaagggcggccagagaagaggggggggagcgaggagcagtgcacaggccgacagcgggtctagcgacgatgaggccgcaagcgaggccaggagtacagcatctgagtgtccgagcttactgtctaccaccgcagaggactccctgggaggagacgtggttgatgaacagggccaacaggaggatctggaagaaaagctgaaggaatacgttgactgtttgaccgacaagtctgcaaagaccagacagggtgccctcgaatctttacggcttgcacttgccagccggctgctgccggattttctgctggaaagaaggctcactttggccgatgcattggaaaagtgcttaaagaagggtaagggggaggaacaggctctggcggcagccgtgctcggcctactgtgcgtgcagctaggacctggaccaaaaggcgaggaactgtttcattctctgcagcccctcctcgtgagcgtcttaagtgacagcacagcttcccctgcagctagattacattgcgcttccgctctcggcctgggctgctatgtagctgcggctgatattcaggacctggtgtcctgtctcgcatgtctggagtctgtattttcccgattttatggattaggtggctcaagtaccagccccgtcgtgccggcgagcctgcacggcttgcttagcgccgcactgcaagcctgggcgttactcctgaccatatgcccttccacacagatcagtcacattctggatcgccagttgcccaggctgccacagcttctgagtagcgaatcggttaatctccgcatcgcggcaggagaaaccatcgcactgttgttcgaattggcacgcgacctcgaggaggagtttgtgtatgaagatatggaggcgctgtgctcggttttgaggacactggctacagattccaataagtaccgcgctaaagcggatcggagaaggcaaaggagcaccttcagggctgtcctgcatagtgtggagggtggtgagtgcgaggaggaaatcgtcaggttcggattcgaagtgctgtatatggattcttgggctcgacataggatctacgcagcctttaaggaggtacttgggtcaggcatgcatcatcacctgcagaataatgaacttctgcgagatatttttggtctgggcccagtgctcctgttagatgccaccgctctgaaggcttgtaaggttccccgattcgaaaaacatctgtacaatgcggctgccttcaaggcacggactaaagcccgtagtagagtgagggataaacgggcggatatactgtag

SEQ ID NO: 191713 - DNA, 1713 bp, synthetic construct
  misc_feature 1..1713: note = Description of Artificial Sequence: Synthetic coding sequence
  source 1..1713: mol_type = other DNA
atgaccctgctgtggtgcgtggtgagcctgtacttctacggcatcctgcagagcgatgcttcggaaaggtgtgacgactggggactggacaccatgaggcagatccaggtgtttgaggatgagccagcgcgtattaagtgtccactgttcgaacattttctcaagtttaattactccacagcccattctgcggggctcacattgatctggtactggacccgccaagatagagatctggaggagcctattaatttccgacttcccgagaatcggatcagtaaagagaaggatgtgctgtggttcaggcctacactgctgaacgataccggaaattatacttgcatgttacgcaatacaacttattgctccaaggtggcatttcctctcgaagtggttcagaaggatagctgcttcaattctcccatgaaacttccggttcacaagctctatatcgagtatggaatacagcggattacttgcccaaacgtggatggatattttccttcttcagtcaaacctaccatcacttggtacatgggttgttacaaaatccaaaacttcaataacgtgatccccgagggcatgaacctgagcttcctcattgctcttatttctaacaacggaaactacacctgcgttgtgacatatcctgaaaatggtaggacctttcatttgacacgaaccctcactgtgaaggttgttgggtctcccaagaatgctgttccaccagtgattcactccccaaatgaccacgttgtgtatgagaaggagcctggcgaagagctcctgatcccctgcaccgtttacttttcttttttaatggattctaggaacgaagtgtggtggacaatcgatggtaagaaaccagacgacattaccattgatgtaactattaacgagagcatctctcacagtagaaccgaggatgaaacaagaacacagattctgtccattaaaaaagtaacctctgaagacctgaaacgcagctacgtttgccacgcccgcagtgcgaagggtgaagtggccaaagcagctaaagtaaagcagaaggtccccgcccccaggtataccgtagaactggcgtgtggttttggcgctactgttcttctggtggtgattctgattgtggtctatcacgtgtattggttggagatggtgctgttctaccgagcccattttgggactgatgagacaatcttagatggaaaggagtatgatatttatgtgtcatatgcccggaacgccgaggaggaagagtttgtgctcttaacactgcgcggtgttttggaaaacgagttcggatataagctgtgtatcttcgatcgcgactcattaccaggcggaattgtgaccgacgaaacactgagtttcatccaaaaaagccggaggttgctggtcgttcttagcccaaattatgtcctgcagggaactcaggcgctccttgagctaaaagctggactggaaaatatggcctctcgtggcaatataaacgttatcctcgttcagtacaaggcagtgaaagagaccaaggtcaaggagttaaagcgagctaagaccgtcctgactgtgattaaatggaagggagagaagtctaaatatccccaggggcgattttggaagcagctgcaggttgctatgcccgtgaagaaaagtcccagaaggagctcctccgatgagcaaggcctctcttattctagtctcaagaatgtgtag

SEQ ID NO: 191714 - DNA, 2064 bp, synthetic construct
  misc_feature 1..2064: note = Description of Artificial Sequence: Synthetic coding sequence
  source 1..2064: mol_type = other DNA
atgaccctgctgtggtgcgtggtgagcctgtacttctacggcatccttcagtcagacgccagcgagcggtgtgacgattgggggctggatacgatgagacaaattcaagtgtttgaggacgaacccgcccggatcaaatgtccgctgttcgagcactttctgaaatttaattatagcactgcacacagcgccggcttaacactgatctggtattggactcggcaggatagggacctggaagagcctattaatttccggctgcctgagaaccgcatttctaaggaaaaggacgtcctgtggtttcgcccgactctactgaatgatactggcaattacacttgtatgcttcgaaacaccacttattgcagcaaggttgcttttcccctggaggtggtgcaaaaggacagctgttttaacagccccatgaagctccctgtgcataagctatatatcgagtacggaatccagcgcattacctgtccaaacgtagatggctacttccccagctccgtgaaacccacaataacctggtacatgggttgctataagatacagaactttaataatgtgattcctgaagggatgaatctgagttttcttatagctctgatcagtaacaacggaaactatacgtgtgttgttacatatccagaaaatggaagaacgttccacctgactcgaacattaaccgtcaaagtcgtgggatcacccaagaacgctgtaccccctgtgattcactcccccaatgaccatgtcgtgtatgaaaaggagcctggagaggaactcctgattccctgcaccgtgtatttctcgtttttgatggacagtcggaacgaagtgtggtggaccatcgatgggaagaaaccagacgacatcactatcgacgtcaccataaatgagtccatttcacactcaaggacagaggatgagacccgcactcagatcttgtcaataaagaaagtgacctcagaagacctcaaaaggtcatatgtgtgtcacgcccggtcagctaagggggaagtagctaaagccgctaaggtgaaacagaaggtacccgcacccaggtacactgtggaacttgcgtgcggattcggtgcgactgtgctactggtggtcattctgatagtcgtgtatcacgtatattggcttgaaatggtgttgttttacagggcccacttcggtactgacgagaccatcctggacgggaaggagtatgatatttacgtatcatacgcccgcaatgctgaagaagaagagtttgtgcttctcactctacgcggggtcctcgaaaacgaatttggctataaactctgtattttcgacagggattcccttccaggcggcaacacagtagaagccgtgttcgactttatccagcgaagtcgcaggatgattgtggtactcagtcccgattacgtgaccgaaaaatccatttctatgctagaatttaagcttggggttatgtgccaaaactcgattgccacgaagttgatagtagtggaatacagaccgctcgagcacccgcaccccgggatcctccaactgaaggagtctgtaagcttcgtctcatggaaaggagagaagagtaagcactcaggctcaaagttttggaaagctctccggctcgcactgcctctgcgctctctgtctgcatcttctgggtggaacgagtcttgcagtagccagagtgacatctccctcgaccacgttcagcgccgacgctcccggctcaaagagccgccagaactgcagtcgtccgaaagagcagctggatcccctcctgctcccggtacaatgtctaagcatcgaggcaagtctagcgccacatgtcgatgttgcgtgacttactgtgaaggtgagaatcacctgaggaataaatctagagctgaaatccacaaccagccacagtgggaaacacacttatgcaaacctgtgccccaggaaagtgagacgcagtggatccagaatggaacaaggctggagccacctgccccccagatatctgcgctggcccttcatcatttcactgacctttctaacaataacgacttctatatcttatag

SEQ ID NO: 191715 - DNA, 1713 bp, synthetic construct
  misc_feature 1..1713: note = Description of Artificial Sequence: Synthetic coding sequence
  source 1..1713: mol_type = other DNA
atgaccctgctgtggtgcgtggtgagcctgtacttctacggcatcctgcagagtgacgcatctgaacgatgcgatgactggggactggatacgatgagacagatccaggtttttgaggatgaaccagcaaggatcaaatgtccactgtttgaacattttcttaagttcaactactcaaccgcccactccgccgggctcacacttatctggtactggactcggcaggatcgggacctcgaggagcccataaattttaggctgcccgagaatcgaatctccaaagagaaggatgtcctctggttccgccctactctccttaatgacacggggaattacacctgtatgttacgaaacactacttactgttcaaaggtggcatttccccttgaagtagtgcagaaggacagctgtttcaacagtccaatgaaacttccggtgcacaaactgtatatcgagtatggaatccagaggattacatgcccaaatgtagacggctactttccttcatctgttaagcctaccattacttggtatatggggtgttataagatacagaatttcaacaatgttattccggagggcatgaatctgagcttcttgattgcactcataagcaataacgggaattatacatgcgtggtcacatatcctgagaacggacgcactttccacttaactcgtacattaactgtgaaggtcgttggatcaccgaaaaatgccgtgccccctgtgattcattctcctaacgaccacgtcgtgtatgaaaaggaaccgggggaggagctgttaatcccctgcactgtgtatttcagttttctgatggacagtcgcaacgaggtctggtggacaatcgacgggaaaaaacctgatgatatcactatagatgtgacaatcaatgagagcattagccattcccgaacagaagatgaaacaagaacgcagatcctgagcataaagaaggtgacttctgaagatctgaaacgttcttacgtttgccatgcccggagcgcgaaaggggaggtggccaaggccgcaaaggtgaagcagaaagtacctgcacctcgatatacagtggagctggcatgtggctttggcgccacagtgctcttggtcgtgatacttatcgttgtctaccacgtgtattggctggagatggtgctattttaccgcgcccattttggaacggacgaaaccatccttgacggcaaagagtatgatatctacgttagttatgcaaggaatgcggaagaagaggagtttgtgctgctgacgctgagaggcgtactcgagaacgagtttggctataaactctgtatatttgatcgggatagcttgccaggcgggattgttaccgacgagaccttgtcttttattcagaagtctcggcggcttctggttgtgctgtccccaaactatgtgctgcagggcacccaggcgctgcttgagctcaaagccggattagagaatatggcctccagaggcaatatcaatgtcattctcgtgcagtataaggctgtaaaagagaccaaagtgaaggagctgaagagggccaagacggttttaactgttatcaagtggaagggggagaaaagcaaatacccgcaaggccgtttctggaagcaactgcaagtggctatgccagtgaagaagtccccgcgacggtcctcaagtgacgagcaggggctgtcctacagttcactaaagaacgtgtag

SEQ ID NO: 191716 - DNA, 1071 bp, synthetic construct
  misc_feature 1..1071: note = Description of Artificial Sequence: Synthetic coding sequence
  source 1..1071: mol_type = other DNA
atgaccctgctgtggtgcgtggtgagcctgtacttctacggcatcctgcagagtgatgctagcgaaaggtgcgatgactggggtctcgacaccatgcgtcagattcaggtgttcgaggatgagcctgcacggatcaaatgccctttatttgagcatttcctgaagttcaattatagtaccgctcatagtgctggcttaacccttatctggtattggacccggcaggacagggacttggaggagcctatcaattttaggctgccagaaaatagaatcagtaaagagaaggacgtcttgtggtttcggcccactctcctgaatgacactggcaattatacctgcatgctgcgaaacactacgtattgcagcaaggtggctttccctctggaagtcgtgcagaaagactcctgctttaattcacctatgaagctaccagttcacaaattgtatatagagtacggcatccaaagaatcacttgtcctaatgtggacggctactttccctctagtgtgaaaccaacgattacttggtatatgggctgttataagatacaaaatttcaacaatgtaattcctgagggtatgaatctctccttccttatcgcgctcatttccaataacggaaattatacatgcgtcgtgacctacccagagaacggacgcacctttcacctcacaagaactttgactgttaaagtggtgggctcacctaagaacgctgtgcctcctgtcatccattcccccaacgatcacgtggtgtacgaaaaagagcctggagaggagttgttaatcccttgtacagtgtacttcagtttcctgatggactcacgcaacgaggtgtggtggacaatcgacgggaagaaaccggatgatatcaccatcgacgttacaatcaatgaatcgatctctcacagccgaactgaggacgaaacaagaacacagattctctctattaagaaggtgaccagcgaggacttaaagagatcttatgtgtgtcatgctcgctctgcaaagggggaggtcgccaaggctgctaaggttaagcaaaaggggaaccgctgcggacagtag

SEQ ID NO: 191717 - DNA, 342 bp, synthetic construct
  misc_feature 1..342: note = Description of Artificial Sequence: Synthetic coding sequence
  source 1..342: mol_type = other DNA
atgaccctgctgtggtgcgtggtgagcctgtacttctacggcatcctccagtcggatgccagcgagcgctgcgacgattgggggctggacacaatgcgacaaattcaggtttttgaggacgagcccgcacggataaaatgccctctgttcgaacatttcttgaaattcaactattccacagctcactcagccgggttgactctgatatggtactggaccagacaggatcgcgatctagaagagcccatcaattttaggctgccagagaatcggatctccaaagaaaaggacgtgctttggttccgccccacgctgcttaatgacaccgggaattatacatag

SEQ ID NO: 191718 - DNA, 1071 bp, synthetic construct
  misc_feature 1..1071: note = Description of Artificial Sequence: Synthetic coding sequence
  source 1..1071: mol_type = other DNA
atgaccctgctgtggtgcgtggtgagcctgtacttctacggcatcctgcagtccgacgctagcgaacgctgcgatgactggggactggacacaatgcgccagattcaggtgttcgaggatgaacctgctcggattaaatgcccgctgttcgagcattttctgaagtttaattacagcactgcacacagcgccgggttaacactcatctggtattggacacgtcaggatagagaccttgaagagccaatcaacttccgtctacccgaaaaccgcatcagtaaagagaaggatgtactttggttccgccccacactcctgaacgacacagggaactacacttgcatgctccgtaacactacttattgtagcaaagtcgctttccctctagaggtggtgcaaaaggattcttgttttaattcccccatgaagctccctgtgcacaaactgtatattgagtatggcattcagcggataacctgtcccaatgtcgacggctactttccttcttccgttaagcctaccattacttggtacatgggctgttataagatccagaattttaacaacgtgatacctgaaggtatgaatctgagcttcctgattgccctgatctccaacaatggcaactacacttgtgtagtcacttatcccgagaacgggagaacatttcatctcaccaggactctcaccgtaaaagtggtgggatccccaaaaaacgctgtgccccctgttatacactctcccaacgatcatgtcgtgtacgaaaaggaaccgggggaagaacttctgatcccgtgcaccgtgtacttcagttttcttatggactctaggaacgaagtgtggtggacaatcgacggcaaaaaaccagacgatattacaatcgacgttacaattaacgagtcaattagtcactccagaaccgaggacgagaccagaacccaaattctgtccatcaaaaaagtgacatccgaagaccttaaacggagctatgtgtgtcacgcgcggagcgcaaagggcgaggtggcgaaagcggccaaggtcaaacagaagggtaatagatgcgggcaatag

SEQ ID NO: 191719 - DNA, 1713 bp, synthetic construct
  misc_feature 1..1713: note = Description of Artificial Sequence: Synthetic coding sequence
  source 1..1713: mol_type = other DNA
atgaccctgctgtggtgcgtggtgagcctgtacttctacggcatcctgcagtcagacgcctccgaacgctgcgacgattgggggctggacactatgaggcagatacaggttttcgaggacgaaccggctaggatcaagtgtcctctgtttgaacatttcctgaagtttaactacagcaccgcccattcggccggactgacattaatttggtattggacgcgccaggacagagacctcgaggagcctataaattttcgactgcccgagaaccgtatcagcaaggagaaggacgtgctgtggttccgtcctaccctcctaaacgataccggcaactatacatgcatgctgaggaataccacgtactgtagcaaggtggcgtttccactggaggtcgtgcaaaaagatagctgcttcaattcacccatgaagctgccagtgcataagctgtacattgagtatggcatccagcggatcacctgtccgaatgtggacggctatttcccaagctctgtgaaaccaaccatcacttggtacatgggatgttataaaatccagaacttcaacaacgtcataccggagggaatgaatctttcctttctcatcgccctgatctctaataacggtaactacacatgtgttgtcacttatccagagaacggtagaacgttccatctgactagaacccttactgtgaaagtcgtgggttcccccaagaacgctgtgcctcctgtgatccatagccccaatgaccacgtagtgtatgagaaagagccaggggaggagcttctcattccgtgtaccgtctattttagtttcttgatggattcccggaatgaggtgtggtggacaatcgatggcaagaaacccgacgacattacaattgacgtcacaataaacgagtctatttcccactctagaactgaggacgagactcgaacccagatcctgtcaattaaaaaagtgaccagtgaggacttgaagagaagctatgtgtgtcacgccagatctgccaagggcgaagtcgccaaggccgccaaggtcaagcagaaagtgcccgccccaagatatacagtggagctggcctgtgggtttggcgccaccgtcctgctagtggtcatcctgattgttgtttaccatgtgtactggctggaaatggtccttttctatcgcgctcattttgggaccgacgagaccattcttgatggtaaagagtacgacatctacgtatcgtatgcccggaacgcagaggaagaagagtttgttctcctcactctgcgcggcgtgctcgaaaatgaattcggctacaaactgtgcatctttgacagagactctcttcctggcggtattgtgacggacgagactctgagcttcatccagaagtctagacgactcctggtagtgctgagtccgaattacgtgctgcagggtacacaggccctcttggagctgaaagccgggctcgaaaacatggcatcgcgcgggaatatcaatgttatcctcgtccagtacaaggcagtgaaagaaactaaggtgaaagagctcaagagagccaagactgtgctgactgtcattaaatggaagggggagaagagcaaatacccacaagggcggttttggaaacagctacaggtcgccatgcccgtcaagaaatctccccgccgctccagcagcgacgagcagggattgagctattcttctctgaaaaacgtgtag

SEQ ID NO: 191720 - DNA, 2064 bp, synthetic construct
  misc_feature 1..2064: note = Description of Artificial Sequence: Synthetic coding sequence
  source 1..2064: mol_type = other DNA
atgaccctgctgtggtgcgtggtgagcctgtacttctacggcatcctgcagagcgatgcctcagagaggtgtgatgactggggtctggacaccatgcggcagatacaggttttcgaagacgaaccggcccgaatcaaatgccccctctttgaacacttccttaaattcaactatagtacagcacacagcgccggactcaccctgatctggtattggactagacaagatcgcgacttggaggagccaataaattttcggctcccagagaataggatctccaaagagaaggatgtgctgtggttcaggcccaccctgttaaacgataccggtaattatacctgcatgctcaggaacaccacctactgttccaaagtggcatttccgttagaagttgtccaaaaagatagctgcttcaattcccctatgaaactacctgtgcataaactttacatagaatatggcattcagcgtatcacatgtccaaatgtggatggatatttcccttcttcagtaaaaccgacaatcacttggtatatgggctgttataagatccagaattttaacaatgtaatccccgaagggatgaatctgagttttctgatcgcactgattagcaataacgggaattacacgtgtgtggttacgtacccagaaaatggacggacctttcacctcacacgcacattaacagtcaaggtggtgggcagcccaaagaatgccgtgccacctgtgattcactctccaaacgaccacgttgtctacgagaaggaacccggtgaagaactcttgattccgtgcaccgtttatttctcgttcctcatggatagtagaaatgaggtgtggtggaccatcgatggcaaaaaacctgacgacattactatcgatgtcacgataaacgaatctatcagccactctagaaccgaggatgaaacccggacccagattctgtcgattaagaaagtcacaagcgaagacctgaagcggtcttatgtctgccatgctcgctcggctaagggcgaagtagcgaaggccgccaaggttaagcagaaagtgccagccccgcggtacaccgtagaactggcttgcggcttcggtgctacagtattactagtcgtgatactgattgtggtatatcatgtttattggctcgagatggtcctgttttatcgggcacacttcggcactgacgagactattttggacggcaaggaatacgacatctacgtgtcgtatgcgcgtaatgctgaagaggaggagttcgtgttgcttacactgcggggggtgttggaaaacgagtttggttataaactctgcatttttgatcgagactccctcccaggcggcaataccgtcgaggcagtgttcgactttattcagcgctcacggcgcatgattgtggtgctgagcccggactacgtcactgagaagtccatttctatgctggagtttaagctaggggtgatgtgtcaaaattctatcgcaactaaactgattgtggttgaataccgccctctggaacatccacaccctggaatcctgcagctcaaagagtccgtttcttttgtgtcctggaagggagaaaagtcaaaacactcaggttccaaattctggaaggcgcttcgattggccctcccactcaggtccctcagcgcttcgtctgggtggaatgaaagctgcagttcacagagcgacatctcactggaccacgtccaaaggcgtaggtccaggttgaaagagccccccgaactgcagtcatctgaacgggccgctggttcgcccccagctcccggaactatgtccaagcacaggggcaagtcatccgcaacttgtaggtgttgtgttacctactgtgaaggagaaaatcatttaagaaataagtctagagccgaaattcataatcaaccccagtgggaaacacatctttgtaagcccgttcctcaggagagtgagacccaatggatccagaacggcactagacttgagccgcccgccccccagatatccgctctcgcacttcaccactttacagacctgagcaacaataatgacttttatatcctgtag

SEQ ID NO: 191721 - DNA, 1713 bp, synthetic construct
  misc_feature 1..1713: note = Description of Artificial Sequence: Synthetic coding sequence
  source 1..1713: mol_type = other DNA
atgaccctgctgtggtgcgtggtgagcctgtacttctacggcatcctgcagagtgatgcttccgagcggtgtgatgactggggactggacacgatgaggcagatccaggttttcgaagatgagccagcgcgcataaagtgtcccttgtttgaacattttctgaagttcaattattcgaccgctcactccgcaggcctgacgctgatatggtattggacccggcaagacagggacctggaggaaccgataaactttagactgccggaaaaccgcatcagcaaggaaaaggatgtgttgtggttccgaccaaccttactcaacgatactggaaactatacttgcatgctccgaaatactacttactgtagcaaggtggccttcccactcgaggttgttcagaaagatagttgtttcaactctcccatgaagctcccggtccacaaactttacattgagtacggcatccaacgcatcacctgcccgaacgttgatggatactttccatccagcgtgaagccgacgattacctggtatatgggttgctacaagatccagaacttcaataatgtcattccagagggaatgaatctatccttccttatagcactgatttcaaacaacggcaattatacctgcgtggtaacttacccggaaaatggcaggacattccatctgacccggactctgactgtgaaagtcgtggggtcccctaaaaatgcagtcccacctgttatccacagcccgaatgatcacgtggtctacgagaaagagcccggtgaggagcttttgattccttgtactgtctactttagcttcctaatggattcacgaaacgaagtttggtggaccattgacggaaagaaacctgatgacatcacaatcgacgtcactattaatgagagtatctcacacagtagaaccgaagacgaaaccaggacccagatcctgagtattaaaaaggtgacctccgaggacctaaagcgttcctacgtgtgtcacgcacggagcgccaagggagaggtagccaaagctgccaaggtgaagcagaaagtcccagcccccaggtacacagtggagctggcttgcggttttggagccactgtgctgcttgttgtgatcctgattgtggtttaccatgtgtactggctggagatggttctcttctatagagcacactttggaaccgacgagacaattctggatgggaaagagtatgatatttacgtgtcttacgctcggaacgctgaggaagaggaatttgtgctgctcaccttgcgaggagttctcgaaaacgagttcggatataagctgtgtatctttgatagggatagtctcccaggcggtatcgtgaccgacgaaacactctcatttatccagaaatcacggcggctgttagtcgtgctgagtccgaattacgtgctgcagggtacacaggccttactagagctaaaagcgggcctggaaaacatggcctcccggggaaatattaatgttatcctggtgcagtacaaggcagtaaaggagaccaaggttaaagaactcaaaagagccaagaccgtgctgacagttatcaagtggaagggagagaagagcaagtatccccaaggccgcttctggaagcaactgcaggtggctatgccagtaaagaagagcccgaggcgcagctcttccgacgagcagggattaagctatagttctctcaaaaacgtctag

SEQ ID NO: 191722 - DNA, 438 bp, synthetic construct
  misc_feature 1..438: note = Description of Artificial Sequence: Synthetic coding sequence
  source 1..438: mol_type = other DNA
atgaccctgctgtggtgcgtggtgagcctgtacttctacggcatcctgcagtccgacgcctcggaacggtgtgacgactggggcctggatacaatgaggcagattcaagtcttcgaagacgagccggctagaatcaaatgtcccttgtttgaacactttctaaaattcaattactcaaccgcacactcagcaggcctcaccctcatctggtactggacgcgacaggatagggatttagaagaaccaattaattttcgcctaccagagaacaggatctcaaaagagaaggatgtcctatggttccggcctacgctattgaatgataccggaaactatacttgcatgctgcgaaataccacttattgcagcaaggtcgcatttcctctcgaggtggtgcaaaaagactcttgtttcaattcacctatgaaactgccttag

SEQ ID NO: 191723 - DNA, 2091 bp, synthetic construct
  misc_feature 1..2091: note = Description of Artificial Sequence: Synthetic coding sequence
  source 1..2091: mol_type = other DNA
atgaaggcccccatcccccacctgatcctgctgtacgccaccttcacacagagcctcaaggtggttactaaaagaggatctgccgacgggtgtacggactggagcatcgatatcaaaaagtatcaagtactcgtgggagagccagtgcggatcaagtgcgcgctcttctacggctatataaggacaaattattcccttgcgcagtccgccggtttgagcttgatgtggtataaaagttctggacctggtgacttcgaggaacctatcgctttcgacggcagccgaatgtcaaaagaagaggactccatatggtttaggcctacactcctgcaggatagcggtttatatgcctgcgtcatccgtaatagtacctactgtatgaaagtgagcataagcctcaccgtgggcgagaatgacactggtctgtgctacaattctaagatgaagtacttcgagaaagctgagctgtccaagagcaaggaaatcagctgccgcgacatagaagacttccttctgcctactcgggaaccagaaattctgtggtacaaagaatgtcgcaccaaaacatggcggcccagcatcgtctttaaacgcgacactctccttatccgggaagtccgagaagacgacattgggaattacacttgtgagttgaagtatggtggattcgtcgtgcgccgcacaaccgagctcaccgtgacggcgcctctgacagataaacctccaaaacttctttaccccatggaaagcaagctaactatccaggagacacagttgggcgactctgccaatcttacttgtcgggctttctttgggtacagcggggatgtatcgcccttgatttactggatgaagggcgaaaagttcattgaagatctggacgaaaatagagtgtgggagtccgacatcaggatcctgaaagagcacttgggagaacaagaggtttctatatctttgatcgtggattctgtcgaagaaggggatctgggtaactacagttgttacgtcgaaaacggcaacggacgaaggcatgcctcagttctcctccacaaacgggaactgatgtacacggtcgaactggcagggggccttggggccatcctgcttctactggtctgcctcgttacaatctataagtgctataagattgagatcatgctgttctaccgcaatcatttcggtgcggaggagttggatggcgataataaggattacgacgcctacctttcttataccaaggtagaccctgatcagtggaaccaggaaaccggcgaggaagagagatttgcacttgaaatcctccctgacatgctggagaagcattatggctataagcttttcattcccgacagagacttgataccaaccggcacctacattgaggacgtggcccgctgtgtggatcagtccaagagactgataatcgttatgacgcctaattacgttgttcggcgcggctggagcatcttcgagttggaaacaaggctcagaaatatgctggtgacaggcgagatcaaagtgatactcattgagtgctcagagttgcgcggtattatgaattaccaagaagtggaggctctgaaacatactataaaactgcttactgtcataaagtggcacggccctaaatgcaataagctcaactcaaagttttggaagaggcttcagtatgagatgcctttcaagagaattgagcccatcacccacgagcaggctctggatgtgagcgaacagggtccattcggcgagcttcagaccgtctctgccatttcgatggcagccgcaacctccactgccctggccacagcccacccagatctaaggagtacttttcacaacacgtaccatagtcagatgaggcagaagcattattatcggtcctacgaatacgatgttccgcctacgggaacgctgcctcttaccagcatcggcaaccaacatacctactgtaacataccaatgacactgattaatggacagcgtccccagactaagtcatccagagagcaaaatcccgatgaggcccatacgaatagcgccattctgcctctgctgcctagagagactagcatttcatccgtgatttggtag

SEQ ID NO: 191724 - DNA, 2091 bp, synthetic construct
  misc_feature 1..2091: note = Description of Artificial Sequence: Synthetic coding sequence
  source 1..2091: mol_type = other DNA
atgaaggcccccatcccccacctgatcctgctgtacgccaccttcacccagtcactgaaggtcgtgaccaagcgaggttccgctgatggctgtacagattggagcatagacatcaagaagtatcaggtgctcgtaggagagccagtgaggataaagtgcgctctgttttatggttacatcagaaccaattacagcctcgctcagtccgccggtctgtctttaatgtggtataagtcctcgggtcccggcgacttcgaggaaccaatcgcctttgacgggagtcgtatgagcaaggaggaagattccatctggttcaggcccacccttcttcaagactctgggctttatgcctgcgtcattaggaacagtacttactgcatgaaagtatcaatttcactgactgtgggcgaaaatgacacaggcctgtgttataacagtaaaatgaaatattttgagaaggccgaactttctaaatccaaggagatatcgtgtagagacatcgaggactttctgctgcccacacgggagcctgaaatcctgtggtataaggagtgtcgtacaaagacttggagaccaagtatcgtgtttaaaagagacaccctgttaattcgagaggtgcgcgaggacgacataggaaattacacctgcgagctcaagtacggcgggtttgttgttcggcgtacgacagagctcaccgtgactgcccctctaaccgataagccacccaagctgttgtaccctatggagagcaagctgacaattcaagaaacccagctcggggactcagctaacctgacctgtagggcttttttcggctactcaggcgatgtgagtcctctgatctactggatgaaaggcgagaaattcatagaagatctggatgagaacagggtgtgggagtccgatattcgtattctgaaagagcatctgggagagcaggaggtgtctatcagtctgatcgtggattccgtggaggaaggggaccttgggaactactcctgttatgtagaaaacgggaatggtcgtcggcacgctagcgtgctcttgcataaaagagaactgatgtatactgttgagctcgccgggggactgggagcaatcctcctgctcctggtttgtctcgtgacaatttataaatgctataaaatcgagataatgttgttctatcgaaatcattttggagcggaggagcttgacggggataataaggattacgatgcatacctttcatacacgaaggtagaccctgaccaatggaaccaggaaacaggagaagaagaacggttcgccctggagatccttcccgacatgctggagaagcactacggatacaagctgttcatccccgaccgagatctcatcccaaccggaacgtatatagaggacgttgccagatgcgtggatcaaagtaagcggctcattattgtaatgacaccgaactacgttgttcgccgtggttggagcatattcgagctggaaactcggcttcgcaatatgctggtgaccggagagattaaagtgatcttgattgaatgctcggagctgcgggggattatgaattatcaagaggtggaagctcttaagcatacaatcaagctcctcacagttatcaagtggcatggccccaaatgcaacaagctgaactccaaattctggaagcgactgcagtacgaaatgccatttaagaggattgagccaattacacacgagcaggccctcgatgtgagtgagcagggcccctttggcgagctgcagacagtttcagccatttcaatggcagccgctacatctaccgccctggccacggcacatccagatctgcgatctacatttcacaatacatatcatagccagatgcggcagaaacactattaccgcagttatgagtatgacgtgccgcccactggcactctgcccttaactagcatcggcaatcaacacacctattgcaacatcccgatgactcttatcaatggacagaggccacagaccaagtcatcgagagaacaaaatccagacgaagcccacacgaactccgcaattctgccattgctgcccagagagacctccattagttctgtgatttggtag

SEQ ID NO: 191725 - DNA, 2061 bp, synthetic construct
  misc_feature 1..2061: note = Description of Artificial Sequence: Synthetic coding sequence
  source 1..2061: mol_type = other DNA
atgaagccccccttcctgctggccctggtggtgtgcagcgtggtgtcaacaaatctgaaaatggtctctaaacggaatagcgtggacgggtgtattgactggtcagtcgatctcaagacatacatggctcttgcaggagagccagtgagagtgaagtgcgctctcttttattcctacattcgcactaactactcaaccgcacagtctacaggcctgagactgatgtggtataagaacaaaggcgacttggaggaacccataatcttcagcgaggtccgaatgagcaaggaggaagacagcatctggttccattccgctgaagcgcaggacagtggattttacacttgtgtgcttaggaattctacatattgtatgaaggtgtccatgagccttacggtggctgagaatgaatcaggcctttgctacaattctcgcattcggtatctggagaagtcagaggtcactaagaggaaggaaatttcttgccccgacatggacgactttaagaaaagtgatcaggaaccagatgttgtgtggtataaagaatgcaagcccaagatgtggcgatctatcatcattcaaaagggcaatgcattgttgattcaagaagtgcaggaggaggacggcgggaattacacgtgcgagctgaagtatgaaggtaaactcgttagaaggacaactgagctgaaggtgacagctctgctcactgacaaacctcccaaaccccttttcccaatggagaaccagccctcagtgatcgatgttcagctaggaaagcctctcaacattccttgtaaggcctttttcgggttctccggtgaatcaggccccatgatttactggatgaagggggaaaagtttatcgaggaactggcaggtcatatccgggaaggagagatccgcctactgaaagagcacctcggggaaaaagaagtcgaactggccctgatttttgactctgtcgttgaggctgacttagcaaattacacttgtcacgtggagaacagaaatggccgtaagcatgcctctgtgttgctccgcaagaaagatctgatatacaagattgagctcgccggagggcttggcgccatctttctgttactggttctgctggtagtgatctataagtgttacaatattgagttgatgttgttctataggcagcattttggagccgatgaaacaaatgatgacaacaaagagtatgatgcatacctgagttacactaaagtggaccaggataccctagactgcgataatccagaagaggagcaatttgccttggaggttctccctgacgtcctagagaagcactatggttataagctgtttatccctgaaagggatctgataccttccggaacctacatggaagaccttacccggtacgtggagcagagcaggagactcatcatcgttctcacacctgattatatcctgcggcgaggctggtctatttttgagctggagtctagactacacaatatgctggtgtcaggagagatcaaggtcattctgattgagtgtaccgagttgaaggggaaagtgaattgtcaggaggtcgaaagcctaaagcggtctattaaactgctgagtctcatcaaatggaaagggtctaagtccagcaaactgaattccaagttttggaagcacctagtctatgagatgcccattaagaagaaggagatgttaccgcgctgccacgtgctggattctgccgagcagggtctgttcggggagctgcagcctatccccagcatcgccatgaccagcaccagtgcaacgctcgtctctagtcaggccgacctgcctgagtttcaccccagcgacagtatgcaaatacgccattgctgtagaggatataagcacgaaattcctgctacgacactgcctgtgccatctttgggtaatcaccacacgtattgtaatctacccctgacactgctcaacggccaattgccactgaacaataccctgaaggacacccaggagtttcacagaaattcatctctcctgccactgagttccaaggagttatcgtttactagtgatatctggtag

SEQ ID NO: 191726 - DNA, 2061 bp, synthetic construct
  misc_feature 1..2061: note = Description of Artificial Sequence: Synthetic coding sequence
  source 1..2061: mol_type = other DNA
atgaagccccccttcctgctggccctggtggtgtgcagcgtggtgtcgactaatttgaagatggtgtctaagcggaactccgtggatggctgtattgactggagtgtagacttgaaaacatacatggccctggccggtgaaccagtccgggtcaagtgcgcattattttattcctacatcaggacaaattatagcacagcacagagtacggggctgagactaatgtggtacaaaaacaaaggagatctggaagagcccattatctttagtgaggtgagaatgtccaaggaggaggacagtatatggtttcactctgctgaggcgcaggacagcggcttctacacatgcgtgcttcggaatagtacatactgtatgaaagtctcaatgagcttgacagtggccgaaaatgagagcggattgtgctacaattctagaattcgatacttggagaagagtgaggttactaagagaaaagagatcagttgtccagatatggacgatttcaagaagagtgaccaagagcccgatgtcgtctggtataaggaatgtaagcccaagatgtggagatcaatcattattcaaaaagggaacgcactgctcatacaagaggttcaggaggaggatgggggcaactacacctgcgagctgaagtatgagggcaagctcgtgcgaaggacgacagagcttaaagtgacagcactcttgaccgataagccccctaagccactcttccctatggagaatcagcccagcgtgatcgacgtgcagcttggtaagcccttgaatattccttgtaaggcattcttcgggttttcgggggagtcaggacctatgatttactggatgaagggggagaaatttatcgaggaactcgccggacacatcagagaaggagagatcaggcttctgaaggagcatttaggagagaaagaggtcgaactagcactgatctttgattccgtcgttgaggcggacttggccaattacacttgccatgtggagaaccgtaacggccgaaagcacgcctccgtgttgctgcgaaaaaaggacctaatttacaagattgaactggcagggggtctgggcgcaattttcctcctgcttgtcctgctggtcgtgatctacaaatgctacaatatagagctgatgctcttttataggcagcattttggcgcggatgaaacaaatgatgataacaaagaatacgatgcctaccttagctacactaaagtggaccaagatacactcgactgtgataaccccgaggaggagcaatttgcgcttgaggtactcccagacgtgctggagaagcattatggttacaagttgttcatccctgaacgagatctgataccctcggggacatacatggaagatctgactaggtatgttgagcaatcccgcagactgatcatcgtgttaacacctgactacatcctacgtaggggttggtcaatttttgagctagagtccagactccataatatgctggttagtggtgaaatcaaagtcattttgatcgagtgcaccgaactgaagggtaaagtcaactgccaagaggtggagtcactgaagaggagcattaagttgctgtccctgattaaatggaaaggctccaaaagctcaaaactgaactcaaagttctggaagcacttagtttacgaaatgcctattaagaagaaggagatgctccctcggtgtcacgtccttgacagtgccgagcagggtctatttggcgagctgcagccaatcccaagcatcgccatgacatcaacatccgcgactctcgtaagcagccaagctgatctccccgagtttcacccctcagacagtatgcagatccggcactgctgtcgtggatacaagcatgaaattcccgccactacactgcctgtaccatcacttggaaaccatcacacctactgcaacttacccctgaccctgttgaacgggcagttacctctgaataacactctcaaggatactcaggagtttcacaggaatagctccttgttgcctcttagctctaaggaactaagcttcacctcagatatctggtag

SEQ ID NO: 191727 - DNA, 876 bp, synthetic construct
  misc_feature 1..876: note = Description of Artificial Sequence: Synthetic coding sequence
  source 1..876: mol_type = other DNA
atgcgggacaacaaggagtacgacgcctacctgagctacaccaaggtggaccaggacaccctagattgtgacaaccccgaggaggaacagttcgcactcgaggtcttacctgacgttttagagaagcattacgggtacaaattattcataccagaacgcgacctgatcccttccggcacatatatggaagacctgacgcggtatgttgaacagtcgcggagactaattatcgttctgacccctgactatatcttgcgacgcggttggagcattttcgagttggaatcccgcctacataacatgctggttagcggcgaaatcaaggttatcctaattgaatgcaccgagcttaaagggaaagttaactgccaagaggtcgagtccctcaaaagatctattaaactgttgtccctgattaagtggaaaggatccaagtcatccaaacttaacagcaagttttggaagcatctggtctacgaaatgccgatcaagaagaaagagatgttaccccggtgtcatgttctggactccgccgaacaaggtcttttcggtgaactccagccaattccttcgatagccatgacctcaacttccgccaccctggtctcctcccaagcagacctccccgagttccacccctcagattctatgcaaattaggcactgttgcagagggtataagcatgaaatccctgcaactactctccctgtgccctcactgggaaaccatcacacctattgcaacttacctctgacgctgctcaacggtcagctgccacttaataacacactcaaagatacacaagaattccaccgaaattcaagtctgttgcccctgtcaagtaaggagctcagtttcacctccgatatctggtag

SEQ ID NO: 191728 - DNA, 1197 bp, synthetic construct
  misc_feature 1..1197: note = Description of Artificial Sequence: Synthetic coding sequence
  source 1..1197: mol_type = other DNA
atgctgcggctgtacgtgctggtgatgggcgtgagcgccttcaccttacaacctgccgcccatactggggcagccaggtcatgtaggtttagggggaggcactataagcgagaattcagactggagggagagcccgtcgcactaaggtgtccccaagtcccctactggttatgggcatcagtgtcaccccggattaacctgacctggcataagaacgacagtgcaaggaccgtgcctggggaggaggaaacgcgcatgtgggcacaggatggcgccctgtggctactccccgccctgcaggaggattcaggtacctatgtgtgcaccacccgcaatgcctcttattgtgataaaatgtccattgagctgagagtgttcgagaataccgacgccttcctgccctttatcagttatccacaaattttgactctgagtacaagtggggtgctggtttgcccagacctctccgagttcacacgagataagaccgatgtgaaaattcagtggtacaaggacagcctattgttggacaaggacaacgaaaaatttttgtcggtgagaggcactacacacttactggttcatgacgtcgccctagaagatgcgggttactaccgctgcgtgttgaccttcgcacacgagggtcagcagtacaatattacgaggagcattgagttgcgaatcaaaaaaaaaaaggaggagaccatccccgtgatcataagcccgctcaagaccatttctgccagtctgggctcaagactgactataccctgcaaggtatttttgggcaccgggactcctctcaccactatgctatggtggaccgctaatgacactcatattgaatcagcttatcccggtggaagagttacagaaggcccccggcaagagtactcggagaacaacgagaattacatcgaagtccccctgatttttgatcctgtcacacgggaggatctacacatggattttaagtgcgtcgttcacaacacgttgagctttcagacccttcgcactacagtgaaagaggcttcaagtaccttttcctggggcatcgtgctggctcccctgtcgctggcatttctggtgctgggtggaatctggatgcaccgaaggtgtaaacatcgaactggaaaggctgacggacttactgtcctatggccccatcatcaggatttccaatcttacccaaagtag

SEQ ID NO: 191729 - DNA, 1197 bp, synthetic construct
  misc_feature 1..1197: note = Description of Artificial Sequence: Synthetic coding sequence
  source 1..1197: mol_type = other DNA
atgctgcggctgtacgtgctggtgatgggcgtgagcgccttcaccctgcagcccgccgcccacacaggcgccgcccgcagctgtagatttcgcggccggcactacaagagggaattccggcttgaaggtgagcccgtggccctccggtgtccacaggttccatattggctgtgggctagcgtgtctccacgaatcaacctcacctggcataaaaatgacagcgcaaggactgtacccggggaggaggaaacgcgtatgtgggctcaggacggcgccctgtggttgctgccggctcttcaggaggattcaggcacttacgtttgcacaacacgcaatgccagctattgtgacaagatgtccattgagttacgggtcttcgagaataccgacgccttcctgccttttataagctatcctcagattctcactctgtccaccagtggagtgctggtctgccctgacctgagtgagtttacccgcgataagacagacgtgaaaattcagtggtacaaagacagcctgctgctagacaaagacaatgagaaattcctgagcgttagaggtactacacatttgttagtccatgacgtggctctcgaagatgccgggtattacagatgtgtgctcacatttgcacatgagggccaacagtataatataacccgctctatcgaactgagaatcaagaagaaaaaggaggaaaccatacctgtgatcattagtccactgaagacaatttcagcgtccctaggatcccgccttaccattccttgtaaggtattcctaggaaccggtacgcccttaacgactatgctctggtggacagcgaacgacacgcatatagagtctgcttatcccggggggagagtcaccgaagggccgcgccaggaatactccgagaacaatgaaaactacattgaggtaccactgatcttcgatcctgttacccgagaagatttgcatatggattttaagtgcgttgtccacaacaccctgagctttcaaacattgcgcactactgtaaaggaggccagcagcacatttagctggggaattgtgctggcacccctttccctggcattcctggtactaggcggcatttggatgcataggaggtgtaaacaccgtactggtaaggccgacggtctaaccgtattgtggcctcatcaccaggacttccaaagctaccctaagtag

SEQ ID NO: 191730 - DNA, 690 bp, synthetic construct
  misc_feature 1..690: note = Description of Artificial Sequence: Synthetic coding sequence
  source 1..690: mol_type = other DNA
atgctgcggctgtacgtgctggtgatgggcgtgagcgccttcaccttgcagccggcggctcacacaggggccgctcgctcatgtcggttcaggggtcggcactataagcgagagttcagattagagggtgaaccagtggcactacggtgccctcaagtgccttattggctgtgggcatctgtttcaccacgaataaatctgacatggcacaagaatgacagtgcccgcactgtgcctggagaagaagagacacgcatgtgggcccaggacggggctctgtggctactccctgcacttcaggaggacagtggcacctatgtgtgtaccacacggaatgcctcctactgtgacaagatgtccattgagttgagagtctttgagaacaccgatgcttttctccccttcatctcatacccgcagatcctgactctctccaccagtggtgtgttggtgtgccctgacctatcagagtttaccagagataagacagacgtcaagattcagtggtataaggactcacttctactggataaggacaacgagaagtttctgtctgtgcggggaactacccatctcttagtgcacgacgtggctctcgaggacgcggggtattatcgatgcgttcttacattcgcccatgaaggccagcagtacaatattacaagaagcatcgaactgcgcattaagtag

SEQ ID NO: 191731 - DNA, 1098 bp, synthetic construct
  misc_feature 1..1098: note = Description of Artificial Sequence: Synthetic coding sequence
  source 1..1098: mol_type = other DNA
atgctgccccccctgcccagccggctgggcctgctgctgctgctgctgctgtgtccagcccacgttggagggctatggtgggccgtggggtcgccgctggttatggatcctacttccatctgtcgcaaagccagacggcttgctggtcggcaagccgaactgtgccaggcagagcctgaggttgttgcggaactggccagaggcgcgcgactcggcgtgcgcgagtgtcaattccagtttagattcagaagatggaactgtagctcccactctaaagcctttgggcggattttacagcaggatatccgcgagacggcattcgtcttcgctatcacagctgctggtgcgtctcacgcagtcacccaagcctgcagcatgggcgaattactccagtgtggttgccaagcgcccagaggccgcgctccgcctcgaccctctgggctacctggaacacccggcccccccggtccggcggggagcccagaaggttcagcagcctgggaatggggaggttgcggtgatgacgtcgactttggtgacgaaaagtcccgcctgttcatggatgccagacataaaagggggagaggcgatattagagcgttagtgcagctccacaataatgaggccggccgcctggccgttagatcacacacccgcacagagtgcaagtgccacgggttgagcggaagttgcgcattgagaacatgctggcaaaaattgccaccatttcgggaggtgggagcaaggttactcgagagattccatggcgcgtccagggtgatgggtaccaatgatggaaaagctcttctgccagccgttcgcaccttaaagcccccagggagagccgacctgctgtacgctgccgacagtcccgacttctgcgcccctaacaggcgtactggctcccctggtacaagggggcgggcctgtaacagtagtgctccagacttaagtgggtgtgacctgctctgctgtggacggggacaccgtcaagaatcggttcaactggaggaaaactgcctctgtcggtttcactggtgctgcgtcgtgcagtgccaccgatgtcgcgtgagaaaggaattgtccttatgtctatag

SEQ ID NO: 191732 - DNA, 987 bp, synthetic construct
  misc_feature 1..987: note = Description of Artificial Sequence: Synthetic coding sequence
  source 1..987: mol_type = other DNA
atgggcttctggatcctggccatcctgaccatcctgatgtacagcacggccgcgaagttctccaaacagtcatggggactcgaaaatgaagccctgatcgtgcgctgccctaggcagggcaagccatcgtataccgttgactggtactactctcagacaaataagagcatccctactcaggaacgaaacagggtctttgcatcaggacagcttctcaaattcctacctgccgctgtggcagactccggcatttacacatgcatagttagatctcctactttcaatcgaactggttacgcgaatgtaaccatctataaaaagcaaagtgactgtaatgtgcccgactatctaatgtatagcacggtttccggctcagagaaaaactcaaaaatttactgccccactatcgacttgtataactggacagcgcccctagagtggtttaagaactgtcaggcccttcagggctcccgctatcgagctcataagtccttcctggtcatcgacaatgtgatgactgaggacgccggggattacacttgcaagttcattcataatgaaaacggcgctaactattctgtgacagctacccgctcgtttacagtgaaagatgaacaagggttctccctattccccgtcattggcgcccctgcacagaacgaaataaaagaggtggagatcggaaagaacgcaaacttgacctgtagcgcatgctttggcaaagggactcaattcttggctgcagtgctgtggcagctgaatggaactaaaatcaccgactttggggagcctaggatacagcaggaagaaggacagaaccagagtttcagtaacggacttgcttgcttggacatggtgctcaggatcgctgatgttaaggaagaagatcttctcctgcagtacgattgtttggccctgaatctccacggtcttcggaggcacaccgtgagactgtcaaggaaaaacccaagcaaggaatgtttctag

SEQ ID NO: 191733 - DNA, 780 bp, synthetic construct
  misc_feature 1..780: note = Description of Artificial Sequence: Synthetic coding sequence
  source 1..780: mol_type = other DNA
atgggcttctggatcctggccatcctgaccatcctgatgtacagcacagcggcgaaattctctaaacaaagttggggcctcgaaaacgaggctcttattgtccgttgtccgcgtcaaggaaaacctagctacaccgtggattggtactactcacagaccaataaaagtattccaacccaggagcgcaaccgggtgttcgcctccggacagttgctgaaattcctcccggccgcggtcgcagactccggaatctacacatgtattgtccgctcccctacctttaaccggaccggctatgccaacgtgaccatttataagaaacagtctgactgtaatgtgccggattatctgatgtactccacagtatcaggctcagagaaaaactccaagatttactgtcctaccatcgacctttacaattggactgctccactggaatggttcaagaattgtcaggctcttcaggggtcccgctacagagctcacaagagctttttagtgatcgacaacgtcatgactgaggacgcaggcgactatacctgcaaatttatacataacgagaacggagccaactactccgtcaccgccacccgttcatttaccgtgaaagtgtggtgccaatccttctgcaagctaaaaaaatccctcatcttttccaatactcattggatccagagcctcatgaggggcttcgtgatggtgtactacggggtacacaaatgttgccgcgttgtattcaatttatgtctgcagtacttccagcatcaccagtggccctag

SEQ ID NO: 191734 - DNA, 636 bp, synthetic construct
  misc_feature 1..636: note = Description of Artificial Sequence: Synthetic coding sequence
  source 1..636: mol_type = other DNA
atgtacagcaccgtgagcggcagcgagaagaacagcaagatctactgtcccacgattgatctctataactggacagctcctctggagtggtttaagaactgccaggctctgcagggctcaaggtatcgcgcccataagagtttcctggtgatcgacaacgtcatgaccgaagacgcaggcgattatacttgtaagtttatccataatgaaaatggcgctaactattccgtgactgcgacgaggtccttcactgtgaaggatgagcagggcttcagtttgtttccagtgattggggcccctgcccagaatgaaattaaagaggtggaaataggtaagaatgctaatcttacgtgctctgcttgcttcgggaagggtactcaattcttggccgccgtgctgtggcagctcaatgggacaaaaatcactgatttcggcgaaccgcgaattcagcaggaggaggggcagaaccaatctttctccaacggactagcgtgtcttgatatggtcttacgtatcgcagatgtgaaggaagaggatttgctcctgcagtatgattgcttggccctgaacctacatggtctcaggaggcacacagtgcgcctttcgcggaagaacccctccaaggagtgcttctag

SEQ ID NO: 191735 - DNA, 945 bp, synthetic construct
  misc_feature 1..945: note = Description of Artificial Sequence: Synthetic coding sequence
  source 1..945: mol_type = other DNA
atgggcttctggatcctggccatcctgaccatcctgatgtacagcacagctgctaaattttcaaaacagagttgggggttagaaaacgaagcattgatcgtcagatgcccgcgacaggggaaaccttcctatacagttgactggtactactcccaaacgaataaatctatacccacacaggagaggaaccgggtctttgcgagtggacagctgctgaagttcctcccggctgccgtggccgactctggaatctatacatgcatcgtcaggtctcctacattcaatagaactggatatgctaacgtgacgatctacaaaaagcagagtgattgcaatgttcctgattacctgatgtattctacagtgtctggctccgagaagaattcgaaaatttattgtccaaccatagacctctacaattggaccgccccattggaatggtttaagaactgtcaagcccttcagggaagtcggtacagggcacacaaaagcttcctggtaatagacaatgtgatgaccgaagatgccggggattacacctgtaagttcatacataacgaaaacggcgcaaattactccgtgacagcaacaaggtccttcaccgtgaaggatgaacaggggttctccttattcccagtgatcggggcccctgcccaaaatgagatcaaggaggtcgaaataggaacacagtttctggccgctgttttgtggcagttaaatggcacaaagataacagacttcggtgagccacgcattcaacaagaggaggggcaaaatcagtcattctccaacggcctcgcgtgcttggatatggtgttgaggatcgccgatgtgaaggaggaggaccttcttcttcaatatgactgtctggccctgaacctgcatgggctgagacgccacactgtccgcttatccagaaaaaatccgagcaaggaatgtttctag

SEQ ID NO: 191736 - DNA, 117 bp, synthetic construct
  misc_feature 1..117: note = Description of Artificial Sequence: Synthetic coding sequence
  source 1..117: mol_type = other DNA
atgggcttctggatcctggccatcctgaccatcctgatgtacagcactgccgctaaattctcaaagcagagttggggactggagaacgaggcactcattgtaaggtgtcctcgctag

SEQ ID NO: 191737 - DNA, 1728 bp, synthetic construct
  misc_feature 1..1728: note = Description of Artificial Sequence: Synthetic coding sequence
  source 1..1728: mol_type = other DNA
atgtggagcctgctgctgtgcggcctgagcatcgccctgcccctgtccgtgaccgctgacggctgcaaagatatctttatgaaaaatgagattttaagtgcaagccagcctttcgcctttaattgtaccttcccccccataacaagcggagaagtgtctgtaacctggtacaaaaattccagtaaaatcccagtctctaaaatcattcagtctaggattcaccaggacgagacatggattttatttctgcccatggagtggggtgactcgggcgtataccagtgtgtcataaagggccgcgattcttgtcatcgtatacacgttaatctcacagtctttgaaaaacactggtgtgatacttcgatcgggggcttaccgaatctcagtgatgagtacaagcaaattctgcatctcggcaaagacgattcacttacatgccatctgcattttcctaagagctgcgtgttggggcctatcaagtggtacaaggactgcaatgagattaagggcgaaagatttactgtcctcgagacgcgcctgctggtgagcaacgtgagcgcagaggatcgaggcaactacgcatgccaggctattttgacccattctggaaaacagtacgaagtcttaaacggaatcacagtctctataaccgagagagctggctatggagggtcagtgcctaaaatcatctaccctaagaaccattcaattgaagtgcagctgggaacaacactgatagtggattgtaatgtgacggacacaaaggataacacaaatttacggtgctggcgggtgaacaatacattggtggatgattattacgacgagagtaaaaggatccgagagggcgtggaaacgcacgttagctttagggaacacaatctatatacggtgaatatcacatttctggaggtcaagatggaggattacggcctccctttcatgtgtcacgccggggtcagcacagcttacattattcttcaactgcccgctccagacttccgggcctacctcatcggagggcttattgcacttgtcgccgtagcagttagcgtcgtttatatttataatatctttaagattgacattgtcctgtggtataggagtgccttccactctacagagacgatcgtggatggcaaactgtacgatgcttatgtgctctacccaaagcctcacaaggaatcacagaggcatgccgtcgatgccttagtactaaacatcttgccagaggtgctggaaagacaatgcggatataagttattcatattcggtcgagacgaattccccggacaagccgttgccaacgtgatagacgaaaatgtaaagctgtgcaggaggctgattgttatagtcgtccccgagagcctcggctttggactgctgaagaatttaagcgaagaacagatcgccgtctattctgccctgatccaggacggcatgaaggtgatccttatagaattggaaaaaattgaggattacaccgtcatgccggaatcaatacagtacattaaacagaaacacggcgctattagatggcacggagactttactgaacagtcacagtgcatgaaaacgaagttctggaaaacagtcaggtatcatatgcctccaagacgctgccgtcccttccctcctgttcagcttttgcaacatacaccttgctatcggaccgccggaccagagctgggctcgcgacggaagaaatgcaccctcaccaccggctag

SEQ ID NO: 191738 - DNA, 519 bp, synthetic construct
  misc_feature 1..519: note = Description of Artificial Sequence: Synthetic coding sequence
  source 1..519: mol_type = other DNA
atgtggagcctgctgctgtgcggcctgagcatcgccctgcccctgtctgtgacagctgacggttgcaaagacatctttatgaagaatgaaattctctccgcgtcccaaccattcgcattcaattgcacatttccaccaattacaagtggggaggtgagcgtcacctggtacaagaattcatctaagattccggtatctaaaattatccagagccgtatacaccaagatgagacctggatcctcttcttacccatggagtggggggactccggggtgtatcaatgtgttattaagggccgcgactcctgtcataggattcacgtcaacctgaccgtgtttgagaagcattggtgcgatacttcaatagggggcctgcccaatctgagtgatgagtacaaacagattttacacctgggcaaagacgactcattaacctgccacctgcacttccccaagagctgcgtgctgggtccgataaaatggtacaaagattgtaacgaaattaagggcgaacgctag

SEQ ID NO: 191739 - DNA, 1374 bp, synthetic construct
  misc_feature 1..1374: note = Description of Artificial Sequence: Synthetic coding sequence
  source 1..1374: mol_type = other DNA
atgaccggcctggtgagcctgagctacttccccctgagcacccggagttgtgccttgcaaagctgttcacccgtatggggatgcggtccatgttgcagcgcaggatgtccaagcccattccactgcctatctcagcaggactgcaatgagataaaaggtgagagatttacagtcctcgagacccgactgcttgtcagcaacgtgagcgctgaagatcggggcaactatgcgtgccaagccatccttacccatagcggtaaacagtacgaggtcttaaatgggatcacggtttccattaagagagccggctacggtggatcagtgcctaaaatcatctatcctaaaaatcacagcatcgaagtccagctgggtacaaccttgatagtggattgcaatgtaactgacacaaaggacaataccaacctgcgctgttggagagtaaataacactttagtggatgattattatgacgagtctaaacgtatccgggaaggagtcgagacacacgtctctttcagggaacacaatctgtacaccgtcaatatcacctttctcgaagttaagatggaggattacggtctgcccttcatgtgccatgcgggtgtctccacagcgtacattatcctgcaattaccggcccccgacttcagggcctacctaattgggggattgattgcactggtcgctgtggcagttagcgtggtctacatctacaacatcttcaagatagacattgtgctctggtatcgtagcgcctttcactccacggaaaccatcgtggacggtaagttgtacgatgcttacgtgctctacccaaagccacacaaggaatcccagaggcatgcggtggacgctcttgttctcaatatcctccccgaggttcttgagcgacagtgtgggtacaaactgtttattttcgggcgcgatgaattcccagggcaggccgtagcaaatgtcattgacgagaacgtgaaactgtgtagaagacttatcgtcatcgtggtgccagagagtctaggatttggcctgcttaaaaacctttccgaggagcagatcgcagtgtattccgcacttatccaggatggcatgaaagtgattctgatcgaactggagaaaattgaagactacacagtcatgccagagtccatccagtatattaaacagaaacatggcgctatacggtggcatggcgacttcacagagcagtcccagtgtatgaagactaagttctggaaaaccgtgcgatatcacatgcctcctcgccgctgccgccctttcccacccgttcaactgctccaacatacaccctgctataggacagccggtccggaattgggaagtagacggaaaaagtgcaccctcaccacaggttag

SEQ ID NO: 191740 - DNA, 1728 bp, synthetic construct
  misc_feature 1..1728: note = Description of Artificial Sequence: Synthetic coding sequence
  source 1..1728: mol_type = other DNA
atgtggagcctgctgctgtgcggcctgagcatcgccctgcccctgagcgtcactgcagatggctgtaaagatatctttatgaagaatgagattcttagcgctagccaacccttcgcttttaactgtacatttcctcccatcactagtggcgaggtgagtgtgacctggtataaaaattcctctaagatacctgtttctaaaatcattcagtctcgcattcaccaggacgagacctggatcctttttttgccaatggagtggggcgattcaggcgtctaccagtgcgtgattaaaggccgagacagctgccaccgaattcacgtaaatctgaccgttttcgaaaaacactggtgtgacacgagcatcggaggcctgcccaatctcagcgatgagtacaaacagattctccacttaggcaaagatgacagtctcacttgtcatttacactttcctaaatcctgcgttcttgggcctatcaagtggtataaggactgcaatgaaattaagggcgagcgctttaccgtgcttgaaactcggctgctggtgagcaatgtgagcgctgaagatcgcggaaactacgcttgccaggctatcctgactcacagcgggaaacaatacgaagtcttgaacggaatcacagtctctattaccgagagggcaggctacggtgggtcagtgccaaagatcatttacccgaagaaccatagtatcgaagtgcagctgggcacaactctcatagtggattgcaatgtcactgacacaaaagacaatacaaatttgcggtgttggcgggtgaataacacattggttgacgattattatgacgagtctaaaagaatcagagaaggcgtagagacacacgtgagcttcagggaacataatctgtacaccgtgaatattacattcctagaggtgaagatggaggactatggcctgccgttcatgtgccatgccggggtttccacagcttacattatcctccaactcccagcccctgatttcagagcatatctgatcggaggactcattgcactagtggctgttgctgtgtctgtcgtgtatatctataatatttttaagatcgacatcgttctgtggtataggtctgcttttcactcgaccgaaactattgttgacggtaagctgtatgacgcctacgtcttatatccaaagccccataaggaaagccagcgacacgcagtcgacgcactggtgcttaatattctgccagaagtgctcgagcgtcaatgcggttataaactgttcattttcggacgcgacgagttcccagggcaggccgtggccaacgtgatcgacgaaaatgtcaagctctgccgcaggctcattgtcatcgttgtgcccgagtccctcgggttcgggcttctgaagaacctgagcgaggagcagattgcggtgtatagcgctctgattcaggacggaatgaaggtgatcctcattgaacttgagaagatcgaagactacaccgtgatgccagagagcatacagtacatcaagcaaaaacacggagcaatcaggtggcacggcgactttaccgaacagtcccaatgtatgaagacgaagttctggaaaaccgtgcggtaccatatgcccccacgtcgctgcagaccctttccccctgtgcagttgctgcagcacactccatgctaccggactgccggcccagaactgggatctcggcggaagaaatgtaccttgacaacggggtag

SEQ ID NO: 191741 - DNA, 300 bp, synthetic construct
  misc_feature 1..300: note = Description of Artificial Sequence: Synthetic coding sequence
  source 1..300: mol_type = other DNA
atgcagccccgggtgctgctggtggtggccctgctggccctgctggcttccgcgcgcgcgtcggaagccgaggacgctagtctgctgtcttttatgcagggttacatgaagcatgccacaaagacggcaaaggacgctttaagtagcgttcaggagtctcaggttgctcaacaggcgagaggttgggttaccgatgggttttccagtcttaaggattactggtctaccgtcaaggacaaattttcagagttctgggacctggaccctgaagttcggcctacatcggcggtggctgcatag

SEQ ID NO: 191742 - DNA, 1500 bp, synthetic construct
  misc_feature 1..1500: note = Description of Artificial Sequence: Synthetic coding sequence
  source 1..1500: mol_type = other DNA
atgagccggaccgagctgcccagcccccccagcgtgtggttcgaggctgaattttttcatcacatcctgcattggacccccattcccaaccagtctgagagtacatgctacgaagttgccctgctacgctatggcattgagtcttggaattccattagcaattgttcccagaccctctcttacgacttgacagctgtgactctggacctgtaccattccaacggctatagagctagggtccgcgccgttgacgggtccagacactctaactggaccgtcacaaatactaggtttagcgtggatgaggtcacactcaccgtgggttccgtgaacctggaaatccataacggttttatcctgggtaaaatacagctgcctcgacccaagatggcgccagctaatgacacatacgagtccatatttagccacttccgagaatatgaaattgccattcgcaaggtgcctgggaattttacatttactcacaaaaaggttaagcacgagaacttttcactgctgacaagcggtgaggtgggggagttttgtgtgcaggtaaagccgtctgtggcctcacgctccaataaaggcatgtggagcaaggaagaatgtatctctctcacccgtcagtacttcacagtcaccaacgtgataatttttttcgccttcgttctgcttctctctggcgctctcgcatattgtttggcactgcagttgtacgtcaggcgaaggaaaaaattgccaagtgtgttgctcttcaaaaaaccttctcccttcattttcatcagccaacggccatcacccgagacccaggatacaatccaccctctcgatgaggaagcttttttgaaagtcagccctgaactgaaaaaccttgatttacatggttctactgacagcggcttcggaagcacaaagccatcgctacagactgaggaaccccagtttttactgcccgatcctcacccacaggcagataggactctcggtaatagagagcccccagtgttaggagattcatgtagctccgggagttctaatagtacagattctgggatttgtctgcaggaaccatccctgagcccgtccactggaccaacatgggaacaacaagtcggcagcaactcccgcgggcaagatgattccggcatagacttggttcagaactcagagggacgcgctggtgatactcagggcggctctgcacttgggcatcattcccctcccgaacccgaagttcccggagaggaagaccctgctgcagtagcctttcagggatacctcaggcaaaccaggtgcgcagaagagaaggcaaccaagaccggatgtctggaagaagagtctccccttacggacggcctgggccccaagtttggccgctgcctcgtggacgaggcaggccttcacccaccagccctggccaaaggttaccttaagcaagatccgttggaaatgacactcgcgtcctccgggcccaacgggaccgtcgagcctgcgcattag

SEQ ID NO: 191743 - DNA, 1677 bp, synthetic construct
  misc_feature 1..1677: note = Description of Artificial Sequence: Synthetic coding sequence
  source 1..1677: mol_type = other DNA
atgagccggaccgagctgcccagcccccccagcgtgtggttcgaggccgagtttttccaccatatcttgcactggacgcctatcccaaatcaatccgagagcacttgctatgaggtagctctccttaggtatgggatcgaaagttggaattctataagtaactgtagtcagacactctcctacgacctgaccgccgtaacattggatctgtaccattctaatggctatcgggcccgagtgcgggccgtcgacgggagtcggcactcaaactggacagtgaccaatacacggttttccgtggacgaggtgactcttacagtcggctctgtgaatctcgagattcacaatggttttatcctgggaaaaatacagctccccaggcctaagatggccccggcaaacgacacctatgaatccatcttctcccatttccgagagtatgagatcgcaattcgtaaagtacctggtaacttcacttttacgcataaaaaagtcaagcacgaaaatttctcactgctgacatccggagaagtaggcgagttctgcgtgcaggtgaaaccaagcgtagcttcccgatccaacaagggcatgtggagcaaagaggaatgtatttctctgacccgccagtatttcacggtaactaacgtcatcatcttctttgcctttgtgctcctgctttccggagccttggcctactgcctggcactgcaattgtatgtgcgacgtcgaaagaaactcccttcagtcctcctgttcaagaaaccctctccgtttatttttatcagccagcgcccatcccccgagactcaggacacaattcatccacttgatgaggaggcttttttgaaggtgagccccgagttgaaaaatctcgatctgcacggatcaaccgatagcggttttggttctaccaaaccatcactgcagactgaggagccacagtttctcttgcctgaccctcatccacaggcggatcggactctgggcaacagggagccccccgttctcggcgactcttgttcctctggatcgtcgaatagcaccgacagcggaatctgcttgcaagagccttcactctccccttccacaggtcctacatgggaacaacaggtcggctctaactctaggggccaggatgactccggaattgatctggtgcagaacagtgagggaagagccggggatacacaggggggatcggctttgggtcaccactccccaccggaacccgaagtcccaggggaggaggaccctgctgctgttgcgttccagggctatttgagacagacgagatgtgccgaagagaaagccaccaaaactggatgcctggaagaggagagcccgctgactgacggcctgggccccaaatttgggagatgcctcgtggatgaagctgggctccatccacccgcattggctaaaggatacctcaagcaggatcctcttgaaatgactttggctagctcgggagctccgacggggcagtggaatcagcccacggaggagtggtccctgctggccctcagttcttgctccgacctgggcatcagcgattggagttttgcccatgatctagccccactcggttgcgttgccgcgccaggcggactgctaggctcctttaattccgacctcgtaactttgcctctcatctcttccctgcagagcagtgagtag

SEQ ID NO: 191744 - DNA, 1290 bp, synthetic construct
  misc_feature 1..1290: note = Description of Artificial Sequence: Synthetic coding sequence
  source 1..1290: mol_type = other DNA
atggcccccgccaacgacacctacgagagcatcttcagccacttccgcgagtatgaaatcgccattagaaaagtccctggaaacttcaccttcacgcacaagaaggtgaaacatgaaaacttcagtctgttaacgagcggcgaagttggggaattttgtgtacaggtgaaaccgagtgtcgcttctagaagcaacaaggggatgtggagcaaggaggagtgcatctctttgactcgccagtatttcactgtgacaaacgtgatcatctttttcgccttcgtgctgctcctgtccggagcgctggcctattgcctggcactgcagctgtacgttcgccgccgcaagaagcttcccagcgtccttctgttcaaaaagccctcgccgttcatctttatttcccagcgtccttccccagaaacccaggacacaatccaccccctggacgaggaggccttcctaaaagtctcccctgagctcaaaaatctggacttgcacggttccaccgattccggcttcgggtccactaaaccgagccttcagaccgaggagccacagttcctgttgccagatccgcacccccaggctgatagaaccctggggaaccgagaaccccctgtccttggagatagctgctcaagtggttcaagcaattcaaccgattccggaatatgcctccaggagcctagtctgtcccctagcacaggacctacgtgggaacagcaggtgggcagcaactccagaggacaggatgacagcgggattgatctcgtccaaaattccgagggccgggccggagacacgcagggcggaagcgctttgggccatcattctccaccagaacctgaggtgcccggcgaagaagaccctgccgcagttgcatttcagggctacttgcgtcagacccgatgcgccgaggagaaagcgaccaaaaccggctgtttggaagaggagagccctcttacagatggcttaggacccaagtttggccgatgcctcgtggatgaagccggcctgcatcctcccgctctcgccaagggctacttaaaacaggatcccctagaaatgacactagcaagcagcggtgctcctactggccagtggaaccagcccaccgaggagtggtccttgctcgctctatcaagttgtagcgacctggggatcagcgattggagctttgcccatgatctggctcctcttggttgcgttgcggccccagggggtctcctcggcagctttaactcagacttggtcacacttcctctaataagttcattacagagtagcgaatag

SEQ ID NO: 191745 - DNA, 1269 bp, synthetic construct
  misc_feature 1..1269: note = Description of Artificial Sequence: Synthetic coding sequence
  source 1..1269: mol_type = other DNA
atgagcagcagctgcagcggcctgagccgggtgctggtggccgtggctactgctcttgtaagcgcaagcagtccatgtccccaggcctggggcccgccaggagtccagtatggacaaccgggtcggagtgtcaagctgtgctgccctggagtcactgccggagaccctgtcagctggttccgagacggggagcccaaactactacaggggcctgattccggcctgggccatgaactcgtccttgctcaggccgattctactgacgaaggaacctatatatgtcaaaccttagacggagcccttggtggcactgtgacactgcagttgggatacccaccagcacggccagtcgtgagttgccaggccgccgattacgaaaacttttcttgcacttggagtccaagtcagatttctggcctgcccacacggtaccttacatcgtatagaaagaaaaccgtcttgggggcagatagccagaggcggtctccttccacaggcccgtggccgtgtccgcaggacccccttggcgcagctagatgcgtcgtgcacggagctgagttctggtcacaatacaggattaacgtcactgaggttaatcctctgggtgcctcaacacgactgctggacgtgtccctgcaaagcatcctgagacccgaccctccgcagggacttcgcgtggagtcggttccgggataccccaggagactgagagcaagttggacttatcctgccagctggccgtgccagccacattttttattgaagtttaggctgcaatatcgtccagctcagcatccagcatggtccaccgtggagcctgcaggcctagaggaggttataacagatgctgttgctggcctgccacatgctgtccgcgtgagcgcaagggactttcttgatgcggggacctggtctacctggagtccagaagcatggggcactccctcaaccggaacgattcccaaagaaatccctgcatggggccagctgcacacacaacctgaagtggagccccaggtagattcccctgcacctcccagaccatccctacagccgcacccgagactgctggaccatcgggatagcgtggaacaggtggcagtgctcgcctctctcggcatactcagcttcctgggtctggttgcgggcgctttggccctgggtctgtggctgaggctccgcagagggggcaaagacggttcaccaaagccaggtttcttggcctccgtaatccctgttgatcggaggcccggggcaccaaatctctag

SEQ ID NO: 191746 - DNA, 1173 bp, synthetic construct
  misc_feature 1..1173: note = Description of Artificial Sequence: Synthetic coding sequence
  source 1..1173: mol_type = other DNA
atgagcagcagctgcagcggcctgagccgggtgctggtggccgtggcgactgccctagtttctgcatcctccccatgcccccaagcctggggacctcctggagtgcagtacggccagcccgggcgctccgtgaaactgtgctgcccgggggtaacagctggggacccagtctcatggttccgagacggggaaccgaagctgctgcagggccctgattcagggctcgggcatgaattggtgctggctcaggctgatagcacagatgagggaacctacatctgccaaacactggacggcgccctcggcggcacggtcaccctgcagctgggctacccacccgcccgacccgtggtctcctgtcaggcagctgactacgaaaacttttcttgcacgtggagcccctctcaaatctccggtctgccaactcggtacctgacctcttacagaaaaaagactgtcttaggcgccgacagccagcgaagaagcccctccacgggaccctggccttgcccgcaggatccattgggcgcggctcgttgtgtcgtgcacggcgccgaattctggtcacagtaccgaatcaatgtgacagaggtgaacccactgggagcatccaccaggcttcttgacgtgagtctgcagagtatattgcgccctgaccctccgcagggcttaagagtggagtccgtgcccggctatccgcgcagacttcgcgccagttggacctatcctgcttcctggccctgtcaacctcatttcctcttgaaattcaggcttcagtatagacccgctcagcaccccgcttggagtaccgtggaaccggctggcctggaagaggtgatcacagacgccgtggcgggtctgccccatgccgtccgtgtgtccgccagagatttcctggacgccggtacctggtcgacttggtcgcctgaggcctggggaacccctagtactggcactatcccaaaggaaatcccggcttggggacagctgcatacccaaccagaggtggaacctcaggtggattcacctgctcccccccggccttccttacagccccatccacgccttctggaccaccgagattctgttgaacaagtcgccgtgctggcctcacttggtattctgtcctttctgggactggtggcgggcgctctggccttagggctctggtag

SEQ ID NO: 191747 - DNA, 1269 bp, synthetic construct
  misc_feature 1..1269: note = Description of Artificial Sequence: Synthetic coding sequence
  source 1..1269: mol_type = other DNA
atgagcagcagctgcagcggcctgagccgggtgctggtggccgtggcaaccgctcttgtgtctgcttccagtccttgcccccaggcgtggggccccccaggtgtgcagtacgggcagcctggccggagcgtcaagctgtgttgtcctggagttacagccggggatcctgtctcctggttcagggacggcgagcctaagcttctccaaggaccagactctgggttaggacacgagctggtcctggcccaagccgattcaacagatgagggaacctatatctgtcagaccctggatggcgctctgggcggtaccgtgacactgcagctgggctatccacccgcacggccagtggttagctgccaagccgcagattatgaaaacttttcttgtacctggagtccctcacagatatcgggtctgcccacacgctacttaactagctatcgaaaaaagactgtgctaggcgccgactcacagcggagatctccctctaccggaccatggccctgcccacaagaccctctgggggcggcaagatgtgttgtgcatggcgcagaattttggagccagtacagaattaacgttactgaagtaaatcccctgggtgcgagcacccgcctccttgacgtttccctgcaaagcatactccggccagacccaccccagggcctacgggttgaatctgttccagggtaccctagacgcctgcgcgctagttggacttaccccgcaagttggccttgtcagcctcactttctcctgaagttccgcctgcaataccgacctgcgcagcatcctgcctggtctaccgttgaacctgctggcctcgaagaggtgatcacagatgccgtcgcgggcctcccgcatgccgtcagggtctctgcgagagatttcctggatgctggtacttggtcaacttggtctcccgaggcgtggggaactccaagcactggcaccattcccaaggaaatccccgcatggggtcagctacacactcagcccgaggttgagccccaggttgattcccccgccccaccacgaccaagtttgcaaccacacccccgtcttcttgaccatcgcgacagcgtcgagcaggtagctgtgcttgcgagccttgggattctatcctttcttgggctcgtggcaggagccctggccctgggcctttggctacgccttcgaaggggtggaaaggacggaagtcctaagccaggcttcttagcaagcgtcataccagtggacaggaggcctggcgctcccaatctctag

SEQ ID NO: 191748 - DNA, 1269 bp, synthetic construct
  misc_feature 1..1269: note = Description of Artificial Sequence: Synthetic coding sequence
  source 1..1269: mol_type = other DNA
atgagcagcagctgcagcggcctgagccgggtgctggtggccgtggcaactgctttagtttcggcctcttctccctgccctcaggcttggggaccgccaggagtgcaatacggtcagcctgggaggtcagtcaaactgtgctgcccaggtgtgacagccggcgatcccgtctcgtggtttcgcgatggggagcctaaactccttcagggacctgactctggcctagggcatgagctggtgcttgcccaggcagatagcacagatgagggcacttacatttgtcagactctcgacggcgcccttggcggcactgtgactctgcagctagggtacccaccagcaagacctgtagtctcttgccaggctgcagactacgagaatttcagttgcacttggtctcccagtcaaatttcggggctgcccacacgttacctaacttcctatagaaaaaagaccgtgctcggggcggattcacagagaagatctccctccaccggtccctggccttgtccgcaagatccgttgggtgccgctcgctgcgtagtgcacggcgccgaattctggagtcagtataggatcaacgtgactgaagtaaaccctttaggtgcatctacacgcttgctcgacgtgtcacttcaatctattctgcggcccgaccccccgcagggcttacgtgtggagtctgtccccggataccccaggcggctcagggcttcatggacctatcccgcaagctggccatgccaaccccatttcctccttaaattcaggctgcaatatcgccccgcgcagcaccctgcatggtccaccgtggaaccagccggtctcgaagaagtcattactgatgcggtggctggtcttccccacgccgtcagagtttccgctcgcgactttctggatgcaggtacatggagtacctggtcaccagaggcttggggaacaccaagcactggtacaatacccaaagaaattcctgcttggggccagctacacacacagcccgaggtggagccacaggtcgattccccagcacccccacgtccttcactccaaccacacccccgcctactggaccacagagattccgtggagcaggtagccgtactggcttccctggggattctgtcattcctcgggttggtagcaggggctctggcactgggcctgtggctcagattgaggcgaggaggcaaagacggatccccaaaaccgggatttttagcatctgtgattccagtcgatcggagacctggcgccccaaacttgtag

SEQ ID NO: 191749 - DNA, 813 bp, synthetic construct
  misc_feature 1..813: note = Description of Artificial Sequence: Synthetic coding sequence
  source 1..813: mol_type = other DNA
atgagcagcagctgcagcggcctgagccgggtgctggtggccgtggccaccgccctggtcagcgcatcttccccctgtccacaggcatgggggcctcctggtgtgcaatacggacaacccgggaggagcgttaaattgtgctgcccaggagttaccgcaggggaccctgtgtcctggttccgagatggcgagcctaaacttctccaaggccctgacagtggcctcgggcacgaactagtactcgcgcaggcagatagcaccgatgaagggacttatatctgtcagacgttggacggtgctctgggggggacagtgacattgcagttaggctatcctccagcccgccccgtcgtcagttgtcaggcagcagattacgaaaatttctcttgcacttggagtccttcccagatcagcggactacccacccggtatttaacctcttacaggaagaagaccgtgcttggtgccgactcccaaagacggtcgcctagcacagggccctggccctgcccacaggatcctctgggtgccgcccgttgtgtggtgcacggggccgagttttggtctcagtacaggatcaatgtgactgaggtgaaccccctgggcgctagcacccggctcttggatgtgtccctgcagtccatactcaggccagatccgccccaggggcttcgggtagagagtgtacccggatatccacgcagacttagggcttcctggacctaccccgcctcatggccttgccagcctcattttttactcaagtttcgcctacagtatcgccctgcacagcaccctgcgtggagcacctag

SEQ ID NO: 191750 - DNA, 504 bp, synthetic construct
  misc_feature 1..504: note = Description of Artificial Sequence: Synthetic coding sequence
  source 1..504: mol_type = other DNA
atgagcagcagctgcagcggcctgagccgggtgctggtggccgtggctacagcactcgtgtccgccagctctccatgtccccaggcttggggcccgcccggggtgcagtacggacagcctggtaggagcgtcaaattatgctgccctggggtgactgccggagatcccgtttcctggttccgcgacggtgagcctaagttactgcaggggcccgatagtggactgggacacgagctcgtactggcccaagctgactctacagatgaaggaacatacatctgccagactctggacggcgcgcttggcgggactgtgacactgcagctgggatacccccctgcccgcccagtcgtttcctgtcaagccgccgattacgagaatttttcatgtacctggagcccgtcgcagatcagcggcttacccacacggtacctcacctcttaccgtaaaaaaacggtgctgggtgcagacagccagagaaggagtccgagtaccgggccttag

SEQ ID NO: 191751 - DNA, 420 bp, synthetic construct
  misc_feature 1..420: note = Description of Artificial Sequence: Synthetic coding sequence
  source 1..420: mol_type = other DNA
atgagcagcagctgcagcggcctgagccgggtgctggtggccgtggcaaccgcactggtgtccgctagcagcccatgccctcaggcctggggcccgcctggggtgcagtacggtcagcccgggaggtccgtgaaactatgttgtcccggagtgacggcaggcgaccccgtgagctggtttcgcgacggggaacccaaactcttacagggcccggacagcggcctcggtcacgagctcgtgctggctcaagccgactcaactgacgagggaacctacatctgccagactctggatggtgcccttggcggtaccgtgacattgcagcttgggtaccctccagctcgacctgtggtgtcatgccaggctgccgactacgagaacttcagctgtacttggtcaccctcccagatctctggctag

SEQ ID NO: 191752 - DNA, 1989 bp, synthetic construct
  misc_feature 1..1989: note = Description of Artificial Sequence: Synthetic coding sequence
  source 1..1989: mol_type = other DNA
atggagcccctggtgacctgggtggtgcccctgctgttcctgttcctgctgtcacgccagggtgctgcctgcaggacctctgagtgctgcttccaggatccaccgtaccccgacgccgactcgggctccgcctcgggaccaagggacctccgctgttaccgaattagcagcgatcgctatgaatgcagttggcaatatgagggccctactgctggggtgtctcattttctgagatgttgcctgtcctccggacgctgctgttatttcgccgcaggatctgcaacccgattgcagttcagcgaccaggccggagttagtgtgctatataccgtaactctctgggtggagtcctgggctagaaatcagaccgagaaatcacccgaagttacgcttcagttatacaactccgttaaatacgagcctccgttgggggatattaaggtcagcaagttggcgggccagcttcgtatggagtgggagacgcctgataatcaggtgggcgcagaagtccagttcaggcatagaacaccgtcctctccatggaagctcggcgattgcggcccccaggatgacgatacagagagttgcctgtgtcctctggagatgaacgtggcccaggagtttcagttacgccgaaggcagctggggtcgcaggggagttcctggtcaaagtggagttccccggtttgcgtgcccccagagaatcccccccagccccaggtgagattctcggtcgaacagctcgggcaggacgggcgtcgcaggttgactctgaaggaacagcctacccaactcgaactgcctgagggctgtcagggtttggccccagggaccgaagtgacctataggctacaacttcacatgttatcctgcccttgtaaggccaaagctactcgaactctccatctcgggaagatgccctatctgtctggcgcagcttacaatgtagctgtaatcagcagcaatcagtttggccccggcctgaatcaaacatggcatattccagctgacactcacaccgagccagtggccttgaacatctccgtgggcaccaatggcactactatgtattggcctgccagagctcagtcaatgacatattgtatagagtggcagccggtaggacaggatggagggctggctacctgctccctcaccgcgccccaggatcccgatccggctggaatggccacgtactcttggtctagagaatcaggcgctatgggccaggaaaaatgctattacattacaatcttcgcatccgcacatccagagaaattaacattgtggagcacagtgctgtccacttatcactttggtgggaacgctagcgcagccggaacaccacaccacgtgtctgtcaagaatcattccctggactctgtgtcggtagattgggccccctctctgttgagcacttgtcccggagtgttgaaggagtacgtggtacggtgcagagatgaggactcaaagcaggtaagtgagcaccctgtgcagcccactgagacacaggtcacactcagtgggcttagagctggggtggcttacaccgtgcaggttagggccgataccgcctggctcaggggcgtgtggagccagccgcagcggttcagtatcgaggttcaggtgagcgactggctgatcttttttgccagcttaggatcattcctttcgatactcctcgtcggagtactgggttatctaggactgaatagggccgcccgccatctttgcccgcctcttcctacaccttgcgcttctagcgccattgaatttcctggcggcaaggaaacctggcaatggattaatcccgtggatttccaagaggaagctagcctgcaggaggcactagtggtggagatgagctgggataagggcgaacgaactgagccattggaaaagacagagttacctgagggcgcacctgagctcgcccttgatacggaactttctctggaagacggcgatcgctgcaaggcgaagatgtag

SEQ ID NO: 191753 - DNA, 1146 bp, synthetic construct
  misc_feature 1..1146: note = Description of Artificial Sequence: Synthetic coding sequence
  source 1..1146: mol_type = other DNA
atggagcccctggtgacctgggtggtgcccctgctgttcctgttcctgctgtctagacagggcgcagcttgtagaacttccgagtgttgcttccaggatcccccataccctgatgccgatagcggatccgcttccgggccccgcgaccttcgatgctataggatcagcagcgataggtatgagtgctcgtggcagtatgaagggcccactgcaggagtcagccattttcttagatgctgcctcagtagcggtaggtgttgttactttgccgcaggaagcgccacacgccttcagttttcagaccaagccggggttagcgtgctgtacaccgtcacactttgggtggagtcttgggcccggaaccaaaccgaaaagtcacctgaggtgacgctccagttatataatagtgtgaaatacgaacccccactcggagatatcaaggtgagtaagttggctggccagctacggatggagtgggagacgccggataaccaggtaggagccgaggttcagttcaggcatcggacaccgtcctctccctggaagctgggagactgcggcccccaagacgacgatactgagtcatgtttgtgcccactggaaatgaatgtggctcaagaatttcagctcaggcggcgccagctgggctcccaagggtccagctggtccaaatggtcttccccagtttgtgtgccacctgaaaacccgccacagccccaggtgaggttctccgttgaacagctgggccaggacggccggcggagactgacacttaaggaacaaccaacgcagctcgaactacccgagggttgtcagggtctcgcccctggaaccgaggtgacttatcgactgcagctgcatatgctctcatgcccttgtaaggcgaaggctaccaggactcttcatctcggaaaaatgccttacctctcaggagcggcttataatgtggccgtgatcagctctaaccaatttgggcctggcctcaatcagacttggcatatacccgccgacacccacaccgacggaatgataagcgcccactgtaatctgagactccctgattcaagagattcaccggcctcagcatcgcgcgttgccggcatcacaggcatctgccaccacacacggctcattctctatttttag

SEQ ID NO: 191754 - DNA, 1989 bp, synthetic construct
  misc_feature 1..1989: note = Description of Artificial Sequence: Synthetic coding sequence
  source 1..1989: mol_type = other DNA
atggagcccctggtgacctgggtggtgcccctgctgttcctgttccttctgagcagacagggggcggcttgccgtacatcagagtgctgctttcaagatccaccctacccagatgcagacagcgggtccgcgtccggaccaagagacctaagatgttaccggatctccagcgatagatatgagtgttcgtggcaatacgaggggccaacagcgggcgtgagccactttcttagatgctgcttaagctccggacgctgttgctattttgccgcgggttctgcgaccagacttcagttctctgatcaagccggggtgagcgtgctgtacactgtcaccctgtgggtggagtcctgggcccgcaaccagacggaaaaatccccagaagtgactctacagctctataattctgtaaagtacgagcccccgctgggcgacatcaaagtgtcaaaactcgccgggcaactcaggatggagtgggaaacccccgataatcaggtaggagcggaggtccagttccggcaccgtacaccgtctagcccttggaagcttggtgactgtggcccccaggacgatgataccgaatcatgtctgtgtcctctagaaatgaacgttgcccaggagttccagttgaggcgccggcaactaggatcccaaggttcaagttggtccaagtggagcagccctgtgtgcgttccacccgagaaccctcctcagccccaggtgagattttccgtggaacagcttgggcaggacgggagacggaggctcacgctgaaagaacaacccacccagctcgaattaccagagggctgtcagggcctggcccccggaaccgaggttacctacaggctccagctacatatgctgtcctgcccatgtaaggcaaaggctacaagaacactgcatcttggtaagatgccctacctgtctggagcagcctacaatgtggccgtgatatcatccaatcagttcgggcctggactaaaccagacctggcacatcccggccgacactcacacagagccagttgccttaaatattagcgtagggactaatggcactacaatgtactggcccgccagggctcaatctatgacgtattgtatagagtggcaaccagtggggcaagatggcggactggccacttgttcgctaaccgcgccacaggaccccgatcctgcaggaatggctacttactcttggagcagagaatcaggcgctatgggccaggagaaatgttattacattaccatctttgcaagtgctcacccagagaagttgacactgtggtccaccgtcttgagtacctaccattttgggggcaatgcctctgccgcggggacaccacatcacgtttccgtaaaaaatcactctctggacagcgtcagtgtggactgggcaccatccctgctttcaacctgccccggagtgctcaaggagtatgtggttcgttgccgcgacgaggattcaaaacaggtgagtgaacaccctgtgcaacccactgaaacccaggtcacccttagcgggctacgggccggcgtggcctacacagtgcaggtcagagctgatacagcttggctgcgaggcgtgtggtctcagcctcagagattctctatcgaggtacaggttagcgattggctcattttctttgcatccctgggcagctttctgtccatcctactggtcggagtcttgggatacctggggctcaatagggccgcacggcatttatgcccccccttgcctaccccctgcgcttcctccgccattgagttccctgggggaaaggagacgtggcaatggatcaatcctgttgattttcaggaggaggcttctttgcaggaagccctcgtagtggaaatgagctgggataagggcgaacgtactgagccccttgagaaaacggagcttcctgagggtgcccccgaactggccctggacaccgagttatccctggaggatggcgataggtgtaaggcgaagatgtag

SEQ ID NO: 191755 - DNA, 2589 bp, synthetic construct
  misc_feature 1..2589: note = Description of Artificial Sequence: Synthetic coding sequence
  source 1..2589: mol_type = other DNA
atggcccacaccttccggggctgcagcctggccttcatgttcatcatcacctggctactcattaaagccaaaatcgacgcctgtaagagaggagacgtcaccgttaagcccagtcatgtcatcctcctcggcagtactgtgaatatcacctgctctctgaagcccaggcagggctgcttccattactcccgaaggaacaagttaattctgtacaagttcgacaggaggatcaattttcatcacggacattccctgaattcccaagttacaggactgcccctgggaaccacgctcttcgtgtgcaaattagcctgcattaactctgatgaaattcagatttgcggcgccgaaatctttgtgggggtggcacccgagcaaccccagaatttgtcttgcatccagaaaggcgaacagggtacagtggcttgcacttgggaacgaggtcgagatacccacttgtataccgaatatacactccagctctctggacccaagaacctcacctggcagaaacagtgtaaggatatctattgcgactatttagacttcggcataaatctgacaccagaaagccccgaaagcaacttcaccgctaaggtgacggcagtcaactctttgggctcctcatcctctcttccctccacgttcacctttttagacatcgtgagaccactgcccccctgggacatcaggatcaagttccaaaaggctagtgtaagccgctgtacactttactggcgcgatgaggggctggttctgcttaacagactcagataccgaccatcaaactccaggctttggaacatggtaaacgttaccaaggcaaagggccgccacgacttactcgatctgaagcccttcactgaatacgagtttcagatctcctccaagctgcatctgtataagggctcctggagtgattggtccgagagcctcagagctcagacacccgaagaggaacccaccgggatgcttgacgtttggtatatgaagcggcatatcgactactccagacaacagattagtctcttttggaagaacctcagcgtgtcggaagcccgaggaaagatcctgcattatcaggttaccttacaggagttgactggaggaaaggcgatgacacagaacatcaccggacataccagctggacgaccgtaatacctagaactggaaattgggccgtggccgtgagcgcagctaacagcaagggcagcagcctccccacaaggataaacatcatgaacttatgtgaggcgggcctgctcgccccacggcaagtgtcagccaatagtgagggcatggacaacatcttagttacctggcaaccgccacgaaaagatccaagcgcagttcaagagtacgtcgtcgaatggcgagagctccacccaggaggcgatacgcaggtgcctttgaactggttacggagccgtccctacaatgtttcagcccttatctccgagaatatcaaatcttacatttgctacgagataagagtgtatgcccttagcggcgatcagggcggctgttccagtatccttggtaatagcaagcataaagcacctctctctggacctcacatcaatgctattacagaggagaagggatctatcctgatcagttggaatagtatccccgtgcaggagcaaatggggtgcctgctccactaccgcatctactggaaagagagagactcaaattcccagccgcaactgtgcgagatcccctaccgagtgagccagaactcccacccgatcaactctttgcagcctcgagtgacctacgtcctgtggatgacagccttgaccgcagcaggggagagcagccatggaaacgaaagagagttctgcttacaaggcaaagccaactggatggcatttgtagctccatcaatctgtatcgccatcatcatggtaggaatcttctctacccactattttcagcagaaagtattcgtgctcctcgccgctctcagacctcagtggtgcagccgcgagatcccagatcccgcgaattcaacatgcgctaaaaagtaccccatcgcggaagagaagacacagctacctttggaccggctgctcatcgattggcccacccctgaggaccctgagcccctggtcatttctgaggttctccaccaggttacacctgtatttcgccatcccccttgtagtaattggccacagagggaaaaagggatccaagggcaccaggcttcagagaaggatatgatgcacagtgcctcctccccccccccccccagggccctccaggctgagtctaggcaactcgtggacctgtacaaggtgctcgaatcaaggggttccgaccccaaacccgagaaccccgcttgtccatggactgttttgcctgccggggacctgccgacccatgacggctaccttcccagcaatatcgacgatttgccatcacatgaggcacctctcgcagatagtttggaagagttggaacctcagcacatttcactgtcagtcttccccagttcatctctgcacccattgacattctcatgtggagacaaactgactcttgatcagcttaaaatgcgctgtgattctctaatgttatag

SEQ ID NO: 191756 - DNA, 1980 bp, synthetic construct
  misc_feature 1..1980: note = Description of Artificial Sequence: Synthetic coding sequence
  source 1..1980: mol_type = other DNA
atggcccacaccttccggggctgcagcctggccttcatgttcatcataacatggctcctgataaaggctaagatcgacgcctgcaagcggggtgacgtgaccgttaagccttctcacgtgatactgctcgggagcacagtgaacattacatgctcgttaaagccgagacaggggtgctttcattattctaggagaaacaagctcattctttataagtttgaccggcgcattaactttcatcacggacatagtctgaacagccaggtgacgggcctgcccttggggacaactctgttcgtgtgcaagctggcttgcatcaattccgatgagattcagatctgcggtgccgaaatatttgtcggtgtcgctccggaacagccacagaacctctcttgcatacagaaaggcgaacagggcacagtcgcctgcacgtgggagcgaggaagagacactcacctgtacaccgagtacactttgcaattatccgggccgaaaaatctgacctggcagaaacaatgcaaggatatttactgcgactatcttgacttcggaatcaatctgacaccagagtcccctgaatccaatttcaccgctaaggtcactgctgtgaactcgctgggaagctccagctcgctgcccagtacctttactttcctggacatcgtgcgtccactgccaccctgggacattcgcattaagtttcagaaggcgtctgtgagccgctgtacattatactggagagatgaaggcctggtgctgctaaataggctgcgctataggccaagtaactccaggctctggaatatggtgaacgtcactaaagcaaagggccggcacgacctgttagatctgaagccctttacggaatatgagttccagatctcatcaaagctgcatctttacaaaggatcctggtctgactggtccgagtccctccgggcacagacacccgaggaggaaccaacagggatgctcgatgtgtggtatatgaagcggcatatcgattactcacgacagcagatctctctcttctggaaaaacttgagtgttagtgaggctcgagggaaaattctgcactaccaggtgaccctgcaagagttaacaggaggcaaggccatgacacagaatatcacgggtcatacgtcttggactaccgtgatccccagaaccggtaactgggcggtagcggtgagcgccgcaaacagcaagggctcttcccttcctacacgcattaacattatgaacctctgtgaagccggactgctcgcccctcgtcaagttagtgcgaactcagaggggatggataacatcctggtgacctggcagcctcccaggaaggaccctagcgccgttcaggagtatgttgtggagtggagggaactccatccggggggagacacccaggtgccattgaactggctgcgatcccgcccctataacgtttccgctcttattagtgagaacattaaaagctacatatgttatgagattagagtgtacgcgctcagcggggatcaggggggttgttcctctattctgggtaactcaaaacataaagcccccctgtctggaccccacattaatgccatcactgaggaaaagggatcgatactgatatcatggaattctattcctgttcaagaacaaatgggatgcctgctgcattaccgcatttattggaaggagagggactccaattcccagccccaattgtgcgagattccttacagagtctcacaaaacagtcatccaattaattctctccagccccgcgttacatatgtgctatggatgacagccttgacagcggccggcgaaagctctcatggaaatgaacgtgagttttgcctccaaggtaaggcaaactggatggccttcgttgctccttcaatctgcattgcaataattatggtggggatttttagcacccactattttcagcagaaaaggcgtcactcgtgtccctggacgggatcatag

SEQ ID NO: 191757 - DNA, 693 bp, synthetic construct
  misc_feature 1..693: note = Description of Artificial Sequence: Synthetic coding sequence
  source 1..693: mol_type = other DNA
tgacagaagggcgagcagggcaccgtggcctgcacctgggagcggggccgtgatacacacctctacaccgaatacaccctgcagcttagtggtcctaagaacctgacctggcaaaagcagtgtaaggatatctattgcgattatttagattttggcataaaccttacacccgagtctcccgaatcaaatttcacagccaaggttaccgctgtgaatagtctgggcagcagcagctccctgccttctacctttacctttctggatatagtccgtcccctgcccccttgggatatccgcattaagttccaaaaggctagcgtttctcggtgcaccctttactggcgcgacgagggactggtactattaaaccgccttcgctatagaccgtcgaactctagactgtggaacatggttaatgttaccaaagccaaaggccggcatgacctgctcgatctcaagccatttacagagtacgagttccagatcagctctaaactgcatctctacaaaggaagttggagcgactggagtgaatctttgcgcgcccagacccccgaagaggagcccacagggatgctggacgtctggtatatgaaaagacacattgactatagccgccaacagatctccttattttggaaggtatcattcaagcgccagttgaagacacaggggaataaaaccgagggctag

SEQ ID NO: 191758 - DNA, 1980 bp, synthetic construct
  misc_feature 1..1980: note = Description of Artificial Sequence: Synthetic coding sequence
  source 1..1980: mol_type = other DNA
atggcccacaccttccggggctgcagcctggccttcatgttcatcattacatggctactgataaaagcaaagattgacgcctgcaaacgaggtgacgtgactgtgaaaccttctcacgtcatcttgctcggatccacagtgaacatcacatgcagcctgaaaccgagacagggctgcttccactattctcggaggaacaaactcattctgtataagttcgataggcgaatcaatttccatcacggtcattctcttaattcccaggttaccggtctccccctaggcacgaccctgtttgtatgtaagcttgcttgtattaattcggacgaaatccagatctgtggtgctgagattttcgtcggtgtcgcgccagaacaaccccagaatctaagttgcattcagaaaggggaacaggggaccgtggcctgcacctgggagcgtggacgggacacacacctctataccgagtacacgttacagttaagcggacctaagaacctcacgtggcaaaaacagtgcaaggacatttactgcgactacctcgacttcggcattaatctgactccggaatccccggaaagcaattttactgcaaaggtgaccgccgtgaattcactggggtctagctctagccttccctcaactttcacatttcttgatatcgtgagaccgttaccaccctgggacatccgcattaaatttcagaaagcctctgtctcacgttgcacactctattggcgggacgaaggccttgttctgctgaataggctcagatatcgaccctctaacagcagactttggaacatggtgaatgtcaccaaagcaaagggacggcatgacttgcttgatctgaaaccattcacagaatacgagtttcagatttctagcaagctgcacctctataaaggttcctggagcgattggtccgaatctctgagagcccagacccctgaagaagaacccaccgggatgcttgacgtgtggtatatgaagaggcacatcgactattcccgccagcagatttccctgttctggaagaatctgagcgtatccgaagcacggggcaagatcttgcattaccaggtgaccttacaagagctcaccggtggaaaggctatgacccagaacatcacagggcacaccagttggaccaccgtgataccgcggacaggaaactgggcagtggccgtgagtgctgccaattccaaggggtcttctctgcctacacgaatcaatattatgaatctctgtgaagctggcttgttggcgccaagacaggtgtcagctaattccgaaggcatggacaacattctagtgacctggcagcctccgcgcaaagaccccagtgctgtgcaggagtatgtagtcgaatggagagagctacatcctgggggcgacacacaggtccctctaaactggctgcggagtcggccttacaatgtttctgccctgattagcgagaatatcaagtcatatatctgctacgaaattcgcgtttatgctctgtcgggcgaccaggggggttgtagttctatcctggggaacagcaaacacaaggcaccgttatccggtcctcacataaacgccattacagaggagaaaggcagtatcttgatcagctggaattccatacccgtccaggaacagatgggctgtctcttgcattacagaatctactggaaggaacgtgatagcaacagccagccccagctatgtgagataccgtaccgggtgagccagaacagccaccctattaattctctccaaccccgagtgacatatgtgctgtggatgacagcactaactgcagcgggggaaagttcccatggcaatgagcgggaattttgtctgcaggggaaggctaactggatggccttcgtcgctccaagcatctgtattgccattataatggtcggaatctttagcacacactatttccaacagaaacgtcggcattcatgtccctggacagggtcgtag

SEQ ID NO: 191759 - DNA, 2331 bp, synthetic construct
  misc_feature 1..2331: note = Description of Artificial Sequence: Synthetic coding sequence
  source 1..2331: mol_type = other DNA
atggcccacaccttccggggctgcagcctggccttcatgttcatcataacctggttgctgattaaagctaagatcgacgcgtgcaaaaggggggacgtgacggtgaagccctcccacgtcattctacttggcagcactgtgaacattacctgttctctaaagccaagacaagggtgctttcattatagcagacgaaataagctcattctgtacaaattcgatcgccgcataaattttcatcacggccacagcctcaattcacaggttacaggcctgcctctgggcactacgctgttcgtctgtaagctggcttgcatcaacagcgacgaaattcagatttgcggagccgaaatctttgtcggggtggcgccagaacaacctcagaacctttcgtgtattcagaaaggcgagcagggaactgtggcatgtacctgggaaaggggtcgggacacacatctgtataccgaatatacactccaattaagtggaccaaaaaacctgacttggcagaagcagtgcaaagatatctactgtgactatctggattttggaataaatctcaccccagaatcacctgaaagtaacttcactgccaaagtgaccgctgtgaattctttggggtcatcctctagcttaccttctaccttcactttcctcgatattgtgcgcccactccctccttgggacatccggataaagttccagaaggcatccgtgtctcgatgtacactttactggcgggacgaaggactggtgttgttaaacaggctgaggtacaggccctccaactcccgcctgtggaatatggtgaatgttactaaggcaaagggacgacacgatctgctagacctcaagcctttcaccgagtatgagtttcagatttcttcaaaactgcatctgtacaagggaagttggtccgattggtccgaatcccttcgggcccaaacacctgaggaggaaccaacaggcatgctggatgtgtggtacatgaagaggcacatcgattacagcaggcagcagatctcactcttttggaagaatttgtccgtgtccgaagctagagggaaaattctgcactaccaggtgacgctgcaggagttaaccgggggcaaagccatgacccagaatatcacagggcacactagctggacaaccgtgatcccgcgcaccggaaactgggccgtggcagttagtgcagccaattccaaaggcagctcactgccgactcgcattaacattatgaacttgtgtgaagctgggctcctcgctcctagacaagtttccgctaacagcgagggaatggataacatcctggtgacgtggcagccccctcgaaaggatccctccgcagtgcaggagtacgtggttgagtggcgcgagctgcatcctgggggtgacacccaggtgccgctcaactggcttaggtccaggccttacaatgtttctgctctcatttctgagatcccctacagagtcagccaaaattcccatcctattaattctctgcaacctcgagttacgtacgtgttgtggatgacggcccttactgccgctggagaatcatcccacgggaatgagagagagttctgtcttcagggtaaagcaaattggatggcatttgtggcgccaagcatttgcatcgcaataatcatggtgggcattttctccacgcattacttccaacagaaagttttcgtgttgctcgccgcattgaggccccaatggtgttcccgcgagatccctgatccagccaattcaacttgcgcaaagaaataccctatcgccgaagagaagactcagctcccccttgacagactcctgatagattggccaacacctgaagatccagagcctttagttatcagtgaggtcctccaccaggtcacacctgtcttccgtcacccaccatgtagcaattggccgcagcgagaaaagggcatccagggccaccaagcaagcgagaaggatatgatgcactcggcaagcagtccaccaccgccccgggccctgcaggcagagtccaggcagttggttgacctgtacaaagtgctggagtctagaggctcagatcccaagccagaaaatccagcttgtccttggaccgttctgcccgcaggcgaccttcctacccacgatggctatctgccctccaatatagacgacctcccaagtcatgaagcaccattggccgatagcctggaagagctggaaccccagcacatctcgctctctgttttcccttcatcatcgttacaccccctgaccttctcctgtggagacaagctgactttggaccagctgaagatgaggtgtgattccctaatgctgtag

SEQ ID NO: 191760 - DNA, 681 bp, synthetic construct
  misc_feature 1..681: note = Description of Artificial Sequence: Synthetic coding sequence
  source 1..681: mol_type = other DNA
atgagcagccccaccgccagcagcaccaccccccggtgcggcacctctgcgggccctgcatcccctacctggagatgcagagctaccgccctgcatctgcatcacccggtggaccagctaccccatcaggtgctccagcctactacaggacagcgacagcccggcacaggactgccttggcacagcaccccagctcaactggctctggccggattgagacaggcccaaccccatccccagcaacagcgcttgcatcagcccgggctccggggggtggatgctcatggttcagccgcccacgtgccacaggcagtccctcaggccgtgagggcccacccccccggacagcttctgtcatgggccgctgctgtctgcctgctgtgccaacatcatcttcagctgcccggcaaaaagaggaattctacactctacataaccatgctcctgattgtgccggtgattgtcgccggggccatcatcgttttgttattatacctaaagcggctcaaaatcatcattttcccgcccattcctgacccgggtaagattttcaaggaaatgttcggagaccagaacgatgacactctgcactggaaaaagtacgacatatatgagaagcagacgaaagaagaaaccgactcggtcgtgttgatcgaaaaccttaaaaaggcctcccagtag

SEQ ID NO: 191761 - DNA, 840 bp, synthetic construct
  misc_feature 1..840: note = Description of Artificial Sequence: Synthetic coding sequence
  source 1..840: mol_type = other DNA
atggagtggcccgcccggctgtgcggcctgtgggccctgctgctgtgtgcgggaggcgggggcggtggaggcggggccgccccaacggaaacccagccaccggtcactaacctgtctgtgagcgtggaaaacctctgcactgtcatatggacctggaacccacctgagggggcgagctccaactgctcactttggtacttttctcactttggcgataaacaagataaaaaaatcgcccccgagacacggaggtctattgaggtgccactgaatgaaaggatatgcctgcaagttggcagccagtgctcaactaatgagtctgagaagccctcaatactggtcgaaaagtgtattagccctcctgagggagatcccgaatctgcagttacagagctgcagtgcatctggcacaacctctcctacatgaaatgcagttggctgccaggccggaacacatcgcccgacaccaactacacactatactattggcatcgatcactggagaaaatccaccaatgcgaaaatatttttcgcgagggccaatactttggttgctccttcgacttgacaaaagtcaaggactcctcatttgaacaacactccgtgcagattatggttaaggataacgccggcaaaatcaaaccctctttcaatatagtgccactgactagcagagttaagccggatccaccgcatattaagaatctatcctttcacaacgacgatctgtatgtccagtgggaaaacccacagaactttatctcaaggtgtctcttctatgaagtagaggtaaacaatagtcagacagaaacacataatgtattctacgtgcggttttag

SEQ ID NO: 191762 - DNA, 1284 bp, synthetic construct
  misc_feature 1..1284: note = Description of Artificial Sequence: Synthetic coding sequence
  source 1..1284: mol_type = other DNA
atggagtggcccgcccggctgtgcggcctgtgggccctgctgctgtgtgctggcggcggcgggggcggaggcggcgccgcccccaccgaaacgcagcctcccgttaccaatcttagcgttagcgtcgaaaatctgtgtaccgtgatctggacctggaacccgccagaaggtgcctccagcaattgcagtctctggtacttctcccacttcggggataagcaggacaagaaaatcgccccagagacacgcagaagtatcgaagtcccgctgaatgagagaatctgcctgcaggtgggatctcaatgcagcactaacgagtctgaaaaacctagcattttggtcgaaaaatgcatctcacccccggagggagatccagagagcgctgttactgagctacaatgtatctggcataatctgagttacatgaagtgttcgtggctcccagggcggaatacatctcccgatactaattacactctctattactggcacaggagcctggaaaagatccaccagtgcgagaacatttttcgtgagggccaatattttggctgtagtttcgacctgacaaaggttaaagatagctcattcgaacagcacagcgtccagataatggttaaagacaatgctggaaagattaagccttcgtttaacatcgtgccgctcactagcagggtaaaacccgatcctcctcatataaagaatctttccttccacaacgatgatttgtatgttcaatgggaaaatccgcagaactttatatccaggtgtcttttctacgaagttgaagtgaacaacagtcaaacggagacgcataatgtgttctacgtccaggaagctaaatgcgagaatcctgaattcgaaaggaatgtcgaaaacaccagctgcttcatggtgccaggcgtgctgcctgacaccctgaatacagtgaggattcgagttaagaccaacaagttatgctatgaggatgacaagttgtggtctaattggtcacaggaaatgtctattggaaagaagcgtaatagtacgttatatataactatgctactgattgtcccggtcatcgtcgccggcgccatcattgtgttgttgttgtacctgaagagactcaaaatcataatcttcccccccatccccgatccaggaaagattttcaaggagatgttcggagatcagaatgacgacactttacactggaagaagtatgatatctacgagaaacaaacaaaggaggagaccgacagcgtcgttctgatcgaaaacctgaagaaggccagccagtag

SEQ ID NO: 191763 - DNA, 1143 bp, synthetic construct
  misc_feature 1..1143: note = Description of Artificial Sequence: Synthetic coding sequence
  source 1..1143: mol_type = other DNA
atggccttcgtgtgcctggccatcggctgcctgtacaccttcctgatctccaccactttcgggtgtacctcgagctcagatacagagattaaagtgaatcctccccaggactttgaaatcgtcgaccctggctatcttggttacttatatctgcaatggcagcccccactttcgctagaccatttcaaagaatgcactgtggaatacgagctgaagtaccggaacataggatccgagacctggaaaacaattattacgaaaaaccttcactataaagatggctttgatctaaacaaaggcattgaagcaaaaattcacacgctgcttccttggcagtgtacgaatggctccgaagtccagagcagctgggccgaaacgacatactggatctctcctcaggggataccagagacgaaggtgcaggacatggactgcgtttattataattggcagtacctcctttgcagttggaaacccggcattggtgtcctcctggataccaactataatctgttttattggtatgaaggtctcgatcacgctctccagtgcgttgattacataaaggctgacggccaaaatatcggatgtcgttttccatacctggaagctagtgattataaagacttttatatttgcgtcaatggcagcagtgagaataaacctatccgtagtagttatttcaccttccagttgcagaatatagttaagccactcccccccgtttatctgacttttacaagagaaagcagttgtgaaatcaagttaaagtggtccatccctttgggaccaataccagcacggtgcttcgattatgaaatagaaattagggaagatgatacaacgcttgtgactgcaacagtggagaatgaaacctatacacttaagaccacgaacgaaactcggcaactctgtttcgtggttagatcgaaggttaacatctattgctccgacgacgggatctggtccgagtggtcagataaacaatgctgggaaggcgaggacctgagtaagaaaactctgcttcggttctggctgcccttcgggttcattctgatactcgtaatcttcgtgacagggctgctgctcaggaaacccaacacgtaccccaagatgattcctgagttcttctgtgacacctag

SEQ ID NO: 191764 - DNA, 1143 bp, synthetic construct
  misc_feature 1..1143: note = Description of Artificial Sequence: Synthetic coding sequence
  source 1..1143: mol_type = other DNA
atggccttcgtgtgcctggccatcggctgcctgtacaccttcctgatctctactacgttcgggtgtacttctagcagtgatacagagatcaaagtaaatcctcctcaggacttcgagattgttgatcccgggtatcttgggtatctttatctccagtggcagccaccattgagtttggatcattttaaagagtgcacggtcgaatacgagcttaaatacaggaatattggctccgaaacttggaagacaatcataaccaagaatctccattacaaggacggattcgacctgaataagggcatcgaggccaaaattcacaccttactgccatggcaatgcactaacggtagtgaagtgcagtcatcatgggccgagaccacatactggatatcacctcaggggattcctgaaactaaggtccaggatatggactgcgtgtattataactggcaatacctcctttgctcgtggaagcccggaattggcgtgctcctcgataccaattacaatcttttctactggtacgaggggctggaccatgcgttgcagtgcgtagactatattaaagccgatggacaaaatatcgggtgtaggtttccgtacctcgaagcgagcgattataaggatttctatatttgtgtcaatgggtcgagcgagaataagcctatcagaagtagttatttcacttttcagctgcagaatatagtgaagccattaccacccgtgtatctaaccttcactcgcgagtcttcgtgcgagatcaagttgaaatggagcatacctcttggacccatacctgctcgctgcttcgactatgagatagagatcagagaagacgacacaacgctcgtgacagctaccgtcgagaacgagacttacactctgaaaacaactaatgagacccggcagctatgctttgtggtaaggtctaaggttaatatctattgctccgatgatgggatttggagcgagtggtcggacaaacagtgttgggaaggggaggatctgtcaaagaaaacccttctgagattttggctgcccttcgggtttatccttatcctggtcatctttgtaactggtctcctcttgaggaagcccaacacttatcccaaaatgatccccgagttcttttgtgacacttag

SEQ ID NO: 191765 - DNA, 465 bp, synthetic construct
  misc_feature 1..465: note = Description of Artificial Sequence: Synthetic coding sequence
  source 1..465: mol_type = other DNA
atggccccccggcgggcccggggctgccggaccctgggcctgcccgcgctgctgctgttgctattgcttagaccaccagccaccagggagcccgcggcttcaagcccttccagcaataatactgccgccacgacagctgcgatcgttccggggtctcagctcatgccaagtaaatccccctccacgggaaccaccgaaatctccagccacgagtcaagccatggtacaccctcccaaaccacagccaagaactgggaacttaccgcctctgcgtctcatcagcctccaggggtatatccacagggtcatagcgatactaccgttgccatctccaccagtaccgtgcttctgtgcggtctctctgctgtttccctcctcgcctgctacctcaagtcacgtgcctccgtatgtagctgtcacccccgcagtgccggccatacatgttcagtgggatcagtttgctag

SEQ ID NO: 191766 - DNA, 804 bp, synthetic construct
  misc_feature 1..804: note = Description of Artificial Sequence: Synthetic coding sequence
  source 1..804: mol_type = other DNA
atggccccccggcgggcccggggctgccggaccctgggcctgcccgctcttctcctgcttctgctgctcaggcccccggccacccgagggattacctgtcccccacccatgagcgttgagcacgccgatatctgggtgaagtcttattccttgtacagtcgcgagaggtatatctgcaactcaggattcaaacgcaaggccggcacaagctctttgaccgagtgtgtgttaaataaagccacaaatgtggctcattggaccacacctagtctgaagtgcatcagggatccagctctggtccaccaacgcccagcccctcccagtaccgtcacaacagcaggggttacaccccaacccgaatcactctctcctagcggcaaagagcctgcagcctcaagcccctcatccaacaataccgctgccactaccgcagccattgtacctggtagccagctcatgcccagtaaaagcccttcgaccgggacaacggaaatttcatcccatgaatccagccatggcactccaagccagactacagccaagaattgggagctcactgcctctgcttcacatcagccgcctggagtctatccccaaggccacagcgacacaactgtggcaatctctacttcaactgtgctgctgtgcggactatctgctgtcagcttgctcgcgtgctacctgaaaagcagacaaacccccccactggctagcgtggagatggaggccatggaggctttgccagtgacctgggggacctccagccgagatgaggacctcgagaactgttcacatcacctgtag

SEQ ID NO: 191767 - DNA, 612 bp, synthetic construct
  misc_feature 1..612: note = Description of Artificial Sequence: Synthetic coding sequence
  source 1..612: mol_type = other DNA
atgagcgtggagcacgccgacatctgggtgaagagctacagcctgtactctagagaaagatacatctgcaactctggctttaagcgcaaggccggaacttcgagcttaacagagtgtgtgcttaacaaggccacaaatgttgcccactggactactcctagtttgaagtgtataagggaccccgctctcgtgcaccagcgacctgctccgccctccacagttaccaccgccggagtgacaccccagccagagtcactttcgccatctggaaaagagcctgccgcctcaagcccatccagtaacaataccgccgctactaccgcggccattgtgccagggtcacaacttatgccctctaagtccccatctactggcactactgaaatcagcagccacgaatcatcccacggcacacctagccaaaccactgccaaaaattgggaactgacggcaagcgcatctcatcaaccgcccggagtgtatccccagggtcacagtgacaccacagtcgctatctcgacaagcaccgtacttttatgtggtcttagtgcggttagcttgcttgcttgctaccttaaaagttccggagcagtcctctcttattccggttag

SEQ ID NO: 191768 - DNA, 696 bp, synthetic construct
  misc_feature 1..696: note = Description of Artificial Sequence: Synthetic coding sequence
  source 1..696: mol_type = other DNA
atgagcgtggagcacgccgacatctgggtgaagagctacagcctgtattccagagagagatacatctgcaactccgggttcaagagaaaagcaggcacgtctagcttgactgaatgcgtcctcaacaaggccacaaatgtagcccattggacgactccaagccttaagtgcattcgcgaccctgccttggtgcaccagagaccagccccgccctcaaccgtaactactgctggggtgactccgcagccggagagtttgagcccaagcggcaaggagcccgccgcgtcgtcccctagctcaaataatacagctgctacaacagcagcaattgtgccaggatcccagctgatgccgtcaaagtcgcctagcacgggtactactgagatcagtagtcacgagtctagccacggcaccccaagccagaccactgccaaaaactgggagctcaccgcctccgcctcacaccaaccaccaggagtttacccccagggacattccgacacaaccgtggcaatcagcacatcgaccgtgcttctgtgtggtctgtctgctgtttcattactggcctgctacctcaagagccgacagacacccccactggccagcgtggaaatggaggccatggaagctctccccgtgacctggggcacatcttccagagacgaagatcttgagaattgttcccatcacctctag

SEQ ID NO: 191769 - DNA, 510 bp, synthetic construct
  misc_feature 1..510: note = Description of Artificial Sequence: Synthetic coding sequence
  source 1..510: mol_type = other DNA
atggccccccggcgggcccggggctgccggaccctgggcctgcccgcccttttgcttctcctacttctgcggcccccggccacaagggaaccagcggcctctagccccagctccaataacacagcagccacgacagccgccatcgtgccaggctcccagctaatgcccagcaaatctccctcaaccggcaccaccgagatcagcagtcacgagtcctctcacggaactcctagccagacgaccgccaagaactgggagctgactgcaagcgctagtcaccagccgcctggcgtgtacccgcagggccatagcgacacgaccgtggccatatcaacaagcacagttctattgtgtggtctttcagcagtgagcctcctggcttgttacctgaaaagtagacagactcccccgttggcatcggtggagatggaggcaatggaggctctccctgtcacctggggaacgtctagtcgggatgaggatctcgagaactgctctcatcacctgtag

SEQ ID NO: 191770 - DNA, 609 bp, synthetic construct
  misc_feature 1..609: note = Description of Artificial Sequence: Synthetic coding sequence
  source 1..609: mol_type = other DNA
atggccccccggcgggcccggggctgccggaccctgggcctgcccgccctcctccttttgcttcttcttcgcccccccgccaccaggggggatcctgcccttgtacaccagcgacccgcgccaccttccactgtgactactgcaggggttacgccccagcctgaatcgctttcaccatcagggaaagagccagccgccagtagcccaagctctaacaacacggccgccaccaccgcggcaattgttcccggtagccagctgatgccttcaaaatctcccagcaccggtacaacggagatctcctctcatgaatccagccatggcactccttcacagaccactgctaagaactgggaactcaccgcatccgcttcacatcaaccacctggtgtataccctcagggacattccgataccacagtcgccatctccacatccacagtcctgctgtgtgggctttctgcagtgtcactgctggcgtgctacctcaaatctcgccagactcctcccttggcctcagtcgagatggaggccatggaggcactgcccgtgacctgggggacaagtagtcgcgacgaagatctcgaaaactgcagtcatcacctctag

SEQ ID NO: 191771 - DNA, 759 bp, synthetic construct
  misc_feature 1..759: note = Description of Artificial Sequence: Synthetic coding sequence
  source 1..759: mol_type = other DNA
atggccccccggcgggcccggggctgccggaccctgggcctgcccgccctactgctgcttcttcttttaagaccccccgccacaagaggaatcacctgtcctccaccaatgtccgtagaacacgctgacatctgggttaagtcctacagcctgtattctcgtgagagatacatctgcaactcaggctttaagcgaaaggcaggaacctcatcgctaacagagtgtgttttgaacaaggcaactaatgtggcgcattggactaccccttcattgaagtgcatacgggatcccgctctagtgcaccaacggccagccccaccttccacagtgactacagctggcgtgactccccagccagagtcactgtcccctagtgggaaggagcctgctgcaagcagtccaagcagtaataataccgccgccactaccgccgccattgttccagggtcacagctgatgcctagcaagtctccatctacaggcactacagagatctcttcacatgagtcctcccatggtacgccatcccagactacagctaagaattgggagcttacagcctcggccagtcaccagcctcccggggtgtatccacagggacactccgataccaccgtggccatatccacgtctaccgttcttctgtgcggattatccgctgtgagtctgctcgcgtgctatctcaagtcccgtgcttctgtctgcagctgccacccccggtcagctggacacacttgctcagtggggtccgtatgctag

SEQ ID NO: 191772 - DNA, 564 bp, synthetic construct
  misc_feature 1..564: note = Description of Artificial Sequence: Synthetic coding sequence
  source 1..564: mol_type = other DNA
atggccccccggcgggcccggggctgccggaccctgggcctgcccgccctcttgctactgttactcctacgacctcccgccacaaggggggatcctgcgctggtgcatcagcggccagctcctccgagtactgttacaacagccggcgttacaccccagccagagagtttgtcccctagtgggaaggagcccgcagccagctccccatccagcaacaataccgcagccaccaccgcagccattgttcctggtagtcagctgatgccttcgaaaagccccagcacaggaactaccgagatatcgagccatgagagttcgcatggcaccccctctcaaacaaccgcaaagaactgggagctcaccgcttcagcctctcaccagcctccaggggtgtaccctcaaggccattccgacactactgtggccatttctacgtcgacagtgctgctgtgtggactctcggctgtttctctgctcgcttgctacttaaaatcccgagccagcgtatgttcctgtcatcctcgctctgcgggtcatacatgtagcgtaggcagtgtgtgctag

SEQ ID NO: 191773 - DNA, 705 bp, synthetic construct
  misc_feature 1..705: note = Description of Artificial Sequence: Synthetic coding sequence
  source 1..705: mol_type = other DNA
atggccccccggcgggcccggggctgccggaccctgggcctgcccgccctgctattgttgttattactaagaccacctgccactcgggggattacttgcccaccacccatgtccgtggaacacgccgatatctgggtcaagtcttactctctatactctcgggagcggtatatatgcaattctggctttaagcgtaaggctgggacctcgtccctaacagagtgcgtcttgaacaaagctaccaatgtggcacattggacaaccccgtccctcaaatgtatcaagcctgcagcgagtagcccaagctccaataatactgcagcaaccaccgcagccatagtgcccgggagccagctgatgcctagtaagtcccccagcaccggaactactgagattagttcacacgagtcgtcacatggcacgccctcccagacaacagctaagaattgggagttgactgcgagcgcctcacatcagcctccaggagtttacccacagggtcacagtgacacaaccgtggccataagtacaagcaccgttctgttatgtggattgtccgccgttagcctcctcgcatgttatctgaagagccgacagaccccgccgctcgcctctgtggagatggaagccatggaggcactaccagttacatggggcacgagttctcgcgatgaagacctggagaactgtagccatcacctgtag

SEQ ID NO: 191774 - DNA, 660 bp, synthetic construct
  misc_feature 1..660: note = Description of Artificial Sequence: Synthetic coding sequence
  source 1..660: mol_type = other DNA
atggccccccggcgggcccggggctgccggaccctgggcctgcccgctttactgctgctgttactgctgcggcctcctgctacccgcggaataacttgtcccccacccatgagtgtggagcatgctgacatatgggtgaagtcgtattctctctattctcgcgagaggtacatctgtaacagtggattcaaacgcaaggccggtactagtagcctgactgaatgcgtcctgaataaagcgacaaatgtggcacattggactactccttccctgaagtgcatcaagcctgccgcttcaagtcctagttctaataataccgccgccacaaccgccgcaattgtacccggtagtcaactcatgccatccaaatctccatctacgggaacaaccgaaatctcatcacacgagtcttctcatgggacgcccagtcagaccacagccaagaactgggagcttactgctagcgcctcccatcagccaccaggagtgtatcctcagggacatagtgacaccacagtcgccatttcaacgtcgaccgttcttctgtgtggcctgagcgccgtttccctgttggcctgttatctgaagtccagggcctctgtctgttcctgtcatcctaggtcggcaggacacacctgtagtgtgggctctgtatgttag

SEQ ID NO: 191775 - DNA, 2601 bp, synthetic construct
  misc_feature 1..2601: note = Description of Artificial Sequence: Synthetic coding sequence
  source 1..2601: mol_type = other DNA
atgggcgccgcccggagcccccccagcgccgtgcccggccccctgcttggcctgctcttgttactcttaggggttcttgctccaggaggcgcaagcttgaggttgctggatcatagggccctggtgtgcagccagcctggcctcaattgcaccgtgaagaacagtacctgtttggatgatagctggatccacccaagaaatcttacccccagcagcccaaaggacctccaaatccagctacattttgcacatactcagcaaggagatctgtttcctgtcgctcatatcgagtggaccctgcagaccgacgcttccattctgtacctcgagggggctgagctatccgtgctgcagctcaacaccaatgaacggctgtgcgtcaggttcgagtttctctcaaaactgcgccatcatcaccggcggtggcgtttcacctttagccactttgtggtagatccagatcaggaatatgaggtaacagtgcatcatttgcccaaacccattccagacggcgaccctaatcaccaaagcaagaacttcttagtgccagactgcgagcatgcccgaatgaaggtaaccactccttgtatgagctctggatctctttgggatcccaatataacagtggagactctcgaggcacaccagctgcgtgtgtcctttactctgtggaacgaatcaacacactaccagattcttcttacgagtttcccacatatggagaaccactcttgtttcgaacacatgcatcatatcccagcacctagaccagaggaatttcaccagaggagcaatgtcacgctgacactgcgcaacctcaagggatgctgtcgccatcaggtgcaaatccagcctttttttagctcttgtctgaacgattgtttgcggcacagcgcgaccgtctcctgccctgaaatgcccgatacacctgagcctattccagattatatgccactgtgggtctactggttcatcaccggcatcagcatcctgctcgttggctctgtgatattgctgatagtctgcatgacatggagactcgcaggaccgggctctgaaaaatattcagacgacacaaagtataccgatggcctccccgccgccgacttgatacctcctcctctcaagcctagaaaggtatggatcatctactctgctgatcatccattgtatgtggacgttgtgctgaaatttgctcagtttttgttgacagcttgtggcactgaagtcgcactggatctgcttgaggaacaggccatctccgaagcgggcgtaatgacatgggtgggcaggcaaaagcaggaaatggtcgaaagcaattcaaagatcatcgtgctgtgctctcgcggcacgcgcgctaagtggcaggccctgctgggtcgaggcgcccctgtcagactccggtgtgatcatggcaagcccgtgggcgacttgtttacagctgcaatgaatatgattctaccagacttcaaacgacccgcatgtttcggaacctacgtggtgtgctacttctctgaagtctcttgcgacggggacgtgcccgatctgtttggggcagctcctcgatatcctctgatggacagatttgaagaggtgtactttagaatccaggacttggagatgtttcaaccggggcgcatgcatagagtcggagagctcagcggcgacaactatctcagatcacctggagggaggcaacttcgtgctgcattggaccggttccgcgattggcaggttaggtgtcctgattggtttgagtgcgagaacctctactcagcagacgatcaggacgctccatccctagatgaagaggttttcgaggaacctctgctgcctccagggactggaattgtcaagagagccccgctggtgagagagcctggctcccaagcctgcctcgcaatcgacccgctggttggcgaggaagggggagccgctgttgcaaagctggagcctcacttacagccccggggccagcctgcacctcaacctctgcatacgctggtgttggcggccgaggagggagccctggtcgccgcagtcgagcccggaccactggcggacggcgcagccgtccgattggccctggccggggagggggaggcatgccctttactgggaagtcccggggccggcagaaactctgtgctgttcctcccagtagacccggaggattccccccttggcagttcgacgccgatggcaagcccagatctgctacctgaggacgtgcgggagcatctggaaggactgatgctgtcactattcgagcagtccttatcctgccaggcacagggcgggtgcagtcgccctgccatggtacttacagatccacatacaccctacgaggaggagcaacggcaaagcgtgcaaagcgaccagggctatatctcaagaagtagcccccagccccctgagggcctgaccgaaatggaagaggaggaggaagaagagcaggatcccggaaaacctgccttgcccctctcccccgaagatttggagtctcttagatcactccagcgtcagttgctttttcgccagttacagaagaatagcggttgggacactatgggatctgagtctgagggcccatccgcttag

SEQ ID NO: 191776 - DNA, 2445 bp, synthetic construct
  misc_feature 1..2445: note = Description of Artificial Sequence: Synthetic coding sequence
  source 1..2445: mol_type = other DNA
atgggcgccgcccggagcccccccagcgccgtgcccggccccctgctgggactgctcctactgttgctgggggtacttgcacccgggggcgcttcattacgtctgctcgatcacagggccctggtctgtagccagcccggattgaactgtacagttaagaactctacatgcctggacgacagctggatacaccctcgaaacctcactcccagttcccccaaagacctacagattcagctccactttgcccacacccagcagggcgacctgtttcctgtggcacatatagagtggacactccagaccgacgcatcaatcctgtatctggaaggagctgagctgtccgtcctgcaacttaataccaacgagcggctctgtgtcaggttcgagtttctgtccaagctgcgccaccatcaccgcaggtggagatttactttcagtcatttcgtcgtcgacccagatcaggagtacgaagtgaccgtccaccacctcccaaagccgattcctgacggcgatcctaatcaccagagcaagaacttcctggttccagactgtgagcatgcaaggatgaaagtgacaacaccatgtatgtcatctggatccctctgggatcctaacattactgtggagactctggaagcccatcagttacgggtctccttcacgctgtggaacgaatctacacactatcagattcttctaacctcattccctcatatggagaatcattcttgttttgaacatatgcaccatatacccgcccctaggcctgaagagtttcatcagcgcagcaatgtgacgctgaccttgaggaatctcaaaggttgctgccgccaccaagtccagattcagccatttttctcttcttgcttaaacgactgcctcaggcacagtgcaacagtctcttgcccggaaatgcccgacacccctgacggactgcccgcagccgatttaatcccccctcccctgaaacctcgtaaggtatggataatttactccgccgatcacccgctctatgtcgatgtggtcctgaaattcgcgcagttcttgttgactgcatgtggcactgaagttgcattggacctcctggaggagcaggcgatcagcgaagccggagttatgacatgggtcggacgtcagaaacaggagatggtagaatctaatagtaaaatcattgtgctgtgctcgagaggaacccgggccaagtggcaagccctgttgggccgaggagctcctgtgcggctgcgctgtgaccacggcaagcccgtcggagatctttttaccgcagccatgaacatgatcttgccagattttaagcgacccgcttgcttcggcacctatgtggtttgctatttttctgaagtctcctgtgatggagatgtgcccgacctgttcggagccgcacctcggtaccctctgatggatagatttgaggaagtgtacttcagaattcaagatctcgaaatgttccaacctggtcggatgcatcgagtgggggagctaagtggggacaactatctccgaagcccagggggccggcaactcagggcggcgcttgaccgattccgggattggcaggtgcgttgccccgattggttcgaatgtgagaatctttacagcgcagacgaccaggatgcaccttcactggacgaggaagtgttcgaggagccgttgctgccacccgggaccggcattgtgaagcgagcacctctcgtgagagagccaggcagtcaggcctgcctggcaatagatccactggtcggcgaagagggaggtgctgctgtggctaaactggagcctcatctgcagccgaggggtcaaccagcccctcagcccctgcacacgttggtcctggctgcagaggaaggggcactcgttgccgcagtcgagcctggacccctggcagacggcgccgctgtccggctggcgcttgccggcgagggcgaggcctgcccactattaggctctcccggcgctggcaggaactctgtgctcttcctgcccgtcgacccagaagatagtccactgggaagcagcacccccatggcctctccggacctccttccagaggatgtccgcgaacacctcgagggactgatgctgagtctgtttgagcagagcctatcttgtcaggcccaaggcgggtgcagcagaccagcgatggtgttgactgacccacacactccctacgaagaggaacagcggcagtctgtgcagagcgaccaagggtatatcagcagatctagcccccagccccccgaaggactgaccgagatggaggaggaagaggaggaggagcaggatcctggtaagcctgctctaccgctctccccagaagatctggaatctctgcgttcactgcagcggcaactgctgtttagacaattgcagaaaaattctggatgggacacaatgggctcagaatctgagggtccatcagcctag

SEQ ID NO: 191777 - DNA, 1509 bp, synthetic construct
  misc_feature 1..1509: note = Description of Artificial Sequence: Synthetic coding sequence
  source 1..1509: mol_type = other DNA
atgagcctggtgctgctgagcctggccgccctgtgccggagcgccgttcctagggagcccacggtgcagtgtggctctgagacaggcccatcaccggaatggatgctgcagcatgatttgatccccggggatctccgcgaccttagagttgaaccagtcacgacgtccgtggcaaccggtgattatagcatactaatgaacgtgtcctgggtattgagagccgatgcgagtattcgcctgctgaaggctaccaagatctgtgtaaccgggaagagtaattttcaatcctattcctgcgtgagatgcaattacaccgaggctttccagacacagactcgtcctagcggagggaagtggactttctcttatatcggtttccctgtcgagctgaacaccgtctatttcataggcgctcataatataccaaacgccaatatgaatgaggacggcccctctatgagcgtgaactttacttcacccgggtgcctggaccacattatgaagtataagaagaagtgtgtgaaagctggcagcttatgggatccgaatatcaccgcatgtaagaagaacgaagagaccgtggaagtgaactttaccacaacacctttaggcaacagatacatggccttgatccagcattccacaattattggtttttcccaggtctttgaacctcaccagaaaaaacagactagagccagtgtcgtcattcctgtcaccggtgattcggagggcgctacagttcaattaacaccctattttccgacttgcggcagcgactgtatccggcataagggcacagttgtgctgtgtccgcagacaggtgtgccgttccccttggataacaataaatccaaacccggcgggtggttgcctttgctgttactatcactacttgtggctacttgggtgctcgtggctgggatctatctgatgtggaggcatgagaggataaaaaaaacaagtttctcgaccacaacactcctcccacccataaaagtgttggtcgtataccccagcgaaatttgcttccatcatactatctgttattttacggaattcctccagaatcactgtcggtctgaggtcatcctggagaagtggcagaagaaaaagattgctgaaatggggcccgtacaatggctggcaacccagaaaaaagctgccgacaaggttgtgttccttctctccaatgatgtgaactccgtgtgcgacggcacttgtggaaaatctgaggggtcgccttccgagaactcacaggacctattcccactggcctttaatctgttttgcagcgatctgagaagtcagatccacttacacaagtatgtagtggtgtattttagagaaattgatactaaagacgattataacgcgttgtcagtgtgtcctaagtaccacctgatgaaagatgccaccgctttttgtgctgagttgctgcatgttaaacagcaggttagtgccggaaaacgctcacaggcgtgtcacgacgggtgctgttccctgtag

SEQ ID NO: 191778 - DNA, 2376 bp, synthetic construct
  misc_feature 1..2376: note = Description of Artificial Sequence: Synthetic coding sequence
  source 1..2376: mol_type = other DNA
atgcccgtgccctggttcctgctgagcctggccctgggccggagcccagtcgtgctgtcgctggagcgactagtgggacctcaggacgcaacccactgctcccccgtgagtctcgaaccttggggtgacgaggagagattgcgcgttcagtttctggcgcagcaaagtctgtctttggcccctgtcactgcggcaacagccagaactgccttgtcaggcctcagcggggcagatggccggagggaagagcgaggacgcggaaaatcctgggtctgcctgtccctgggaggatctggcaataccgagcctcaaaaaaaaggactgtcctgtcgcctgtgggacagcgacatcctttgcctgcccggagacatcgtgcccgcaccaggccccgtactggcccctactcacttgcaaacagagctagtactgcgatgccagaaagagaccgactgcgacctctgcctgcgggtggctgtccacctggcagtacatggccactgggaagaacctgaagacgaagagaaattcggcggtgcagccgactcaggcgtcgaggagcctcggaatgcctcattgcaggcacaggttgtgctgtcttttcaggcctatcctacggccaggtgcgtcctgcttgaggtgcaagtccccgccgccctagtccaatttggacaaagcgttggatccgttgtgtacgattgctttgaagctgctctgggaagtgaggtcaggatttggtcttacacacaaccaagatatgagaaggagctgaatcacacccagcaactgcctgattgccgcggtctcgaagtgtggaatagcattccgtcatgttgggctttaccttggttgaatgtatccgctgacggcgataacgtccatctggtcctgaatgtgtcggaagagcagcactttggattgtccctttattggaaccaggtacaagggcccccaaagccacgctggcacaagaacttgaccggcccccaaattataaccctcaatcataccgacctcgtaccctgcttatgcatccaggtttggccattagagcccgactcagtgcgcactaacatttgtcctttccgcgaggatcctcgcgctcatcagaatctgtggcaggccgcccgccttcagctacttaccctgcagagctggctcctagatgctccatgcagtttacccgccgaggctgcgctctgctggagagcccccggaggagatccctgtcagcccctcgtaccccccctcagctgggagaacgttaccgtggacaaggtactcgagtttccgcttctgaaagggcaccccaacctttgcgtccaagtgaactcttccgagaagctccagcttcaggagtgtctttgggctgactccctggggcctctgaaagatgatgtgctcctcctcgaaacgcgcggcccccaagacaaccgcagcttgtgcgccttagaaccatctgggtgcacgtcattgcccagcaaagcatccacccgggcagccagattaggagagtacctcctacaggacctgcagagcggacagtgcctgcagttgtgggatgatgaccttggtgcgctgtgggcatgtccaatggataaatacatacataaaagatgggcgctggtctggctggcatgtctgttgtttgccgctgccctcagcctgatcctcctgctcaagaaggatcacgcgaaggggtggctgcggcttctcaagcaggacgtgagaagtggcgcggctgccagaggtagggccgccctcctactctactcagcagacgattcagggttcgagaggctagtaggcgctctcgcttcagctttatgccagttgcccttacgggttgccgtcgatttgtggtccagacgggagctttccgctcaggggcctgttgcatggtttcacgcccagagacgtcagaccctgcaggagggaggggtcgtcgtccttttgttcagccccggggcggtggccctgtgttctgaatggctgcaggacggagtgtcaggtcccggggcccacggccctcacgacgcttttagggcctcattgtcctgcgtcttacccgacttcctgcagggccgtgcacccgggagctacgtgggagcttgcttcgacaggctcttgcatcccgacgccgttccggcactgtttcggaccgtgcctgtgttcactcttcccagccaactgccagactttctgggggcactgcagcagccacgggctcccagaagtggaagattgcaggagcgcgcggaacaggtctctcgggccttacagcccgcacttgattcatatttccacccccctggcacccccgctcctggccgtggggtcggtccaggagccggccccggtgccggcgacggcacatag

SEQ ID NO: 191779 - DNA, 2118 bp, synthetic construct
  misc_feature 1..2118: note = Description of Artificial Sequence: Synthetic coding sequence
  source 1..2118: mol_type = other DNA
atgcccgtgccctggttcctgctgagcctggccctgggccggagcccggtggtcctgtcgctggagcgattggtgggtccccaagatgctacccattgctctcctgggctgtcctgccggttgtgggatagcgacatcctttgtttgcccggcgacattgtgcctgcacctggtccggttctcgctcctactcacctgcagaccgagctggttctaaggtgtcaaaaggaaacggactgcgacttgtgtctaagggtggccgtacacttggccgttcacgggcactgggaagaaccagaggacgaggaaaaatttggcggggcagccgactccggggtggaggaacctagaaatgcaagcctacaagcccaggttgtcctctcattccaagcctaccctacagctcgatgcgttttgctggaggtccaggtgcccgcagctcttgtccagtttggccagtccgtgggatcagtggtgtacgactgcttcgaagcggcgctgggtagcgaggtgaggatatggagctacactcaacctcgctatgaaaaagagctgaatcacacccagcaactgcctgcactgccttggttgaacgtctcggccgacggagataacgtgcacctggtcctgaacgtgtccgaagagcaacacttcgggctcagcctttattggaatcaagttcagggtccacccaagccaaggtggcataagaacctgaccggtccccagataattacactgaatcatactgatctggtcccatgcttatgcattcaagtgtggcctctggagcccgactccgttagaacaaacatctgcccttttcgagaagatcctcgggcccatcaaaatctttggcaggcggcccggctacagctgctgaccttacaaagctggctcctggatgcgccctgctcactgcctgcggaagccgccctatgctggcgagcccccggcggggatccctgccaacccctggtgcccccactgagctgggaaaacgtgactgtggataaagtgctcgagttccccttactgaaggggcacccaaacctgtgcgttcaagttaactctagtgagaagctgcagctgcaggaatgcctgtgggcagatagcctgggtcccctgaaggacgacgttctcctgctggagacaaggggcccccaggataacagatcactgtgtgccctcgagccttctggatgcacatccttaccatctaaggccagcacccgagctgcccggctgggggagtatctgctgcaagatttgcagtcgggacagtgcctacagctgtgggacgatgacctgggggccctctgggcttgtcccatggataaatacattcacaaacggtgggctctcgtatggctggcatgtctgctgtttgcagcagccctgagcctcattctgctcctgaaaaaggaccatgccaaaggatggctcagactgttaaaacaagacgtcagaagcggggccgctgcccgaggacgtgcagctctgttgctctacagcgctgatgatagcgggttcgagcgacttgtgggcgctcttgcatccgctttatgtcaacttccactccgcgtggccgttgacctttggagcagaagagagctctctgcacagggtcctgtcgcctggttccacgcccagaggagacagaccttacaggagggtggagtggttgtgcttctgttctctcctggcgccgtggccctttgtagcgaatggctgcaagatggggtgagcggtccaggtgctcacggccctcacgacgccttccgcgctagtctctcctgtgtcctccctgatttccttcaaggaagggcccccggcagctatgttggggcttgcttcgatcgcctgttacacccagacgctgttcccgctctctttcggacggtgcctgtgttcactttaccgagccagctccccgatttccttggcgcattacagcagcctcgcgcaccgcgatcagggcgcctacaggaaagggctgagcaggtgtccagagccctgcagcccgctctagactcgtacttccatccaccgggaacacccgcccccgggcggggtgtgggacccggcgcagggccaggcgctggggacggaacctag

SEQ ID NO: 191780 - DNA, 2163 bp, synthetic construct
  misc_feature 1..2163: note = Description of Artificial Sequence: Synthetic coding sequence
  source 1..2163: mol_type = other DNA
atgcccgtgccctggttcctgctgagcctggccctgggccggagccccgtggtactgtcactcgaacgacttgttggaccacaagatgcgacacattgcagccccggcttgtcatgtcgtctatgggattctgacattctttgtttaccaggtgacatcgtgcccgcgcctgggccagttctggcaccgacccatctccagaccgagctggtactgagatgccaaaaggaaaccgactgcgacctctgcctgagggttgccgttcacctagctgtgcacgggcattgggaagagccagaggacgaggagaaatttggcggcgccgccgactctggggtcgaggaaccaagaaatgctagcctccaggcccaggttgtgctgtcctttcaagcctacccaacggctcgatgtgtgttattggaggtccaggttccagcggcactggtgcagttcggccaaagcgtgggcagtgtggtttacgactgttttgaagccgcactgggatccgaagtgcgaatctggagttatacccagccccgctatgaaaaggagctgaaccacacccaacagctgcccgattgtaggggactcgaggtgtggaattcaatcccttcctgctgggccctgccgtggcttaatgtgagcgcagacggcgataatgttcatctcgtgctgaacgtgtcagaagaacaacactttggcttgagtctgtactggaatcaagtccaggggcccccgaaaccaagatggcataaaaacttgacagggccacagataattaccctgaatcacaccgaccttgtgccctgtttatgtatccaggtctggccattggaaccagatagtgtgcgcacgaatatctgtccctttcgcgaagaccctagagcgcatcagaatttgtggcaagccgcccggctccagctgcttacactgcagtcatggcttctggatgctccttgcagcctgcctgctgaggctgctctgtgctggcgcgcccctggcggcgatccttgccaacctctggtacccccactaagttgggagaatgtgaccgtagacaaggtgcttgagttccccctcctgaaggggcaccccaatctgtgtgtgcaggtgaatagctcggagaaacttcaactacaggaatgtctgtgggctgatagccttggacctctcaaggacgatgtcttgctgctagagactcggggcccgcaggacaataggtccctgtgcgccctggagcccagtggctgcacttccctcccctctaaggcttctaccagagcagccagactgggcgagtacctcttgcaggacttgcagtctgggcagtgtcttcagttgtgggatgacgatctgggggccctgtgggcttgccctatggataagtacattcacaaacgctgggcccttgtgtggctcgcttgcttgctctttgcggccgctctgagcttgatcctgctcctcaaaaaggaccacgcaaaaggatggctgaggcttcttaagcaagatgtgcggtcaggcgcggccgcgagaggtagggcagcactgctactgtatagcgccgatgatagcggttttgagcgccttgtgggggcactggcttccgcactgtgtcagctccccctccgcgtggccgtggacctatggagccgacgggagctgagtgcccaggggcctgtggcttggttccacgcccagagacgccagactctgcaggaaggcggtgtggttgttttgttatttagccccggcgccgtcgctctgtgctcagagtggctccaggatggagtgtctggtccaggagcccatggacctcatgatgcctttcgcgctagtctctcttgcgtcttacccgatttcctgcaaggccgagcaccaggatcttatgttggggcgtgctttgaccgcctgctccaccccgatgccgtgccagccctcttcagaaccgtgccagtgtttactctgcccagccagctgcctgatttcctcggagcccttcaacaacctcgcgcgccacgcagcgggcgcttgcaggagcgggccgaacaggtgtctagggcccttcaacctgccttggactcctactttcatcccccaggaactccagctcctgggaggggcgtgggccccggcgccgggccaggtgcaggcgatgggacatag

SEQ ID NO: 191781 - DNA, 1641 bp, synthetic construct
  misc_feature 1..1641: note = Description of Artificial Sequence: Synthetic coding sequence
  source 1..1641: mol_type = other DNA
atggcctaccccaccgcccggtgcgtgctgctggaggtgcaggtgcccgccgccctggtgcagttcggccagtccgtggggagcgttgtgtacgactgctttgaggccgctctcggcagcgaagtccgaatatggagttacacacaaccacgctatgagaaagagcttaaccatacccagcagcttccggccctgccgtggctgaatgtatcagcagatggggataatgtgcatctggtgctgaacgtgtcagaggaacagcacttcggtctcagtctttattggaatcaggtgcagggcccccccaagcctcggtggcataagaacctgaccggaccacagattatcactctgaatcataccgacttagtgccatgtctgtgtatccaagtttggcctctggagcccgactccgttagaaccaatatctgcccctttagagaagatccccgagctcatcaaaacctttggcaagcggctcgccttcaactgctgacactacaaagctggcttctagacgccccctgttcactacctgcagaggctgcactgtgctggagggcacccggcggggatccctgccagcctcttgtcccacctctctcatgggaaaatgtaacagttgatgtcaacagctccgaaaagcttcagctgcaggagtgtttatgggcagattctttgggtccgctgaaagacgacgtgctgctgctggagacccgcggtcctcaggataacaggtcactgtgcgccctggagccttccgggtgcacgtctctgccctctaaggccagcacccgggctgctcgccttggagagtaccttctgcaggacctgcagagcgggcagtgtcttcaattgtgggatgatgatctcggagctctgtgggcctgtcccatggataaatatatccacaaaagatgggccctagtctggctggcatgtttgctgtttgcagctgctttgtccctgatcctgctgcttaaaaaggaccatgccaaagccgcagcacgggggcgggcagctctgctcctttattcagctgacgacagtggcttcgagaggctggtgggcgctctggcaagcgcgttgtgtcagttacccctgcgggtggcagttgacctctggagtcgtagagagttatctgctcaaggtccggttgcatggtttcacgcccagcggcgacagaccctgcaggagggcggtgttgtagtgctgttgttctctcccggcgccgtggccctgtgcagtgaatggctgcaagatggtgtgagcggccccggtgcccacggccctcacgatgccttcagggcctccctcagttgtgttctgcccgatttcctgcagggccgggctccaggctcctacgttggtgcatgttttgataggctgctccaccctgacgccgtgcctgccctttttaggactgtgcccgtgtttacactgcccagtcagttgcccgatttcctgggcgccctgcagcagccgcgcgccccccgctccggacgtctgcaggagcgggcggagcaggtgtcacgagcactgcagcccgcactcgattcatattttcacccccccggcacgcccgccccaggcaggggagtgggcccaggcgcagggccgggtgccggagacggcacgtag

SEQ ID NO: 191782 - DNA, 2124 bp, synthetic construct
  misc_feature 1..2124: note = Description of Artificial Sequence: Synthetic coding sequence
  source 1..2124: mol_type = other DNA
atgcccgtgccctggttcctgctgagcctggccctgggccggagcccagtggtcctgtctctcgaacggttggtggggccccaggatgctacccattgttctccaggcctttcatgtcggctctgggactccgatatcctgtgtctacccggtgatatagtgccggcgccaggcccggtgctggcacccacgcaccttcaaactgaacttgtgctaagatgtcaaaaagagactgactgcgatctctgcctgcgggtggctgtgcatctggccgtccacggccactgggaagagcccgaagacgaggagaaatttgggggagccgccgactcaggtgtggaggagccaagaaacgcctccctccaggcccaggtggtactgtcttttcaagcttaccctaccgctcgatgcgtattgctcgaggtacaagtaccggccgctctggtgcagttcggccagtcagtagggagtgttgtgtatgactgcttcgaagccgctctcggatctgaggtgcgcatttggtcctacacacagccccgatacgagaaggagctgaatcatactcagcagctgcctgactgcaggggcctggaagtgtggaactccatcccctcttgctgggcactcccatggctgaacgttagcgccgatggagacaacgtgcatctagtattgaacgtgagtgaggaacaacacttcggactgtccctatactggaaccaggtacaggggccccctaaacctcgatggcataagaatctgacaggtccgcagattatcacgctgaatcacacagatctggtgccttgtttgtgcatccaagtatggcccttggagcccgatagtgtgaggacaaacatatgcccattccgcgaggacccacgggctcaccagaacctctggcaggccgccaggctccagttgctcactctccagtcctggttgctggacgccccctgctctctgccagctgaagctgcactatgttggcgggcgccgggcggagacccatgtcaaccccttgtgccaccactctcctgggaaaatgtcaccgtggataaagtgctggaatttcccctcttaaagggacaccctaatctatgcgtccaagtcaattcttcggagaagctgcagctgcaggagtgtctttgggccgattcgctgggcccactcaaggatgacgttctgctgttagaaacacgtgggccccaggacaaccggagcttgtgtgcacttgagccttcagggtgtacgtcgctaccatcaaaagcatccaccagagcagcccggcttggagagtacctgctccaggatttgcagagtggacagtgtcttcagttgtgggacgatgacctcggagccctatgggcttgtcccatggacaaatatattcataagcggtgggccctggtttggctggcctgtctgctcttcgccgccgcattgtctttaatactgctcctgaagaaagatcacgcgaaggcagccgcccgcggtagagctgccctgctcttgtactctgcagacgattctggttttgagcggctcgtgggtgcccttgcatcggctctttgccagctgccactgcgggttgcggtggacctctggagtcgcagagagctgtccgcacagggccccgtcgcctggttccacgcccaacgccgacaaacactccaagaggggggggtggtggtgctgctgttctcccctggggccgtggctctctgttccgaatggctgcaagatggcgtgagcgggcctggcgcccatggaccacatgacgcatttcgggcttcattgtcctgtgtacttcccgacttcctgcaaggacgtgcccccggcagctacgttggtgcctgttttgataggctcctgcacccggacgctgtacccgcactgtttaggacagtccctgttttcactttgccatctcagttgcccgactttttaggggccctccaacagcctagagcaccgcgcagtggaagactgcaggagcgcgccgaacaagtatctcgcgccctgcagcccgctctggactcttattttcacccaccagggacccctgcgccaggccgcggtgtgggccccggcgcagggccaggcgcgggcgacggcacttag

SEQ ID NO: 191783 - DNA, 213 bp, synthetic construct
  misc_feature 1..213: note = Description of Artificial Sequence: Synthetic coding sequence
  source 1..213: mol_type = other DNA
atgcccgtgccctggttcctgctgagcctggccctgggccggagcccagtggtgttatcacttgaaaggctagtgggaccccaagacgccactcattgtagtcctgggcttagctgccgcctgtgggttacttactccgcttgccttggcaccagttgcctactccgggccccctgctggcgtctgcggacatgtcgccagagctggtgctag

SEQ ID NO: 191784 - DNA, 2067 bp, synthetic construct
  misc_feature 1..2067: note = Description of Artificial Sequence: Synthetic coding sequence
  source 1..2067: mol_type = other DNA
atgcccgtgccctggttcctgctgagcctggccctgggccggagccccgtagtgctgtccttagagaggctcgttggaccccaagacgcaacccattgctcccccggcctgtcttgcaggctgtgggactcagacattctctgcctcccaggcgatattgtccctgcgcccgggccagtgctcgctccaacgcatctgcaaacagaactggtgctccggtgccagaaggagacagactgtgacctgtgcctacgtgtagccgtccacctggcggtacatgggcattgggaggaacccgaggatgaagaaaaattcggaggggccgccgactcaggcgttgaggagccgaggaatgcgtctctacaggcacaggtggtactatctttccaggcctatccaactgccaggtgtgtcctgctcgaggtgcaggttccggcagccctcgttcagttcggccaatctgtggggtccgtagtgtacgactgttttgaagccgctcttggtagtgaggtgcgcatttggtcatatacacaacctcgatatgagaaggagctaaaccacactcaacaactgcccgctttgccctggctgaatgtgtctgctgacggtgataatgtgcacctggttcttaacgtgtctgaagaacagcatttcggtctctcactatattggaaccaggtgcaggggccccccaaaccaagatggcacaagaacctcacaggtccacaaattattaccctgaaccacaccgacctcgtcccctgtctctgcatccaggtatggcctctggagcccgattctgtgcgaactaatatttgtccctttagggaggacccaagagctcaccagaatttatggcaagcagctcgtttgcagctcttaacactccagtcctggctgctcgatgccccttgttcactccctgccgaagcagcgctatgttggagggcacccggcggcgatccttgtcagcctttagtaccccctctctcttgggagaacgttaccgtggatgtgaattctagcgagaagcttcagcttcaagagtgtctgtgggctgattccctggggccactcaaggacgacgtgctgctgttggaaactagaggcccacaggataataggtcgctttgcgctcttgagcctagtggatgtacctcactcccatccaaagctagtacccgggccgccagactgggtgagtatctcctgcaagacttgcagagtggacagtgcctgcagctgtgggacgacgacttaggagccctctgggcttgtccaatggacaagtatatccacaaaaggtgggccttggtctggctcgcttgcctgctgtttgccgccgctctgtcactgattctgctgctgaagaaagaccacgctaaggggtggctcagactcctgaaacaggatgtacgatccggtgccgctgcacggggccgggcagccttactcctctatagtgccgatgacagcggtttcgaacggctggtgggagcgcttgcctcagccctgtgtcagcttcctctgcgagtggctgttgacctctggagcagacgggagctctcagcccaggggcctgtggcttggtttcacgctcagcggcgacaaacacttcaggaggggggtgtggttgttctgctgttttcccctggcgctgtggcgctgtgcagtgagtggcttcaggacggagtgtctggacccggggcccatggtccgcacgatgctttccgcgcaagcctctcatgcgtgctgcctgatttcctacagggccgcgctcctggttcatatgtgggtgcttgttttgatagactccttcaccctgatgcggtgcccgcactgttccgcacagttcccgtgtttacattgcctagtcagctgccagatttcctcggagcattacagcaacctcgagcacctcgttctggccgtttgcaggaacgcgccgagcaggtttcacgcgctctgcagccagcgctcgattcctattttcaccctccaggaactcccgcccctggaaggggcgtgggccccggggctgggcccggcgctggcgatggaacctag

SEQ ID NO: 191785 - DNA, 2220 bp, synthetic construct
  misc_feature 1..2220: note = Description of Artificial Sequence: Synthetic coding sequence
  source 1..2220: mol_type = other DNA
atggccccctggctgcagctgtgcagcgtgttcttcaccgtgaacgcatgcctgaacgggagtcagctcgcagtggcagccggtggaagtggacgcgctcgcggcgcagatacctgtgggtggcgcggggtgggacccgcctctcgcaactctgggctctacaacattacattcaagtatgataattgtaccacttacctgaatcccgtaggcaaacatgtgattgccgatgcacagaatataacgattagccagtacgcgtgtcacgatcaggtggctgtcacgatcctctggtcgcctggggctctaggcatcgagtttctcaaaggcttccgagtgatactagaagagctgaaatctgaaggccggcagtgtcagcagctgattctgaaggacccgaaacagcttaattccagttttaagcggacagggatggagtcccaaccttttctcaatatgaaattcgagacagactacttcgtgaaggtggtgcccttccccagcatcaagaatgaaagtaactaccatccttttttctttcgcacgcgcgcctgtgatctcttgctccaacctgacaatctggcttgtaagccattttggaagccacgcaacctgaacatctcccaacatggctcagacatgcaggtctctttcgaccacgcaccccacaacttcggctttaggtttttctatctgcactacaagctcaagcacgaggggccattcaagcgaaagacctgcaaacaggaacagaccactgagactacgtcctgtctcctacagaacgtctcacccggtgactatatcatagagcttgtggatgatacaaatacaactcgtaaggtcatgcattacgcgctcaaacccgtgcattctccgtgggccgggccgatccgtgccgtcgccatcaccgtacccctggtggtcatctcagccttcgccacattgttcaccgttatgtgtaggaaaaagcaacaggagaacatttattcacatctggacgaagaatcatctgagtcgtctacgtataccgccgccctgcctcgcgaacgccttagaccccgccccaaagtcttcctgtgttactcctcaaaggatggccagaatcacatgaatgtggtacagtgctttgcttatttcctacaggatttctgtgggtgtgaggtggctcttgatttatgggaggacttttctctgtgtcgcgaaggccagcgcgaatgggtgattcaaaaaattcatgaaagccagttcataattgtcgtctgctcaaaaggcatgaagtatttcgtggacaagaagaattacaagcacaagggagggggacgggggagcgggaagggtgaactgtttttagttgcagtctctgcaatcgcggaaaaactccgtcaagcaaagcaatccagtagcgctgccctgtccaaattcatagccgtgtattttgactactcctgcgaaggcgatgtgccaggaatcctcgatctttccaccaagtatcgcctgatggacaatttaccccagctttgctctcacttgcatagccgggaccacggattgcaggagcccggccagcatacaaggcaggggagcagacgcaactacttccgttctaagagtggtcggagcttatacgtcgccatatgtaacatgcatcaatttattgacgaagaacctgactggttcgagaagcagtttgtgcccttccatccgccacctttgagatatagagaacccgtgctggagaagttcgacagcggactggttctgaatgatgttatgtgcaagcctggccccgagtccgatttctgtctcaaagtcgaggcggcagtcctgggagcaaccggccctgcagactctcagcacgagtctcagcacggagggctcgatcaggacggcgaagctcgccccgccttagatggctccgccgctctacagcccctgctccacacggtcaaagctggaagcccatctgacatgccacgcgacagcggcatttatgattcatcagtgccgtcaagtgagttgtctctgcccctcatggaagggctgagcactgatcaaacagaaacatcctctctaacggaatcggttagctcttcatcaggtttgggggaagaggagccgccagcacttccatctaagttgttatcaagtgggagctgcaaggccgatttgggctgcaggtcatatacagatgagctccatgccgtcgctcccctgtag

SEQ ID NO: 191786 - DNA, 1788 bp, synthetic construct
  misc_feature 1..1788: note = Description of Artificial Sequence: Synthetic coding sequence
  source 1..1788: mol_type = other DNA
atggagagccagcccttcctgaacatgaagttcgagaccgactactttgtcaaagtggttccattccccagcatcaagaacgaatctaattaccaccccttcttttttcggactcgcgcctgcgatctgttgctgcaacctgacaatctcgcatgcaaaccgttttggaagcctaggaacctgaacatctcgcagcatggctccgatatgcaggtgtccttcgaccacgccccacacaattttggctttcgttttttttatctgcactataaactgaaacacgaagggcccttcaaacgtaaaacttgcaaacaggaacagacaacagaaacaacctcatgtctactgcagaacgtttcgcccggggattacattatcgaactggtggacgatactaataccacaagaaaggtgatgcactacgctttaaagcccgtacatagcccatgggccggtcctatccgggcagttgctatcactgttccgctcgtggtgattagcgctttcgcaaccctgttcacagtcatgtgccgcaaaaagcagcaggagaacatatactctcacctggacgaagagagctctgagagttctacatatacagctgctctcccgagagaacggctgcgcccaagacccaaggttttcctatgctattcttcgaaggatggccaaaaccacatgaatgttgtgcaatgtttcgcctactttctgcaggatttctgcggctgtgaggtagctctggatctttgggaggatttctctctgtgtagagagggacaaagggaatgggtgatacagaagatacacgaatctcagtttataatcgttgtctgttctaagggaatgaagtacttcgtggacaagaagaactataaacacaaaggaggtggccgagggagtgggaagggtgagttgtttctggtggctgtctcagctatagcagaaaaactgaggcaggccaagcaatcctcttccgcggctctcagtaaattcatagcagtgtatttcgactactcttgtgagggagacgtgccaggaatactagacctgtctaccaaatataggctaatggataatcttcctcagttgtgtagccacctccattcaagagaccatgggttacaggaacccggtcaacatactagacagggcagccgcagaaattacttccgctcaaaatctggccgatccctctatgtcgcaatctgtaatatgcaccaattcatcgacgaagaacccgattggtttgagaaacagtttgtgcctttccacccaccccctctgagatacagggagcccgtccttgaaaaatttgactctgggctggtgctcaatgacgtgatgtgtaaacccggaccggaatccgacttttgtttgaaggtcgaggccgccgtgctgggagccacaggccctgccgacagtcagcacgaaagtcagcacggaggactcgatcaggatggggaggctagaccagccctggacggttctgcagccctgcagcccctcctccacactgttaaggccgggagcccaagtgatatgccacgcgacagtgggatctatgactcatctgtgcctagtagtgagctgtcgttgccactgatggaaggcttatccactgatcagactgaaactagctctttgactgagtcagttagctctagttccgggctcggtgaagaagaaccaccggctctgccaagcaagttattatctagcggatcgtgcaaggcggatctcggctgcaggtcctacacagatgagctgcatgctgtggcccccctttag

SEQ ID NO: 191787 - DNA, 2148 bp, synthetic construct
  misc_feature 1..2148: note = Description of Artificial Sequence: Synthetic coding sequence
  source 1..2148: mol_type = other DNA
atgccccgggccagcgccagcggcgtgcccgccctgttcgtgagcggagagcagggagttggtcccgccagtaggaactcaggcttatacaacattaccttcaaatacgacaattgtactacctatctgaaccccgtaggtaagcacgtgattgcagatgcccaaaacataactatctcccagtacgcttgccacgaccaggtcgccgttactattctatggtcgcccggcgcattaggaattgagtttttgaaaggttttcgcgtgatcttggaggagctcaaatctgagggtcgtcaatgccagcaactgattttgaaggatccaaagcagctcaatagctcattcaagagaacaggtatggaatctcagccatttctcaacatgaaatttgagacagattatttcgtaaaagtagttcccttcccgtccattaaaaatgagtctaactaccacccttttttctttcggacacgggcttgtgacctgttgttacagccagacaatctagcctgtaaacctttctggaagcccagaaaccttaacatctctcagcacggcagcgatatgcaggtatcctttgaccacgcccctcacaatttcgggttccgcttcttttatctccactataagttaaaacacgagggaccgtttaagaggaagacgtgcaagcaagagcagactacagagacaacctcctgcctactgcaaaacgtgtctcccggcgattacataatcgagctggtggacgacacgaataccacccggaaggtgatgcactacgccttaaagccagtgcacagcccgtgggctggccccatacgagccgtagccattaccgtccccctggtggtgatctccgcattcgcaactctctttacagtcatgtgccgcaaaaagcagcaggagaacatctattcccacctggatgaggagtctagcgaaagcagcacgtataccgctgctttaccgcgggagcgtttgaggcctagacccaaggtgtttttatgttattcaagcaaagacggccaaaatcacatgaacgtagtacagtgcttcgcatacttcttacaggacttttgcgggtgcgaggttgcgcttgatctatgggaggatttcagcctgtgtcgggagggccagagggaatgggttatacagaagatacacgagagccagttcattatcgttgtttgttcgaaaggaatgaagtacttcgtggacaagaagaactacaagcacaagggcggtggacgcgggtcagggaagggagagctctttcttgtggccgtgagcgctatagctgagaagctgcgacaggccaagcaaagctcttcagcagctctatcaaagttcatagctgtctactttgattactcctgcgagggcgacgtgccaggcatcctggatctctcaaccaagtacaggttgatggataatcttccacagctatgctctcaccttcatagccgggatcacgggctgcaggagccaggccagcatacaagacaggggtcccggaggaattatttcaggtctaagagcggtcgctcactctacgttgccatctgcaatatgcaccagtttatagacgaagagcccgactggtttgagaagcagttcgtaccttttcacccccccccactgaggtatcgcgagcccgttctggagaagtttgatagtgggctagtcctgaatgatgttatgtgtaagcccggaccagaatctgatttttgtctgaaggtcgaagcggcagttctgggcgccaccggacctgcagactctcaacacgagagccagcatggcgggctggaccaagacggcgaggcccgtcccgctttagatggctctgcagctcttcaaccattacttcacacagtcaaggcggggtctcccagcgacatgccacgtgatagtggcatctacgatagtagcgtcccttcatcagagctctcattacccctgatggaagggctgtctactgaccagacagagacctcctccctcaccgagtccgtgagctcaagcagtggattaggcgaagaagagccacctgctctcccatctaagctcttgtcaagcggcagctgtaaggcagacctcggctgcaggagctacactgacgagttacacgctgtggctcccctgtag

SEQ ID NO: 191788 - DNA, 1788 bp, synthetic construct
  misc_feature 1..1788: note = Description of Artificial Sequence: Synthetic coding sequence
  source 1..1788: mol_type = other DNA
atggagagccagcccttcctgaacatgaagttcgagaccgactacttcgttaaagtcgtgccttttccttccatcaaaaatgaaagcaactatcacccattcttcttccggaccagagcgtgcgacctgcttcttcaaccggataacctggcatgcaagccattttggaagccaaggaacttgaatatatcccagcacggctctgacatgcaagtctcatttgaccacgccccacacaactttggctttagattcttctaccttcattataagttaaaacacgaagggccctttaaacgcaagacttgcaagcaggaacagactactgaaacaacatcgtgtcttcttcaaaacgtgtcacccggcgactatattattgaactggtggatgataccaacacaactagaaaggtaatgcactatgctttgaagcctgttcacagcccatgggcaggccccattcgggctgtcgcaatcaccgtgcccctagtggtcatttctgcttttgctactctgtttactgtgatgtgtcggaaaaagcagcaagagaacatctattctcacctggacgaagaatcatcagagtcatctacttatacagccgctctccctcgagaaaggttaagacctcggcctaaggtattcctgtgttactcctccaaggatggtcagaaccacatgaacgtagtccaatgctttgcttacttccttcaggacttttgtggttgcgaagtggcactcgatttgtgggaagatttttcactctgtagagaggggcagagagaatgggtcattcagaaaattcacgagagccagtttattattgttgtgtgctccaagggcatgaagtacttcgtggataaaaagaactacaaacacaaggggggcggcagaggatcaggcaagggcgagctgttcctcgtggctgtgtctgcaattgccgagaagctgcgccaggcaaaacagtcgtcttccgccgctctgagcaagtttattgcagtctactttgactattcatgcgaaggagacgtacctggtattctggatctcagcactaagtaccggttgatggataacctgcctcagctgtgctcgcacctccattccagggatcacggcttacaggagcccgggcagcacacgcgccaaggcagccgcagaaattatttccggtctaagagtggacgctcgctgtacgttgcaatttgcaacatgcatcagtttatagacgaggaacccgactggttcgagaagcagttcgtcccgtttcatccaccccctttgcgctacagagagcccgttttggaaaagtttgacagcggattggtccttaacgatgttatgtgcaaacccggccccgaatcagacttctgcctgaaggttgaagctgccgttttgggcgccacgggaccagccgatagtcagcacgaaagccaacacgggggtctggaccaagatggggaggcccgacctgccttggacggttccgcggctttgcagccactcttgcacacggtgaaagcagggagcccttcagacatgcctcgggactctggcatttatgattcctcagtcccatcaagcgagttaagcctccctttgatggagggtctgtccaccgaccagacggaaacaagttcccttactgaaagcgtgtccagctcttctggcctgggcgaagaggaaccgcccgcactgcccagcaagctgctgtcttcggggtcttgtaaagccgatttggggtgccggagctacacggatgagctgcacgcagtggctcctctgtag

SEQ ID NO: 191789 - DNA, 222 bp, synthetic construct
  misc_feature 1..222: note = Description of Artificial Sequence: Synthetic coding sequence
  source 1..222: mol_type = other DNA
atggagagccagcccttcctgaacatgaagttcgagaccgactacttcgtcaaagtggtccctttcccatccatcaaaaatgagagcaactaccatcctttcttcttccgcacacgcgcctgcgatctgctcttgcagccggataacttagcctgcaaaccattctggaagcccagaaatctgaatataagccagcatgggtcagacatgcaggtttcctag

SEQ ID NO: 191790 - DNA, 1671 bp, synthetic construct
  misc_feature 1..1671: note = Description of Artificial Sequence: Synthetic coding sequence
  source 1..1671: mol_type = other DNA
atgggcttctggatcctggccatcctgaccatcctgatgtacagcacagcagcaaaattttccaaacagtcttgggggctcgagaacgaagctctcatcgttcgttgccctcggcagggcaaaccatcgtacaccgtagattggtactattctcagacgaataaatccatacccacacaggaaagaaatcgagtattcgccagcgggcaactactaaagttcctgcccgcagcagtcgcagatagcggcatctacacctgcatcgtccgctcccccacttttaataggactggctatgctaatgttaccatctacaaaaaacagagtgactgtaatgttcccgattatctgatgtattccaccgtcagtggttctgagaagaacagcaaaatctactgccctaccatcgacctgtacaattggactgctcccctggaatggttcaagaactgtcaggcacttcagggctcccgctacagggcacacaagtccttcctcgtgatagacaacgtcatgaccgaagacgcgggtgactacacatgtaagttcattcacaacgagaatggagccaattactcagtgacagctacacggagtttcaccgtgaaggatgagcagggctttagccttttccccgtcatcggagctcccgctcagaatgaaatcaaggaagtggaaataggtaaaaatgccaatctgacctgtagcgcgtgtttcggaaaggggactcagtttctggctgcagtgctatggcagctcaacggcacaaaaatcactgacttcggagagcctcgtatccagcaggaagagggccaaaaccagtccttttctaatggtctggcatgcctggatatggttcttcggatcgccgacgttaaggaggaggacttgttacttcagtacgattgtctggcactcaacctacacggcctgcgtcgacacacagttcgcctttctaggaaaaaccctatcgatcaccatagcatttattgcattattgcagtttgttctgtctttctcatgctaattaatgttctggtgataatactaaagatgttctggatcgaggccacactgttatggcgggatatagccaaaccctacaagacacgcaatgacgggaagctttatgacgcttatgtggtctatcctcgcaattacaaaagcagtactgacggtgcttcccgagttgagcattttgtccaccagatactaccggacgtgcttgagaacaagtgtggatacactctttgtatttatggccgcgatatgcttccgggagaggatgtcgtcactgccgtggaaacaaatattaggaagtcacgacgacatattttcatcctgactccccagattacccataacaaggagttcgcctatgaacaggaggtcgcccttcactgcgccctgatacagaacgacgctaaggtgatcttgatcgaaatggaagcactgtcagagcttgatatgctgcaggccgaggcactgcaggattccttacagcaccttatgaaggtacaagggacaattaagtggcgggaggatcatattgctaacaaacggagcctgaactccaaattctggaagcacgtgagataccagatgcccgtacctagcaagatcccaaggaaggcaagttcactcacgccattggccgcacaaaaacaatag

SEQ ID NO: 191791 - DNA, 513 bp, synthetic construct
  misc_feature 1..513: note = Description of Artificial Sequence: Synthetic coding sequence
  source 1..513: mol_type = other DNA
atgaactgccgggagctgcccctgaccctgtgggtgctgatcagcgtgagcactgctgagtcctgcacctcccgtcctcatatcacagtcgtcgagggcgaaccgttttatttaaagcactgctcgtgcagcctcgcccatgagattgagacgacgactaaatcatggtacaagagcagtggatctcaagaacatgtggagctgaacccccggagcagcagccgcatagcccttcacgactgcgtgctggaattctggcccgtcgaactgaacgatacaggcagctatttcttccagatgaagaactacacacagaaatggaagcttaacgtgatccggaggaataagcactcatgcttcacagagagacaagtgaccagtaaaattgtggaagtcaagaaattcttccagatcacttgtgaaaacagttactaccaaaccctggtgaattccacatctctctacaaaataggcccacctatctgtaggaaaacaagctccggcctgcactag

SEQ ID NO: 191792 - DNA, 1626 bp, synthetic construct
  misc_feature 1..1626: note = Description of Artificial Sequence: Synthetic coding sequence
  source 1..1626: mol_type = other DNA
atgaactgccgggagctgcccctgaccctgtgggtgctgatcagcgttagtacagccgagtcgtgtacctctagaccgcacattaccgtggtggaaggcgagcctttctatctgaagcattgcagttgcagcctggctcacgagatagagactacaactaagagttggtacaaatccagcggaagtcaggagcatgtggagctgaatccaaggagctccagccggatcgctctgcatgattgtgtactggaattctggccagtggagcttaacgacactggctcctatttcttccagatgaaaaattacacacagaaatggaaactgaacgttatcaggaggaataaacacagttgctttacggagcgacaggtgacatccaaaatcgttgaagtgaagaagttctttcaaatcacctgtgaaaattcctactatcagaccttggtgaatagtacatctctatataaaaactgcaagaaactcttactcgaaaataacaaaaacccgactatcaagaaaaatgcagaattcgaagatcaaggctattacagctgtgtacacttcctgcatcacaacggaaaacttttcaatataacaaaaacatttaatataactatagtagaggatcgatccaatatcgtccctgtgctgctcggtcctaaactgaaccacgttgctgtggagctgggcaagaatgtgaggttgaactgctcagccctgctgaatgaggaggatgtaatctactggatgtttggcgaggagaacggcagtgacccaaacatccacgaggagaaggaaatgcggattatgactcctgaaggcaagtggcatgcctctaaggtactgagaattgaaaacatcggagagagcaatcttaatgtcctatacaattgcaccgtagctagtacgggcggaaccgacactaagagttttatcttggtgcggaaggcggacatggccgacattccaggccacgtgtttaccaggggaatgataatcgctgtcctcatcctggtcgctgttgtctgcctcgtgaccgtgtgtgtgatctatcgcgtcgacctggtgttgttttatcggcacctcacaagacgggacgaaacattaacggacgggaagacctacgacgcctttgtgtcctatttgaaagaatgcagaccagagaatggagaagaacacactttcgcagtcgaaattctgccccgagttcttgagaagcactttgggtataaactttgcatctttgagcgggatgtggttcccggaggcgccgtggtggatgagattcatagcctgatcgaaaagtcccggcgcctgatcatagtcctgagtaaaagttatatgagcaatgaggtgcgttatgaacttgagtcagggctgcacgaagccttagttgaaaggaagattaaaatcatcctcatagaattcacaccggttaccgatttcacctttttgcctcaatctctgaagttgctgaaaagccaccgcgtcttgaagtggaaggcggataagtcccttagctataattcccgcttttggaaaaatctcttgtacctcatgcctgccaaaaccgttaagcccggtcgggatgagcccgaagtactccctgtgcttagcgaaagttag

SEQ ID NO: 191793 - DNA, 1626 bp, synthetic construct
  misc_feature 1..1626: note = Description of Artificial Sequence: Synthetic coding sequence
  source 1..1626: mol_type = other DNA
atgaactgccgggagctgcccctgaccctgtgggtgctgatcagcgtctccacggccgaaagttgtacctcgcgaccacatatcactgttgtagagggggaaccgttctatctcaagcattgctcctgtagcctggcccatgagatcgagaccaccaccaagtcatggtacaagtccagcgggtctcaagaacatgtggagcttaatccacggagctcctcccgcatcgccctacacgattgtgtgctggagttctggcctgtagagttaaacgataccggttcctactttttccagatgaagaattacacacagaaatggaagttgaatgtgatccggcggaataagcattcctgctttactgagaggcaggtaacctccaaaatcgtggaggtaaagaaattttttcagattacctgcgaaaacagttactaccaaacccttgttaatagcacttccctgtataaaaactgtaaaaaactgttgctcgaaaataacaaaaaccctactatcaaaaaaaacgctgaattcgaagaccaaggatactacagctgcgtccattttttacaccataacgggaaactctttaatatcacgaaaaccttcaacattactatcgttgaagacagatctaatatcgttcctgtgcttctcggaccaaagctgaaccatgtcgcagttgagctggggaagaatgtgagactgaattgctccgcccttctgaacgaggaggacgtgatttattggatgtttggagaggaaaacgggagtgaccccaacatccatgaggagaaagaaatgcgaataatgaccccagaggggaaatggcacgcctccaaggtgctgaggatagagaacatcggggagagcaatctcaatgtgctgtataactgtactgtggcaagtacaggcggcacggacactaagtcctttattctggtgcgaaaggccgatatggccgacatacccggacatgttttcacacgagggatgatcattgctgtcctcatcttggtggctgtggtttgccttgtcacggtctgcgttatttatagagtggacttagtattattttacagacatctgactagaagagacgaaaccttaactgacggtaaaacatacgacgcctttgtgtcgtatctcaaagaatgtagaccagagaatggtgaggagcacacgttcgccgtggaaatactgccgagggtgttagaaaagcatttcgggtataaattatgcatttttgaacgggacgtggtccccggtggagccgtcgtggatgaaattcatagtctgattgagaagtcacgcaggctcattatcgtgttatctaagagctatatgagcaatgaggtgagatacgagttggaatctggcctgcacgaggctttagtggagaggaagatcaaaatcatattaattgaattcactcccgtgaccgatttcacctttctgccgcagtccttgaaacttctgaaatcacaccgtgtgcttaaatggaaagctgacaagagcttgtcatacaatagccgtttttggaagaacctgctgtacttgatgcccgccaagactgtcaagcctgggcgggatgagcccgaggtcctgcctgttctgtcagaatcttag

SEQ ID NO: 191794 - DNA, 1800 bp, synthetic construct
  misc_feature 1..1800: note = Description of Artificial Sequence: Synthetic coding sequence
  source 1..1800: mol_type = other DNA
atgctgtgcctgggctggatcttcctgtggctggtggccggcgagcggataaaggggttcaacataagtgggtgcagcacaaagaaactcctatggacctacagcacgcggtccgaagaggagtttgtgttgttctgcgatctaccagaaccgcagaaatctcatttttgccaccgtaatagactgtcgccaaaacaagttcctgagcatttgcccttcatgggcagcaatgacctgagcgatgtccaatggtaccagcagccttccaacggcgacccgctggaggacatcaggaagagctacccacacataatccaggataagtgtaccctgcatttcctaacccctggggtgaataacagcggaagctacatatgcaggcccaagatgataaaaagcccctatgatgtcgcctgctgcgtgaaaatgatcctggaagtgaagcctcagactaatgcaagctgcgaatattccgctagccacaaacaggacttactgttaggctccaccggaagcatatcttgtccctctctgtcttgtcaaagtgacgcacagtctcctgctgtgacttggtacaaaaacggaaagctgctttcggtcgagagatccaaccgtatcgtcgtggatgaggtgtatgattatcaccagggtacatatgtgtgtgactacacacagagcgacactgtgagctcctggactgtccgcgctgtcgtgcaggtgcggaccattgttggggatacgaagctcaaaccagacatactggacccagtggaggacacactggaagttgaactagggaagcctctcacgatcagctgcaaagcaagattcggcttcgaaagagtctttaatccggtcattaagtggtacatcaaggactcggacctggagtgggaagtgtcagtgcccgaggctaagtcaattaagtccacactgaaggatgagattattgagcgtaacattattctcgaaaaagtcacacagcgcgatttgagacggaagttcgtgtgcttcgtgcagaattccatcggaaacacaactcagagtgtgcagctaaaagaaaaacgcggcgtagtactgctttacatcctgctcggcacaattggcacactcgtggcagtgctggctgcgagcgctcttttgtaccggcattggattgaaatcgtgctgctatatcgcacctatcagtctaaagaccagaccctgggtgacaagaaagacttcgatgcgtttgtctcttacgccaagtggtcttcttttccatctgaggcgacctcatcacttagtgaggagcacctggctctcagcctgtttccagatgtactcgaaaataaatatggatatagtctgtgtttactagaaagagacgtggctccaggcggggtgtatgccgaagacattgtgagcattataaagaggagtcgccgtgggatcttcattctgtctcctaattatgttaatgggccttcaatcttcgagctgcaagccgccgtgaacctggcattagacgatcaaactctgaaactgatactcatcaagttctgctattttcaggaaccagagagtcttccccacctggtgaaaaaagctttgcgggtgctgcctacggtcacatggaggggattaaagtctgtacccccaaactccaggttttgggccaaaatgcgatatcatatgccagtaaagaattctcagggatttacatggaaccagttgcggattacctcccggatctttcagtggaaggggctttctcggactgagacgacaggacggtcctctcagcctaaagagtggtag

SEQ ID NO: 191795 - DNA, 1374 bp, synthetic construct
  misc_feature 1..1374: note = Description of Artificial Sequence: Synthetic coding sequence
  source 1..1374: mol_type = other DNA
atgatcctggaggtgaagccccagaccaacgccagctgcgagtactcggcgtcacacaaacaggatctcctactcggcagcaccggcagcatcagctgccccagtctgtcttgtcagagcgacgcacagagcccagccgtcacctggtacaaaaatggcaagctgctaagcgttgagcgtagcaatcgaatcgttgtggatgaagtctacgactaccatcaggggacttatgtgtgcgattacacacagtcagacactgttagttcatggacggtacgggctgttgttcaggttcgtaccattgtgggagacactaaactaaaaccagatatcctcgacccagtagaagataccctggaggtcgaactaggtaaaccgctgaccatctcatgtaaggcccgctttggcttcgagagagtattcaaccctgtgattaaatggtacataaaggacagcgatctggaatgggaagtgagtgtcccagaggccaagagcattaagtccacattgaaggacgaaattattgaaagaaacattatcctggaaaaagtcacccagcgcgacctgagaaggaagtttgtctgctttgtgcagaattctatcggtaacacaacccagagcgttcagctgaaggaaaaaaggggagtggtactcttgtacattttgctgggtacaattggaactctggtggccgtccttgcggcctccgctctgctctataggcattggatcgagattgtgctcctttatcgtacctatcagagcaaagatcagacgcttggagataaaaaagacttcgatgcattcgtatcttatgctaagtggtcaagctttcccagcgaagccactagtagtttaagcgaagagcatctggccttgagcctgttcccagacgtacttgagaacaagtatgggtatagcctgtgccttcttgagagagatgtggcgccaggcggggtttatgctgaagacatcgtgagtattattaaaagatctaggagggggatttttatccttagccctaattacgtaaacgggccaagcatctttgaactccaagcagcagtcaacctagccctcgatgaccaaactcttaaactgattctaataaagttctgctacttccaggagcctgagtccttgcctcaccttgttaaaaaggccctgagagtgctgcccacagtgacctggcggggtctgaagtctgtgcctccaaacagtaggttttgggcgaaaatgcgctaccatatgcccgtcaagaacagccaggggtttacgtggaaccagttgagaattactagcaggatctttcagtggaagggactctcgagaaccgagactaccggtagatcctcccagccgaaggaatggtag

SEQ ID NO: 191796 - DNA, 135 bp, synthetic construct
  misc_feature 1..135: note = Description of Artificial Sequence: Synthetic coding sequence
  source 1..135: mol_type = other DNA
atgctgtgcctgggctggatcttcctgtggctggtggccggcgagagaatcaaaggtttcaacatctcaggatgctctacaaaaaaactgctctggacttacagcaccagatcagaggaggaatttgtcttatag

SEQ ID NO: 191797 - DNA, 534 bp, synthetic construct
  misc_feature 1..534: note = Description of Artificial Sequence: Synthetic coding sequence
  source 1..534: mol_type = other DNA
atgaagctgcagtgcgtgagcctgtggctgctgggcaccatcctgatcctttgctctgtagacaatcacggtctgcgccggtgtctgatctccaccgatatgcaccatatagaagaatcatttcaggagatcaagcgcgccatccaagcgaaagatactttccccaatgttactatcctgtcgactctcgagacactgcaaattattaaaccactcgatgtttgttgtgtgacgaagaatctgctggccttctacgtcgatcgcgtttttaaagaccatcaggagcccaacccaaaaatcctgcggaagatatcaagtatcgccaacagctttctgtatatgcagaaaaccctgaggcaatgtcaggaacagaggcaatgtcactgtcgccaagaggctaccaacgcaacccgcgtcattcacgacaattacgaccaactggaagtgcacgcagccgctatcaagagcttaggtgagctcgacgtgttccttgcttggatcaacaagaatcacgaggtgatgttctccgcctag

SEQ ID NO: 191798 - DNA, 648 bp, synthetic construct
  misc_feature 1..648: note = Description of Artificial Sequence: Synthetic coding sequence
  source 1..648: mol_type = other DNA
atgtgcaccgagggcgccttcccccaccggagcgcctgcagcctgccactgacccacgttcatacacacatccacgtgtgcgtccctgtcctgtgggggagtgttccacgcggcatgaaattgcagtgcgtctcgctgtggctccttgggaccatcctcattttgtgttccgttgataaccacggcctgagacgttgcttgatctctaccgacatgcaccacatagaagagtcatttcaagagattaaaagggctattcaggcgaaagatacgttcccaaacgtaacaatactaagtaccttggaaaccctacaaatcattaaaccactggatgtctgttgtgtgacaaagaatcttctcgcattttacgttgatagagtctttaaggaccaccaggagccgaaccctaaaattctccgtaagatcagcagcattgccaattcattcctgtacatgcagaaaactctccgccagtgtcaggagcagcgccaatgtcattgccgacaggaggccacaaacgcgactagggtgattcatgacaattacgaccaattagaagttcatgctgccgctatcaagagtctcggggagctggatgtctttctcgcctggattaacaaaaatcacgaggtgatgttcagtgcttag

SEQ ID NO: 191799 - DNA, 792 bp, synthetic construct
  misc_feature 1..792: note = Description of Artificial Sequence: Synthetic coding sequence
  source 1..792: mol_type = other DNA
atggacagctacctgctgatgtggggcctgctgaccttcatcatggtacctgggtgccaggcagaactgtgcgatgacgaccctcccgagattccacatgcaacgtttaaggccatggcctacaaggagggcaccatgttgaactgcgaatgtaaacgcgggtttaggaggataaaatccggatccttatatatgctgtgtaccggaaatagcagccacagttcttgggataaccagtgccagtgcacatcgtctgcgactcggaatacaacaaaacaggtgacgccacagcccgaagaacaaaaggagaggaagactacagagatgcagtccccaatgcagcccgtggatcaggcctcactgcccggccactgccgcgagccacctccttgggagaacgaggccacggaacgcatttaccacttcgtagtcggccagatggtttactatcaatgcgtgcaaggttatagagccctgcatagaggaccggcagaatctgtgtgcaaaatgacccatggcaagactcgttggacgcagccccagctgatttgcaccggtgaagaaaagccccaggccagtccagagggcagacccgagagcgagacttcctgcctggtgacaacaacagattttcaaattcagacggagatggccgccacaatggagacgagcatcttcaccacagagtaccaggtggctgtggcaggctgcgtgttcctgctgatatccgttctgctgttaagtgggttgacctggcagaggagacagcgaaagtctcggagaacaatctag

SEQ ID NO: 191800 - DNA, 603 bp, synthetic construct
  misc_feature 1..603: note = Description of Artificial Sequence: Synthetic coding sequence
  source 1..603: mol_type = other DNA
atggacagctacctgctgatgtggggcctgctgaccttcatcatggtgcccggatgtcaggccgagctttgcgatgacgacccccctgaaatcccgcatgccacatttaaagctatggcatacaaagaagggactatgctgaattgtgaatgtaaacggggtttccgacggatcaaatccggaagcctctatatgctctgcaccggcaattcaagccactcatcctgggacaaccagtgccagtgtaccagttctgcgacacggaatactactaagcaggttaccccacagcccgaagaacagaaagaaaggaaaacaactgaaatgcagtcccctatgcaaccggtggaccaggcctccttaccaggcgaggagaagccacaggcctcccccgaagggcgccctgaaagtgagacctcttgtctcgtgactacaaccgattttcagatccaaaccgaaatggccgctaccatggagacttcaatctttactacagagtatcaggtcgctgtcgccgggtgtgttttcttgttgatttccgtacttctcctcagcgggctcacatggcagcggcgccagcggaagtcaagaaggaccatttag

SEQ ID NO: 191801 - DNA, 819 bp, synthetic construct
  misc_feature 1..819: note = Description of Artificial Sequence: Synthetic coding sequence
  source 1..819: mol_type = other DNA
atggacagctacctgctgatgtggggcctgctgaccttcatcatggttcctggatgtcaggctgagctgtgtgatgatgaccctccagagatccctcacgcaacattcaaggccatggcctacaaggagggtacaatgcttaattgtgagtgtaagagaggattccggcggatcaaatctggcagcttgtacatgctgtgtactggcaactcctctcattcctcttgggacaaccaatgtcagtgtaccagctccgctaccagaaatactaccaagcaagtgacccctcagccagaagaacagaaagagcgcaaaactaccgaaatgcaatcgcccatgcagcccgttgatcaggcttcccttcccgggcattgccgggagccccctccttgggaaaacgaagcgactgagcggatataccactttgtggtgggtcagatggtttattatcaatgcgtccaggggtacagagcactgcacagggggcctgccgaatcagtctgtaaaatgacccacggcaagaccaggtggactcagccacagctgatctgcaccggagaaatggagacctcccaattccccggggaggaaaagcctcaagcatcgcccgaggggcgccctgagagcgagacttcatgcctggtgacaaccacggatttccaaatccagaccgaaatggccgcaaccatggagacctctatatttactactgagtatcaagtcgccgtggccgggtgcgtgttcctcctgatttccgtgttactgctgagcgggctgacgtggcaacgtcggcagaggaaatcgcggaggacgatttag

SEQ ID NO: 191802 - DNA, 489 bp, synthetic construct
  misc_feature 1..489: note = Description of Artificial Sequence: Synthetic coding sequence
  source 1..489: mol_type = other DNA
atggtgcccggctgccaggccgagctgtgcgacgacgacccccccgaaattccccatgccacctttaaagccatggcgtataaggaaggcaccatgctgaactgcgagtgcaagcgaggattccgaaggatcaagagtggctcactatacatgctctgtacgggaaatagctcacacagcagctgggacaaccagtgccagtgcacctcctccgccaccagaaacactacgaaacaggtgaccccccagcccgaagagcagaaggagcgcaaaactacggaaatgcagtctcccatgcagcccgtcgaccaagcttccttacccgactttcagatacaaactgagatggcagcaactatggagactagtattttcacaactgagtaccaagtggcagttgcagggtgtgtttttctactaatttctgtcctcttgttaagcggtctgacctggcaaaggcgacagcggaagagccgacgtaccatttag

SEQ ID NO: 191803 - DNA, 330 bp, synthetic construct
  misc_feature 1..330: note = Description of Artificial Sequence: Synthetic coding sequence
  source 1..330: mol_type = other DNA
tgaatcccccacgccaccttcaaggccatggcctacaaggagggcacaatgctgaactgcgaatgcaagcgagggttcaggcggattaaaagtggatcgttgtatatgttatgcacgggcaactcctcccactcgtcatgggataaccagtgtcaatgtacctccagcgccaccagaaatacgacaaagcaagtaacgcctcagccagaggagcagaaggaaagaaagacaaccgaaatgcaatcgcctatgcagcccgtggatcaggcaagtctccctgacttccagatccagaccgagatggcagccactatggaaacaagcatttag

SEQ ID NO: 191804 - DNA, 1110 bp, synthetic construct
  misc_feature 1..1110: note = Description of Artificial Sequence: Synthetic coding sequence
  source 1..1110: mol_type = other DNA
atggacccccggaaggtgaacgagctgcgggccttcgtgaagatgtgtaagcaggacccatcagtgctgcacaccgaggagatgcggttcctcagggagtgggtggagagtatgggggggaaggttcccccggcaactcaaaaagctaaaagtgaagaaaacacgaaagaggaaaaacctgacagcaaaaaagtggaggaggaccttaaggctgatgaaccttcctctgaagagtcagatctcgaaatcgataaggaaggagtgatcgagcccgacactgacgcgcctcaagagatgggtgacgaaaatgcagagattaccgaggagatgatggatcaggctaacgataaaaaagtggccgccatcgaggctttgaacgatggcgagttacagaaagccattgacttgttcaccgacgctatcaagctgaacccaaggttggccattctttacgccaaaagagcgagcgtgttcgtcaaactgcagaaacccaacgctgccattcgggattgcgatcgtgccatagaaatcaaccctgattccgcgcagccgtataagtggcgaggcaaggcgcatagactgcttggacactgggaggaagcagctcacgatcttgcactcgcttgcaagttggactatgacgaggacgccagcgccatgttgaaggaagtgcagcctcgggcacaaaagatcgccgagcatagaagaaagtatgaacgcaagcgcgaagagcgggaaatcaaggagcgtattgagagggttaagaaagccagagaggaacacgaacgagcgcaacgcgaagaagaagccagacgtcaatctggcgcacagtatggctcttttcccggtggcttccctggtggcatgccaggtaattttccaggaggcatgcctggcatggggggcggcatgcccgggatggcgggaatgccgggtttaaatgaaatactctcagaccccgaggtgctggcggctatgcaggacccagaagttatggtggcctttcaggatgtggcccaaaatcccgcaaacatgtccaaatatcagagcaatcccaaagttatgaacctcatctctaagttgtctgctaaatttgggggccaggcttag

SEQ ID NO: 191805 - DNA, 441 bp, synthetic construct
  misc_feature 1..441: note = Description of Artificial Sequence: Synthetic coding sequence
  source 1..441: mol_type = other DNA
atggccgcccccgccctgagctggcggctgcccctgctgatcctgctcctgcctctggcgaccagctgggctagtgcagctgtcaacggcaccagccagtttacctgcttttacaacagccgggccaatatcagttgtgtgtggtcccaagatggcgcactgcaagatactagctgtcaggtgcacgcttggcccgaccgtagacgttggaaccagacatgtgagctgctccctgtgtctcaagcttcatgggcctgcaacttgatcctgggggcccccgacagccagaaactaacgactgtggatattgtaacgctacgggttctgtgccgcgagggcgtaagatggcgggtgatggccatccaggattttaaacccttcgagaacctaaggctgatggcccctatttccctacaggttgttcatgtcgaaacgcattag

SEQ ID NO: 191806 - DNA, 267 bp, synthetic construct
  misc_feature 1..267: note = Description of Artificial Sequence: Synthetic coding sequence
  source 1..267: mol_type = other DNA
atggccgcccccgccctgagctggcggctgcccctgctgatcctgcttctgccactggccaccagctgggcatccgcagctgtgaacgggacgagccagtttacgtgtttctacaacagcagagccaatatatcctgcgtttggagccaagacggtgcgctacaagacaccagctgtcaggtccatgcttggcccgaccggcgccgatggaaccagacgtgtgagctgctccctgttagtcaggcctcttgggcttgtaatctgtag

SEQ ID NO: 191807 - DNA, 567 bp, synthetic construct
  misc_feature 1..567: note = Description of Artificial Sequence: Synthetic coding sequence
  source 1..567: mol_type = other DNA
atggccgcccccgccctgagctggcggctgcccctgctgatcctgttgctgcctctggctacgagctgggcttctgccgcagtgaacggcacatcccagtttacgtgcttctataactcgagagccaacattagctgcgtgtggagccaggatggggctctgcaagacaccagctgccaggtgcacgcttggccagatcggcggcggtggaatcagacatgtgagctcctgccagttagccaggccagctgggcctgtaacctcatactgggagccccagactctcagaagctgactaccgtcgacatcgtcacacttcgtgtgttgtgtagggaaggagtcagatggcgcgtgatggcaattcaggacttcaaaccttttgagaatctgagactgatggctccgattagtctccaggtggtccacgtcgaaacacatagatgcaacatttcctgggagatctcccaggcctcccattatttcgagcgccatctggaattcgaagcaaggacgctgagcccaggacacacttgggaggaggcccccttgttgaccctgaagcagtag

SEQ ID NO: 191808 - DNA, 297 bp, synthetic construct
  misc_feature 1..297: note = Description of Artificial Sequence: Synthetic coding sequence
  source 1..297: mol_type = other DNA
atggagccccccaaccccctgggcgagcagtacttcaagcggaccatgcctcgcataccgactcttaagaacctcgaagatctggtgacagaatatcatgggaacttttccgcttggtctggagttagcaagggtttggcggagtcccttcaaccagattactctgagcggctgtgccttgtcagtgagatcccaccaaaagggggggcacttggcgagggccctggcgcgtctccctgcaaccagcacagtccctattgggcgccgccttgctataccttgaaacctgaaacgtag

SEQ ID NO: 191809 - DNA, 474 bp, synthetic construct
  misc_feature 1..474: note = Description of Artificial Sequence: Synthetic coding sequence
  source 1..474: mol_type = other DNA
atgctgaagcccagcctgcccttcaccagcctgctgttcctgcagctgccactccttggcgtgggtctgaacaccacaatcctcacaccaaatggaaacgaagacacaaccgctgatttcttccttacaaccatgcctaccgatagtttgagcgttagcacactacctctgcccgaggtgcagtgctttgtctttaatgtggagtacatgaactgtacttggaatagctcttctgaaccacagccaacaaacctcaccttgcactattggtacaagaatagcgataatgacaaggtacagaagtgttcacactatctttttagcgaagaaatcacatcaggctgtcagctgcaaaaaaaggaaatccacctgtaccaaacattcgtcgtgcagcttcaggatcctcgcgaacctagacgtcaggcgacacagatgctgaaactgcagaacttaggaaccatctctggtctctag

SEQ ID NO: 191810 - DNA, 1110 bp, synthetic construct
  misc_feature 1..1110: note = Description of Artificial Sequence: Synthetic coding sequence
  source 1..1110: mol_type = other DNA
atgctgaagcccagcctgcccttcaccagcctgctgttcctgcagctccccctgctgggcgttggcttgaacacaactatcctcacccccaacggcaatgaagatactacggccgatttctttctcacaaccatgccaactgattccctttctgtgtcaaccttaccactgcctgaggtccaatgcttcgttttcaacgtagagtacatgaactgcacctggaattctagcagtgagccccaacccaccaacttaacgctgcactattggtataagaactctgacaatgacaaggttcagaagtgtagccattatctcttcagcgaggagatcacgtctggatgtcaactgcagaagaaggaaattcatctgtatcaaacgtttgtcgtccaactccaagaccctcgcgaaccgagacggcaggcgactcaaatgttgaagttacagaacctcgtgatcccatgggctcccgagaatctaaccctccacaaactatctgagagtcagcttgagcttaactggaataatcggttcctcaaccactgcttggagcacctcgtacaataccgaaccgactgggatcattcctggaccgagcaatcagtggactaccgacacaagtttagtctgccatcagtggacggccagaagcgatacacttttagagtccgatctcgatttaatccactctgcgggtccgcccagcactggtcggaatggtcccacccaattcattggggctctaacacatcgaaagagaatccgtttctatttgctcttgaggccgtagtgatctctgtggggagcatggggctgatcattagtctcttgtgtgtgtacttttggctcgaacggaccatgcctagaatccctactctgaagaatttggaagatctggttacggagtatcatggcaacttttcagcctggtcgggtgtcagcaaggggctcgccgagtccctgcaaccagactactccgaacgcctttgcctggtgtccgaaattccacccaagggcggtgccctcggcgaaggccctggcgccagtccctgtaatcagcatagcccctactgggccccgccttgctatacacttaaacccgagacatag

SEQ ID NO: 191811 - DNA, 540 bp, synthetic construct
  misc_feature 1..540: note = Description of Artificial Sequence: Synthetic coding sequence
  source 1..540: mol_type = other DNA
atgggcatgaagaccccccagctggagcagagcgtggactaccggcacaaattttccttgcccagcgtggatgggcaaaaacgatatactttccgcgtcagatcacgcttcaatcccctctgcggaagcgcccagcactggagcgagtggagtcatcctattcactgggggagcaacacaagcaaggaaaacccgtttttgtttgcattggaggcagtagtcatttctgtcggctcaatgggtctgattatcagtctgctctgcgtctacttctggctggagcgaacaatgcccaggatccctaccctcaaaaatctcgaggatctcgtgactgagtaccatgggaacttcagcgcatggtccggcgtgagtaagggcctggcggagtctctacaaccagactactctgagcgactctgcctggtgtcggagattccgcctaagggaggagcactgggcgagggcccgggagccagtccctgcaatcagcactctccttactgggctcctccctgttacacgctgaagcctgaaacctag

SEQ ID NO: 191812 - DNA, 1662 bp, synthetic construct
  misc_feature 1..1662: note = Description of Artificial Sequence: Synthetic coding sequence
  source 1..1662: mol_type = other DNA
atgcgggcccccggccggcccgccctgcggcccctgcccctgcccccactcctgctgttgctgctcgcggctccctggggacgcgccgtgccctgcgtgtccggagggctgcctaagcctgcaaatatcacattccttagtattaacatgaagaatgtcctccagtggacaccacctgagggcctgcagggcgtcaaagtgacgtatacagtccaatacttcatctatggccagaaaaaatggttgaacaagtccgagtgcagaaacattaatcgcacttactgtgatctgagtgctgagacctcagattacgagcaccagtactatgcaaaggtcaaggccatttgggggacaaagtgtagcaaatgggccgaaagcggccgattctatccatttctggagacccagatcggccctcccgaagttgccctgaccactgatgaaaaaagtatttcggtggtgctgactgcccctgagaagtggaaacgtaaccctgaagacctccccgtgtcaatgcagcagatctacagtaatctgaagtacaatgtatcagtgctaaacaccaaatccaatcgcacctggagtcagtgcgtcacaaaccacacactggtgttgacttggctggagcctaataccctgtactgcgttcatgtggaatctttcgtgccgggacctccccgccgagcacaaccgtccgaaaagcagtgcgccagaacgctcaaagatcagagctccgagttcaaggcaaaaatcattttctggtacgtgcttcccgtcagcattactgtgtttctgttttcagtgatgggttactccatctataggtacatccacgtgggcaaggaaaagcaccccgccaatctgatcctgatttatggcaacgagttcgataaaagattctttgttcccgcggaaaagatcgtaattaacttcattaccctgaatatctcggacgattctaagattagccaccaggatatgagtttgctcggaaaaagctctgatgtgtcaagtttaaatgatccccagcctagcggcaatctgcggcccccgcaggaagaagaggaggtgaaacacctgggctacgcctcccacttgatggagattttctgtgactccgaagagaataccgagggaacatcacttactcagcaagagtctctctctcggacaattcccccagacaaaaccgtaatagaatatgaatatgatgtgagaaccacagacatttgtgcaggaccggaagaacaggaactttccctgcaggaggaggtaagtacccaaggcacgttactcgaaagccaagcagcactagcagtgctcggtccccaaactctccagtatagctatacccctcaactgcaagacttagaccccctggcacaagagcataccgacagcgaggaggggcccgaggaagaaccaagtacgactctagtcgattgggatccccagactgggaggctctgcattccctccctatccagcttcgatcaagattccgagggctgcgaaccttctgaaggcgatggtctgggagaggaagggctcctgagtaggctgtatgaggaacccgccccggaccgacctcctggggaaaacgagacgtatctcatgcaatttatggaggagtggggactgtacgttcagatggaaaactag

SEQ ID NO: 191813 - DNA, 630 bp, synthetic construct
  misc_feature 1..630: note = Description of Artificial Sequence: Synthetic coding sequence
  source 1..630: mol_type = other DNA
atgcgggcccccggccggcccgccctgcggcccctgcccctgcccccacttctcctgctgcttctggcagccccctggggccgagccgttccatgtgtctccggtggcttacctaagccagcgaatatcacatttctgagtatcaacatgaagaatgtcctgcagtggacgcctccagaaggccttcagggagtcaaggtgacctacactgtgcaatactttatttacgggcaaaagaagtggttgaacaagtccgagtgccggaacatcaatcgcacgtattgtgatctgtccgctgagacatccgattacgaacatcaatactatgctaaggtaaaagccatatgggggaccaagtgtagcaagtgggccgagagcgggcgattctatccatttctggagacccaaattgggccaccagaagtggcactgacaactgacgaaaaatccataagcgttgtgctgacggccccagaaaagtggaaacggaaccccgaggacctgccagtgtccatgcaacagatatacagcaatctgaagtataatgtaagtgtccttaatactaaatccaatcgcactgtgtctctcaagtggaacggtgcttacatccacgtgccactgtgcagttag

SEQ ID NO: 191814 - DNA, 1329 bp, synthetic construct
  misc_feature 1..1329: note = Description of Artificial Sequence: Synthetic coding sequence
  source 1..1329: mol_type = other DNA
atgagctacaacggcctgcaccagcgggtgttcaaggagctgaagctcctgacattgtgcagcatttcttcccagatcggtccccccgaggtcgccttaaccacagatgagaagtcaatcagcgtggtgcttaccgcgcccgaaaagtggaagcgcaacccagaagatctccccgtgagtatgcaacagatatattctaacttgaagtacaacgtttctgtgcttaataccaagagtaacagaacatggagtcagtgtgtgacaaaccacacactcgttctgacgtggttagagccaaacaccctatattgcgttcatgtggaatcttttgttcccggacctccgaggagagcacagccgagtgagaagcagtgtgcacgcaccctcaaggaccagtcatcagagtttaaggccaaaattatcttttggtacgttttgcctgtttcgatcaccgtgtttcttttctccgtgatgggttacagcatctatcgatatatccacgtggggaaagagaagcaccccgctaatctgatcctgatatatggaaacgagttcgacaaaaggttctttgtgccagccgagaaaatagtcattaattttattacccttaacatttcagatgattctaagatatcacaccaggacatgagcttgctgggtaagagctcagacgttagttccctgaatgatccacagcctagcgggaatctgcggcctccacaggaggaagaggaagtgaagcacctgggctatgcttcacatctgatggagatcttctgtgactctgaggagaacaccgagggcacaagtctgacacaacaggagagcctgagccgaacaatacctccagacaagacagtcatcgaatatgagtatgacgtcagaaccaccgatatctgcgcaggccctgaagaacaggagctgagcctgcaggaagaagtgtccactcaaggaacgctgctggagtcccaggccgccctcgcggttctcggaccccagaccctccagtatagctacactccacagcttcaggacctcgatcccctcgcccaagaacacacagattctgaggaaggccccgaggaagagcctagtaccaccctcgttgactgggacccacaaactgggaggctctgtattccctctttaagctctttcgaccaggattctgaaggctgtgaaccgagcgagggggatggcttgggggaagaaggcctcttgtcacgcttgtacgaagaacctgcacccgatcgtccgcccggcgaaaatgaaacctacttaatgcaattcatggaggagtggggcctgtatgtgcagatggagaactag

SEQ ID NO: 191815 - DNA, 1515 bp, synthetic construct
  misc_feature 1..1515: note = Description of Artificial Sequence: Synthetic coding sequence
  source 1..1515: mol_type = other DNA
atgaagaacgtgctgcagtggaccccccccgagggcctgcagggcgtgaaagtcacctacacagtgcagtacttcatctacggacagaagaaatggcttaacaagagcgagtgccgtaatataaatcgtacctactgtgacctgagtgcggagacaagtgattacgaacaccagtattatgccaaagttaaggcaatatggggcaccaagtgcagcaaatgggccgagtctggtcgattttatcccttcctagaaacgcagatcggcccccctgaggtggccctcacaaccgacgagaaaagcatctccgtggtactcactgcacccgagaagtggaagcgcaatccagaagatcttcctgtctcgatgcagcagatctacagtaatcttaaatataatgtgagcgttctgaatacaaaatccaatcgaacctggtcgcagtgcgtgacaaatcataccctcgtgttgacatggcttgagcccaacaccctctattgtgtgcacgtagaaagctttgtgcccggacctccccgaagggctcagcccagcgagaaacagtgtgcacgaaccctaaaggatcaatcgtcagagttcaaggcaaaaattatattctggtacgtgcttcccgtgtccataacggtattcctattttcggtcatggggtacagtatctatagatacatccatgttgggaaagaaaagcatcctgctaatctcatcctcatttacggaaacgagtttgacaaaagattttttgtccctgcggagaagatcgtgattaacttcatcaccctgaatatttctgatgactccaagattagtcatcaggatatgtcactgctcggtaagtcatcagacgtgagtagtctcaacgacccgcaacctagcgggaacctgaggcctcctcaagaggaagaggaagtaaagcacctgggatacgccagccatctcatggagattttctgcgactccgaggagaacacggaggggacctccctgactcagcaggagtccctgtcccgcacaataccgcccgacaagacagttattgagtacgaatacgacgtgcggaccactgatatttgcgcaggtccagaagaacaggaactgagtctgcaggaggaagtgtctacccagggaacactgctcgaaagtcaggccgcactggcagtcctgggaccgcaaacccttcagtactcctacacccctcagttacaggacctcgatcctttggcgcaggagcacactgattctgaggagggacccgaggaggaaccctcaaccaccctggtagactgggacccccaaaccgggaggctttgcattccctcgctcagttccttcgaccaagactccgagggatgcgaaccgagcgaaggcgatgggcttggagaagagggattgctttctaggctgtacgaagagcccgcacccgatcggccgcctggggagaacgagacctatctgatgcagttcatggaggaatgggggttgtacgtgcaaatggagaattag

SEQ ID NO: 191816 - DNA, 1617 bp, synthetic construct
  misc_feature 1..1617: note = Description of Artificial Sequence: Synthetic coding sequence
  source 1..1617: mol_type = other DNA
atgccccggggctgggccgcccccctgctgctgctgctgctgcaggggggttgggggtgcccggacctggtgtgttataccgactacctgcagactgtgatctgtattttggaaatgtggaatttacaccctagcacgttgacactcacctggcaagaccagtatgaggagctaaaggacgaagccacgtcctgctctcttcaccgatcagcacacaacgctacccatgccacctacacctgccatatggacgtctttcattttatggccgatgacatcttcagcgttaacattaccgatcagtcaggaaactattcacaggaatgcggtagcttcctactggctgaatcaattaagcccgcgccgcctttcaacgtgacggtcaccttctctggacagtataatattagttggaggtcggactatgaggaccctgccttttacatgttaaaaggtaagctccagtacgagttacaatatcggaatcgcggtgatccctgggctgtgtcaccaaggaggaagctgatatccgtcgactccaggagcgtgtcactgttgcccctagaattcagaaaagattccagttacgaactgcaagtccgggccggaccaatgcctggatctagttatcaaggaacatggagtgaatggtcagatccagttatttttcagacacagagcgaggagcttaaagagggctggaatcctcacttgctgttactactcctcttggtgattgtcttcattccagccttttggtcactcaaaacacaccccttgtggaggctgtggaagaagatctgggccgtgccttcccccgagaggttttttatgccactctacaagggttgtagcggggattttaagaaatgggtgggagccccctttaccggctcttctctggaattgggcccctggtccccagaggttccttcgaccttagaggtctatagctgtcacccacctcggtcccctgccaagcggctgcagctgacagagctgcaggaaccggctgaacttgtggagagtgacggggttccaaaaccgtccttttggcctactgctcaaaactctggtggctccgcctacagcgaggaacgagacaggccatatggactggtctcgatagatacagtcacggtattggacgcagaaggcccttgtacctggccctgctcttgcgaggacgacgggtatcccgccttggatctggatgccggcttagagccaagccccggtttggaagatcctctgttagatgcagggaccactgtcctgagctgtggctgtgtgtccgccggatcacccgggctcggcggtcctttgggatccctactagacagactgaaacccccactcgccgatggggaggactgggctggaggcctaccttggggaggacgttctccaggcggagtgagcgagtcggaggcaggctctcccctcgccggtctcgacatggatacatttgacagtgggtttgtgggaagcgactgttcgtcaccagtggagtgtgactttacaagtccgggcgatgaagggccacccagatcttatctgagacagtgggtggtgattcctccccccttaagttcacccggcccgcaagcatcctag

SEQ ID NO: 191817 - DNA, 1617 bp, synthetic construct
  misc_feature 1..1617: note = Description of Artificial Sequence: Synthetic coding sequence
  source 1..1617: mol_type = other DNA
atgccccggggctgggccgcccccctgctgctgctgctgctgcagggggggtgggggtgcccagacctagtttgctacaccgattacctacaaactgtgatatgcatcttggagatgtggaatttgcaccctagcactttaactttgacctggcaggaccagtatgaggagctgaaagacgaggccaccagctgttcgcttcatcggagcgcgcataatgccacacacgctacctatacatgccatatggacgtgtttcactttatggccgatgatatcttttcagtgaatattacggaccagtctggaaattattcgcaagagtgtggtagctttctcctcgccgaaagtattaagcctgcaccccccttcaacgtcacggtgacgttttcaggtcagtacaatatatcctggcgatccgactacgaagaccccgccttctatatgctcaaaggtaagttacagtatgagctccaatatcggaacagaggagatccttgggctgtctcaccaaggaggaaactcataagtgttgactcacggtccgtgtccttgctgccattggagtttcgcaaagacagctcatatgaactgcaggtgagggcgggtccgatgcccggttcttcctatcagggaacttggtctgaatggtcggaccccgtcatattccagactcaatcagaggaactgaaggaaggttggaaccctcaccttcttctgcttttactactcgtaatcgtgttcatccccgcattttggagccttaagacacatcccctctggcgtctgtggaaaaagatatgggccgtaccaagccctgagaggttcttcatgccactctataaagggtgttcaggcgactttaagaagtgggtgggtgccccttttacaggctcttctctggaacttggcccatggtccccggaggtgccgagcactctcgaggtatattcctgtcaccctccccgctctccagcaaagcgcctgcagctgactgaactccaggaaccagcggagcttgtggagtctgatggggtcccgaaacccagcttctggccgaccgctcaaaacagcggaggcagcgcgtattccgaggagcgtgaccggccatacggattggtgtccattgacacagtaacagtattagacgccgaagggccctgtacatggccctgctcttgcgaggacgacggatacccggctctcgacctcgatgcgggactcgagcctagtccaggactcgaggacccactgctggatgccggtacaaccgtactgagttgtggctgtgtctccgccggtagtcccggactgggcggcccccttggcagcttactcgatcgactcaaaccccccctagcagatggggaggattgggctggcggacttccatggggaggacgatcccccggcggcgtctctgaatcagaggctggatctcctctcgctggattagatatggacacctttgactcaggattcgtgggatctgattgttcgagcccagtcgaatgtgactttacctcccctggcgacgagggccccccaaggagttaccttaggcaatgggtggttataccccctcctctaagctcacccggacctcaagcctcttag

SEQ ID NO: 191818 - DNA, 1617 bp, synthetic construct
  misc_feature 1..1617: note = Description of Artificial Sequence: Synthetic coding sequence
  source 1..1617: mol_type = other DNA
atgccccggggctgggccgcccccctgctgctgctgctgctgcagggagggtggggctgtccggatctcgtctgttacacagactaccttcagacagtaatctgtattctggagatgtggaatctccaccccagcacacttacactgacttggcaagaccagtacgaggaattgaaggatgaggccactagttgttctctccatagatcagcccacaatgccacacatgccacatacacatgtcacatggacgtgtttcacttcatggcagacgatatttttagcgttaacattacggatcagtccggaaactattctcaagagtgtggaagttttttgctggccgagtctatcaaacctgctcctccgttcaacgtgactgttacgttctctgggcagtacaatatatcttggagatccgattacgaagatcccgccttttacatgcttaagggcaagctccagtatgagctgcagtacagaaatagaggtgatccgtgggcagtctccccccggaggaaattgatatctgtggatagccgttcagttagcttgctgcccttagagtttcgcaaggattcctcatacgagctacaggtacgtgcaggccctatgcctggcagctcatatcagggaacatggtcagagtggtctgatccagtgatttttcagacacagtccgaggaactgaaagagggttggaatccacacctgctgttgctgctgctcctggtcatcgtgtttattccggccttctggagtctgaaaacccacccactgtggcgcctctggaagaagatatgggcagtgcctagccctgaacgtttttttatgccactttataaggggtgctccggggacttcaaaaaatgggtaggcgcccccttcactggctcatctctggaattgggcccctggtctcccgaagttccatctacactggaggtgtactcatgccatcctccccgaagccctgctaaacgtctgcagctcactgagctgcaggagcccgcggagctggttgagtccgatggggtcccgaagccttcattttggcctacagcccagaatagcggagggtcagcgtactctgaggaaagagaccgtccttacggactggtgtctattgacaccgtgacagtgctcgatgcggaaggcccctgtacatggccatgctcctgtgaagatgatgggtatccagctttggacttagacgccgggctggagccgtcccctggcttggaggaccccctgcttgacgctgggacaacggtgctgtcttgtggttgcgtgagcgcaggctcccccggattaggaggcccactcggatccctcttggataggctcaagcctcctctggccgatggtgaggattgggccggaggactcccttggggtggcaggtcccccggaggtgtgagcgagtccgaagccggaagtcctctcgccgggcttgacatggacaccttcgattctggattcgtagggagcgactgctcttctccagtggaatgcgactttacttcccccggtgatgaaggcccgccaagaagctaccttaggcagtgggtcgtcatcccgccaccactgagtagtccaggtccgcaggcatcctag

SEQ ID NO: 191819 - DNA, 792 bp, synthetic construct
  misc_feature 1..792: note = Description of Artificial Sequence: Synthetic coding sequence
  source 1..792: mol_type = other DNA
atgatgcccaagcactgcttcctgggcttcctgatcagcttcttcctcacaggggtagcgggaactcagtccacacacgagtccttgaaacctcaaagggttcaattccagtcccgcaattttcacaatatccttcagtggcagcccggtcgcgccctcaccggaaacagttccgtgtattttgtccaatacaagattatgttctcttgcagcatgaagagctctcaccagaagccgtcgggctgttggcagcacatttcgtgtaattttcctggttgtcggacactggcgaaatacggacaaagacagtggaaaaacaaggaagattgttggggcacccaggagttgagctgcgacctgacctcagagacatccgacatccaagagccatactacggccgagtccgggccgccagcgccggaagctactctgagtggtctatgacacctcgctttacaccatggtgggaaaccaaaatcgacccgcccgtgatgaatattacgcaggtgaacggttccttactggtgatcctacacgctccaaatttaccctaccggtaccagaaggaaaagaatgtcagtatcgaagattattatgaacttctgtaccgggtgtttattatcaataacagcctcgaaaaagagcagaaagtgtacgagggcgcccacagggccgtggagatcgaggccctgacacctcattcttcgtattgtgtggtagccgaaatctaccaacccatgcttgaccgccgtagccagaggtccgaggagcgatgcgtcgaaataccttag

SEQ ID NO: 191820 - DNA, 393 bp, synthetic construct
  misc_feature 1..393: note = Description of Artificial Sequence: Synthetic coding sequence
  source 1..393: mol_type = other DNA
atgatgcccaagcactgcttcctgggcttcctgatcagcttcttccttacgggggtagcgggcacccagagcacccatgaaagtctgaaacctcagagagtgcagtttcagtcacgcaacttccacaatatattgcagtggcagcctggtcgagccttgacaggaaattcctctgtatactttgtgcagtacaaaatttacggtcaaaggcagtggaagaacaaggaagattgttggggaacccaggagctgtcctgcgatctgacctccgagacctctgatattcaggagccgtactacggccgggtgagagcggcttctgcagggtcttattctgagtggtccatgaccccgcggtttaccccttggtgggaacgggccaaggggctttag

SEQ ID NO: 191821 - DNA, 696 bp, synthetic construct
  misc_feature 1..696: note = Description of Artificial Sequence: Synthetic coding sequence
  source 1..696: mol_type = other DNA
atgatgcccaagcactgcttcctgggcttcctgatcagcttcttcttaaccggtgtggcggggacccagtccacccatgagtcccttaaacctcagagggtgcagttccagtcccgcaacttccataatattctccagtggcaaccaggccgagcactaacaggaaactcttccgtatattttgtccagtataagatctacggccagagacaatggaagaataaggaggactgttgggggactcaggaactgagttgtgacctgacatctgaaacttccgacattcaagaaccatactacggtcgtgtgagagcagcgtctgcggggagttattccgaatggtccatgaccccaaggtttaccccgtggtgggagacaaagatcgatcctcccgtcatgaatattacacaggtgaatggatctcttttggtgatcttgcacgcgcccaacctgccctaccgctatcagaaggaaaagaatgtctcgatcgaggactactacgagttgctataccgggtgttcatcattaacaactccctcgagaaagaacagaaggtgtacgagggcgcccaccgtgccgttgaaatagaggccctgacaccccactctagttactgcgtcgttgctgagatttaccaaccgatgttggaccgccgatcccagaggagcgaggaacgatgtgtggaaatcccatag

SEQ ID NO: 191822 - DNA, 1563 bp, synthetic construct
  misc_feature 1..1563: note = Description of Artificial Sequence: Synthetic coding sequence
  source 1..1563: mol_type = other DNA
atggccggccccgagcggtggggccccctgctgctgtgcctgctgcaagcagcccccggccgacctcggctcgcccctccccagaacgtcacattactctctcagaacttttctgtgtatctgacctggctgcccggcttgggtaacccccaggacgtgacatacttcgtagcctaccagagcagtcctacccgccggcggtggcgggaagtggaggagtgcgccggaacaaaagagctcttatgttccatgatgtgtttgaaaaagcaggatctgtataacaagttcaaaggccgggtacggacagtgtcccctagctctaagagtccctgggttgagtccgaatatctcgactatctgttcgaggttgagcctgcaccacctgtgttggtcctgacccagactgaggagatcctgtccgctaacgccacgtatcagcttcctccctgcatgcctccgcttgatctaaaatacgaggttgctttctggaaggagggagcaggaaataaaactctctttccagttacacctcacggacaaccggtgcagataacgctgcaacctgcagccagtgaacatcactgtcttagtgctcggacaatatatactttttccgtgccaaaatattcaaaattttctaaacccacatgttttctgctggaggttccagaggccaattgggcttttctggtacttccgagcctgctgatcctgttgctggtcattgcagcagggggagttatttggaaaactttaatgggaaatccatggttccaacgggcaaaaatgcctcgggcattagatttttcagggcacactcatcctgtcgccaccttccaaccaagtcggcccgagagcgtcaatgatttatttttatgtcctcagaaggagcttacccgcggagtgcgtcctacacccagagtgagggccccagctacgcagcagacacgctggaagaaagatctcgccgaggacgaggaagaagaagacgaggaggatacggaagacggcgtatcttttcagccatacatagagccgccctcctttttaggacaggaacaccaggcccctggacactctgaggcggggggagtcgactctggtcggcccagagctcctctagtgccctccgaaggcagttccgcctgggatagctccgacagaagctgggctagtacagtcgattcgtcttgggaccgtgccggatccagcggttacctggcagaaaagggccctggacaaggcccaggtggagatgggcatcaggaaagcctgcccccacctgagttctctaaagactcgggattcctggaggaactgcccgaagataacctaagcagctgggctacatggggaacgttacctccggaacctaatctggtgcctggcgggccccccgtttctctgcagactttaaccttctgttgggagagcagcccagaagaggaggaggaagctcgggagagcgagattgaggattctgatgcgggttcttggggcgcagaatccactcagcgtacagaagacagaggcaggaccctgggtcactacatggctcggtag

SEQ ID NO: 191823 - DNA, 735 bp, synthetic construct
  misc_feature 1..735: note = Description of Artificial Sequence: Synthetic coding sequence
  source 1..735: mol_type = other DNA
atggccggccccgagcggtggggccccctgctgctgtgcctgctgcaggctgctccgggcagacccaggctggctccgccccagaatgtgaccctcctttcccagaactttagtgtgtatcttacctggctacctggtcttggaaatccacaggacgtcacgtacttcgtggcttaccaatcttctcctacacgtcgccggtggcgtgaggtggaagaatgcgccggcactaaggaactgctctgttcaatgatgtgcctgaagaaacaggacctgtacaataaatttaaaggcagagtccggaccgtatccccctcttccaaaagtccttgggtcgagtctgaatacctggactatctgtttgaagtggaaccagccccccctgtgctggtgctgacccagaccgaagaaatccttagtgctaacgcaacctaccagctgccgccttgtatgccacctctcgacttgaagtacgaagtggcgttttggaaagagggtgccggaaataagactcttttcccggtgacaccccacggacagcccgtccaaatcacactgcagccggctgcatctgaacaccactgcttatcagccaggaccatctataccttcagtgtccccaaatatagcaaattcagcaaacccacatgcttcttactcgaagtgccaggtctgttttggacccacacaccttgtggaaacctaagcgcccagcagacgcgggtccgcgagtag

SEQ ID NO: 191824 - DNA, 636 bp, synthetic construct
  misc_feature 1..636: note = Description of Artificial Sequence: Synthetic coding sequence
  source 1..636: mol_type = other DNA
atggccggccccgagcggtggggccccctgctgctgtgcctgctgcaggctgcgcctggaaggccgagactggccccccctcagaatgtaactctccttagccagaattttagtgtgtacttgacatggttaccggggcttggtaacccacaggacgttacttacttcgtcgcatatcagtccagcccgactaggcggagatggcgtgaggtagaggaatgcgccggcacgaaagagctgctctgctcaatgatgtgcctgaagaagcaggacctttataataaatttaaaggacgggtgcgcaccgtctcaccttcctctaagtctccctgggtggaaagcgaatacctggactatctcttcgaggtcgagcccgcaccacctgtgctcgtgctgactcagacagaagaaatactgagtgcaaatgcgacttaccagcttcctccgtgtatgcccccacttgatcttaaatatgaggtggcattttggaaggaaggggcaggcaacaaagtggggtcttctttccccgcaccaaggctgggacccctcttacaccccttcctcctacgttttttctcccctagtcagcccgcccccgcacccctgctacaagaggtcttccctgtgcatagttag

SEQ ID NO: 191825 - DNA, 558 bp, synthetic construct
  misc_feature 1..558: note = Description of Artificial Sequence: Synthetic coding sequence
  source 1..558: mol_type = other DNA
atgatgtgcctgaagaagcaggacctgtacaacaagttcaagggcagggtgcggaccgttagtccaagctccaagagcccctgggtggaatctgagtacctggactacctcttcgaagttgaaccagcccctcccgtgctggtcctgacacagactgaagagatcctgtcggccaatgctacatatcaactgccgccttgcatgccacctttggacctcaagtatgaagtagccttttggaaagagggtgctggaaacaagaccctgtttccagtcacgccacatgggcagcctgttcagatcacgctccagcctgctgcctccgaacaccactgtctctctgcgcgcaccatttatacgtttagcgtgccgaaatacagcaaattctctaagcctacatgttttttgctcgaggtgcccgaggctaattgggcctttttggtcttgccttctcttctgattcttctactcgttatcgctgccggaggtgttatctggaagacgctgatgggaaacccatggttccaaagagccaagatgccccgggcactcgtgtag

SEQ ID NO: 191826 - DNA, 1476 bp, synthetic construct
  misc_feature 1..1476: note = Description of Artificial Sequence: Synthetic coding sequence
  source 1..1476: mol_type = other DNA
atggccggccccgagcggtggggccccctgctgctgtgcctgctgcaggccgcaccaggccggccacgccttgcacctcctcagaacgtgacccttctatcccagaatttttctgtgtacctgacctggttgccgggactcggcaatccccaagacgtgacttatttcgtggcctaccagtcatctccgacgaggaggagatggcgggaggtggaagagtgtgctggaacaaaagagctgctgtgcagcatgatgtgcctcaaaaaacaggatctgtacaataagttcaaaggcagggtgcgtactgtgtccccatcctcaaagagtccttgggtggaaagcgaatacctggattatctgttcgaggtggaaccggctcctcctgtactagtcctcacacagaccgaggagattttatcagcaaacgcgacttatcagctgcctccttgcatgccacccttggacctgaaatacgaagttgccttctggaaggaaggagcgggaaacaagactctgttcccggttacaccacatggccagccagtacaaattacactacagcccgctgcatccgagcaccactgtttaagcgcccgcaccatttacacattttctgtgccaaagtactctaagttcagcaagccaacctgcttcctgctcgaggtgccggaggccaactgggcttttttagtgcttcctagcttgcttattcttttgttagtgattgccgccgggggggtgatttggaaaacactgatgggcaatccttggtttcaaagggctaaaatgccccgcgctctggagttgacgcggggcgtgcgaccaacgcctagagttcgcgcacccgcgactcagcaaacccgatggaaaaaggacctcgcggaggacgaggaagaagaagacgaggaggataccgaagacggagtatcttttcagccttacatcgagccaccatccttccttggccaggaacaccaggcccccgggcattccgaggctggcggggttgatagtggcagaccgagggctcctctagtcccaagcgagggttctagtgcttgggattctagcgatcgctcatgggccagcactgtagatagctcctgggaccgggctggaagctccgggtacctcgcagagaagggtcctggtcaggggcctggaggcgatggtcaccaagagagcctgccaccgccagagtttagcaaagatagcggctttctggaggagctgccagaagacaatctcagttcttgggccacctggggcaccctgcccccagagccaaacctggtccctggaggcccccccgtaagtctgcagacgttgacattctgctgggaaagctctcccgaggaagaagaggaagccagggagtctgagattgaggatagtgacgctggctcatggggggcagagtccacacagcggaccgaagacaggggtcgaacactcggccactacatggcaaggtag

SEQ ID NO: 191827 - DNA, 459 bp, synthetic construct
  misc_feature 1..459: note = Description of Artificial Sequence: Synthetic coding sequence
  source 1..459: mol_type = other DNA
atgagccggctgcccgtgctgctgctgctgcagctgctggtgcggccaggccttcaggctcctatgactcagacaacacctttgaagacatcctgggtgaactgcagtaatatgatcgatgaaatcattacacacctgaagcaacctccccttccgctccttgattttaataatctcaacggcgaagaccaggatatattgatggagaacaacctgcggaggcctaatctggaagccttcaacagagcagtgaaatctctgcagaacgcgtctgcgatcgaaagcattctcaagaatctcctaccttgcctcccgctggccaccgcagcgcctacccgacaccccatacacatcaaggacggcgattggaacgagttccgccgcaagttgacattttatttgaagacacttgagaacgctcaagcacagcaaactaccttaagtctggctatattttag

SEQ ID NO: 191828 - DNA, 1137 bp, synthetic construct
  misc_feature 1..1137: note = Description of Artificial Sequence: Synthetic coding sequence
  source 1..1137: mol_type = other DNA
atggtgctgctgtggctgaccctgctgctgatcgccctgccctgcttactgcaaactaaggaagatccaaacccacctatcacaaaccttagaatgaaggccaaggcccagcaactgacatgggacctcaacaggaacgtcacagatattgagtgtgttaaggacgcagattactctatgcctgccgttaacaatagctactgtcaattcggggccatcagcctgtgcgaggtgacaaactacacagtgcgtgtagccaacccacctttctctacctggattctttttcccgagaactctggcaagccttgggccggagcagagaacctcacttgctggattcacgatgtagactttttaagctgttcttgggcagtgggaccgggcgcacccgctgacgtgcagtatgacctgtatctcaatgttgccaaccgccggcaacagtatgaatgcctgcactataagactgacgcccagggcacgcgcatcggctgccggtttgacgacatctcacgtttatcaagcggctcccagtcctctcatatcctcgttcgggggagatccgccgcctttggcattccatgtacagacaagttcgtggtgttcagtcagatcgagatcctgaccccgccaaatatgacagccaagtgtaacaagactcactcatttatgcactggaaaatgcgctcgcacttcaatcggaaatttcgctacgagttgcagatccagaagagaatgcagcccgttattactgagcaggttcgggacagaaccagttttcagctactgaatccaggcacgtatacagtacaaattcgcgccagagagagggtatacgagtttctctccgcgtggtctacaccacagcggttcgaatgtgatcaggaagagggcgccaacaccagggcatggcgcacgtcccttctgatcgccctaggcactctgttggctctcgtgtgtgtgttcgttatctgcagacgctatttggtgatgcagcgactttttcctaggatcccccacatgaaagaccccatcggggattcttttcagaatgacaagctcgtcgtctgggaagccggaaaggccggcttagaagaatgcctggtcacagaagtccaggtggtgcagaaaacatag

SEQ ID NO: 191829 - DNA, 903 bp, synthetic construct
  misc_feature 1..903: note = Description of Artificial Sequence: Synthetic coding sequence
  source 1..903: mol_type = other DNA
atggtgctgctgtggctgaccctgctgctgatcgccctgccctgcctgctgcaaactaaggagggaggtaaaccttgggctggcgcagagaacttaacatgttggatacacgatgtggattttctttcgtgttcgtgggctgtagggcctggggctccagctgacgtacagtacgacttgtacttaaatgtcgccaacaggaggcaacaatacgagtgcctacactacaagaccgacgctcaggggactagaatcgggtgcaggtttgacgatatttctcggctgtcgtctggatctcaatcaagtcacattctcgttaggggcagatcagcagcatttggtatcccctgtactgacaaattcgtagtgttttcgcagatagaaatcctcacccctcctaacatgaccgccaaatgtaataaaacccactcctttatgcactggaaaatgcgcagccactttaataggaagtttcgatatgagctgcagatacagaagcgtatgcagccggtaattacagagcaggtgagggaccgtacctcttttcagctcctaaatcccggtacatataccgtacagatccgcgcccgcgagcgggtctacgagtttctatcggcttggtccacaccacaacgctttgaatgtgatcaggaggaaggggccaatactagagcatggaggacatcactgcttatcgcattgggtacattgcttgctctagtttgtgtgttcgtgatttgccggcggtatctggtcatgcagaggctgttcccccgtatcccacatatgaaggaccccatcggcgacagcttccaaaatgataaactcgtggtgtgggaggccgggaaggccgggctggaggaatgtctcgtaacagaggtgcaagttgtacagaagacttag

SEQ ID NO: 191830 - DNA, 495 bp, synthetic construct
  misc_feature 1..495: note = Description of Artificial Sequence: Synthetic coding sequence
  source 1..495: mol_type = other DNA
atggtgctgctgtggctgaccctgctgctgatcgccctgccctgcctgctgcagaccaaggaaggagggaagccttgggcaggggcagaaaatctcacttgttggattcacgatgtggactttctgagctgttcctgggcagtcggtcccggagcacctgcggatgtccagtatgatctatatctgaacgtcgccaacagaagacagcagtatgagtgccttcactacaaaactgacgcccagggcaccaggataggttgccggtttgacgacatcagccgcctgagctccggttcacagagctctcacatcctggttcgtggaagatccgcagcctttggtattccttgtaccgacaaattcgtggtctttagccaaattgagatcttaactcctcccaatatgaccgcaaagtgcaacaaaactcactcgttcatgcactggaaaatgcgaagtcattttaatcgcaaattccggtacgagcttcaaatttag

SEQ ID NO: 191831 - DNA, 1323 bp, synthetic construct
  misc_feature 1..1323: note = Description of Artificial Sequence: Synthetic coding sequence
  source 1..1323: mol_type = other DNA
atgacctactggcggctggagaacatcgccaagaccgagccccccaaaatttttcgcgtgaagccggtgctgggcatcaagcggatgatacaaatcgaatggattaaacctgagctggccccggtgtcttctgatctgaagtacaccttgcgctttcgaaccgtgaactccacgagctggatggaagtgaactttgccaagaatagaaaagacaaaaatcagacgtacaacctgacagggctccagccttttactgagtacgtgatcgccctacgatgcgctgttaaagaaagcaagttctggagtgactggtcccaggaaaagatgggcatgaccgaggaagaagctccgtgcggattagaattatggagagtgctaaagccagccgaggccgacgggcgcaggccagtaaggcttctctggaagaaagcaagaggggcccccgtgttagagaaaactcttggatataatatttggtactaccccgaatctaacacaaatttgaccgagaccatgaatactacaaatcagcagttagagctgcatcttggtggagaaagtttttgggtatcaatgatttcttataattcactaggtaagagcccagttgcaacattgcgaattcccgccatccaggaaaagtcgttccaatgcattgaggtgatgcaggcctgtgttgctgaggatcagcttgtggtcaagtggcagtccagtgcccttgatgttaacacttggatgatagagtggtttcctgacgtcgattctgagccgactaccctgagctgggaaagtgtatcccaagccacgaactggacaatccagcaggataagctcaaacctttctggtgctataatatatcagtgtaccccatgctccacgacaaagtcggggaaccatattccatacaggcttacgccaaggaaggggtgccaagcgagggcccagaaacaaaagtggagaacatcggggtaaaaacagtaactatcacctggaaggagatccctaagtcagagcgcaagggcattatttgcaactacaccatattctaccaagccgagggaggcaagggattttgtaagcacgcccatagtgaagttgaaaagaaccccaaaccccagatcgacgctatggaccgccccgtggtgggaatggcaccaccgagtcactgcgacttgcagcccggcatgaatcacctggcttccctgaacctgtcagaaaacggtgctaaatcaacccatctgttaggcttttgggggctgaatgagtccgaggtgaccgtgcctgaacgcagagtactgcggaagtggaaagaacttctttag

SEQ ID NO: 191832 - DNA, 1989 bp, synthetic construct
  misc_feature 1..1989: note = Description of Artificial Sequence: Synthetic coding sequence
  source 1..1989: mol_type = other DNA
atgaagctgagcccccagcccagctgcgtgaacctgggcatgatgtggacatgggccctttggatgcttccttcactctgtaagttctctttggctgcccttcccgccaaacccgaaaatatcagctgtgtttactactatcgcaaaaacttaacttgcacatggagcccaggaaaggagacaagttacacccaatacacagtaaagcgcacttacgcctttggcgaaaaacacgacaattgtaccacaaactcctccaccagcgagaatcgcgcgagttgttcattcttcctgccccgaatcactatcccagataactacaccatcgaagtggaggctgaaaatggtgatggggtgatcaagtcccacatgacttattggcgactggagaatatcgcaaagaccgaaccgcccaagatcttcagggtgaagccagtgctagggattaaaaggatgatacagatcgaatggatcaagcccgagttagctccagtttccagtgacctaaagtacaccttgcggtttcgaaccgttaatagcaccagctggatggaggtaaactttgcaaaaaaccgcaaggacaagaaccagacctacaatcttaccggtctccagccgtttacagaatatgtcattgcgctgcgttgcgctgtaaaggagagtaaattctggagcgactggtcacaggaaaagatgggtatgactgaagaagaggcaccctgtgggttggagttatggagggtgctgaagccggcagaagcagacggccgccgacccgttcgacttctgtggaagaaggcacggggagcacccgttctcgaaaaaaccctggggtacaacatatggtattacccggaaagcaacaccaaccttacggagacgatgaacaccactaatcagcagctagaactgcatctgggaggagagtccttctgggtgagtatgattagttacaactccttaggcaagtcgcccgttgcaactcttagaatccccgccatccaagagaaaagttttcagtgcatcgaagtgatgcaagcctgcgtcgccgaggatcagctggtcgtgaagtggcagtcttccgctctcgatgtgaatacctggatgatcgagtggttccccgatgtggactccgaaccaactaccctgagctgggagtccgtgagccaagccaccaattggacaatccaacaggacaaactaaaacctttctggtgttataacatctcagtgtacccaatgctccacgacaaagttggcgagccttactccatacaagcctatgctaaggagggagtgccatcagagggccccgagaccaaggtagaaaatatcggggtgaaaacagtgactatcacttggaaagagatacctaaatctgaacgaaaggggatcatctgtaactacaccatcttttaccaggcagaaggtgggaaaggttttagtaagaccgtgaactcctccatcctgcaatatggcctggagtccctaaaacgcaaaactagttatatagtgcaggtcatggcctcaacttcggcaggtgggactaacggcacctcaataaattttaaaacactgtcctttagcgtatttgaaatcatactaatcacttcacttatcggcggaggcctgctgatcttaatcattctcactgtcgcctacggcttgaagaaaccaaataagctgacccacctgtgctggcctacagtgccaaaccctgcagaatcaagcatcgccacctggcatggcgacgattttaaagataagctgaatctgaaagagtcagacgattccgttaatactgaggatcggattctgaagccatgttcaacgccgagcgataagctggtgattgataagttggttgtgaattttggaaatgtgctgcaggaaatttttacagatgaggcccggaccggccaggaaaataatctgggtggagagaagaacgggacgcggatactgtcatcttgccccacctccatctag

SEQ ID NO: 191833 - DNA, 2046 bp, synthetic construct
  misc_feature 1..2046: note = Description of Artificial Sequence: Synthetic coding sequence
  source 1..2046: mol_type = other DNA
atgtgcatccggcagctgaagttcttcaccaccgcctgcgtgtgcgaatgtccacaaaacattctgtctcctcaaccctcgtgtgtcaatttaggtatgatgtggacctgggccctttggatgctgccgtccctctgtaagtttagcctcgcggccttgccggcgaagccagagaacataagttgcgtgtattactatcggaaaaatcttacctgcacctggagtccaggaaaggagacttcttatacacaatataccgtgaaaaggacctacgctttcggggagaagcatgacaattgtacaaccaattccagcacttcagaaaatcgagcttcatgcagctttttcctgccgcgtattacaatcccagacaattacacgattgaagtggaggccgagaacggagatggagtcataaagtcccacatgacctattggcggctcgagaacatagctaagaccgaaccaccgaaaatattccgcgttaaacccgtcctcggaataaagagaatgattcaaatcgaatggatcaaacctgagttggcgcccgtatcgagcgatctcaagtataccctgaggtttagaacagtgaattctacctcctggatggaggtcaacttcgccaaaaacaggaaagataaaaatcaaacatacaacttaactgggttacaaccatttaccgagtatgtaattgctttgcggtgcgccgtcaaggagagcaaattttggagtgattggagtcaggagaagatgggtatgactgaggaggaggcgccttgcggcctcgaactttggcgcgtgttgaagccggcagaagccgacggaagacgacccgtgaggttgctttggaaaaaagccagaggagctcctgtactggaaaaaaccctaggatataacatttggtactaccccgagagtaatactaatctgactgaaactatgaatacgaccaatcagcaattggagctccacctgggtggagagagcttctgggtcagtatgatctcctacaattctctcggtaagtcaccagtggcaacattaagaatccctgctattcaggaaaaaagttttcagtgcatcgaagttatgcaagcttgtgtggcagaggatcaacttgtggtaaagtggcagtccagcgctctggacgtcaatacctggatgatcgagtggtttcctgacgtggactccgagcccacaactttgagctgggagtcagtgtcccaggccactaactggaccatccagcaggacaaacttaaaccgttctggtgctataatattagcgtgtaccccatgttacatgataaggtcggagagccgtactctatacaggcttacgcaaaggagggcgtgccaagcgaggggcccgaaacgaaggtcgaaaatatcggcgtaaagacggtgaccattacttggaaagaaatacctaaatccgagcgaaagggaatcatttgtaactatacgattttctatcaggccgaaggtggcaaaggcttcagtaagacagttaactcttctattctgcagtatggattggaaagtctgaagcggaaaactagctacatcgtgcaagtgatggcgtccacctccgctgggggcaccaacggaacttccatcaactttaagaccctaagttttagcgtatttgaaattattcttattacttccctgatcggcggcggactgctgatactgatcatcctgactgtagcttatgggttgaagaaacctaataaactgacccatctttgctggccaaccgtaccgaatcccgcagaaagttccattgccacctggcatggcgacgactttaaagataagctaaacctcaaagaatccgacgatagtgttaacacggaagacagaatactcaaaccatgttctacaccgtccgacaaattggtgattgacaagctggtggtgaattttgggaatgtgctgcaggaaatatttaccgatgaagctcgaacaggccaggagaataatttgggaggcgagaagaatggtactagaatcttgtcgtcttgccctacgtccatatag

SEQ ID NO: 191834 - DNA, 1989 bp, synthetic construct
  misc_feature 1..1989: note = Description of Artificial Sequence: Synthetic coding sequence
  source 1..1989: mol_type = other DNA
atgaagctgagcccccagcccagctgcgtgaacctgggcatgatgtggacatgggcactttggatgctgccatccctgtgtaaattttcacttgctgcgctgcccgcaaagccagaaaacatctcctgcgtgtactactatcgaaagaacttaacctgtacttggtcacccggcaaggaaactagttatactcagtatactgtgaaacgaacttatgccttcggggagaagcatgacaactgtacaacaaatagctccaccagcgagaatagagcctcttgctccttcttcctcccccgcataacaatcccagataactacaccattgaagtcgaagccgagaacggtgatggtgtaattaagtcccacatgacttactggaggctcgaaaatatcgctaagacagagcctcccaaaatcttcagagtaaaacccgtgttgggaatcaagagaatgatacagattgagtggatcaaacctgagctggctccggtgagttcagatctcaagtacaccttacgatttaggacggtcaactccacttcgtggatggaagtaaacttcgctaaaaaccgcaaagataagaaccagacctataacctcaccgggctgcagccattcacagaatacgttattgctctgcgctgcgctgtaaaagagtcaaaattttggtctgattggtcgcaagaaaaaatgggcatgactgaggaggaggctccctgcgggcttgaattgtggagagtcctgaagcctgcagaagcagatgggagaagaccagtcagattattgtggaagaaagcaaggggagcccctgtcctcgaaaagaccttagggtacaatatctggtactaccctgaaagtaatacaaaccttactgagaccatgaataccactaaccagcagctggagcttcatctgggtggcgagagtttctgggtctccatgatcagttacaatagtctgggaaaatcaccagtcgctacccttaggatcccggccatccaggaaaagagctttcagtgtattgaagttatgcaggcttgcgtggccgaggatcagctagtcgttaagtggcaatcgagcgcattggatgtaaacacttggatgatagaatggtttcctgacgttgactcagaacccaccaccctaagttgggaatcagtgagtcaggccaccaactggactattcagcaggataaactgaaacccttctggtgttacaacatctctgtgtacccaatgctgcacgacaaggtgggagaaccctattctatccaagcctatgcaaaggagggggtgccatcagagggcccagaaaccaaggtggagaatattggagttaaaactgtaacgatcacttggaaggagattcccaagtccgagaggaaggggatcatctgcaactatactattttttatcaggctgagggaggcaaggggtttagcaagaccgtgaacagctctattttgcagtacggcttagagtcgcttaaacgcaagaccagctacatcgttcaagtgatggcttcaacaagcgccggaggcactaacgggaccagcataaatttcaagaccttgagcttctcagtttttgagattattttgataacctctctcattggaggtgggcttctcatactcataatactgacagtggcttacggtctaaaaaagccaaataaactgacccatctgtgttggcccaccgttccaaacccagccgagtcttcaattgccacatggcacggagatgacttcaaggacaaattgaacctgaaggagagtgatgacagcgtgaatacagaggaccggattcttaagccctgctctacaccgagtgataagttggtgattgataagctggtggtgaattttggaaatgtgcttcaggaaattttcacggatgaggctcggaccggccaggagaataacctaggaggcgaaaagaacggcacaaggatcttgagtagttgccccacctccatttag

SEQ ID NO: 191835 - DNA, 1749 bp, synthetic construct
  misc_feature 1..1749: note = Description of Artificial Sequence: Synthetic coding sequence
  source 1..1749: mol_type = other DNA
atgtgcatccggcagctgaagttcttcaccaccgcctgcgtgtgcgagtgcccacaaaacattctgtcacctcaacctagctgcgttaacctggggatgatgtggacatgggctttatggatgctgccctcgctctgtaaattttcccttgcggcgctcccagcgaagcctgaaaatatctcttgtgtatactactatcgaaagaatttgacatgcacttggtcgccaggcaaggaaactagctacacccaatacactgtcaagagaacctacgcttttggagagaagcatgacaactgcaccactaattcaagcacaagcgaaaaccgcgccagttgcagcttcttcttgcctagaattactatacccgataattatacgattgaagtggaagccgagaacggtgacggcgttatcaaatcccatatgacatattggcggcttgaaaacatagcgaagaccgaaccccccaagattttccgagtcaaacctgttctgggcattaaacgcatgattcagattgagtggattaaacctgagctggcacctgtgtcttcagacttgaaatacactttgaggtttaggactgtcaacagcacctcttggatggaagtgaattttgccaagaacaggaaagacaaaaatcagacgtataatctcacagggctacagccattcacagagtatgtgatcgctctgcggtgtgctgtgaaggaatctaaattttggtcagattggtcacaagagaaaatgggaatgactgaggaagaggccccatgcggcctcgaactgtggagagttctgaagccagccgaggcagacggccgcagacccgttagactgctgtggaagaaggcccggggagctccagtgctggaaaaaacactgggctacaacatctggtactatccagagtcaaacactaatctgacggaaaccatgaataccactaaccagcaactggagctgcacctcggcggggaatccttctgggtgagcatgatcagctacaattctttgggcaaaagcccggtggcgaccctacggattccagctatccaggaaaagtcgttccagtgcatcgaggtcatgcaggcttgtgtcgcggaggaccagctcgtagtgaaatggcaatccagtgcgcttgatgttaacacatggatgatagagtggtttccagacgtagactctgaacccacaaccctgagttgggagtccgtgtcccaggctaccaattggactatccaacaggacaaattgaaacccttctggtgctataacatttccgtctatccaatgttacatgacaaagtcggcgaaccatactcaattcaagcctacgctaaggaaggcgtgcctagcgagggccccgaaaccaaagtggagaatattggcgtcaaaacagtgacaattacctggaaagaaatacccaaatccgaacgaaaaggaattatctgcaactacaccattttttaccaggctgagggtggtaagggcttttgtaaacatgctcattccgaggtagagaagaaccctaaaccacaaatagacgcaatggacaggcccgtggtgggtatggccccgccctcccactgcgacctgcagcccgggatgaatcacctggcatcactcaatctgagcgaaaacggcgctaaatctacccatctgttaggcttctgggggcttaatgaaagtgaggtcaccgtccccgaacggcgggtgctgagaaagtggaaagaactgctctag

SEQ ID NO: 191836 - DNA, 2295 bp, synthetic construct
  misc_feature 1..2295: note = Description of Artificial Sequence: Synthetic coding sequence
  source 1..2295: mol_type = other DNA
atgtgcatccggcagctgaagttcttcaccaccgcctgcgtgtgcgaatgtccacagaacatattgtcccctcagccctcatgcgtcaacctggggatgatgtggacgtgggctttatggatgctaccatctctctgtaagttttctttagccgccctgccggctaaaccggagaacatctcttgcgtttattactatcggaagaatcttacgtgtacgtggtctcccggtaaagaaacgtcctatacgcaatatacggtcaagcggacatacgcgttcggtgagaagcatgacaattgtactactaatagcagtacatcagagaatagggcctcctgctctttcttccttcctcgcatcacgataccagataactatacaatcgaggtagaggccgagaatggagacggggtgataaagtctcacatgacctactggcgacttgagaacatcgccaagacagagcccccaaagatctttagggttaagcccgtattgggaataaaaagaatgatccaaatcgaatggattaagcctgagcttgcacctgtctcttctgatctgaaatatacgcttcgattccgcaccgtgaattccacttcatggatggaagtgaatttcgctaaaaacagaaaggacaaaaatcagacttacaatctgaccggacttcaacctttcaccgagtacgtgatcgcattgcgctgtgcagtgaaagagagcaaattttggagcgattggtctcaagaaaaaatgggtatgactgaagaagaggctccatgcggactagagttgtggagggttctcaagccagcggaagccgatggccggagacctgtgcggctgttatggaagaaggcaaggggcgcgcccgtgttggaaaagaccttgggctataacatctggtattaccccgaaagcaacaccaacctaaccgagacaatgaatactacaaatcagcagttggaacttcacctggggggtgagtctttttgggtgtccatgattagctataactcactcggcaaatctcccgtagccacattgcgcatcccagccatccaggagaaatcttttcagtgcattgaggtgatgcaagcctgcgtcgcggaggaccagcttgtggttaaatggcagagtagtgccttggatgttaacacctggatgatcgagtggttcccagacgtggacagcgaacccactactctgtcttgggaatcagtttctcaagctaccaactggactattcaacaggacaagctgaagccattctggtgttataacatttccgtgtaccctatgctccacgataaggtgggggagccatacagtatccaagcctacgcaaaagaaggagtccccagtgagggccctgaaacaaaggtagagaatatcggggtaaaaacggtcaccatcacctggaaggagataccgaaaagcgaaagaaagggcatcatatgtaattacactatattctaccaggccgagggtggaaaaggcttcagcaagactgttaattcctctatcctccagtatggactagaaagcctcaagcggaagacttcgtacatcgtgcaggtgatggcctctacctccgctgggggtactaacgggacgagcatcaatttcaagacactgtcatttagcgtgtttgaaattatcctcatcacctcactaatcgggggtgggctgctgatcctgattattctgacagtcgcttacggcctgaagaaaccaaacaaactcacccatctctgttggcctaccgtgcctaatccggcagagtctagcatcgctacttggcacggtgatgatttcaaggacaaactcaatctgaaggagagcgacgatagcgttaatacagaggaccgcattctgaagccgtgcagcaccccctcagacaaactggtcattgacaagctcgtggtcaatttcgggaacgtgctgcaggagatcttcaccgatgaagcgcggacaggacaagagaacaatttaggcggggaaaagaacggatatgttacttgcccattcaggcctgactgtccgctggggaagtcattcgaagagctgcccgtttcaccagaaattccccctaggaaatctcaatacttacggtcacgtatgcccgagggcaccagacctgaggccaaggagcagttgctcttctctgggcagtccttagtccctgaccacttatgtgaggagggggccccaaacccctatctcaagaactccgtaactgcgcgcgagtttcttgtgagtgaaaaactgcctgaacacacaaagggcgaagtctag

SEQ ID NO: 191837 - DNA, 1869 bp, synthetic construct
  misc_feature 1..1869: note = Description of Artificial Sequence: Synthetic coding sequence
  source 1..1869: mol_type = other DNA
atgacctactggcggctggagaacatcgccaagaccgagccccccaagatcttccgagtaaaacccgtgttgggtattaagcgcatgatccagattgaatggattaagcctgaactggcaccagtctcatcggatcttaagtataccttgaggtttaggacagttaactctacttcttggatggaggtgaattttgccaaaaatcgaaaagataaaaaccagacatataacttgaccggacttcagccttttaccgagtacgtgatcgcacttaggtgtgcagtcaaagagtctaagttctggagtgactggtcccaagaaaaaatgggtatgacagaggaagaggcaccgtgcggcctcgagctctggagagtcctgaaaccagcagaggctgatgggagacgaccagtccggttgctctggaaaaaagccaggggcgcccctgtgctggagaaaactttgggctataacatctggtattacccggagtctaacactaacctgactgaaacaatgaatacgaccaatcaacagttagaacttcatcttggcggcgaaagtttctgggtgagtatgatctcttataacagcctgggaaaaagccccgtggcgacactccggatccccgccattcaggagaagtccttccaatgcatcgaagtcatgcaggcctgcgtcgcagaggaccaactggtcgtgaagtggcagtcgagcgctctggacgtgaacacatggatgatagaatggtttccagacgtagacagtgaacctactaccctgagttgggagtctgtgtcccaggcaaccaactggacgattcagcaggacaagcttaaaccattctggtgctataacatttcagtgtaccccatgctgcatgacaaagtgggtgagccctacagcattcaggcgtatgcaaaggagggtgtcccatctgaggggccagagacgaaggtggagaacatcggagtgaagacagtgacgataacatggaaagagattcccaaatcagaacggaaagggattatctgcaactataccatcttttatcaggccgaaggtggcaaaggctttagcaagaccgtcaactcctcgatactccagtacggactcgaaagcctaaaaagaaagacatcatacattgtccaggtcatggcttccaccagtgcaggcggcaccaacggcacttctattaattttaaaaccctgtccttttctgtcttcgagatcatattaatcacttctctgatcggaggcgggctgttaatcttgattattctgaccgtcgcttacggactgaagaagccaaataagttgacacacctgtgctggccaactgtgcccaatcccgccgagtcctccattgccacatggcacggggacgacttcaaggataaactgaacctcaaagagagtgacgattcagtgaacaccgaagacagaattctgaaaccctgttcgactccttccgacaagctggtgattgacaagttggtggtgaacttcggcaacgttctgcaggaaatctttacagatgaggccaggacagggcaggaaaataacctaggtggcgagaagaacggctacgttacctgccctttcagacctgactgtcctctcggtaagagtttcgaggaactccccgtgtcacctgagatccctccacgtaaaagtcagtacttgagatcaagaatgccagagggaacccggcccgaggcgaaagagcagctattattctcaggtcagtccttggtccctgatcacctctgcgaagaaggagctcctaacccttatctaaagaactcagtgacagcccgagagttcttagtgagcgagaagctgccagaacatactaaaggagaggtgtag

SEQ ID NO: 191838 - DNA, 468 bp, synthetic construct
  misc_feature 1..468: note = Description of Artificial Sequence: Synthetic coding sequence
  source 1..468: mol_type = other DNA
atggtgctgagcggcgccctgtgcttccggatgaaggacagcgccttgaaagttctgtacttacacaacaatcaactgttagcaggagggctgcacgcaggcaaggtcatcaagggcgaggaaattagcgtcgttccaaacaggtggctggatgcctcactgagccccgtcatcctgggagtgcagggcggaagccagtgcctatcttgcggtgtggggcaggaacccactctgacattagagcctgtcaacattatggaactgtatctgggagctaaggaatccaagtcctttaccttttacaggcgggacatgggactgacctcgtcatttgaatcggcggcttatcccggttggtttctctgtacagtgcctgaggcagaccagcccgtgcgtttgacacagctccccgagaatggcggctggaacgcgccaattacagatttttactttcagcagtgcgattag

SEQ ID NO: 191839 - DNA, 468 bp, synthetic construct
  misc_feature 1..468: note = Description of Artificial Sequence: Synthetic coding sequence
  source 1..468: mol_type = other DNA
atggtgctgagcggcgccctgtgcttccggatgaaggacagcgccttgaaggtattgtatctccacaacaaccagctgttagcagggggactccatgcaggcaaggtgattaaaggagaagaaatcagcgtggtgcctaacagatggctggatgcttctctgtcacctgttatccttggcgtgcaaggaggcagccagtgcctaagttgtggggtcgggcaggaacccactctcacccttgagccagtgaatatcatggagctatatcttggagccaaggagtctaagtcctttaccttctaccggagggacatgggactgacctcctcattcgagagcgctgcctacccaggatggttcctttgcactgtgcccgaggcagatcagcctgtgaggctcacccagctgccagaaaatggcggctggaatgcccccatcactgatttctattttcagcaatgtgactag

SEQ ID NO: 191840 - DNA, 354 bp, synthetic construct
  misc_feature 1..354: note = Description of Artificial Sequence: Synthetic coding sequence
  source 1..354: mol_type = other DNA
atggtgctgagcggcgccctgtgcttccggatgaaggacagcgccctcaaggtgctgtatctgcataataaccagctcttggccggaggcttgcacgcaggcaaggtgataaagggggaggaaatctctgtagtgcccaacagatggctagatgctagcctctcccccgtgatcctcggcgtccagggggggtctcagtgcctttcatgtggggtgggacaggaacccacactgactttggagcctgtgaacattatggaactttatctgggcgcaaaagaaagtaagtcattcacattttaccgtcgagatatggggcttaccagcagctttgaaagcgctgcgtatccctag

SEQ ID NO: 191841 - DNA, 2478 bp, synthetic construct
  misc_feature 1..2478: note = Description of Artificial Sequence: Synthetic coding sequence
  source 1..2478: mol_type = other DNA
atgggctggctgtgcagcggcctgctgttccccgtgagctgcctggttttactgcaggtggcatcgagcggaaatatgaaggtgcttcaggagcctacatgcgtcagcgattatatgtccataagtacctgcgaatggaagatgaatgggcctacaaattgtagtacagaattgagactgctgtaccagctggttttcctcctctccgaggcccacacctgtattccagagaataatggcggagccggctgcgtttgtcatctcttaatggatgatgttgtgtccgccgataactatacccttgacctctgggcaggccagcaactgttgtggaaaggttcatttaagccatcagagcacgtcaagcccagggccccagggaacctgactgttcatacaaatgtgtcagataccctcctgctcacctggtccaatccttatccgcctgataactacttgtataatcacctcacctatgcagttaacatttggtcagaaaatgatcccgctgacttcaggatctacaatgtcacctatctcgagccgtctctcaggatcgccgccagcacactaaagagcggcatctcatatagggctagagtgcgcgcttgggctcagtgctacaacaccacatggtctgagtggtcaccctctacgaaatggcacaacagctaccgagagcccttcgagcagcacttgttgttgggcgtcagtgtgtcctgcatcgtgattctagccgtttgcctcctgtgctacgtatctatcacaaaaatcaaaaaggaatggtgggatcagatcccaaaccctgcccgtagccggctggttgctatcatcattcaagatgctcaaggctctcagtgggaaaaaaggagccggggccaggaaccagctaaatgcccgcattggaaaaattgcctgactaagctacttccttgctttcttgaacacaatatgaaacgagacgaggacccacataaagccgctaaggagatgcccttccaggggtctggcaaatccgcttggtgccccgtggagattagcaagacagtcctgtggccagaatcaatttccgtcgtgcgctgcgtggaactgttcgaggctccagtggagtgcgaagaggaagaagaggtagaggaggagaaggggtcattctgcgcttctcctgagagctcccgtgacgatttccaggagggtcgagaagggatagtcgctagattaaccgagagtctgtttctcgacttgctcggtgaggagaacgggggcttctgccagcaagacatgggtgagagctgcttgttgccaccaagcgggtccacatcagctcatatgccctgggacgaatttcccagcgccggaccaaaggaagcacccccatggggaaaagagcagcccctacacctcgagccaagtccaccggcctctcctacccagtcgcccgataacctgacatgcaccgagacaccgttggtaatagccggcaatccagcttatcggagcttctcgaactctctatcacagtcaccctgccctagagagttgggacccgatccactccttgctcgtcaccttgaggaggtcgaacccgaaatgccttgcgtgcctcagttgtctgagcccaccacagtgcctcagcccgagcccgaaacctgggagcagattctgagacgtaatgttctgcagcatggggcagctgctgctcccgtcagcgctccaaccagtggctatcaggaattcgtgcatgccgtggaacaggggggtacccaggcaagtgctgtggtgggcttaggtccccccggagaagccggatacaaagcattctccagtcttctggccagttccgctgtatccccagagaagtgtggattcggtgcctcaagcggggaggaagggtacaagccgttccaggatctgatcccaggttgtcccggcgatcccgcccctgtgccggtacccctatttacattcggcttggacagggagccacctcgctctcctcagtctagccacctgccttcgtcttcccctgaacatctggggctggaacccggcgagaaagttgaagacatgcccaagcccccacttccccaggaacaggccactgatccattggtcgattctcttggctctggtatcgtgtattccgccttaacatgtcacctctgtggtcacctaaaacagtgtcacggccaggaggatggcggccaaacccccgttatggccagtccatgttgtgggtgctgctgcggggatcggtcgagccctcctactactcccctgcgcgcccctgatccctcccctggcggcgtgcccttggaggcctctttgtgtcctgcatctctcgcaccttccggcatttctgaaaaatctaagtctagttcctcgtttcatcccgctcccggcaacgcccaaagttccagtcagaccccgaaaatcgtcaactttgtgtctgtgggacccacctacatgcgcgtatcctag

SEQ ID NO: 191842 - DNA, 2433 bp, synthetic construct
  misc_feature 1..2433: note = Description of Artificial Sequence: Synthetic coding sequence
  source 1..2433: mol_type = other DNA
atgcagaaggacgcccggcgggagggcaacatgaaggtgctgcaggagcccacgtgcgtgtccgactacatgtccattagtacttgtgaatggaagatgaacgggccaaccaattgttctacggaactgaggctcctgtaccaattggtgtttctgctgtcggaagcacacacatgcattcctgaaaacaacggcggggctggctgcgtatgccatctactgatggatgatgtagtctccgcggataactataccctggatctttgggccggacagcagttactctggaaggggagcttcaagccaagcgaacacgtcaaaccccgcgctcccgggaatctgaccgttcacaccaacgttagcgatacattgctattaacatggtccaacccatacccacctgataattatctatataatcatttgacctatgccgtcaacatttggtcagagaatgaccctgctgactttaggatttacaatgtgacttatcttgagcccagccttcgcatcgccgcttctactctcaaaagcggtatctcgtacagggcccgagtcagagcatgggctcagtgttacaacactacctggtctgagtggagcccatccaccaagtggcacaacagttatcgggagccgtttgagcagcacctgctgttgggggtttctgtgtcatgcattgtcatccttgccgtgtgtttgttatgttatgtatcaatcaccaaaattaaaaaggagtggtgggatcaaatccctaacccagcccgcagcagattggtcgctattatcattcaggacgcacagggatcacagtgggagaagaggagccgggggcaggagccggcgaagtgccctcactggaagaactgtctgacaaaactgcttccctgtttcctcgagcataatatgaagagggatgaggacccccacaaagccgccaaagagatgcctttccagggcagcgggaaatcagcctggtgtcctgtggagatcagcaaaactgttctgtggcctgaatccatctcagtcgtccggtgtgtggaactgtttgaagctccggtcgaatgtgaggaggaagaagaggtcgaggaggagaaaggttctttttgcgctagcccagaatcttctcgggatgacttccaagagggacgggaggggatcgtcgcacgactcactgagtcccttttccttgatctccttggcgaagagaatgggggcttctgccagcaggacatgggggagagctgcttgctgcccccaagcggctcgacttccgcccacatgccatgggacgagttcccatccgccggacccaaggaagcccctccatggggtaaggaacagcccctccatctggagccttcaccgccagcttcaccaacccagagtcccgacaacctgacctgcacagaaacaccattggtcattgctggaaatcctgcctaccgaagttttagcaactctctgagccagtccccatgcccacgggaactcgggccagatcctctgctggctaggcatctcgaagaggttgagcccgagatgccatgtgtgcctcaactatcagaaccaactactgttcctcagcccgaaccggagacctgggaacaaattcttagacggaatgtcctacagcatggggccgctgctgcgcctgtgagcgctcccaccagcggctaccaggaatttgtgcacgctgtggaacagggcggaacacaggcatcagcggttgtgggtcttgggccacccggggaagctgggtataaagccttctcctctctcttggccagctcggccgtgagccctgaaaagtgcggttttggagcctcctccggggaggaaggctacaagcctttccaggatttgatcccaggatgccccggagaccccgcgccagtgccggtgcctctgtttacctttggactggatcgagagccaccacgcagcccacagagttctcacctgccatccagcagccctgagcacctgggcctcgagcctggggaaaaggtggaggatatgcccaagccacccctcccccaagagcaggctactgatcctctggtcgactccctgggctccggcatcgtgtacagcgctctaacgtgccacctctgcggccacttaaaacagtgtcacggacaggaggatgggggccagactccagtcatggcctctccatgctgcggctgctgctgtggagaccgttcatctcctcccacaacccctctgcgggcaccagatccctcaccagggggtgtccccctggaagcctccctctgtccagcatccttggctccttctgggatatcggagaaatcaaagagcagcagctctttccaccctgctccaggcaacgcccaatcttcgagtcagactccgaagatcgttaattttgtgtcagtcgggcccacttacatgcgggtatcctag

SEQ ID NO: 191843 - DNA, 684 bp, synthetic construct
  misc_feature 1..684: note = Description of Artificial Sequence: Synthetic coding sequence
  source 1..684: mol_type = other DNA
atgggctggctgtgcagcggcctgctgttccccgtgagctgcctggtgttgcttcaggtggctagtagcggcaacatgaaggtgctgcaggaacccacgtgcgtttcagactatatgtctataagtacttgtgaatggaagatgaacggccccaccaactgcagcacggagcttcgacttttgtaccaattagtctttctgctctcagaggcgcacacttgtatacccgagaataacggcggtgctgggtgtgtatgccaccttttgatggatgatgtcgtgtccgcagacaattacacactggacctctgggccgggcaacaattgctgtggaaaggctcttttaagccctcggaacacgtcaaacctcgagcacctggcaatctgactgttcacaccaatgtctccgatacccttttactgacgtggtccaacccttaccctcccgacaactacctatataatcacctgacctacgcagtgaatatctggtccgaaaatgatcccgccgacttccgaatatataatgtgacctatctggaaccgtcgctgcggattgcagcctctactctaaagagtggtattagctaccgtgcgcgggttagggcctgggcacagtgctacaacaccacatggtccgagtggagcccatcaaccaaatggcataatttctccgtgtgctag

SEQ ID NO: 191844 - DNA, 2478 bp, synthetic construct
  misc_feature 1..2478: note = Description of Artificial Sequence: Synthetic coding sequence
  source 1..2478: mol_type = other DNA
atgggctggctgtgcagcggcctgctgttccccgtgagctgcctggtgctgctccaggttgccagttccgggaatatgaaagtgctgcaggaaccaacgtgcgtcagcgactacatgtcaatttcaacttgcgagtggaagatgaacggtcccacaaactgctctacggagctgcgacttttataccagctggtgtttctcctctctgaagcacatacgtgcattcctgagaataatggcggagccggctgcgtttgtcacctgctgatggacgacgtggtctcagctgataactacacgctggacctgtgggccgggcagcagctcctgtggaagggctcctttaaaccttccgagcatgtgaagcctagagcccccgggaatctcaccgtgcacaccaatgttagtgataccctcctccttacctggagtaatccatatccccctgataactatttgtacaatcatctcacttacgctgttaatatctggagcgaaaatgaccctgctgattttagaatttacaacgtcacatatctggagcccagccttcgcatcgcggcttccaccctcaagtctggtatttcatatcgtgcaagggtgcgagcatgggctcaatgctataataccacctggtctgagtggagcccctcaactaagtggcacaatagctaccgcgagccttttgaacagcacttattgctaggcgtgtctgtaagttgtatcgtgattcttgcagtctgtctgctgtgctacgtatcaatcacaaaaatcaagaaagaatggtgggaccaaatcccaaatccagccagaagtagactcgtagcgataattatccaggatgcccaaggttcacaatgggagaagagatccagaggccaagagcctgctaagtgcccccattggaagaactgtctgacaaaactcttgccatgctttctcgagcataatatgaagagggacgaagatcctcacaaggccgcaaaggagatgccttttcaaggcagcggaaagagtgcttggtgcccagtggagatctctaaaactgttctttggcctgaaagcatttccgtcgtgcggtgtgttgagctgtttgaggccccagtcgaatgcgaagaggaagaggaggttgaagaggaaaaaggctccttctgcgctagccctgagagcagcagggacgactttcaggaggggagggaagggatcgttgcacggttgactgaatcactgttcctggacttgcttggagaagaaaacggaggattctgccagcaggatatgggggaaagttgtctccttccacccagtggatccacaagtgcccacatgccctgggatgagttcccttctgccgggcctaaagaggcaccaccatggggcaaagagcagcccctgcatctggagcctagccctcctgcctctcccacccagtccccagacaacctgacctgtactgaaacgccactcgtgattgctggaaatcccgcttaccgaagcttttccaactcactgtctcagtcaccatgtcctagagaactgggtcccgacccattgctcgctcggcacttggaggaagtggagcccgagatgccgtgtgtgcctcagttgtcagagccaactacagtgccccagcccgaacctgaaacctgggagcagatcctaagaaggaacgtgcttcagcatggcgcggccgcagcaccggtgagcgcccctacctctggctaccaagagttcgtacacgcagtggagcagggtggaacccaggcctccgccgtggtgggactcgggcctccaggagaggccggatacaaggctttctcaagtttactcgcctcctcagctgtgtcaccagagaagtgcggatttggggctagctcaggcgaggaaggatacaaaccttttcaagacctgatccccgggtgccccggcgatccagctccagttcctgtccccctgttcacttttgggctagaccgtgaacccccgcgctcgcctcagtcatcccatctaccctcctcatctcccgaacatctcggactagaacccggggagaaggtggaagacatgccaaagcctccactgccacaagaacaggccaccgatcctctggtggattccttagggtccggaattgtctacagtgctctgacatgtcacctgtgtggtcacctcaaacagtgtcacggccaggaggacggtggacagaccccggtgatggctagtccctgttgcggttgctgttgcggggacaggagcagcccaccgaccacaccactgagggctcccgatccctcaccaggaggggttcccctcgaggcatccttgtgtccggcctctctcgcaccttcaggaatttcggaaaagtcaaagtcatcatctagctttcatcccgctccgggtaacgcccagagctcgtcgcagactccaaaaatagtcaacttcgtgtctgtgggtccaacttacatgagggtgagttag

SEQ ID NO: 191845 - DNA, 684 bp, synthetic construct
  misc_feature 1..684: note = Description of Artificial Sequence: Synthetic coding sequence
  source 1..684: mol_type = other DNA
atgggctggctgtgcagcggcctgctgttccccgtgagctgcctggtactattgcaagtggcctcgtcaggcaatatgaaggtcctgcaagaacccacctgcgtttctgattacatgtctatctcaacttgcgagtggaaaatgaatggcccgacaaattgtagcacagagttaaggctgctctatcagctggtctttctgttgtctgaagctcacacctgtatccctgaaaacaatggcggagccggctgcgtctgtcacctcttgatggacgatgtggtcagcgctgataactacacactcgatctctgggctggacagcagctactgtggaagggttcattcaagccctccgaacacgtcaaacctcgggcacccggcaacctcacggtgcatacaaatgtgtcagacacacttttgctcacatggtcgaacccctacccgccggacaactatttgtataatcatctcacctatgctgtaaacatatggtcggagaacgatccagctgacttccgtatctataacgttacatatctggagccttcactgcgtatagctgcttccaccctgaagagtggaatttcatatagagccagggttcgagcttgggctcaatgctacaataccacatggtcagaatggagccccagtaccaaatggcataattctaatatttgctag

SEQ ID NO: 191846 - DNA, 2478 bp, synthetic construct
  misc_feature 1..2478: note = Description of Artificial Sequence: Synthetic coding sequence
  source 1..2478: mol_type = other DNA
atgggctggctgtgcagcggcctgctgttccccgtgagctgcctggtgcttctgcaggttgccagttcgggtaatatgaaagtgctccaggaacctacgtgcgtgagcgactacatgtcaataagcacctgtgaatggaagatgaatggtcctaccaactgctccactgaactcagactcctgtaccagctggtgtttctcttatccgaggcccatacatgtattccggaaaacaatgggggcgctgggtgcgtgtgccacctattaatggatgacgttgtcagcgccgacaactatactctggacctgtgggctggacagcaattgctgtggaagggcagttttaaaccgagcgagcatgtgaaacctcgggctccaggcaacctgacagtgcacacaaacgtgtcagatactctgctcctcacctggtcaaatccctatccccccgacaattacttgtacaatcaccttacctatgcggtgaatatctggtctgagaacgatccagcagacttccgtatttataatgtgacatatctggagccttctctcagaattgccgcaagcacactgaaatccggaatctcttatcgggctcgtgtgcgcgcctgggctcaatgctacaatacgacgtggagcgaatggtccccgtccactaaatggcacaattcgtatcgggagccatttgagcagcacctcttgctgggtgtgtcagtttcctgtatcgttatcttagcggtttgtctgctatgctatgtgtccataactaagattaagaaagagtggtgggatcagatacccaaccctgcgaggtccaggctggtggccattatcattcaggacgcccagggctcgcagtgggaaaagcgaagtaggggacaggaacctgctaaatgcccgcactggaaaaactgtctgaccaagttactgccttgtttcttagagcacaacatgaagcgagacgaggatccccataaggcagcaaaggagatgccttttcaggggtcgggaaaatctgcctggtgcccggtggaaattagcaaaacagtcctatggccagagagcatttctgtagttaggtgcgtcgaactgtttgaggcgccagtggagtgcgaggaagaagaagaagtagaggaagagaaagggagcttctgcgcaagccccgaatccagcagggatgactttcaggaaggccgggagggcatagttgcacggctcacagagtcactattcctggatctcctcggcgaggagaacggtgggttctgccagcaagacatgggagaaagctgtctgctcccaccaagtgggagtaccagcgcacacatgccttgggatgaattcccaagtgctggccccaaagaggcccctccatgggggaaggagcagccacttcacctggagccgtctccacctgctagccctactcaatcgcctgacaatctcacttgcactgaaacaccgcttgtgatcgccggcaatcccgcttacagatccttttcaaactccttatcacagtccccttgtccgcgcgagttgggccccgaccctctgctcgcgcgacacctggaggaagtcgagcctgaaatgccttgcgtgcctcaactttccgaaccaaccactgtgcctcagcccgagcctgagacctgggagcagattctgcggcggaatgtgctgcaacacggagcggcagccgccccagtgagcgctccaacttccgggtaccaagagtttgtgcatgcggtagaacagggaggaacacaggcttccgccgtagtagggcttggaccccccggagaagccggctataaggctttcagttctctcctcgcctcttctgccgtgtcccccgagaaatgcggctttggcgccagtagcggcgaggaagggtacaagcctttccaggacctcatccctggctgccctggcgatcccgccccggttcccgttcccttatttacattcggtctcgacagggaaccacctcggtctcctcaatcatcacatctcccttctagttcgcctgaacatcttgggttagaacccggagagaaagtagaagatatgccaaaacctccccttcctcaggaacaagcaaccgatcctctggtcgactcactgggaagcggcattgtgtactccgctttgacttgtcacttgtgtggccaccttaaacagtgccacgggcaggaagatgggggccagacacctgtgatggcctctccatgttgcgggtgctgctgtggcgaccgaagttcccctcccacgactcctctccgcgctcctgaccctagtccaggcggggtgcccctggaagcaagtctctgtcctgcaagcctcgccccatcggggatatcagaaaagtccaaatcttcatccagttttcatcccgcgcctggcaacgctcagagctcctcccagacccctaagattgtcaactttgtgagcgttggaccaacgtacatgcgagtatcttag

SEQ ID NO: 191847 - DNA, 1263 bp, synthetic construct
  misc_feature 1..1263: note = Description of Artificial Sequence: Synthetic coding sequence
  source 1..1263: mol_type = other DNA
atgatcatcgtggcccacgtgctgctgatcctgctgggcgccaccgaaatcctacaggcagacctgctgccagacgaaaagataagcctgctgccgcccgtcaacttcactatcaaagtgactggcttggctcaggtgctcctgcagtggaagccaaatcccgatcaagaacaaagaaacgtgaaccttgagtaccaggtcaagattaatgctcccaaagaagatgactacgagaccagaataacggaatcaaagtgtgtgactattcttcataaggggttctcagcctccgtccggacaattttgcagaacgatcactctctgctcgcatcttcgtgggcctcagccgaactccacgctcccccaggatctcctggaacgtcaatcgtcaatctgacctgtaccacaaatactacagaggacaattattccaggttgcggtcctatcaggtgtcactgcattgtacttggctggtcggcactgatgcacctgaagacacccagtactttctgtattaccggtatggaagctggaccgaggagtgccaggagtattccaaggataccctcggtcgaaacattgcttgctggtttcccagaacctttatcctttccaagggcagggattggctggccgtactcgtgaatggtagttcaaagcattccgctatccgacccttcgaccaactttttgccttacacgcgattgaccagattaatccccccctgaatgtaaccgcagagattgagggcacgagactcagcatacagtgggagaagccagtgtcggcttttcccatacactgcttcgactatgaggtgaaaatccacaacactcgcaatgggtacttacaaattgagaaactgatgactaatgcttttataagcatcattgatgatttgtctaagtacgacgtgcaggtgagagctgccgtgtccagcatgtgtagagaggcagggctctggtccgaatggtcacagcccatctacgttgggaacgatgagcataaacctctgcgagagtggtttgttatagtgataatggctacaatctgttttatcttactcattctgtccctgatctgtaagatatgccatctgtggattaagctcttcccgccaatccccgctcccaagagcaacattaaggacctgtttgtcacaacgaactacgaaaaagcgggatcctccgaaactgagatcgaagttatctgttacattgaaaaaccaggtgtagaaacactggaagactccgtgttttag

SEQ ID NO: 191848 - DNA, 1008 bp, synthetic construct
  misc_feature 1..1008: note = Description of Artificial Sequence: Synthetic coding sequence
  source 1..1008: mol_type = other DNA
atgatcatcgtggcccacgtgctgctgatcctgctgggcgccaccgaaattctgcaggctgacctgttaccagacgagaagatctcccttctgccaccagtgaatttcaccattaaggtgactgggctggcccaagtactgctccagtggaaaccaaacccggatcaggagcagcggaacgtcaatttagagtatcaagtgaaaatcaatgctccaaaggaagatgactacgagaccaggatcaccgaatccaaatgtgtaacaatcctgcacaaaggcttcagtgctagtgtcagaactattctccaaaatgatcattctctgctcgcctcctcttgggcctctgccgaactgcatgcacctccgggttcaccaggcacgtctatcgtcaatcttacctgtaccactaataccactgaggacaattatagtcgactgcgaagctatcaagtcagcctgcattgtacctggctggttggcactgacgcaccggaggacacgcagtacttcctgtactaccggtacggttcttggaccgaggaatgccaagagtattccaaggacacactcgggagaaacattgcctgctggtttcctaggacattcatactatctaaagggagagattggttagccgtactcgtgaatggctcctcaaagcacagcgccattagaccattcgaccaactgttcgctttacatgccatcgaccagattaacccacctctgaacgtcaccgccgagattgaaggtactagactctcgatccagtgggagaagcctgtttcagcttttccaattcattgtttcgactatgaagtaaagatccacaacacacgcaatggctacctacaaatcgagaaactcatgacaaatgccttcatctcgatcattgacgacctgtcaaaatacgacgtccaagtgagggcagcagtgtcctctatgtgtagagaggccggcctgtggtcagagtggagccagccaatttacgtgggattctccaggtag

SEQ ID NO: 191849 - DNA, 453 bp, synthetic construct
  misc_feature 1..453: note = Description of Artificial Sequence: Synthetic coding sequence
  source 1..453: mol_type = other DNA
atgaccaacgccttcatcagcatcatcgacgacctgagcaagtacgacgtccaggttcgtgcggccgtgagctcaatgtgccgtgaggcaggactgtggagcgaatggagtcagccaatctatgtgggaaatgacgaacacaagccccttcgcgagtggtttgttatcgtgattatggccactatttgctttatactgcttatcctcagcttgatctgtaaaatatgtcacctctggataaagcttttccctcccattcccgcacccaaatccaatattaaggacctgttcgtcactactaattatgaagttttatgtatcttcatctatatcttggactctgcagacaatttcttgcagaagaagaaggctgggagctcagagactgagattgaagtcatttgctatattgaaaaaccaggcgttgaaactctggaggactcagtgttttag

SEQ ID NO: 191850 - DNA, 1008 bp, synthetic construct
  misc_feature 1..1008: note = Description of Artificial Sequence: Synthetic coding sequence
  source 1..1008: mol_type = other DNA
atgatcatcgtggcccacgtgctgctgatcctgctgggcgccaccgaaatcctgcaggctgatttactgccggacgagaaaatctccctgttgccacctgtgaacttcaccatcaaggttactggtctggcacaagtgttgctccagtggaagcccaatcctgatcaggaacagaggaacgtaaatctggaatatcaggttaagattaacgcgcccaaggaggatgactacgagacacgaatcacagaatccaaatgcgtgactatacttcacaaaggcttttccgcctcagtgagaaccattctgcagaatgaccactccctcttggcctccagttgggcctctgcagagttgcacgcccctcctggtagcccagggacaagtatcgtcaaccttacatgcacaaccaacaccaccgaggacaactactcccggctgaggagctatcaggtctccctgcattgcacttggctagtcggtacagatgcccccgaagacacccagtacttcctgtactacaggtacggcagctggaccgaagagtgccaggaatatagcaaagacaccctaggcagaaatatcgcatgctggttcccaagaactttcattctgtctaagggcagagactggctggcagtcctggtcaacggctcctctaagcattccgcaatcagaccgtttgaccaactgtttgctcttcacgccatagaccaaattaacccgcccttgaatgtcaccgccgaaatagagggtaccaggctctccatccaatgggagaagccagtttcggcattccccatacactgcttcgactatgaagttaaaatacataatacaagaaacggctatcttcagatagagaaacttatgacgaatgccttcatcagcatcattgatgatctgagcaaatacgacgtccaggtgcgcgccgccgtttcctctatgtgcagagaagccgggctgtggtctgaatggtcccagccgatctacgtgggcttttccaggtag

SEQ ID NO: 191851 - DNA, 978 bp, synthetic construct
  misc_feature 1..978: note = Description of Artificial Sequence: Synthetic coding sequence
  source 1..978: mol_type = other DNA
atgatcatcgtggcccacgtgctgctgatcctgctgggcgccaccgagatcctccaggcagatctgctgccggatgaaaagattagcctgctgcctcctgtgaattttaccattaaagtgaccggactggctcaagtcctgctgcagtggaaacctaacccagaccaagagcagcggaatgtgaatctggagtatcaggtaaaaatcaacgctcccaaagaggacgactatgagaccaggatcaccgaaagcaagtgtgtcacaattttgcacaaaggattttccgcatccgtgcgcacgattctgcagaacgatcactcactgctggcatcctcttgggcgtccgctgaacttcacgccccacccgggtcccccgggacctcaatcgtcaacctgacctgtacaacgaatactacagaggacaattactcccgcctgcgctcctaccaggtctcactccactgtacctggctggtggggactgacgctcctgaggacacacagtatttcctgtactataggtacggcagttggacggaggagtgccaggagtactctaaggatactctcggacggaatatcgcttgttggtttccacggacattcattctgtctaaggggagggattggctcgccgttcttgtgaatggttctagcaaacactccgccatccggcctttcgaccagctgttcgccctgcacgccattgggaacgatgagcataaacctctccgagaatggtttgtcatcgtgatcatggctacgatttgctttattctgctgatcttatccctaatctgtaagatctgtcatctatggattaaactctttccacccattcccgcccctaagagtaatattaaagacctgttcgttaccaccaactacgaaaaggccggatccagtgagactgagatcgaagtgatctgttacattgagaaacccggagtcgaaacactggaggattccgtgttttag

SEQ ID NO: 191852 - DNA, 330 bp, synthetic construct
  misc_feature 1..330: note = Description of Artificial Sequence: Synthetic coding sequence
  source 1..330: mol_type = other DNA
atgatcatcgtggcccacgtgctgctgatcctgctgggcgccaccgagatcctccaagccgatctgctgcccgacgagaagatcagcctgctgccccctgtgaacttcactatcaaagtgacaggcctggcccaggtactgctccaatggaagcctaacccggaccaagaacagcgcaatgtgaacctcgaatatcaagtcaaaataaatgctcctaaggaagatgactatgaaacacgtatcaccgagtctaagtgtgtgaccattcttcacaaaggcttcagcgcaagcgtaagaacaatcttgcagaacgaccactccctactgtag

SEQ ID NO: 191853 - DNA, 1002 bp, synthetic construct
  misc_feature 1..1002: note = Description of Artificial Sequence: Synthetic coding sequence
  source 1..1002: mol_type = other DNA
atgatcatcgtggcccacgtgctgctgatcctgctgggcgccaccgagattctccaggccgatctcctgcccgatgaaaaaatctcgctgctgcccccggtcaacttcactattaaagttaccggcctcgcccaggtcttactgcagtggaagcctaaccccgaccaggagcagagaaatgttaacttagaatatcaagtgaaaatcaatgcccctaaagaagacgattatgagacccggatcaccgagtcgaaatgcgtgacaattttgcataagggattcagcgcatcagtgagaactattttgcagaacgatcacagcctacttgcttcgagctgggcctccgcagaattgcacgccccccccgggagcccaggcacaagcatagttaacctgacatgcaccaccaatactactgaggacaactacagccgactgcgcagttaccaagtgtccctgcactgcacctggctggtaggcacagacgcacccgaggatacccagtacttcttatactatcgttatggcagctggacagaggaatgccaggagtattcaaaagacaccttgggacgcaatatcgcctgctggttccctaggacattcattctatccaagggtagagactggttggcagttctggtcaacggttcctctaagcatagcgcaattcggccttttgaccagctttttgccctgcacgccatcgatcagatcaatcccccgctgaatgtgacagccgaaatcgagggcaccaggctcagcatacagtgggagaagccagtgtcagcctttcccatccattgctttgattatgaagtcaaaatccataatacaagaaacgggtacctgcagattgagaaactgatgacaaatgccttcatatccattatcgatgatctgtccaagtacgatgttcaggttcgcgccgcagtcagttcaatgtgcagagaagccggcctgtggtccgagtggagtcaaccaatttatgtcggtaagtag

SEQ ID NO: 191854 - DNA, 1137 bp, synthetic construct
  misc_feature 1..1137: note = Description of Artificial Sequence: Synthetic coding sequence
  source 1..1137: mol_type = other DNA
atgatcatcgtggcccacgtgctgctgatcctgctgggcgccaccgagatccttcaggcggacctgctgccagacgagaagatctccctattgccccccgtgaattttactatcaaggttaccggcttggctcaggtactgctgcaatggaaacctaaccctgatcaggagcagcggaatgttaaccttgaatatcaggtcaagattaatgcacccaaggaggatgactacgagactcgaatcaccgagagcaagtgtgtgaccatccttcacaaggggttttctgcctctgtgaggacgattctgcaaaatgatcattctctgctggcatcctcatgggccagtgctgagctccacgcccccccaggtagccccggcacctccatcgtgaacctcacttgcacaacaaacaccaccgaggataattactcaaggctacgaagttatcaggtgagtcttcactgcacgtggctggtggggacggatgcacctgaagacacacagtatttcctctattaccgctacggttcatggactgaggagtgccaggagtattccaaggataccctcggacggaatatcgcatgttggtttccgagaacgttcatcctgagcaaaggaagagattggttggctgtactggtcaatggttccagcaagcacagtgcgatcaggccgttcgaccagttgttcgctttacatgcaattgaccagattaatccccccctgaacgtgacggcagaaatcgagggcactaggcttagtatccaatgggaaaagcccgtctccgcctttcctatccactgctttgattacgaagtgaaaatccacaacacccgtaacggataccttcaaatcgaaaagctcatgactaacgccttcatcagcataatagacgacctgtccaaatacgacgtgcaagtgagagccgctgttagtagtatgtgccgtgaagctggcttgtggtctgagtggagccagccgatctatgtgggcaatgacgagcataagcctcttcgggagtggtttgtgatagtgattatggcaaccatttgttttatcctgctgatcttatccttgatttgcaaaatcaaattgggaccagtgagaaggaagctgaagagcagtgtcatctag

SEQ ID NO: 191855 - DNA, 591 bp, synthetic construct
  misc_feature 1..591: note = Description of Artificial Sequence: Synthetic coding sequence
  source 1..591: mol_type = other DNA
atgatcatcgtggcccacgtgctgctgatcctgctgggcgccaccgagattctccaggctgacctcctgccagatgagaagatcagcctactgccgcccgtgaatttcacaattaaagttacaggcctggcccaggtgctattacagtggaaacctaatcctgatcaggagcagaggaacgtgaatttagaatatcaagtgaaaattaatgctcctaaggaggacgactacgagacccgcatcacagagagcaagtgtgtgactattcttcacaagggatttagcgcctctgtgcggactatcctgcagaatgatcactcccttctggcttctagctgggccagtgccgagctgcatgcgcctcctgggtccccagggacaagcatagtcaatctaacgtgtaccaccaacacaacggaggacaactacagtaggctcagaagttatcaagtaagtctgcactgtacctggcttgtaggcactgatgcacctgaagacacgcagtacttcctgtattacagatatgggagctggactgaagagtgccaggagtactccaaggacacactggggcgcaatattgcctgctag

SEQ ID NO: 191856 - DNA, 636 bp, synthetic construct
  misc_feature 1..636: note = Description of Artificial Sequence: Synthetic coding sequence
  source 1..636: mol_type = other DNA
atgatcatcgtggcccacgtgctgctgatcctgctgggcgccaccgagatccttcaggcagatctcctgcctgatgagaagataagcctgctccccccggtcaatttcacgattaaggtgactggactggcccaggtcctgctccagtggaaaccaaatcctgaccaggagcagcgcaacgtgaatttggaataccaggtaaagataaacgcccccaaagaagatgactacgagaccaggatcaccgagtctaaatgcgtcaccatcctgcataaggggttctcggcgtccgtgcgtaccattctgcagaatgatcatagcttactcgcttcatcatgggcctcggcggagctgcacgctcctccggggaatgatgagcacaaacccctcagggagtggtttgttattgtgatcatggcaaccatctgctttatattattgattctgtcactcatttgcaagatttgtcacctgtggattaaactgttcccccctattcccgccccgaagtccaacataaaggacttgttcgtgactaccaactatgagaaggcaggtagctccgagaccgaaattgaggtaatatgctacatcgagaaaccgggggtagaaactcttgaagactccgtgttttag

SEQ ID NO: 191857 - DNA, 1263 bp, synthetic construct
  misc_feature 1..1263: note = Description of Artificial Sequence: Synthetic coding sequence
  source 1..1263: mol_type = other DNA
atgatcatcgtggcccacgtgctgctgatcctgctgggcgccaccgagattctgcaagctgacttactgccagacgaaaagatctcattactccctcccgtgaacttcactattaaggtcacgggccttgcgcaggttctcctgcagtggaagcccaatccagatcaggaacagcggaatgtgaatctcgaataccaggtaaagattaacgccccgaaagaagacgactatgagactaggattactgaaagtaagtgcgtgaccattcttcataaaggtttcagtgcttccgtgaggaccattctccagaacgaccacagtcttctggcttcctcatgggcgtcagctgagctgcacgctccccctggcagcccagggacgagtatcgtgaacctcacatgcacaactaacacgacggaagacaattattccaggctgcgaagttaccaggtaagtctccattgcacatggctcgtgggtacggacgcacctgaggacactcagtattttctgtattacagatatggatcgtggaccgaggaatgtcaggaatacagcaaggacaccctgggacgtaacatagcctgttggttcccgcggaccttcattctgtccaagggccgggattggctggctgttctagtgaatgggtcttctaagcactccgccatccgaccttttgatcaactcttcgccctgcacgccatcgaccagataaacccgccgctgaatgtcaccgccgagatagaaggaaccagattgtcaatccaatgggagaagccagtctcggcttttcccattcattgtttcgactacgaggtgaagatacacaacacaaggaatggctatctgcagatcgagaaactgatgactaatgcattcatatccataattgacgatctctcaaagtacgatgtacaggtaagggccgcggtgtcaagcatgtgcagagaagctggcctgtggtccgaatggtcccagcccatctacgtcgggaatgatgagcacaagccactacgcgagtggtttgtcatagtgattatggctacgatctgttttattctgctaattctgtcactgatctgtaagatctgtcacttgtggattaaactgtttcccccaatccctgcacctaaaagcaacataaaggatttattcgtaacaaccaactatgagaaagccgggtcctctgagaccgagattgaggtcatctgttatatcgagaaacctggcgtggagacactggaagattcggtgttctag

SEQ ID NO: 191858 - DNA, 1002 bp, synthetic construct
  misc_feature 1..1002: note = Description of Artificial Sequence: Synthetic coding sequence
  source 1..1002: mol_type = other DNA
atgatcatcgtggcccacgtgctgctgatcctgctgggcgccaccgagattttgcaggcagacctgctacctgatgagaaaatttcactcttacctccagttaacttcacaattaaagtgaccggcctggcacaagtgttgttgcagtggaaacccaaccccgaccaggagcaacgcaatgtgaacctagaatatcaagtgaaaattaatgcgcctaaagaagacgattacgagacacggatcacggagagtaagtgtgtaaccattctacacaaaggattctctgcaagcgtccgtaccatcctccagaatgaccattccttgctggctagcagctgggccagcgccgaactccatgccccccccggcagccccggaaccagcatcgtgaacctgacgtgcactaccaacacgaccgaggataattactcccgcctccgtagctatcaggtgtccctgcactgcacctggcttgttggcactgacgcaccggaggatacacagtacttcctttattaccgttacggctcatggacagaggagtgccaagagtattccaaagatacattgggacgaaacatagcctgttggttccctaggacatttattttgagtaagggtagggattggcttgcagtgttagtaaacggctccagcaagcatagtgctattcgcccatttgatcagttgttcgcattacatgctattgaccagattaacccaccacttaatgtgaccgctgagattgagggcacaagactcagtatacaatgggaaaaacctgtgtccgctttcccaattcactgcttcgattatgaggttaaaattcataacacacggaatggatacctgcagattgaaaagctgatgaccaacgcatttatctcgatcatcgacgacttgtcgaaatatgatgtgcaggtacgagctgcagtgtccagcatgtgcagggaggcaggactctggtcggagtggtcgcaacccatctacgtgggaaagtag

SEQ ID NO: 191859 - DNA, 1098 bp, synthetic construct
  misc_feature 1..1098: note = Description of Artificial Sequence: Synthetic coding sequence
  source 1..1098: mol_type = other DNA
atgctggccgtgggctgcgccctgctggccgccctgctggccgcccccggggcggctctagccccacgaagatgccccgcccaggaggtagccagaggggtgctcactagcctgcctggggactccgtgacactcacttgtccaggcgttgagccggaggataatgccacggttcattgggtccttagaaagccagccgctggctcacatcctagtaggtgggcagggatgggtaggaggctgttgctccgtagcgtgcagctgcatgattccggaaattacagctgctatagggcaggccgtccggctggtaccgtccacctcctggtggacgttccccctgaagaaccccagctttcctgcttccggaagagcccgttatctaatgtggtttgcgagtggggtccgcggtcaacccccagcctgaccactaaggcggttttgctcgttcggaaattccaaaacagcccggctgaggactttcaagagccctgccagtactcccaagaatcacagaagttttcttgtcaactggctgtccccgagggggactctagcttctatatcgtgtccatgtgtgtcgcctccagcgtaggctctaagttttctaaaacacagaccttccagggctgtggcattcttcagcctgacccacccgcgaacattactgtgaccgctgtcgcacggaatccacgttggctgtcagtcacatggcaggacccacatagttggaattccagtttctataggctccggtttgagcttaggtacagggctgagcgaagcaaaacgttcacaacctggatggtgaaagacctgcagcatcattgtgtgatccacgacgcctggtcagggcttaggcacgtagtgcagttacgcgcccaggaggaattcggccagggagaatggtctgagtggagcccagaagccatggggaccccgtggaccgaaagtaggagccccccagcagaaaatgaggtgtccacccccatgcaggcccttactactaataaggacgacgataatatcttgtttagggattctgcaaatgctacttctctccctggtagcaggcgaagaggcagctgtgggctgtag

SEQ ID NO: 191860 - DNA, 1407 bp, synthetic construct
  misc_feature 1..1407: note = Description of Artificial Sequence: Synthetic coding sequence
  source 1..1407: mol_type = other DNA
atgctggccgtgggctgcgccctgctggccgccctgctggccgcccccggggcagccctggctccaaggaggtgccccgcccaggaggtggccaggggggtgcttacaagcttgccaggtgactctgttacactcacctgccctggggtggagccagaggacaacgcgacagtacattgggtcttacgcaagcctgcagccggttctcatccttcgcgatgggcggggatgggccggcgcctgttgctacgcagcgtgcagctccacgatagcggcaattatagctgttatagagccgggaggcctgcaggtacagtgcacctgctggtggatgtgccccctgaagagccccagctctcctgttttcgcaagagccccctttctaatgtggtctgcgagtggggacctcggtcaactccaagtctgacaactaaggcggtcctgttagtccgcaaatttcagaactctccagccgaggactttcaggagccttgtcagtacagccaagagagccagaagttttcctgccagctcgctgtgccagaaggtgatagcagtttctacattgtgtcaatgtgcgtggccagctccgttggatctaagtttagcaagactcagacgttccagggatgtggtattctgcaacccgacccacccgccaacatcaccgtaacagcggtggccagaaatccccgctggttgtctgtgacgtggcaagacccgcactcctggaacagctctttttacagattgcgcttcgagctaaggtacagggcggagcggagtaagacctttaccacatggatggtgaaagacttacagcatcattgtgtgatccacgacgcctggtccggccttcgccacgtggttcagttaagggcccaggaggaattcggacagggcgaatggagcgaatggtcacctgaagctatgggcacgccatggacggagagtagatcacctccagccgaaaatgaggtaagcacaccaatgcaggctctcaccacaaacaaagacgatgacaacatcttgtttcgcgactccgcaaacgccacaagcctgcccgttcaggattcctcttccgtgccactgccaaccttcttagtcgccggaggaagcctggcctttgggacattattatgcatcgccatcgttctgcggtttaagaaaacatggaagctacgcgcgctcaaagagggaaagacaagtatgcatccaccttatagcctcggacaactagtgcctgagcggccacgacctacaccagttctcgtgcctctcatctccccacctgtgagccccagcagtctggggtccgacaacacatctagccacaaccgtcctgacgcaagagacccaaggagcccctatgacattagcaacactgattacttctttccgaggtag

SEQ ID NO: 191861 - DNA, 2757 bp, synthetic construct
  misc_feature 1..2757: note = Description of Artificial Sequence: Synthetic coding sequence
  source 1..2757: mol_type = other DNA
atgctgaccctgcagacctggctggtgcaggccctgttcatcttcctcaccacagaatccaccggcgagctgttagatccttgcggttatatcagccccgagtctcctgtggtgcagttacatagtaacttcaccgctgtgtgtgtgctgaaggaaaaatgcatggactattttcacgtcaatgctaattacattgtgtggaagactaaccatttcactatcccaaaagagcaatatactattatcaaccggaccgcctcctccgtgacgtttaccgacatcgccagtcttaatatacaactcacatgtaacatcctgacatttggccagcttgaacaaaatgtgtacggtattaccatcataagcgggctgcccccagaaaaaccaaagaacttatcgtgcatcgtcaatgaaggtaaaaaaatgagatgtgagtgggacggcggtagagaaacacatttagagaccaactttacattgaaatccgaatgggcgactcacaagtttgctgactgtaaggccaagcgcgatacacccacttcctgcacggttgactactccacagtttacttcgtgaatatagaggtctgggtagaggctgaaaatgcccttgggaaggtgactagcgaccatatcaatttcgatccagtgtacaaggtgaagcccaatcctccccacaacctcagcgtgatcaactctgaggagttatccagtattctcaaactcacctggacgaacccttcaatcaaaagcgtgatcatcttgaagtacaatatacagtatcgaacaaaggatgctagcacttggtcgcaaatcccacctgaagacacggctagcacacggtcgagcttcacagtgcaggacctgaagccatttacagagtacgtcttccgaattcgctgcatgaaagaagacggaaaaggttattggtccgactggagcgaagaagcttccggtatcacatatgaagacaggccttcaaaggctccctccttctggtataagatcgacccttctcatacccagggttacaggaccgtacagcttgtgtggaaaacattacctcccttcgaagccaacggcaagatccttgattacgaggtgacactgaccagatggaaaagccatctacagaactatacagtcaacgctacaaaactcacagtcaaccttactaatgacaggtatttagctactctgaccgtgaggaatttggtcggcaaatctgacgctgccgttctgactatacccgcttgtgactttcaggctacacacccagtgatggatctcaaagccttccccaaagataacatgctttgggtggaatggacgacgccccgggagtctgtgaaaaagtacattctagaatggtgcgttctgagcgacaaggcaccatgcattaccgattggcaacaggaggatgggacggtgcaccgcacatacctgagaggtaacttggcagaaagtaaatgttacttgatcaccgtaacgcccgtgtacgccgacggtcccggcagcccggaaagcatcaaggcatatcttaagcaggctcctccctcgaaaggccctaccgtcagaaccaagaaagtaggaaaaaatgaagccgtgcttgagtgggatcagctacccgtggacgtacagaacggtttcatccgcaattacactatcttctaccgtaccataatcggcaacgagaccgccgtgaacgttgacagcagccacactgaatatacactgtcctccctgacctccgacaccctctatatggtgcgaatggcagcatacacagatgaaggcggaaaagacggtcccgagttcacgttcactacaccaaagtttgctcagggcgagatagaggccatcgtggtgcctgtatgccttgcctttctcctcacaacactcctcggtgtcttgttctgtttcaacaagagagatttgattaagaaacatatatggcctaacgttccggaccccagcaagtctcatattgctcagtggagtccgcatacaccaccacgccataacttcaatagcaaagatcagatgtatagtgacggtaattttaccgacgtcagtgttgtcgagatcgaggctaatgataaaaagcccttcccagaggacttgaaaagccttgatttattcaaaaaagagaagatcaacaccgaaggccacagctctggaattggaggttctagttgcatgagctccagcagaccttccatctcatcgagtgacgaaaacgagagttcacaaaacacatctagcactgtccagtactcaaccgtcgtgcatagtggctataggcaccaggtccctagcgtgcaggtcttttctagatccgagtccactcagcccctgctggactctgaagagcgtcccgaagacttacagctggtcgatcacgtcgacggcggagatggtattctgcccagacagcagtactttaaacagaattgctctcagcacgaatcatccccagacatttcacacttcgagaggagcaaacaggtttcctctgtgaacgaagaggacttcgtgcgattaaaacaacagataagtgaccacatctcgcagtcatgtggttcaggtcagatgaagatgtttcaagaagtgagcgccgcggacgcatttggccctggcacagaggggcaagtagagaggttcgagacggtgggcatggaggctgccaccgacgaggggatgccaaaaagttacctaccccagaccgtcaggcaaggggggtacatgccccagtag

SEQ ID NO: 191862 - DNA, 990 bp, synthetic construct
  misc_feature 1..990: note = Description of Artificial Sequence: Synthetic coding sequence
  source 1..990: mol_type = other DNA
atgctgaccctgcagacctggctggtgcaggccctgttcatcttcctaaccacggagagcacaggcgagctgctggatccctgcggctacatttcccccgagagcccagtggttcagctacatagcaactttacggccgtctgcgtgctgaaagaaaaatgtatggattatttccacgtcaacgcaaattacatagtctggaaaactaatcatttcaccatacccaaagaacagtacaccattattaatcgcacggcctctagcgtcaccttcactgacatagccagtctgaatatacaactgacatgtaacatcctgacctttggacaattagaacagaatgtctacgggataacaattatttctgggctgccccctgaaaaacccaaaaatctctcatgcatcgtaaacgaaggaaagaaaatgcgttgtgaatgggacggaggacgtgaaacccacttggagactaattttaccctgaagtcagagtgggccacgcataaatttgccgattgtaaggccaagagggacactcccacgtcttgcaccgtggattattccacagtgtattttgttaacatagaagtgtgggtggaagctgaaaatgctctgggtaaagtgactagcgaccatattaatttcgatcccgtgtataaagtgaaaccaaatcctccccacaatctcagtgtgatcaatagcgaagaactgagtagcattctgaagcttacttggaccaatccaagtatcaagtcagtgatcatactgaaatacaacattcagtatcgcactaaggatgcatctacatggtcccagatacctccagaggatacggcttctactaggtccagttttacagtgcaggatctgaagcccttcacggaatatgtattcagaattcgatgcatgaaggaggacgggaagggatactggtcggactggagcgaggaggcgtcgggtataacatacgaggataatatcgcctcattttag

SEQ ID NO: 191863 - DNA, 2574 bp, synthetic construct
  misc_feature 1..2574: note = Description of Artificial Sequence: Synthetic coding sequence
  source 1..2574: mol_type = other DNA
atgctgaccctgcagacctggctggtgcaggccctgttcatcttcctgactaccgaaagtacaggagagctgctggacccttgtgggtatatttctccagagtctcctgttgtccagttgcactctaattttacagctgtgtgtgtattaaaggagaagtgtatggattactttcacgtcaacgcaaactacattgtgtggaaaacaaatcattttaccattccaaaggagcagtatactatcattaatagaaccgccagctctgttacttttacggatatagcctctctgaatatccagttgacttgcaacatcctgacattcggccagctggaacagaatgtctacggtattacaatcattagcgggctgccacccgagaagccaaagaacctgagttgtatcgtaaacgaagggaaaaagatgcggtgcgaatgggatggcggacgggagacccacttggaaacaaactttacgctgaaaagcgagtgggcgactcacaaatttgcagactgtaaagccaaacgggatacacctaccagctgtacggttgattatagcaccgtttactttgtgaacatcgaggtgtgggtcgaagccgagaatgctctgggaaaggtgacatccgaccatatcaattttgaccctgtttataaagtgaagcccaaccctccacacaatctctctgttatcaacagtgaagagctttcctcaattttaaagcttacatggaccaatcccagtattaagtccgtgattatcctcaaatataacatccagtacaggactaaggatgctagcacatggagccagatccctcccgaggataccgcaagtacacgtagctcatttaccgtgcaggacctgaagccgttcactgagtacgtgtttcgaataagatgcatgaaagaggatggcaagggatattggtccgactggagcgaagaggcctcaggcattacatatgaggataggccttcgaaggcgcctagtttttggtacaaaatcgacccatcacatacccaggggtacagaacagtgcagttggtgtggaaaactctccccccttttgaggcgaacggaaaaattttggattatgaggtgactcttactaggtggaaatcgcatctgcagaactacaccgtaaatgcgaccaaactgactgttaacctgacaaatgatcgctacctagctacactgactgtgagaaacctggtcgggaagagcgatgctgccgtcttgaccataccagcttgcgacttccagggtaatttggcagaaagtaagtgttacttgattactgtgactcccgtatatgcagatggtcctggatctccagaaagcattaaggcctacttgaaacaagcacccccttctaaggggccaacagtaagaaccaaaaaagtcggcaagaatgaggctgtgctggagtgggatcagctgccagtcgacgtgcagaacggatttataagaaattataccatattctaccgcacgattatagggaacgagacagctgtgaatgttgacagttcgcatactgaatatacactgagctctctcacgagtgataccctgtatatggtcaggatggctgcttatacagatgaaggaggcaaggatgggcccgagtttacattcacgactcctaagttcgctcaaggggaaatcgaggccatcgtggtccccgtatgcttggcctttctcctgactactctgctgggagtgcttttttgctttaataaacgggacctgatcaaaaaacatatttggcccaacgtgccagatccctcgaagtctcatatagctcagtggtctccccatactccaccgcgacacaactttaatagcaaggatcaaatgtactcagatgggaatttcactgatgtgagcgtcgttgagatcgaggcaaatgataaaaagcccttccctgaagacctaaagtccctagatttattcaagaaagagaagatcaacaccgagggccattcgtcgggaataggcggctcttcttgcatgagttcttcccgcccatcaatttcaagctctgatgaaaatgagtcctcacagaacacatcctccactgtgcaatatagcaccgtagtccattcagggtatcggcaccaggtcccatccgtgcaggtgtttagtcggtccgagagcacacagcctttactcgacagcgaggaacggccagaggacctccaactcgtcgaccatgtggacggcggcgatggcatcctcccgcgacaacagtactttaagcagaactgctctcagcatgagagttctccagatatcagccacttcgagagatccaaacaggtctccagtgtcaacgaagaagacttcgtgcggctgaaacagcaaatctcagatcacatctctcagtcatgtggctccgggcagatgaaaatgttccaggaggttagcgccgccgacgctttcggtcctgggaccgagggccaggtggaaagattcgagaccgtgggaatggaagccgctaccgacgagggcatgcccaagagctatctaccgcagactgtgcgccagggggggtacatgccgcagtag

SEQ ID NO: 191864 - DNA, 2757 bp, synthetic construct
  misc_feature 1..2757: note = Description of Artificial Sequence: Synthetic coding sequence
  source 1..2757: mol_type = other DNA
atgctgaccctgcagacctggctggtgcaggccctgttcatcttcctcacgacagaaagcactggggagctactagacccctgtggatatatctctcccgagagtccagtcgtgcagttacacagcaacttcactgcagtgtgtgtgttgaaagagaagtgtatggattacttccacgtcaatgccaattatatcgtgtggaagacgaatcacttcactattccaaaggagcagtacaccattatcaacagaactgcgtcatccgtgacctttaccgatattgccagtttaaacattcagctgacatgtaatatccttactttcggtcaattggagcagaatgtttacgggatcactataatctctggcttacctccagagaaaccaaagaacctgtcatgtatagtgaacgaaggaaagaagatgaggtgcgagtgggatggtgggcgggaaacccacctggaaacaaacttcactttaaagagcgagtgggccacccataaattcgcagactgcaaggctaagagggataccccaacctcatgcacagtggactactcaaccgtctactttgtgaatatcgaggtttgggtcgaggcggagaatgccttgggcaaggtaaccagcgaccatatcaattttgaccctgtctataaggtgaagcctaatccacctcacaacctgagcgttatcaatagtgaagaactgtcttccattctgaaactgacatggaccaacccgtccatcaaaagtgtgattattctgaaatacaatatacaatacagaacaaaggacgcatctacctggagccagatccccccagaagacactgcctccacccgatcctcctttaccgtgcaggatcttaagccttttactgaatacgttttcagaatcagatgtatgaaggaagacggaaaggggtattggtccgattggtcggaggaagctagcggaattacatatgaggacaggccgtccaaggcccctagtttttggtacaagattgacccttcacatacccaagggtatcgcactgtccagttggtatggaaaaccctgcccccctttgaagctaacggtaagatcttggactacgaggtcactctgaccagatggaagtcgcatctgcagaactacaccgtgaacgcgacaaaattgactgtcaatctcacaaacgatcgatatctcgcaacactaacagtccggaatctcgttggcaagagcgacgccgcagtactcaccatccctgcatgtgatttccaggctactcaccctgtcatggacctgaaggcttttcccaaagataatatgttatgggtggagtggaccacccctcgggagagtgtcaaaaagtatattctcgaatggtgcgtcctgtctgacaaggcaccttgtattaccgattggcaacaagaggatgggactgtgcaccggacttaccttagaggtaatctggccgagtctaagtgctacctaattacagtgactccagtgtatgccgatggacccggctctccggaatccatcaaagcttatctgaaacaggctccaccaagcaagggccctaccgtccgtaccaaaaaagtgggaaaaaatgaggctgtcctggagtgggaccagctgcccgtagatgtgcagaatggattcatcaggaactatacaattttctataggactataatcggaaatgaaaccgctgtgaatgttgattccagtcataccgaatacacactatccagcctgacttctgataccctttacatggtgcgaatggccgcctacactgacgagggtggcaaggatggacccgagtttacattcacaacgccaaagtttgcccagggcgaaattgaggccatcgtggtgcccgtctgtttagcattcttgttaacaacacttcttggagtcctgttttgttttaacaagagagacctaattaagaaacacatatggccgaacgtgccggatccaagcaagagccatatcgcacagtggagccctcacactcccccccgacacaacttcaattccaaggaccagatgtacagcgatggcaactttaccgacgtgtccgtggttgaaatagaggctaacgacaaaaaaccatttcctgaagatctgaaatctctggatctgttcaaaaaggaaaaaatcaacaccgaagggcattcctcaggaataggcggttctagttgcatgagctcctcgaggcctagcatcagttcatccgacgagaacgagtcatctcagaatacctcaagcaccgtgcagtatagtactgtggtgcatagcgggtatcgacaccaggttccgagtgtgcaggtgttctctagaagcgaaagcacccaacctctcctcgacagcgaggaaaggcccgaggacttacaactggtagaccatgtggatggaggcgatggcatcctgccaaggcaacagtacttcaaacagaactgctcacaacacgaatcatcgccagacatcagccactttgaacgctccaaacaggtaagtagtgtgaatgaggaggacttcgtccgcctgaagcagcagataagcgaccacatctcccagtcctgtggaagcggccagatgaagatgtttcaagaagtttccgcagctgacgctttcggacccggtacagaagggcaggtggagcgcttcgagacagtgggcatggaggccgccaccgatgaaggcatgccaaagtcttacctgcctcagacagtgcgccagggcgggtacatgccgcagtag

SEQ ID NO: 191865 - DNA, 990 bp, synthetic construct
  misc_feature 1..990: note = Description of Artificial Sequence: Synthetic coding sequence
  source 1..990: mol_type = other DNA
atgctgaccctgcagacctggctggtgcaggccctgttcatcttcctgactacggagagtaccggggagctactcgacccgtgcggttatattagccccgagtctcccgtagtccagctccactcaaacttcacagccgtgtgtgttcttaaggaaaagtgcatggactacttccatgtcaacgcaaactatatcgtttggaagaccaatcattttaccattccgaaagaacagtacacaataatcaaccgaaccgcttcctccgtgacattcactgatatcgcctctttgaacatacaactcacatgcaatatcctgacttttgggcagctagagcagaatgtctacggtattaccatcattagtggactaccacccgagaagcctaaaaacctgtcctgcatcgtgaatgagggaaaaaagatgcgctgtgaatgggacggtggcagggagacccacttagagactaattttactctcaagtccgaatgggctacacataagtttgcggactgtaaggctaagagggatacaccaactagttgtactgtggactacagcaccgtttattttgtgaatattgaggtgtgggtcgaggcggaaaacgcgttagggaaggtgacctctgatcacataaactttgaccccgtgtacaaagtaaaaccaaatccgccacacaacctgtctgtcatcaactcagaggagttaagtagtattctcaaactgacttggacaaatccttctatcaagagcgtgattatcctaaaatacaatattcaataccggacaaaagatgcctccacgtggagtcagatcccacccgaagatacggcttcaaccagaagttcctttactgttcaagacctaaagccctttaccgagtacgtattccggatccgctgcatgaaggaagatggcaagggatattggtccgattggagcgaggaggccagcggtatcacttatgaggataacatcgccagcttctag

SEQ ID NO: 191866 - DNA, 990 bp, synthetic construct
  misc_feature 1..990: note = Description of Artificial Sequence: Synthetic coding sequence
  source 1..990: mol_type = other DNA
atgctgaccctgcagacctggctggtgcaggccctgttcatcttcttgacgacggagagcacgggggaattgctggatccctgcggttacatcagccccgagagtcccgtcgtgcagctccatagcaattttaccgcggtgtgcgtgcttaaagagaaatgcatggactacttccacgttaacgccaactacattgtatggaaaacaaaccatttcaccattccaaaggaacagtacactattatcaatagaaccgcctcaagcgttaccttcactgatatcgccagcctaaacattcaattaacgtgtaatatcttaaccttcggtcagttggagcagaatgtgtacgggattaccatcatttccgggctgccacccgagaagccaaagaacttgagctgtatagtaaatgagggcaagaagatgaggtgcgaatgggatggggggcgggagactcaccttgaaaccaactttactttgaagtcagagtgggctacacacaagtttgccgactgcaaggccaagagggacacccccacatcatgtactgtggattactccactgtgtatttcgtgaacattgaggtttgggtcgaggccgaaaacgcactgggaaaagtaactagcgaccacatcaacttcgacccagtgtacaaagtgaaacccaaccctccccataatctgagcgtgatcaacagtgaggaactgtctagcatcctgaagttaacttggaccaatcctagtatcaaaagtgtgatcatactgaaatacaacatacagtatagaacaaaggatgcgtctacctggagtcaaatcccgccagaggatactgcaagcaccaggtcgtcattcactgttcaggacctgaagccctttaccgaatatgtctttcgaatcaggtgtatgaaagaggacggtaagggatactggtctgactggtccgaggaagcatcaggcataacatacgaagacaacatcgctagtttctag

SEQ ID NO: 191867 - DNA, 990 bp, synthetic construct
  misc_feature 1..990: note = Description of Artificial Sequence: Synthetic coding sequence
  source 1..990: mol_type = other DNA
atgctgaccctgcagacctggctggtgcaggccctgttcatcttcctcacaacagaatccactggcgaattactggacccgtgtggatacatcagcccagaaagtcccgttgtgcagttgcactcgaatttcactgctgtgtgcgtgttaaaggaaaagtgcatggactactttcacgtcaacgccaattacatcgtatggaaaactaaccacttcacaatacctaaagagcagtatacgatcatcaatagaacggcgagcagtgtcacgtttacagatatcgcgagcctaaacatccagctaacatgtaacatactgacattcggacagctggaacagaacgtatacggtattaccataatctccggactgcctcctgagaagccaaagaatctgtcttgcatcgttaacgagggtaagaagatgcggtgcgagtgggacggcggacgggaaacgcatctggagacaaattttaccctaaagagtgagtgggccacacacaagtttgccgattgcaaggccaagcgggacactccaacttcttgcacagttgattatagcacagtgtattttgttaatattgaggtatgggtcgaggccgagaatgctctcgggaaagtgacctccgaccacatcaatttcgacccggtatataaggtaaagcccaaccccccccacaatctgagcgttattaatagtgaggagctgtcctctattctgaagcttacatggactaatccctctattaagtcggtaattattctgaagtacaatattcagtatagaaccaaggatgcctctacctggtctcagattccacctgaagacaccgcctcaaccaggagcagcttcaccgtacaggatttgaaaccctttaccgaatacgtttttcggatacgctgcatgaaggaagacggcaaaggatactggtcagactggtccgaggaggcttcagggattacctacgaagacaccatttttagtttttag

SEQ ID NO: 191868 - DNA, 1380 bp, synthetic construct
  misc_feature 1..1380: note = Description of Artificial Sequence: Synthetic coding sequence
  source 1..1380: mol_type = other DNA
atgaccatcctgggcaccaccttcggcatggtgttcagcctgctgcaggtcgtaagcggcgaatctggatacgctcaaaacggtgatctcgaggatgccgagctcgatgattactctttttcatgctactcccaactggaggtcaacggctctcagcactctctcacttgtgcttttgaagacccagacgtgaatatcacaaatttagaatttgaaatctgtggcgctcttgttgaagtgaagtgcctgaatttcaggaagctgcaggagatttatttcattgagaccaaaaaatttctccttatcgggaagagtaatatttgtgttaaggtgggtgagaagtcgcttacttgtaaaaagatcgatctcaccacaatagtaaaaccagaggcccctttcgatctgagcgtggtgtatcgagaaggcgctaacgatttcgtggtaacatttaacacttctcatcttcagaagaaatatgtgaaagtgctcatgcacgacgtggcgtatagacaggaaaaggatgagaacaaatggactcatgtgaacctgtcatccacaaaactgactttgttacaacgaaaattacaacccgctgctatgtacgaaatcaaagttaggtctatccctgaccactacttcaaaggcttttggagcgagtggagcccctcctactatttccgcacacccgagataaacaacagtagtggtgagatggacccaatccttttaaccatttctattttaagtttctttagcgttgcactgttggtgatcctggcctgtgttctgtggaagaagcggattaagccaatcgtctggccttccctgcctgaccacaaaaagactttggagcacctgtgcaagaagccacgcaagaacttaaacgtatctttcaatcccgagtcctttctggattgccagattcatagggtagatgacattcaagcaagggatgaagtcgaaggcttcctgcaagacacatttccccagcaactggaggaatctgagaagcagaggctgggaggtgatgtgcagtctcctaattgtccaagtgaagacgtagtgattacccctgaatcatttgggcgcgactcaagcctgacctgtctggccggtaatgtttccgcctgtgacgccccaatcctatcttcctcaagatccttagattgtcgcgagtcaggcaaaaatggaccacacgtctaccaggacctactcctgtcgctgggcactacaaactctaccctacccccgcccttctctcttcagagcgggatacttaccctgaatccagtggcccagggacagcccattttgacttcactcggttcgaatcaagaggaagcgtatgttaccatgtcctccttctaccagaatcagtag

SEQ ID NO: 191869 - DNA, 789 bp, synthetic construct
  misc_feature 1..789: note = Description of Artificial Sequence: Synthetic coding sequence
  source 1..789: mol_type = other DNA
atgaccatcctgggcaccaccttcggcatggtgttcagcctgctgcaggttgtgtccggcgagtcaggctatgctcaaaatggagatttggaagacgcggagctagatgactacagcttcagctgctattctcagttggaagttaatggaagccagcattccctgacatgcgcgtttgaggatccagatgtgaatatcaccaatctggagtttgaaatatgtggtgccctcgtggaagtgaagtgtctgaattttcgcaagctccaagaaatctatttcattgagaccaaaaaatttttgctaatagggaagagcaatatttgtgtcaaagtgggcgagaagtctctaacatgcaagaagattgatctgacaacaatcgtcaagcccgaggccccctttgatctatccgtggtgtatcgagagggcgccaacgactttgtcgtgacatttaatacctcgcatctgcagaagaaatatgtgaaggtgctgatgcacgatgtggcttatcgacaagagaaagacgagaacaagtggacacacgtcaacctaagtagcaccaaacttacactgctacaacgcaagcttcagcccgctgctatgtacgaaatcaaggtcagatccatccctgaccattattttaaggggttctggtccgagtggtccccatcctattattttaggacacccgaaatcaataattccagcggactgagtctgtcctacggacccgtgagtccaataatcagacggttgtggaacatcttcgtgcgcaatcaagaaaaaatctag

SEQ ID NO: 191870 - DNA, 786 bp, synthetic construct
  misc_feature 1..786: note = Description of Artificial Sequence: Synthetic coding sequence
  source 1..786: mol_type = other DNA
atgaccatcctgggcaccaccttcggcatggtgttcagcctgctgcaggtggtttcaggggagtcaggctacgctcagaacggtgacctggaagacgccgagctcgacgactattctttctcctgctattctcagcttgaggtgaatgggtcccaacacagtctgacttgtgcctttgaggaccctgatgtgaatatcacaaacctcgaattcgaaatctgcggcgctctggtcgaggtcaaatgcttgaacttcaggaagctgcaggagatttacttcattgaaactaagaaattcctgctcatcgggaaaagtaacatttgtgttaaagttggagagaagtctctgacctgcaagaaaatcgacctcacgaccatcgtgaagcccgaagcacccttcgacctctcagtggtctatagggagggcgcgaatgattttgtcgtaacattcaataccagccacctgcagaaaaagtacgtcaaggtcctgatgcacgatgtcgcttacaggcaggagaaggatgagaataagtggacccacgtgaatctgagcagcacaaaacttaccttactccagagaaagcttcagcctgcggcgatgtatgagataaaggtgagatctatacctgaccactattttaagggcttttggtccgagtggtccccttcgtactacttcagaacacccgagatcaacaacagcagtggactgtctctgtcctatgggcccgtgagtcctatcatacgcagactctggaacattttcgtccgaaaccaggaaaagtag

SEQ ID NO: 191871 - DNA, 180 bp, synthetic construct
  misc_feature 1..180: note = Description of Artificial Sequence: Synthetic coding sequence
  source 1..180: mol_type = other DNA
atgaccatcctgggcaccaccttcggcatggtgttcagcctgctgcaggtcgtgagcggggagtctggttatgcgcaaaacggcgaccttgaggatgcagagttggacgactacagcttctcctgttactcccaattagaggtgaacgggtcccagcactccctcacctgtgcattttag

SEQ ID NO: 191872 - DNA, 159 bp, synthetic construct
  misc_feature 1..159: note = Description of Artificial Sequence: Synthetic coding sequence
  source 1..159: mol_type = other DNA
atgaccatcctgggcaccaccttcggcatggtgttcagcctgctgcaggttgtgtctggggagagtggttatgcacaaaacggagatctggaggacgccgaactcgacgattactccttcagctgttactctcaactcgaagtgaatggctcgcagtag

SEQ ID NO: 191873 - DNA, 1566 bp, synthetic construct
  misc_feature 1..1566: note = Description of Artificial Sequence: Synthetic coding sequence
  source 1..1566: mol_type = other DNA
atgggcctgggccggtgcatctgggagggctggaccctggagagcgaagctcttaggagagacatgggcacatggcttctggcctgtatttgcatctgcacatgcgtctgtctcggggttagtgtgactggggaaggccagggcccacggagccggaccttcacatgtctgacaaacaatatccttaggattgactgccactggagcgccccagaacttggacaggggtcttccccttggttgctctttacatcgaaccaggcccctggaggaactcataaatgcattcttcgggggagtgaatgcacggtggttctaccacccgaagccgttttagttccctcagataatttcactatcacctttcaccactgtatgtccgggcgcgaacaggtgagcctcgtcgatcctgagtacctgcccagacgccacgtcaagctggacccaccatctgacctgcagtcaaacataagcagtgggcactgtatcctgacctggtctatatctccggccctggaacccatgacgacgcttcttagctacgaactggcctttaaaaaacaggaagaggcctgggagcaggcccagcatcgcgatcacattgtaggcgtgacttggttaatcctcgaggcattcgagttagacccgggctttatccatgaggcccgtcttagagtgcagatggctaccctggaggacgacgtcgtcgaagaggaacgctacactggtcaatggtccgagtggtcccagccagtttgttttcaggccccacagcggcagggccctttgatcccaccatggggatggcccggtaataccctcgttgcagtgtccatttttctcctgctgacaggaccaacctatctcctctttaagctgagcccgcgggtcaaaagaattttctatcagaacgtgccctctccggctatgttcttccagcccctgtattccgtgcacaatggtaatttccagacctggatgggcgcccacggcgctggggtccttctgtcccaggattgcgcaggaacaccgcagggggccctggagccttgcgtgcaggaagcgaccgcactgctgacatgcggccccgccagaccttggaagagcgtcgctcttgaagaggaacaggaggggcctggaacgcggctgcccgggaatctgtcgtccgaggacgtcttgccagccggatgtaccgagtggcgggttcagacactggcctacctgcctcaagaagattgggcccccacgtcactcacccgccccgcaccgcccgatagcgagggcagtaggtctagcagcagtagctctagtagcaacaataacaattattgtgctctgggatgttacggaggttggcacttgtctgcactcccagggaatacacagagttccgggccgatccctgccctagcctgcggcctgtcttgtgaccaccaaggacttgaaactcaacagggcgtcgcctgggttttagccgggcattgtcagagaccaggccttcatgaggacctacagggaatgctgctgccgtccgtgctttctaaagcaagaagttggactttctag

SEQ ID NO: 191874 - DNA, 1029 bp, synthetic construct
  misc_feature 1..1029: note = Description of Artificial Sequence: Synthetic coding sequence
  source 1..1029: mol_type = other DNA
atgccccagacctgcgacggcaccggccagatgcacctgggcagcaattgctgcaaaaatgggcagacgcttttgcaacgcacttgtcacggcgtgagttgctgcggctggtggttccaagctgcccgatctatactagggaaaggcccgtcagcgcaatctctcgccggatggacgctcgagtctgaagccctccggagagatatggggacatggctcctagcttgcatctgcatctgcacctgcgtctgcctcggagtctctgtgaccggggaaggacagggtccgcggtctcgcacctttacctgcttaactaataatatcctgcgcatcgattgtcactggagtgcacccgagctgggtcaagggagttcaccctggctactctttacaagactgcttgccgcgcatatcagcgccagctgcggcgcagtaagcgcccctagttgttgtcacctgcgccagtgctcctgccacttaaccatcagcccatccttgtcgactacagcatgcctcggaggatctaggtcagcctggtggacacggagcacgtgcccaggcgacacatcaaatatcagtagtggacattgcatcctgacatggtccattagtcccgcactcgaaccaatgactactctgcttagttacgagctcgcattcaagaagcaggaggaggcttgggagcaggctcagcatcgggatcacattgtgggtgtgacctggttgatactggaagcctttgaactggatccaggattcattcacgaggccaggctgcgcgtgcagatggcaactctagaggatgatgtagtcgaagaagaacgatatacgggccagtggtctgagtggtctcagcctgtgtgctttcaggctcctcagcggcaaggaccgttgatccctccttggggatggcccgggaatacccttgtcgccgtgagtatctttctcctcctgaccgggcccacctacttactgtttaaattgtctccccggctggggtggggccccacagggccagtgtgctgttag

SEQ ID NO: 191875 - DNA, 1503 bp, synthetic construct
  misc_feature 1..1503: note = Description of Artificial Sequence: Synthetic coding sequence
  source 1..1503: mol_type = other DNA
atgggcacctggctgctggcctgcatctgcatctgcacctgcgtgtgtctaggcgtaagcgtgaccggcgaaggccaggggccacgttccaggacattcacatgtctgactaacaatatactgagaatagactgccactggagtgctcctgagttgggacagggttcatcaccttggttactgtttaccagtaatcaggcccctggcggaactcacaaatgtattctcagggggagcgaatgtactgtcgtgttgccacccgaagcagttcttgtcccctctgacaattttaccattacattccaccactgtatgagcggccgagaacaggtgtcactggtggacccagaatatctgccccggcggcacgttaaactcgacccacctagcgacctccagagcaatatctcttctggccattgtattctgacctggagcataagccccgcactggaacccatgactaccctgctgtcatacgagttggcgttcaaaaaacaggaggaagcatgggagcaggctcagcaccgggaccacattgtgggcgtaacctggttaatcctcgaagctttcgagctggatcccggttttatccacgaggcccgcctgcgagtgcagatggccacccttgaggacgacgtggttgaggaagaacggtataccggacagtggagtgagtggtcccaacccgtgtgcttccaggccccccaaaggcaaggccccctcattcccccctgggggtggccaggcaataccttagtggcagtttccatctttcttctgctgacaggccccacatacctcctgttcaaactctcacccagggttaagcgcatcttctaccagaacgtgccttcaccggccatgtttttccagccgctctactcggttcacaatggcaacttccaaacttggatgggggctcacggcgcgggcgtgttgctcagccaggattgcgccgggacaccccagggagctctggaaccttgtgtacaggaagcaacagcgcttctgacctgtggaccagcgaggccctggaagtccgtggccctcgaagaggaacaggagggcccgggcactcggctaccgggcaacctcagctccgaagacgttctccctgcaggctgcaccgagtggagagtgcaaaccttggcctatcttccccaagaggactgggccccaacctcacttacgcgaccagctccgcccgacagcgagggcagccggtcaagctccagctcgtcatcttctaacaacaacaactactgtgcactaggatgctacggaggctggcacctctctgctctgcctggcaatactcagtccagcgggccgatacctgccctagcttgcggattgtcttgcgaccaccagggactggaaacgcaacagggagttgcctgggtcctggccggtcattgccagaggcccggattacatgaagacctgcaaggcatgctacttccgtccgtgttatcaaaagctcgctcctggaccttctag

SEQ ID NO: 191876 - DNA, 990 bp, synthetic construct
  misc_feature 1..990: note = Description of Artificial Sequence: Synthetic coding sequence
  source 1..990: mol_type = other DNA
atgggcacctggctgctggcctgcatctgcatctgcacctgcgtgtgtctgggcgtatcagtgactggggagggacaggggccacgctctcggacttttacatgcctaaccaacaatatcctacggattgactgccactggagtgcacccgaacttggacaaggaagttccccttggctgctgtttaccagtaaccaagcccccggaggcactcacaaatgcatcctgcggggcagcgagtgtacggtggttctcccaccggaggcggtgttggtgccaagcgataactttaccatcactttccaccattgcatgagcggccgagaacaggtgagtctagtagaccccgaatatttgcctcggcggcatgtcaagctagatcctcccagtgacctgcaaagcaatatttcatccggacactgcatcttgacctggagtatcagccctgcattagaaccaatgaccaccctgctctcctacgagttggcatttaaaaaacaggaggaggcgtgggagcaggcccagcatcgtgatcacattgtcggagtaacctggttgatcctcgaggcgttcgaactggatccagggtttatacacgaagcccggctgagagtgcagatggcaacgctggaggatgatgtcgtcgaggaggaacgctataccggacagtggtccgaatggagccagcctgtgtgtttccaagctccgcaaaggcaggggcctcttatccccccatggggttggccgggtaataccctggtcgccgttagcatcttcctgctgttgaccggtccaacctaccttcttttcaagcttagcccccgcgtgaaacggattttttatcagaatgtgccgtccccagctatgttcttccaacctctgtatagcgtccacaacggtaattttcaggtatgcgctgagacaacggagggtcacggcgggcagggcctacctagagccttggcttgtccccgttgctggctgtcgtag

SEQ ID NO: 191877 - DNA, 999 bp, synthetic construct
  misc_feature 1..999: note = Description of Artificial Sequence: Synthetic coding sequence
  source 1..999: mol_type = other DNA
atgcacctgggcagcaactgctgcaagaacggccagaccctgctgcagcggacctgccacggggtctcctgctgtgggtggtggtttcaagcagccagaagcattctgggcaagggtcccagcgcgcagtcacttgctggttggactctagagagtgaagccctcagacgagatatgggtacttggcttctggcctgtatctgcatttgcacctgcgtctgtttgggcgtgtcagtgacaggtgagggacaaggccccagaagcaggacttttacctgcctgactaataatattctcagaatagattgtcactggtccgcaccagagttgggacagggtagcagtccatggctgctctttacccggctgctcgccgcacatatcagcgcttcctgcggagctgtctctgcaccaagctgctgtcatttgaggcagtgctcctgccacctcactatttcccctagtctctctacgaccgcatgtctgggtggttcacgcagcgcgtggtggaccaggtctacctgcccaggcgatacgtcgaacatctcatcaggccattgtatcctgacctggagcatttcgccggctcttgagcctatgaccaccctcttatcatacgagctcgcctttaagaagcaggaggaagcttgggagcaggcccagcatcgggaccatattgtaggcgtgacatggttaattctggaggccttcgagctggaccctgggttcatccacgaagcccgactgcgtgtgcagatggcaacgctggaggatgacgttgtcgaagaagagcggtataccgggcagtggagtgaatggagccagccagtctgttttcaggcgccgcagcggcagggtccccttattccaccatggggctggcccggaaacacgctggtagccgtgtcaatcttccttttattgacgggccccacctacctgctgtttaaactcagtccccggctaggctggggaccgaccggcccagtgtgctgctag

SEQ ID NO: 191878 - DNA, 1878 bp, synthetic construct
  misc_feature 1..1878: note = Description of Artificial Sequence: Synthetic coding sequence
  source 1..1878: mol_type = other DNA
atggcctgctacatctaccagctgcccagctgggtgctggacgacctgtgcaggaatatggacgcactaagcgaatgggactggatggaatttgcttcttatgttataaccgacttgacacaattgcgaaaaattaagtcaatggagcgagtccagggagtgtccatcactagagagctgctgtggtggtggggcatgcggcaagcaacagtgcagcagctggtcgatctcctgtgccgcctcgagctgtaccgagccgctcagattatcctgaattggaagcccgcacccgaaatacggtgtcctatccctgcctttccagactcagtgaagcctgaaaagcctttggccgctagcgtaagaaaagcggaggacgagcaggaagaggggcaaccagtcagaatggccactttcccaggtccagggagcagcccagccagagcccatcaaccggccttcctgcagcctcctgaggaggatgcccctcattccctgaggtccgacttgccaacttcgtcagattctaaagatttttccactagcatacccaagcaagaaaagctccttagccttgccggagacagccttttttggtcggaggccgacgtagtgcaggccactgacgactttaatcagaatcggaagatcagtcaggggaccttcgcagacgtgtaccgtggtcataggcatggcaagccattcgtcttcaagaagctgcgagaaaccgcctgtagctcccccggttccatcgagaggttcttccaggcggaactgcagatttgcttaaggtgttgccatccaaacgtcctgcctgtgcttgggttttgcgcagcccgacaattccactcttttatctatccatacatggccaatggttcactgcaagaccgactgcaggggcagggcggctctgatcctctcccatggcctcagcgagtgagtatctgtagcggcctgctgtgtgctgtggagtacttgcatggcctggaaattatccacagtaacgtgaaatcttcgaacgtgctactcgatcagaacctgacacccaaattagcccatcccatggcacacctgtgccccgtgaataagcgttctaagtacaccatgatgaagacccatttgttgaggacttccgctgcttatttgcccgaggatttcatacgcgttgggcaacttaccaaacgtgtagatatttttagctgcgggatcgttcttgccgaagtgcttacagggatacccgccatggataataataggtctccggtctacctgaaagacctactgctgtcagacattccgagttctaccgcctccctgtgctctcgtaagaccggagtggagaatgtcatggccaaggagatttgccagaagtacttggagaagggtgccggacgccttccggaggattgcgccgaggcacttgccactgctgcatgcttgtgtctgcggcgacgcaacacttctcttcaggaagtgtgcggcagcgttgccgccgtggaggagcgactgaggggcagggagacccttctgccatggagcggcttaagcgaaggaacggggtccagtagtaatactcccgaggagaccgatgacgttgacaacagctcattggatgctagtagctccatgtccgtggccccctgggcaggagctgctacgccactgttacctactgagaatggtgagggacggctgagggttatcgtgggtcgtgaggcagattcaagcagcgaagcctgcgtcggtctggaacctccgcaggacgtgactgaaacatcctggcagatcgagataaacgaggccaaacggaaattaatggagaatatactgttatacaaggaggagaaagtggactctattgaactgttcggcccctag

SEQ ID NO: 191879 - DNA, 1791 bp, synthetic construct
  misc_feature 1..1791: note = Description of Artificial Sequence: Synthetic coding sequence
  source 1..1791: mol_type = other DNA
atggccggcaactgcggcgcccggggcgccctgagcgcccacaccctgctcttcgatctgccaccagctctgctcggggagctctgtgctgtgctggactcttgcgatggtgctctaggctggaggggactcgctgagcgactgagttcatcatggctggatgtacgacatatagaaaaatacgtcgatcaaggcaagagtggtaccagggaacttctgtggtcttgggcacagaaaaacaaaaccattggggacttgctacaggttctgcaggagatgggccaccgacgcgccatccacctgataaccaactatggcgccgtcctatccccttctgagaaaagctaccaagagggaggatttcccaacatcttgtttaaagagacggctaacgtcaccgtcgacaatgtcctgattcccgagcataatgagaagggcatactcctaaagtcctcaatttcattccagaacatcattgagggaacccggaattttcacaaggacttcctaattggtgagggcgagatctttgaagtgtaccgcgtcgagattcagaacctgacctacgcagtcaagctattcaagcaagaaaagaaaatgcagtgtaaaaagcattggaaaagatttcttagcgagctcgaggtgcttctgcttttccaccaccccaacatccttgaactggcagcctactttaccgaaacggagaagttctgtctgatttatccctatatgcggaacggcactttattcgacagactgcagtgtgtaggcgacaccgcgcccctcccttggcatatcaggataggcatcttgataggcatttccaaggctatccattatcttcataatgtccaaccatgctcagtgatctgtggtagtatttcatctgccaatatactgctcgatgaccagttccaacctaaactaaccgatttcgctatggcacacttcaggtcacatttggagcaccagtcatgcaccattaatatgacctcctcatcatctaaacacctttggtacatgcccgaggagtacatccgccaggggaaactatcaattaaaactgatgtgtatagctttggtattgtgatcatggaagtgcttactggctgccgcgtggtgctcgatgaccccaagcatatccagttgagggacctgcttcgggaactgatggaaaaacgaggcctggattcttgcctttctttcttagataagaaggtccctccctgccctcggaatttctcagctaaattgttttgcctggccggtcggtgtgccgcaacccgggctaaactgcgccccagtatggatgaagttctgaacactctggaaagtacacaggctagtctctatttcgcagaggatccaccaacctctctcaaatctttccgctgcccctcgcccttgttcctcgagaatgtgccctcaatacccgtggaagacgatgagtctcagaataacaaccttctgccatccgacgaaggacttcgaatcgacaggatgacccaaaagacgccgttcgagtgtagtcagtccgaggttatgtttctgtcactcgacaaaaagccagagtctaaaaggaatgaggaggcttgtaatatgccaagcagcagctgcgaagagagttggtttccaaagtacatcgtgccttctcaggaccttcgaccttacaaggttaatatcgatccttcgtcggaggcacctggacactcatgtcgaagcaggcctgtagagagcagttgttcttctaagttcagctgggatgagtacgaacagtacaaaaaagagtag

SEQ ID NO: 191880 - DNA, 1608 bp, synthetic construct
  misc_feature 1..1608: note = Description of Artificial Sequence: Synthetic coding sequence
  source 1..1608: mol_type = other DNA
atggccggcaactgcggcgcccggggcgccctgagcgcccacaccctcctgtttgacctgccaccagctcttctgggcgaactgtgcgccgtgcttgattcctgcgatggagctctcggctggagaggactcggggccgtcctttctccaagtgaaaagagctatcaggaagggggattccccaacatcttgttcaaggagacggctaacgtcacagttgataatgtgctcatccctgagcacaatgagaagggaatcttacttaagtcttccatctcatttcagaatatcattgagggaacaaggaactttcataaggatttcctgatcggcgaaggcgaaattttcgaggtctaccgggtggaaattcagaaccttacttacgccgtcaaactcttcaaacaggaaaaaaagatgcagtgcaaaaagcattggaaaagatttttgtctgagcttgaggttctcctgctgttccaccaccccaatatcctggagctggctgcgtatttcactgaaacagagaagttctgtctaatttatccgtacatgcggaacggaaccctctttgataggctgcagtgtgtcggtgataccgcgcccctgccgtggcacatacggattggaatactgatcggaatcagtaaagcaatccattatttgcacaatgttcagccgtgtagcgtgatctgtggatccatctcttctgctaatattctgctggacgaccaattccagcctaaacttactgactttgccatggctcattttcgaagccatcttgagcatcaatcctgtacgattaatatgacctctagctcctccaagcatctgtggtacatgccggaggagtacattcggcaggggaagctgtctatcaaaaccgacgtgtactccttcggtattgtgatcatggaggttctcactggatgccgggtcgtccttgatgatccgaagcacattcagctgcgcgacctactgagggagctaatggagaaacggggactagattcctgcttatcctttctggacaagaaggtacccccatgcccccgcaacttttcagcaaaactattctgcctggccggtaggtgtgcagcgactagagcgaagctgaggcccagtatggatgaagtgctgaatacgctggaaagtacccaggccagcttgtacttcgccgaggaccctccgaccagtctgaaatctttccgatgtccaagcccattattcctggagaacgtgccaagcatccctgtggaggacgacgaatcacagaacaataatctactgccctccgatgaagggctgagaattgaccgcatgactcagaaaacaccctttgagtgttcccagagcgaggtgatgttcttgagtttagacaaaaaacctgagtccaagagaaatgaagaggcctgtaacatgccgtcgagtagttgtgaggagagctggttcccgaaatacatagtgccttcacaagacttgcgcccttacaaagtcaacatcgacccttcaagcgaggcgcccggacattcatgcaggagtcgacctgtagaatcctcgtgttcgagcaagttttcatgggatgagtacgagcagtacaagaaagaatag

SEQ ID NO: 191881 - DNA, 657 bp, synthetic construct
  misc_feature 1..657: note = Description of Artificial Sequence: Synthetic coding sequence
  source 1..657: mol_type = other DNA
atgaacaagcccatcacccccagcacctacgtgcggtgcctgaacgtgggactcattagaaagctgtcggacttcattgatccccaagagggatggaagaaattggcggttgccatcaaaaaaccttccggggatgatcggtataaccaattccatattcgtagattcgaagcgttgcttcagacaggaaagtcacccacaagcgagctgctgttcgactgggggactacaaattgcacagttggagacctggttgacctgctgatccagaatgagttcttcgcgccagcttctctcctgctcccagacgcagttccaaagacagccaacactctcccctcaaaggaagcaatcactgtgcagcagaaacagatgcctttctgtgataaggacaggacgctcatgacccctgtccagaatctagagcagtcgtatatgcctccagactcaagtagccctgagaataaatctttggaagtcagcgacacaaggtttcattctttcagcttttacgaactgaaaaacgttaccaacaactttgacgagcgccccatttccgtcggcggaaataaaatgggcgagggcggatttggcgtagtgtacaaaggctacgtgaataataactgtggctccgaagaagcttgctctaacgggtag

SEQ ID NO: 191882 - DNA, 1011 bp, synthetic construct
  misc_feature 1..1011: note = Description of Artificial Sequence: Synthetic coding sequence
  source 1..1011: mol_type = other DNA
atgcccttctgcgacaaggaccggaccctgatgacccccgtgcagaacttagaacagtcctatatgccacctgacagctcttcaccagagaataagtcactcgaggtctcggatacaagatttcatagtttcagcttctatgagttgaagaacgtaaccaataatttcgatgagcgtcctatctcagtggggggaaataagatgggcgaaggcggatttggagtggtttacaaagggtatgtgaacaatactaccgtggccgtgaaaaaactggccgcaatggtcgatattacaacagaggagctcaagcagcagttcgaccaggagatcaaagttatggcaaaatgccaacacgagaatctggtggaattactcggtttctcctcagatggagacgacctctgtctcgtgtatgtttatatgcctaacggttcgctcctggacaggttgtcatgtctcgacggcactccgccattatcatggcatatgcgctgcaagatagcccagggggccgcgaacggaataaacttcttgcacgaaaaccatcacattcacagagacattaagtcagccaatattcttctggacgaggcctttacagccaaaatttcagactttggattggccagggcatccgaaaaattcgctcagaccgtgatgacttccagaattgtgggaaccaccgcctacatggcacccgaagcactaagaggagagatcacgccgaagtctgacatctatagtttcggggtggtgctattggagatcattactggtcttccagcggtggatgagcatagagaaccccagttattgcttgatatcaaagaagagattgaggacgaagagaagactatcgaggattacatcgacaagaagatgaacgatgccgatagcacttctgtggaagccatgtatagtgtagcttcacaatgtttgcacgagaagaagaacaagcggccagatatcaagaaggttcaacagttgctgcaggagatgacagcatcctag

SEQ ID NO: 191883 - DNA, 1011 bp, synthetic construct
  misc_feature 1..1011: note = Description of Artificial Sequence: Synthetic coding sequence
  source 1..1011: mol_type = other DNA
atgcccttctgcgacaaggaccggaccctgatgacccccgtgcagaacctcgagcaaagctatatgcccccagactcatcctcaccggagaataagagtcttgaggtttcagacactagatttcactcattcagtttttatgagctcaagaacgttaccaacaacttcgacgaaaggcccataagcgtcggcgggaacaaaatgggtgagggaggcttcggagtggtgtacaagggatacgtcaataacactacagtagccgtgaaaaaactcgccgctatggtcgacatcaccaccgaagagttgaaacagcagttcgatcaggagattaaggtgatggcaaaatgccagcacgaaaatcttgtggagctgctgggtttcagcagcgacggggatgacctgtgcctggtttatgtctatatgccaaacggatccctgctagatagactgtcttgtcttgacgggacgcctcccctgagctggcatatgcgctgtaagatagctcagggggcagcaaacggcatcaatttcctgcatgaaaaccaccacattcaccgtgatattaagtctgccaatattctattggacgaggcctttaccgcaaaaatttccgacttcgggttagcccgtgccagcgagaaattcgcacagactgttatgacctcaagaattgttgggacaactgcttacatggcccctgaggcccttcgcggggaaattactccaaagtctgacatctactccttcggggtggtactcttagaaattatcactggcctccccgccgtagacgaacatagggagcctcagttgctcctcgatatcaaagaggaaatagaagatgaggagaagaccattgaagactatatagacaaaaagatgaatgacgccgactcgacttctgtcgaggccatgtatagtgttgccagccagtgcttgcacgaaaaaaagaacaaacgccccgacatcaagaaggtgcagcaactgcttcaggagatgaccgccagctag

SEQ ID NO: 191884 - DNA, 1383 bp, synthetic construct
  misc_feature 1..1383: note = Description of Artificial Sequence: Synthetic coding sequence
  source 1..1383: mol_type = other DNA
atgaacaagcccatcacccccagcacctacgtgcggtgcctgaacgtgggtcttatcagaaaactgtccgacttcatcgatcctcaagagggttggaagaaattggcagtggccattaagaagccatccggagacgaccggtacaaccaattccatattcggaggttcgaagcacttctgcaaacagggaagtctccaacttctgaattactcttcgactgggggacgacgaattgcaccgtcggggaccttgtcgacttgcttatccaaaacgagtttttcgcgcctgctagcctgttgctgccagacgcagtccctaaaactgctaatacccttccttccaaggaagctattacagtccaacagaagcaaatgcccttttgcgataaagatcgtactctcatgactcctgttcaaaacctggaacagagctatatgccacccgacagttctagccctgagaacaagtccctggaagtgagcgatacgcgttttcatagcttttctttctatgaacttaagaacgtgacaaacaacttcgatgagcgcccgatctcagttggcggaaataaaatgggagaaggtggcttcggggtggtttacaaaggatacgttaataacactaccgtggctgtgaagaagctcgccgcaatggtggacattacaaccgaggagctcaagcaacagttcgaccaagaaatcaaagtgatggcaaaatgtcagcacgaaaacttagtggagctgctgggattcagttccgatggtgacgatttatgtctcgtctatgtttacatgcccaatggaagtcttctggacagactatcatgcttagacgggaccccaccactgtcatggcacatgcgatgtaagattgctcaaggggcggcaaacggcattaatttccttcatgaaaatcaccatatccaccgagacataaagtcggccaatatcctgctcgatgaagcttttactgctaaaataagtgactttggcctggcccgagcgtcagagaaatttgctcagacagtcatgacatctagaatagttgggaccaccgcctacatggcccccgaggctttaagaggcgagatcacccctaaatctgacatatactctttcggagtggtcctcttagagatcatcacaggactccctgccgtggatgagcaccgggaacctcagctcctcctggatataaaggaagaaatcgaagacgaggaaaagaccatcgaggattacattgacaaaaaaatgaacgatgctgattctaccagtgtcgaggcaatgtactctgtcgcctcgcagtgcctccacgaaaaaaagaacaagagaccggatattaaaaaggtgcaacaactgttacaagaaatgactgcaagttag

SEQ ID NO: 191885 - DNA, 270 bp, synthetic construct
  misc_feature 1..270: note = Description of Artificial Sequence: Synthetic coding sequence
  source 1..270: mol_type = other DNA
atgaacaagcccatcacccccagcacctacgtgcggtgcctgaacgtcgggctgattcgcaaactgtccgactttattgacccgcaagaaggttggaagaaattagcagttgcgataaaaaagccctccggagacgaccgatataaccaatttcatatcagacgctttgaggccctgttgcagacagggaagagccccacatctgagcttctctttgattggggaactaccaactgcactgtgggcgacctcgtggatctgctgatttag

SEQ ID NO: 191886 - DNA, 1383 bp, synthetic construct
  misc_feature 1..1383: note = Description of Artificial Sequence: Synthetic coding sequence
  source 1..1383: mol_type = other DNA
atgaacaagcccatcacccccagcacctacgtgcggtgcctgaacgtggggcttattaggaaactgtcggatttcattgatccccaggagggttggaagaaactcgcagtagccatcaaaaagccctcaggcgacgatagatataaccagttccacattcggcgctttgaagccctgctccagaccggcaaatctcccacttccgaattgcttttcgattggggaaccactaactgcacggttggggacctcgttgacttgctgatccaaaacgagtttttcgcaccagcatctctgttgttgcccgatgctgtccccaaaaccgcgaatactctcccatccaaagaggccatcacagtccaacagaagcagatgcccttctgcgacaaagataggacccttatgactcccgttcaaaaccttgagcagtcttacatgccgcccgatagctcctctccagaaaacaagagcctcgaagtgtccgatacccggtttcactccttcagtttctatgagttgaaaaatgtcactaataacttcgatgagaggcccatcagcgtcgggggcaacaagatgggagaggggggctttggtgtggtgtacaaaggctatgtgaacaacaccaccgtagctgtcaaaaagctagccgcgatggtggatattacgacagaagaactgaagcagcagtttgatcaagaaattaaggttatggcaaagtgccagcacgagaacttggttgaattattgggcttctcttcagatggtgatgacttatgccttgtctacgtgtatatgcccaatgggagtttgctcgaccgtttaagttgcctggacggtacgccaccgctgtcctggcatatgagatgcaagatcgctcagggtgccgccaatggaatcaactttttgcacgaaaaccaccacattcacagagacataaagtccgccaatatcctgttggatgaggcgttcacagccaaaattagcgatttcgggctggcgagagcgagtgagaaattcgctcagactgtcatgactagcagaattgtgggcacaactgcgtatatggcgccagaagcgctgcggggcgagatcacccccaagagcgatatctattcctttggcgtcgtcctccttgaaatcattacaggcttgcccgcggtggacgaacaccgtgagcctcaacttctcctcgacattaaggaggagatagaagacgaggaaaagaccatcgaggattacatagacaagaagatgaacgatgctgactccactagcgtggaagccatgtacagcgtcgcttctcagtgtctacacgaaaaaaaaaataagagaccggacattaagaaagtccagcaattactgcaagaaatgactgcgagttag

SEQ ID NO: 191887 - DNA, 2394 bp, synthetic construct
  misc_feature 1..2394: note = Description of Artificial Sequence: Synthetic coding sequence
  source 1..2394: mol_type = other DNA
atgtacctggagacccggcgggccatcttcgtgttctggatcttcctgcaggtacaaggcaccaaggacatcagtatcaatatctaccattccgagacgaaagacattgacaacccccctaggaacgagaccacggagagcacggagaaaatgtacaaaatgtcgaccatgaggcgtatctttgatctcgcaaagcatagaactaaacgctctgccttcttcccgacgggtgtgaaggtttgtcctcaggagagcatgaagcaaattctcgatagcctccaggcttattatcgactgcgcgtctgccaggaagccgtatgggaggcataccggatttttctcgacagaataccagacacaggagagtaccaggactgggtctcgatttgtcaacaggaaaccttctgtctctttgacataggcaagaatttctcgaatagccaggaacaccttgacctactgcaacagagaatcaaacagcgatcttttcctgataggaaagatgaaatatccgctgagaagactctcggagaacctggagaaaccatcgtcatcagcacggacgtcgctaatgtctcactggggccttttccgttaacgcctgacgacacactgctcaacgaaatcctggacaacactctaaacgatacaaaaatgcctacgacggaaagagaaacagaatttgccgttctcgaggagcagcgggttgaactcagcgtgagccttgtgaaccagaaattcaaggcagagcttgctgactcacagtcaccatattatcaggaactggccggtaagagtcagctacagatgcagaagatcttcaaaaaattaccagggttcaagaaaatccacgtactgggcttccgccccaagaaggagaaagatggctccagcagtaccgaaatgcagctaacagctatcttcaagcgtcattctgcggaggccaaatcacccgcatcagatctgcttagctttgattccaacaagatagagagtgaagaggtctaccatggcaccatggaggaggataaacagccagaaatctacctgacagcgacagatctcaaacgactcatatcaaaagcattggaagaggaacagagcctcgatgttgggactattcagtttacagatgaaattgctggaagccttccagcatttggtccagacacgcagagcgagctgcccacatctttcgctgtcatcaccgaggatgcgactcttagccccgagttgccccctgtcgagcctcagctagaaacagtcgatggggctgagcacggattacccgatacttcatggtcccctccggccatggcctccacttctttgtcagaggctcctcctttctttatggcttcttctatcttttccctgaccgatcaaggcactactgatactatggcaaccgaccagaccatgctagttcctggtcttactatcccaactagcgattacagcgctatctcacagttagcgttaggaatttcacatccacctgcttcctctgacgattctcgcagttccgcaggaggcgaggacatggtaaggcacctggacgaaatggacctgagcgacactcctgctccatctgaggtgcccgagctcagtgagtacgtgtcggtgcctgaccactttctggaggacactacaccagtctctgctctccagtatattactacttcctccatgactatagcaccaaaaggcagggagctcgtcgtgtttttcagcctgcgggtggctaacatggctttctctaacgatctctttaacaaatcttctctggaatatagagcgctggagcagcaattcacccagctccttgttccatacttgcgatcaaacctgaccggttttaagcagctggagatcctgaacttccgaaacggctccgttatcgttaactctaaaatgaagtttgccaagagcgtaccctataacctgaccaaggctgtgcatggtgtcctggaggactttcggtcagcagccgcgcaacagctgcatctcgagatcgatagttactcgttgaacattgaacctgccgatcaggccgatccttgcaagttcctcgcctgcggagagttcgcacaatgcgtgaaaaatgagaggacagaggaggcagaatgcaggtgcaagccaggttacgattcgcagggctcactggatggcctggagccaggcctttgtgggcctggaacaaaagagtgcgaagtgctgcagggtaaaggtgccccatgcagacttcccgaccattccgagaatcaggcatataaaacctctgtgaaaaaattccaaaatcagcagaataataaagtgatctctaaacggaattcagaactcttaactgtggagtacgaagaattcaaccaccaggactgggaggggaactag

SEQ ID NO: 191888 - DNA, 477 bp, synthetic construct
  misc_feature 1..477: note = Description of Artificial Sequence: Synthetic coding sequence
  source 1..477: mol_type = other DNA
gagcggcccaacggcaccagcgcccagcccgcccaggtgaagcccgaattctatcgtcaagcagagctcaagccctgtccatggacgggatctaaccagcgacgatgcataaccttctgtcctactcctgaccaagccgacccttgtaaattcctcgcatgtggagaattcgcccagtgcgtaaaaaacgaacggaccgaggaggcagagtgccggtgcaagcccggatatgactcgcaaggctcattagacggactcgagccaggcctgtgtggcccaggcactaaagagtgcgaagtcttgcaaggaaagggcgcgccttgccgcctccctgaccatagtgagaatcaagcctataagacatctgtgaagaagtttcagaatcagcagaataataaagtaatctctaagaggaactcagaactcctgactgtggagtacgaagagttcaaccaccaggactgggagggcaattag

SEQ ID NO: 191889 - DNA, 444 bp, synthetic construct
  misc_feature 1..444: note = Description of Artificial Sequence: Synthetic coding sequence
  source 1..444: mol_type = other DNA
atgtacctggagacccggcgggccatcttcgtgttctggatcttcctacaagtgcaaggcacaaaagtatgtcaagaggctgtttgggaagcttatagaattttccttgaccgcattcccgatactggcgagtaccaagattgggtgtcaatttgccagcaggaaacattttgtttgtttgacatcggaaagaatttcagcaatagtcaagagcacctggacctcctgcagcagagaatcaagcagaggtccttccctgataggaaggacgagatttcagccgaaaagaccctgggggaaccaggagagactatcgtgatcagcactgaaaagaacaagggcaaaaccaaacctttcaacattctgcagttcggtaacaatcatcacgagcacttgctgccgatattctgtctgttaagctcaatcatttacacctactattag

SEQ ID NO: 191890 - DNA, 3726 bp, synthetic construct
  misc_feature 1..3726: note = Description of Artificial Sequence: Synthetic coding sequence
  source 1..3726: mol_type = other DNA
atgatcatgttccccctgttcggcaagatcagcctgggcatcctgattttcgtattgatcgagggggacttcccctcactgacagcacagacctatctttccatcgaggaaatccaggaaccaaaaagcgccgtcagctttctgctcccagaggagtcaacagatctcagcctcgccaccaaaaagaagcagccattggatagacgggaaaccgaacgacaatggctgattcgacgaaggcgatcgattctcttccctaacggagtgaaaatttgcccagacgaaagcgttgccgaagcagtcgccaaccatgtaaagtactttaaggtgagggtctgtcaggaggctgtgtgggaggcgttccggactttttgggacagactgcccggccgcgaggagtatcactactggatgaacctttgcgaagatggggtaacatcaatttttgaaatggggaccaatttttccgagtcagtcgagcatcggtcactcattatgaagaaacttacctatgctaaggaaactgtgtcttcgtcagaactgtcctccccagttcctgtgggcgacacctccactctcggtgacactacccttagcgtgccccatcccgaagtggatgcgtatgagggtgcatctgaatcatccctagagagaccggaggagtccatatccaatgagattgagaacgtcatcgaggaggctacaaagccggcaggggagcagatcgccgaatttagtattcacttgctcggaaaacagtaccgggaggaactgcaagattcttcctctttccaccatcagcacttagaggaagaattcatctctgaggtggagaacgcattcaccgggctccctggatataaggagatcagagtgttggagtttcgtagcccaaaagagaacgactcaggcgtcgacgtctattacgccgtaaccttcaacggcgaggctatatccaacactacatgggacttgatctccctccattccaataaagtcgagaatcatgggctcgtggagctggatgacaaacccactgtggtatatactatttcaaacttccgggattacattgctgaaactttgcagcagaattttctgctcggtaactcttcgctaaaccctgatccggatagcttgcaactgatcaacgtgcgaggggttttaagacatcagacagaagatctggtctggaatacccaaagtagctctctgcaggccacaccttcctcaatcctggataacacgtttcaagccgcctggccgagtgctgatgaaagtattacttcttccattccacctctggacttcagcagcggcccaccatctgctactgggcgtgagttatggtccgaatcccctttaggcgacctggtctcaacacacaagctagccttcccctccaaaatgggactctcgtcctcacctgaggtgctcgaagtgtcaagcctgacgctccatagcgtcaccccggctgtgttgcaaaccgggcttccagtagcttctgaggagaggacaagtgggagtcacctggtcgaggacgggctcgccaacgtggaggaaagcgaggattttctgagcattgactcactaccttcttcaagcttcacccagccggtgcctaaagagacaattccaagcatggaggacagtgatgttagtctgacatcatccccgtatctgacctcctctatcccatttggtctggatagccttacctccaaagtgaaggatcaactaaaagtctcaccctttctccctgacgccagcatggagaaagaactcattttcgacggtggccttgggtccgggagcggccaaaaagtcgatctcattacgtggccatggagcgaaactagcagtgaaaaatccgccgaacctttgagtaagccatggttggaggatgacgactccttgctacccgccgagatagaggataagaaactggtactggtcgataagatggactcaaccgaccagatctctaagcatagtaaatatgaacacgacgacagatctactcacttccctgaggaggagcccctgtctgggcccgctgtacccatattcgctgacactgctgccgaaagcgccagcctgacactgccgaaacacattagcgaggtacccggcgtagacgactacagcgtcactaaggcaccactcattctaacctccgtggcaattagtgccagcacagacaagagcgaccaggccgatgcaattttgagagaagacatggagcagattactgagtcaagcaattacgagtggttcgatagcgaggtgtctatggtgaaacctgatatgcagactctatggacaatcctgcccgagagcgagcgggtgtggacccgaacatcctcattggagaagctttcacgcgacatcttagcaagcactccacagtctgccgaccgcttatggttgtcggtaactcagtccaccaaactgccccccaccactatcagcaccctcttagaggacgaggtgattatgggagtccaagacatttccctggaactggacagaatcggaaccgactactatcagcctgagcaggtgcaggaacagaacggcaaggtcggctcttacgtcgagatgagcacgtctgtgcattcaactgaaatggtgtcagttgcatggcctactgaaggaggagacgatctgagctacactcagacaagcggagccctggtggtttttttctcactgagggtcacaaatatgatgttcagtgaagacctgtttaacaagaattctcttgagtacaaggctctggaacaacgattcctcgagctgcttgtcccatacctgcagtccaacctgaccggcttccagaacctcgaaattctgaacttccgcaatggatcaattgtcgttaactctcggatgaagttcgccaattctgttccacccaacgtaaacaatgccgtgtatatgatcctggaggatttctgtactaccgcttataacactatgaatctcgccatcgacaagtactcgctggatgtcgaaagcggggacgaagccaacccttgcaaatttcaggcctgcaacgaattctccgaatgcctggtcaatccctggtcaggcgaggctaagtgtagatgctttcccggttacctgagcgtggaagagaggccttgccagagcctttgcgatttgcagccagatttctgccttaatgatggtaaatgcgatatcatgcccggtcacggggctatttgcagatgtcgggtcggcgaaaactggtggtatagggggaagcattgcgaggagtttgtatctgaacccgtgatcattgggataacaatcgcatctgtggtcggcctcctggtgatcttctccgctatcatctatttcttcattagaacactgcaagctcatcacgacagatccgagcgggaatcacctttttcaggcagctctcggcagcctgatagcttatcctctattgaaaatgccgtgaagtataatcccgtatatgaaagccatcgtgcaggatgtgaaaagtatgagggtccttacccacagcatccattttactcgtcagcttcgggggatgttatcggcggcctgagcagggaggagatccgccagatgtacgaaagcagcgaactgagcagggaggagattcaagaacggatgagggtccttgagctgtatgctaatgaccctgaatttgcggctttcgtgagagaacagcaggtagaagaggtgtag

SEQ ID NO: 191891 - DNA, 201 bp, synthetic construct
  misc_feature 1..201: note = Description of Artificial Sequence: Synthetic coding sequence
  source 1..201: mol_type = other DNA
ggctacctgagcgtggaggagcggccctgccagagcctgtgcgaccttcagcccgacttctgcttaaatgacggaaagtgcgatatcatgccaggacacggcgctatatgttccggcagctcccggcagcctgatagcctcagctccatcgagaatgccgtgaagtataacccagtgtacgaatcccaccgcgctggctag

SEQ ID NO: 191892 - DNA, 2745 bp, synthetic construct
  misc_feature 1..2745: note = Description of Artificial Sequence: Synthetic coding sequence
  source 1..2745: mol_type = other DNA
atggcccagttccccacccccttcggcggcagcctggacatctgggcgatcacagttgaggagcgtgctaaacacgaccagcagttccactctctgaaacctatctccggattcataactggggaccaggccagaaatttctttttccagagcggcctcccacagcctgtgttggcgcagatatgggctctggctgatatgaacaatgatgggaggatggatcaggtcgaattctcgatagcaatgaagctgataaaactgaagctccagggttatcagttaccttctgccctccctcctgtgatgaaacagcagcccgtggcaatctcaagcgctcccgcctttggtatgggagggatcgcctcaatgcccccgctgacagccgttgctcctgtccccatgggctcaattcccgtggtcggcatgagtcctacattggtgtcatccgttccaacagccgcagtgcccccgctggccaatggggctccaccagtgattcagcccctaccagcattcgcccatcccgctgccaccttacccaaaagttcttcattctctcggtccgggcccggctcccagctgaatactaaactccagaaggcccagtccttcgacgtggcctctgtgccccccgtggccgagtgggccgtacctcaatcatctagacttaaatacagacaattgtttaactcacatgacaagaccatgagcggtcacttgactggaccacaggcgcgcactatcttaatgcagagcagtcttccccaggcacaattggcttcaatctggaatctgtccgatattgatcaggacggaaagctgacagcggaggaattcatccttgcaatgcatttaattgatgttgccatgtccggacaaccacttccaccggtgctgccccccgagtacattcccccaagctttcggcgggttagatctggatcggggatcagtgtgatctcgtcgacatcagtggatcaacgattacccgaggagcctgtgcttgaggacgagcagcagcaactggagaagaagttgcccgtgacgttcgaagacaagaagcgggaaaacttcgaaaggggcaatctggagctagaaaagagacgccaggccctgctggagcaacaacgcaaagaacaggagaggctggcgcagctggagagggctgagcaagaaaggaaagagagagagaggcaagaacaggaacgcaaacgccagctggagctggaaaaacagcttgaaaaacagcgcgagcttgagaggcagagggaagaggagcgccggaaggagatcgagagacgggaagcggctaagcgcgagttggaacggcagcgacagctggagtgggaacgtaataggcgccaagagttactcaatcagaggaacaaggagcaggaagacatagtcgtgcttaaggctaagaagaagacactggagtttgagcttgaggccctcaatgataaaaaacatcagctggagggaaagcttcaggacattcgctgcagattaaccacccaaagacaggagatcgagtccaccaataaatctagagagttgagaatcgcggagatcactcacttacagcagcagttgcaggaaagccagcagatgcttggccgcctgattccggagaaacagatattaaacgatcaactcaaacaggtccagcagaacagcctgcacagggattcattagtaactctcaagcgcgccctcgaggccaaagagctggcgagacaacaccttcgggatcagttagacgaggtagagaaggaaactagatccaaactccaggagattgacatcttcaacaatcaacttaaggaactgagagagattcacaataaacagcaactgcaaaagcagaagtccatggaagccgaacgtctgaagcagaaagaacaggagcggaagatcatagagctcgaaaagcagaaagaagaggctcagagacgtgctcaggagagggacaagcagtggctggagcacgtgcaacaagaggatgaacaccaacgtccacgcaagctgcacgaggaagaaaagctgaaacgggaagagtcagtgaaaaagaaggatggtgaagagaagggcaagcaggaggcccaggacaagctgggtagactctttcatcagcatcaggagcctgcgaagcctgccgtgcaggctccttggagcacagccgagaaagggccgctgaccatctcagctcaagagaacgtgaaggtggtctactatagggcactgtacccctttgaaagcaggtctcacgatgaaataactattcaacctggcgacatcgtaatggtcgacgagagtcagactggagaaccaggatggcttggtggtgaattgaaggggaagaccggctggttccccgccaactatgctgagaagatacccgagaatgaggtccccgcacctgtcaagcctgtgacagattctacctccgccccggctcctaaattggctttacgggaaactcccgctcccctggcagttaccagctctgagccctccacgacgcccaataactgggccgacttctcctctacctggcctacgagcacaaatgagaagcctgagacagataattgggatgcgtgggcagcccagccatcactgaccgtgccctctgccggccagctgagacagcgatcggctttcacccctgccaccgctacaggctcatcaccgagccctgtgctgggacaacacggattctggttctttcgggagagctgttag

SEQ ID NO: 191893 - DNA, 954 bp, synthetic construct
  misc_feature 1..954: note = Description of Artificial Sequence: Synthetic coding sequence
  source 1..954: mol_type = other DNA
tgacccctgatggagagcgagctgctgaccgagaaggaggtggccatgatattcgtaaattggaaagaactgattatgtgcaacattaaacttcttaaggcattacgagtgcgaaaaaagatgtcaggtgagaagatgccagtcaaaatgattggggacattctctccgcccagctgccgcatatgcagccttacataaggttttgctcacgccagctgaacggagctgcgctcatccagcagaaaacagacgaggcccctgatttcaaggagttcgtcaaacgccttgcgatggacccaagatgcaagggaatgccgctgtccagcttcattctgaaaccgatgcagcgggtgaccagataccctcttatcatcaagaatcagctagtttttaatagcgtgacgaattgcctgggccctagaaagtttttgcacagcggtaagctgtacaaagctaagtcaaacaaggagctctatgggtttttatttaacgactttctgttactgacccagattaccaaaccacttggatcctctggtacggataaggtgttctcccccaagtcaaacctgcagtataaaatgtacaagacacccatttttctgaacgaggtgctcgtcaagcttccaactgatccatcaggagacgagccaattttccacatctcccatatcgatcgggtgtacactttaagggccgaaagtattaatgagcggacagcctgggttcaaaaaatcaaggcggccagtgaactctacatagagaccgaaaagaagaaacgagagaaagcgtacctcgtgcgctctcagagggctactggaattggccggctcatggtcaacgttgttgagggtatcgaattaaagccatgccgctcgcacggcaagtcaaacccttactgcgaagttacgatgggctctcagtgtcacatcaccaaaacaattcaagactag

SEQ ID NO: 191894 - DNA, 5166 bp, synthetic construct
  misc_feature 1..5166: note = Description of Artificial Sequence: Synthetic coding sequence
  source 1..5166: mol_type = other DNA
atggcccagttccccacccccttcggcggcagcctggacatctgggccatcacagttgaggaaagggctaagcatgaccaacaattccactcactgaaaccaatcagtggcttcattactggtgatcaggcaagaaatttcttttttcaatccggcctgcctcaacccgttttagcacaaatctgggcgcttgctgacatgaataatgacggtcgaatggatcaagtggagttctcaatagctatgaaattaattaaactgaagctgcagggataccagctgccgagcgctctaccaccggtcatgaagcagcaacccgtggctatctcctctgctccagcgttcgggatggggggtatcgcaagtatgcccccactgacagcagtggcacctgtaccgatgggcagcattccagtggtcggtatgtccccgacgttagtctccagtgtacctaccgccgccgtgcccccactggccaatggtgctccacctgtgattcagcctctacccgctttcgcccatcccgctgcaaccctcccaaagagctctagcttcagtagatcagggccagggagccagctgaacaccaaactgcagaaggctcagagctttgatgtagcctctgtgccacctgtggctgagtgggccgtcccgcagtcctctagactgaagtatcggcagctgttcaacagccatgataagaccatgagtggtcatctgactggaccacaggcgagaacgatcctcatgcaaagttcactcccgcaagcccagttggccagcatatggaatttgagcgacatcgaccaagacggtaaacttaccgctgaagaattcatcctggccatgcaccttatcgacgtcgccatgtcagggcagccactgccaccagtattgcctcccgagtacatccccccttcttttcggagagtgcgtagtggatctgggatttccgtgatctcgtccacgtctgtggatcagcgactgccggaggagcccgtgcttgaagacgagcaacaacaactggagaaaaagctgcctgtaacctttgaagataagaagcgtgaaaactttgaacgtggcaacctggagcttgaaaagcgacgccaggcgttgctagagcaacagcggaaggagcaggaaagactggcgcagttggagagggcggagcaggaaagaaaggaaagagaaagacaggagcaggaacggaagcgccagctggagctggagaagcagctcgaaaagcagagagaactcgaaaggcagcgtgaagaggagcggagaaaggagattgagagacgagaggcagcaaagcgcgagttagagcggcaaagacaactggagtgggaaagaaaccgccgccaggaacttctcaatcagagaaataaggagcaggaggatatcgtcgttctaaaagccaaaaaaaagaccctggaattcgagctcgaggcattgaacgacaagaagcatcagttggagggcaagttgcaggacattaggtgtcgtttgacaacccagagacaggagatcgagagcacaaacaagtcccgtgaattgcgcatcgccgaaattacccatctgcagcagcaactccaggaaagccagcagatgcttggtcgtttgataccagaaaaacaaatactgaacgaccaattgaagcaggtgcagcagaactctctgcaccgagattcccttgtgacactgaaacgcgcactggaggctaaagagttagccagacaacatctgagggatcaactggatgaggttgagaaggaaacacgctcaaagctgcaggagatcgatatctttaataatcaacttaaagaactgcgcgaaatccacaataagcaacagctccagaagcagaagtccatggaggctgagaggcttaagcagaaggagcaggagcgtaagatcatcgagctcgagaaacagaaagaggaggctcagagacgcgcccaagaaagggataaacagtggctcgaacatgtacagcaagaggacgaacaccagcgaccgcggaagctacatgaagaagagaaactcaagagagaagaatctgttaagaaaaaagacggtgaagagaaggggaagcaagaggcacaggacaagctaggccggttatttcaccaacaccaggagccagctaagccagctgtccaggccccttggtctaccgccgagaagggtccactcactatatcagctcaggagaacgttaaggtggtgtactatagggccctatatccattcgagtctcggtcacacgatgagataaccatacagccgggggacatcgtgatggtgatagggtgttgggtggatgaaagtcagactggagagcccggatggctgggaggagagttgaagggcaaaaccggatggttcccagctaactatgccgaaaaaatcccggaaaatgaagtaccagccccggttaagcccgtgacagactctacaagcgctccggcccccaaactcgccctcagagagactcctgctcccctcgccgttacgtcgtccgagccctctaccactcccaacaactgggccgacttctcttcaacttggcccacttctacaaacgaaaagccagagacagacaattgggacgcctgggctgcccagccaagcctgactgttcctagtgccgggcagctgaggcagcgctctgctttcactcccgccaccgcaacgggttcctccccgagcccagttctcgggcagggcgagaaggtcgaaggcctccaggcacaggctctgtatccctggagagctaaaaaagacaaccacctgaacttcaacaagaatgacgtgattactgtccttgagcagcaagatatgtggtggtttggcgaagtacagggtcaaaagggctggtttccgaagagttacgtgaagctcatcagtgggccaatcaggaagtccacttccatggatagcggctcatccgagtcccccgcatcactaaagcgcgttgcttccccagccgccaagccagtggtgtcgggagaagagtttattgcaatgtacacgtatgaaagctccgagcagggagatctgacattccagcagggagacgtgattttggtcactaaaaaagatggcgactggtggacagggacagtgggggataaagctggggtgttcccttctaactatgtgcgcctaaaagattccgaagggtctggcacagcaggcaaaactggttctctcggaaaaaaacccgagatcgctcaagtaatcgcctcctatacagccaccggaccggagcagctcactctggccccgggacagctgatcctgatccgcaaaaagaaccctggaggttggtgggaaggcgagctgcaagcacgcggcaagaaacgacaaatcggctggttcccagccaattatgtaaagctactgtcccccggaacatctaagatcacaccaaccgaacctccaaaatccaccgccttagcggccgtgtgtcaggtgatcgggatgtacgattataccgcccagaacgatgacgagctagcctttaacaagggccagataatcaacgtgctaaataaggaggaccccgattggtggaaaggagaggttaatggccaggtcgggctattccctagcaactatgtgaaactaaccacagacatggatccttcacaacagtggtgttccgatctccacttactcgatatgctgactcctaccgaaaggaagaggcagggatacatccatgaactgatcgtgactgaagagaattatgtgaacgatttgcagttagtgacggagatcttccagaaaccgctgatggagtcggagttgctcacagagaaggaagtggcaatgattttcgttaactggaaagaactcattatgtgtaacattaaactgctgaaggcactccgtgtgcgtaaaaaaatgagtggcgagaagatgccggtcaagatgattggtgatattctgagtgcccaactccctcatatgcagccttacattcgtttctgcagcaggcagctgaatggtgctgccctgatccagcaaaagactgacgaggcacctgactttaaggaattcgttaaacgcctagccatggacccacgatgtaagggcatgcccctctcatcgttcatactgaaaccaatgcaaagggtcacgcgatatcccctgatcatcaagaatattctggagaataccccagagaatcaccctgatcactcccatctcaaacacgctcttgagaaggcggaggaattgtgttctcaggttaacgaaggagtgagggagaaagagaactccgaccgtctcgaatggatacaagcccacgtgcagtgtgaaggtttaagtgaacaacttgtgttcaactccgtaaccaactgtttgggtccccgcaaatttctgcatagtgggaagttgtataaggccaaaagtaacaaagagctctatggattcctgttcaatgactttttgcttttgacacaaatcacaaaacccctcggttcctctggtaccgataaggtatttagccccaagtcgaacctgcagtacaagatgtataaaacacccatcttcctgaacgaggtgcttgtaaaactgcccaccgacccttctggggacgaaccaatcttccatatcagtcatattgatcgcgtgtatacgttgcgggccgaatcaatcaatgagaggacagcctgggttcagaagatcaaagccgcaagcgaattatacatcgaaaccgagaagaaaaaacgggaaaaggcttacttagttcgcagccaaagagcaactggcataggccgtttgatggtgaatgtagtggaagggattgaactcaagccctgtagaagccacggaaagtcaaacccctactgtgaggtgaccatggggtctcaatgccacattaccaaaaccattcaggatacattaaacccaaaatggaactcaaactgccagttcttcatccgcgatttggagcaagaagtgctgtgcattactgtgttcgagagggaccagttctctccagatgatttcctgggtcgaaccgagataagagtggcagacatcaaaaaagatcaagggagtaagggtcctgtcacgaagtgtctcctgctgcatgaagttcctactggcgaaattgttgtgcgcctcgacctgcaattgttcgacgaaccctag

SEQ ID NO: 191895 - DNA, 4953 bp, synthetic construct
  misc_feature 1..4953: note = Description of Artificial Sequence: Synthetic coding sequence
  source 1..4953: mol_type = other DNA
atggcccagttccccacccccttcggcggcagcctggacatctgggccatcacggtggaggagcgcgccaagcatgaccagcagtttcatagccttaagcctatctcgggatttattacaggcgaccaggcaaggaatttcttcttccagagcgggttgccacagcctgtactggcccagatctgggccctcgccgacatgaataacgacggccgaatggaccaggtggaattttcgatcgctatgaaattgattaagctgaagttgcagggataccagctgccttctgcgctgcctcccgtaatgaagcagcagcccgtggcaatctcctcagcgcctgcgttcggcatggggggaatagccagtatgcctccacttacagctgtcgcacctgtcccaatggggtctatcccagtcgtcgggatgtcccctaccctcgtctcttccgtgcctaccgcagctgtgccaccgctggccaatggagccccaccagtgattcaacctctgcccgccttcgcccatccagcggccacactaccaaagagctccagcttcagccgctccgggccaggctcacaactgaataccaaactccagaaggcccagtccttcgatgtagcttcagtgccccccgttgctgagtgggccgtcccacaaagcagcagattgaagtacaggcagctttttaattcccacgataagactatgtcaggccacctgacggggcctcaagcgagaacaattctgatgcagagcagcctgccccaggcccaattggcctcaatatggaacctttccgacatcgaccaggacggtaagcttaccgcggaagaatttattctcgcgatgcacctgatcgatgtggccatgtcaggccagccgctgccaccggtcctgccacccgaatacatccccccttctttccggcgtgtccggtcagggagcggcatctcagtcatctccagcactagcgtggaccagcgcttacctgaggaaccagtgctagaggatgaacagcaacagctggaaaagaaacttccagtgacgttcgaggacaaaaagcgtgaaaattttgagcggggaaatctagagctagagaaacgcagacaggctttgctcgagcagcagcggaaggaacaagagcggctcgcccagcttgaaagggcggaacaggaaagaaaagagcgagagagacaggagcaagagcggaagagacaacttgagttggaaaagcagttggagaaacagagggagctggagcgacagagggaagaggaaagaagaaaggaaatagaacgcagagaggcggcaaaacgggaactggaacgtcagcggcagctcgaatgggaacggaataggcggcaggagttgctgaaccagagaaataaagagcaagaggatattgtggtgctgaaggccaagaagaagaccctcgagtttgaactggaggctttgaacgacaaaaaacaccaactggaaggtaaacttcaggacataaggtgtcgtctgaccacacagaggcaggagattgagagcactaataagagtcgcgagctgcggatcgcggagataacacatctgcaacagcaactgcaggaatcgcaacagatgttgggccggctcataccggaaaagcagattttaaacgaccagctgaaacaggtgcaacagaactctctgcacagagactccctagtcaccctgaagcgggcattagaggccaaggaattagcccgacaacatttacgggaccagctggatgaggttgaaaaggagacccggagcaagctacaagaaatcgatatttttaacaatcagctcaaggagttgcgcgagatacataacaaacaacagctccagaagcagaagtcgatggaggccgagagactgaagcagaaggaacaagagaggaagattattgaactggaaaagcagaaggaggaggctcagaggcgtgcccaggagagagataaacagtggctcgagcatgtccagcaggaagacgagcaccagaggcctcggaagctgcatgaggaagaaaagctcaagagagaggagtccgtgaaaaagaaggatggcgaggaaaagggaaagcaggaagctcaagacaagctgggccgactttttcaccagcaccaggagccagccaaacccgcggttcaggccccatggagcacagccgagaagggtcccttaacaatctccgcccaagagaacgtgaaggtcgtgtattatagagcgttatacccttttgaatcaagatcacatgacgaaattactattcagccaggcgatattgtaatggtgattgggtgttgggtcgatgaatcccagaccggtgaaccagggtggttaggcggagagcttaagggcaagacaggctggttccctgccaactatgccgagaaaatcccagaaaatgaagtccccgctcccgtgaaacctgtgacagactctacaagcgctcctgctcctaaattagcccttagggagacgcctgctccactggctgtgactagctctgagccctcgaccactcctaataattgggccgactttagctcaacctggccgacatccactaacgaaaaaccagaaactgacaactgggatgcgtgggccgctcaaccctctctcactgtgcctagtgcagggcaattgaggcagaggagcgctttcacacctgcaaccgccaccggaagcagtccctcacccgttctgggtcagggggaaaaggttgagggcctccaggcacaggcactgtacccctggcgtgcaaagaaagataaccatctgaactttaacaaaaacgatgtgataaccgtcctggagcaacaggacatgtggtggttcggtgaggtgcaggggcaaaaggggtggttcccaaagagctacgtcaagcttatttcgggccccatcagaaagagcactagcatggacagcggctccagcgaaagccctgcaagtctgaagcgcgtggccagtccggctgcgaagcctgttgtctccggggaggagatcgcacaagttatagctagttacactgctacgggccccgaacaattaactctggcgccaggtcagctgatcctgatacgcaaaaagaatcctggcggatggtgggaaggggagctgcaggccaggggcaaaaaacgccaaatcggctggttccctgccaattatgtgaagctgctttcccccgggacgtccaaaataacaccaaccgagcccccaaagtccacggctctcgcagctgtgtgtcaggtgattggtatgtatgactacaccgctcaaaatgatgacgaactagcgtttaacaaaggccaaataattaatgtgttaaataaagaggatcctgattggtggaagggagaggtgaacggtcaagtcggacttttcccaagcaactacgtcaagctgactactgatatggatccatcccagcagtggtgcagcgacctccacttactagacatgctcactcccaccgagcgaaaaaggcaaggatatattcatgagctgattgtgacggaagaaaactatgtgaacgacctgcaactcgttaccgagatcttccagaaacccctgatggagtcagagttgctgacggagaaggaagtggccatgatttttgtgaattggaaggagcttataatgtgcaatataaaactcctgaaagccctgcgagttagaaagaagatgtctggagagaagatgcccgtaaaaatgattggggatatattgagcgcccagctaccacacatgcagccgtacatccgattctgtagcagacagctgaacggggccgcactcattcagcagaaaacagatgaggcccctgatttcaaagaatttgtcaaacgtctggccatggacccaagatgcaaagggatgcctctgagttcttttattctgaaacccatgcagagggtcacgcgctatcctcttatcattaagaacatcctggaaaatacacctgaaaatcacccagaccactcgcatttgaagcatgcactagagaaggccgaagagttgtgctcccaggtgaacgagggtgtgagggagaaggagaacagtgaccgcctggagtggattcaggctcatgtacagtgtgaagggctgagcgaacagctggtctttaactcagtgactaactgcctgggaccacggaagttcttgcactccggcaagctgtacaaggccaagagcaacaaagaattgtacgggttcctgtttaatgattttctgttgctgacccagatcactaagcctctaggctcttctggtacagacaaggtcttttccccgaaatcaaacctgcagtacaaaatgtataagacaccgattttcctcaacgaggtcctagtgaagttgccaaccgacccttctggcgatgaaccaatcttccacatctcacacattgatcgggtgtacactctgcgggctgagagcattaacgaaagaactgcttgggtgcaaaagatcaaagccgcctccgagctctatatcgagaccgaaaagaaaaagcgcgagaaggcatacctggtgcggagccagagggcaactggcattggaagactgatggtaaacgtggtcgagggcatagagttgaagccatgtaggtctcatggcaagtctaacccatactgcgaagtgaccatggggtctcaatgccacatcactaaaacaattcaggatacactgaaccccaagtggaattcaaactgccagttctttatccgtgatctggaacaggaagtgttatgtatcaccgtgtttgagagagatcagttttccccagatgatttcctggggcgcaccgagatcagggtcgctgacattaaaaaggatcagggctcgaagggaccagtcaccaagtgtcttctcctccacgaggtgcctaccggggaaatcgtagtcaggctggacctgcaactgtttgacgaaccatag

SEQ ID NO: 191896 - DNA, 3237 bp, synthetic construct
  misc_feature 1..3237: note = Description of Artificial Sequence: Synthetic coding sequence
  source 1..3237: mol_type = other DNA
atggcccagttccccacccccttcggcggcagcctggacatctgggcaatcaccgtagaggagagagctaagcatgatcagcagtttcacagtcttaagcctatttccggctttattactggtgaccaagcacggaattttttcttccaaagtgggctgccccagcccgtgttggcccaaatttgggctctcgctgacatgaataacgatgggcgtatggaccaggtggagttctcaatagccatgaaactcatcaaattgaaactgcaagggtaccagctgccatctgctctcccacctgtcatgaaacagcagcctgtggcaatttcttcagctcctgcgtttggaatgggcggcatcgccagcatgccaccgttgacggccgtggcgcctgttcccatggggtctatccccgtggtgggcatgagtcccacactggttagttctgtacctactgccgccgtcccccctctggctaacggcgcaccacccgtgatccagccgcttcccgcctttgctcatcctgctgccacactgccgaaatctagtagcttcagtagaagcggacccggaagccagctgaataccaagctgcagaaagcacagagttttgatgttgcgtctgtgcctcccgttgctgagtgggctgtgccacaatcctctaggttaaagtaccgccaactgttcaatagtcacgacaagaccatgagtgggcatctgaccggtccacaggccaggactatccttatgcaatcctccttgcctcaggcacagttggcctcaatttggaatctgtctgatatagatcaagatggtaaactaaccgccgaggagttcatcttggccatgcatctaatcgacgtggctatgtcagggcagcccctgccccctgtcctgccaccagaatatatccctccatcctttagaagagttcggtcgggctcaggcatctctgttatcagtagcacctccgtggaccagcgcctccccgaagagcccgtgctggaggatgagcagcagcaactggagaagaagctgccagttacattcgaggataagaaacgagagaactttgaaagagggaatttagaacttgaaaaaaggagacaggcattactggaacagcaacgaaaggagcaagagcgtctggctcagctcgagagagcggagcaggagaggaaggaaagagaaaggcaggaacaggaacgcaaacggcaattggagctcgaaaagcagttggaaaagcagagggagttagagcgacagagggaggaagagagacgtaaggagatcgagcggagggaggcagctaaaagagaactggaacgacagagacaactggagtgggagaggaaccggcggcaggaactcttgaaccagcggaacaaagagcaggaggacattgtcgtgctaaaggccaagaaaaagacacttgagtttgaactggaggccctgaacgataaaaagcatcaactagaaggtaaactgcaggacattaggtgccgcctcacaacacaacgtcaggaaatcgagtctacaaataagtctcgcgaactgcgaattgctgaaatcacgcatctgcagcaacagttgcaagagtcccaacagatgttagggagattaatccccgagaagcagatcctgaatgaccagcttaaacaggtgcagcagaatagcctgcatcgagacagtttggtgactttaaagcgtgctttagaagcaaaggaactggcccgccaacatttaagggatcaattagacgaagttgaaaaggagaccagaagcaagctgcaggagatcgacattttcaacaaccaacttaaggaactcagagagatacacaataagcagcagctccagaaacagaagtctatggaggccgagagactgaaacaaaaggagcaggagcgaaaaatcatcgaactggagaagcagaaggaagaggctcagcgacgtgctcaggaacgcgataagcagtggctagagcacgttcagcaggaagatgagcaccagcgtccccggaaactccatgaagaggagaagctgaagcgcgaagaatcagtgaagaaaaaggatggcgaagagaaagggaaacaggaggcccaggataagctaggtagattgtttcatcaacatcaagagcctgcgaagccggcagtgcaggccccatggtctacagccgaaaagggaccactgaccatttcggcgcaagaaaacgtgaaagtcgtctattaccgtgccctatacccttttgagtcacgcagccatgacgaaatcactatccaaccaggggatattgttatggttgacgaaagtcaaactggtgagcccggatggttgggaggagagctgaagggcaagaccgggtggttccccgccaactacgcagaaaagatccctgaaaatgaagtccccgcgccagtgaagcctgtgacagactccacatctgcccctgccccaaaactcgccttgagggaaactcctgccccccttgccgttacctcgtctgagccttccacaacacccaataactgggccgacttctcgtctacttggccaacctcaaccaacgagaagccggagaccgacaattgggacgcttgggctgcccagcccagtctcacggtgccctctgctggtcagcttcggcagcgtagcgctttcactccagccaccgcaaccgggtcaagcccttctccagttctagggcaaggggagaaagtcgagggcctgcaggctcaggctctgtatccatggcgcgccaagaaggacaaccacttgaactttaacaaaaacgacgtgattacagtcttagagcagcaggacatgtggtggttcggagaggtgcagggtcaaaagggctggttccctaaatcatatgttaaattgattagcggcccaattcggaagtccacctctatggacagcggttctagcgagagccctgcatccctgaaacgtgttgcaagcccagccgcaaagcccgtcgtcagcggtgaggaatttatcgcaatgtatacttacgaatcttccgagcaaggtgacttaacctttcaacagggagatgtaattttggttacaaaaaaagatggggactggtggacaggcacagtaggcgacaaagccggcgttttccctagcaattacgtgcggttgaaggacagtgaggggtctgggacagcgggcaaaactgggtcattggggaaaaagccgggccccagctgcaatgtcaagtag

SEQ ID NO: 191897 - DNA, 3663 bp, synthetic construct
  misc_feature 1..3663: note = Description of Artificial Sequence: Synthetic coding sequence
  source 1..3663: mol_type = other DNA
atggcccagttccccacccccttcggcggcagcctggacatctgggctatcactgttgaagaacgtgctaagcacgatcagcagttccatagcctcaagcccatttctggtttcatcactggggaccaagcccgaaactttttttttcagtccggtctcccgcagcctgtgctcgcccagatttgggcattggccgatatgaataacgacgggcggatggaccaggtcgaattctcgattgccatgaagttgatcaaacttaagctccaggggtaccagttgcctagcgctctgccccccgtgatgaaacagcagcctgtggcgatcagctctgcccccgcgttcggcatgggaggaatcgcttccatgcctccccttacagcggtggctcccgtgcctatgggctccattccagtcgtggggatgagcccaaccctggtcagtagcgtcccaaccgcagccgtcccacctttggcaaatggcgcgccccccgtcatccagccactgcccgcgttcgcccaccccgcagccacacttccgaaaagttcttccttcagccggagcggaccaggctctcagcttaacacaaagttacagaaggcccagtcattcgatgttgcctccgttccacctgtggccgagtgggccgtccctcagtctagccggctgaaatatcgccagctcttcaatagccatgataaaaccatgtccggccacctgactggtcctcaggcaaggactattctgatgcagagctccctgccccaggcccagcttgcaagtatctggaacctgagtgatattgaccaagacggaaagttgactgcagaggagttcatattggcgatgcatctgattgatgttgcaatgagcgggcagcccctacccccagtcctgcctcccgaatacataccacccagtttccgacgagtgcgcagtggcagcggaatttccgtcatcagcagtactagcgtggatcaaagattgcccgaggaacctgtgctcgaggacgaacagcagcagctggaaaaaaagttgccggtgacctttgaagataagaaacgggaaaatttcgagagaggaaatctcgaactggagaagcggcgccaggctcttctggagcagcagcgaaaggagcaggagagacttgcccagctggagcgcgcagaacaggagcggaaggaacgggaaaggcaggaacaagaaagaaaacggcagctggagctcgagaagcaactcgaaaagcagcgagagctggaacgccaaagggaggaggagcggcggaaggaaatcgagaggagggaggcagcaaagagggagctggagcgtcagcgccagctggaatgggaacgcaacaggcggcaggaacttctaaaccaacgaaacaaagagcaggaagacatcgttgtattaaaggccaagaaaaagaccctggagttcgagctggaggcgctcaacgataaaaaacaccagctcgagggtaaactgcaggacatcaggtgtcgcttaactactcaaagacaagagatagaatccacaaataagtctcgggagttgaggattgccgaaattactcacttacagcagcagttacaggaaagccagcaaatgttagggcggttgatcccggaaaaacaaatcctcaacgaccagctgaaacaagtgcaacaaaattcattgcatagagattctcttgttaccctgaagcgggctctggaggctaaagaactagcccgccagcacctacgtgaccaactggatgaagtcgaaaaagaaacaaggtcaaaattgcaggagatagatatatttaacaaccagctgaaggagctgagggaaatccataataagcagcagctgcaaaagcaaaaaagcatggaggccgagaggctcaagcagaaggagcaggaaaggaagattatcgaactagaaaagcaaaaggaggaagcacagcgaagagcacaagagagggacaaacaatggcttgaacatgtgcagcaggaagatgagcaccagcgccctcggaaactccacgaggaggagaagctgaagagagaagaaagcgtcaaaaagaaagatggtgaggagaagggaaagcaggaggcccaggacaagctgggcaggctcttccatcagcaccaagaacccgccaagcccgccgtgcaagccccatggtccactgccgagaaggggcccttaactatcagcgcacaagaaaatgttaaggtggtgtattatagagcactatatccctttgaatcccggtcccacgacgagataactatccagcccggagacatcgtcatggtgaagggtgagtgggtcgacgaatcacagacaggtgaaccaggatggttgggtggcgaattgaaaggcaaaacgggctggttccccgccaactacgctgaaaagatccctgagaatgaagtgcctgctcctgtgaagccagtgacggattctacgagcgcccctgcgcccaagcttgctctgcgggagacccccgctccactggcagttactagctccgagccaagtacaacaccgaataattgggccgacttctcctcgacatggcccacaagcactaacgagaagcctgagactgacaattgggatgcatgggcagcacagccaagtttgaccgtgcccagcgccggtcagctccgacagagatccgcgtttacccctgccactgccactgggagttccccgtcccccgtgcttggtcagggggagaaggtagagggactgcaagctcaggctctgtacccatggagggcaaagaaagataatcacttgaacttcaataagaacgacgtaataacagtgcttgaacagcaggatatgtggtggtttggggaggttcagggacaaaaaggatggttccccaaaagctatgttaagctgatcagcggtcctatccggaaaagcacttcaatggattccgggtcctcagagtctcctgcctctctgaagagagtagccagtccagccgccaagcccgtggtgagtggggaagagttcatcgccatgtatacttatgagtccagcgagcaaggggacctgactttccagcagggggacgttatcctggtgacgaagaaagacggcgattggtggaccgggacggtgggcgacaaggccggcgtctttccatcgaattatgtccggctgaaggactccgaggggagcggaacggccgggaagacaggtagcttaggaaaaaagcctgaaatcgcacaggttatcgcctcatatactgcgaccggacccgaacaactgactttggctcccggtcagctgatcttaattaggaagaagaaccctgggggttggtgggaaggcgaactccaagctcggggtaagaagcggcaaatcggctggtttcctgctaattacgtgaagctcctgtctcccggcacctccaagatcacaccaactgaacctcccaagtccactgccctcgccgccgtttgccaggtcattggtatgtatgactacacggcccagaacgatgacgagctcgctttcaacaaagggcagatcatcaacgtgctgaacaaagaagaccccgactggtggaaaggcgaggtcaacggccaggttggcttgttcccgagcaattatgttaagctaaccactgatatggatccctcccagcagtag

SEQ ID NO: 191898 - DNA, 5166 bp, synthetic construct
  misc_feature 1..5166: note = Description of Artificial Sequence: Synthetic coding sequence
  source 1..5166: mol_type = other DNA
atggcccagttccccacccccttcggcggcagcctggacatctgggcaatcacagtggaggaacgcgctaaacacgaccaacagtttcactccctgaaaccaatttctggctttattactggtgatcaggcacgcaactttttcttccagtctgggctgcctcagcccgtcctcgcccaaatctgggcactggccgacatgaacaatgatggaagaatggaccaggtcgagttctccatcgctatgaagttgatcaagctgaaactgcagggctaccaactcccgtcagctctgccgcctgtaatgaagcagcagcccgtggccatttcttctgcaccggcttttgggatgggcggcattgccagcatgccccctctcactgccgtggctcccgtcccaatggggtccattcccgtagtcggaatgtcgcctacattggtgtcttccgtccctacagctgccgttcccccacttgcaaacggcgctccacctgtgattcagccacttcccgcttttgcacacccggccgctactcttcccaaaagcagttcattttcaaggagcgggcctgggtctcaactcaatacaaagctccagaaggctcagtcattcgatgtggccagtgtgcctcccgtcgctgaatgggcagtgcctcagtcttcgaggttgaagtataggcagctgttcaattcgcatgataagacgatgtcggggcacctgactggtccccaagcaaggaccattctcatgcaatcttcactccctcaggcacaactggcctctatatggaacctttcagacatcgatcaggacgggaagcttactgcagaagagttcatactggcaatgcatttgattgatgttgccatgtcagggcagcctttacccccggtgctgccgccagaatacattccaccatccttcaggcgcgtgcgttcaggatccggcatcagcgtgatttcctcaactagcgtggaccagcggctgcctgaggagccagtgttggaagacgagcagcagcagctggaaaagaaacttcccgtcacatttgaggacaagaagcgagagaacttcgagcggggcaacttggagctggagaagcgccgacaggccctgctggagcagcagcggaaggagcaagaacggctggcccagctggagcgcgcggagcaggaacggaaggagagggagcgacaggagcaagaacggaaacgccagttggagctcgagaagcagttagaaaagcagagagaattggagagacaacgggaagaggaaagaaggaaggaaatagaacggcgcgaagccgcgaaacgagagctcgaaaggcaacgacagctggagtgggagaggaacaggcgacaggagctgctgaatcagcggaataaggagcaggaggatattgtggtattgaaagctaaaaaaaagacactggaatttgagttggaggccctgaatgataagaagcaccagttggaagggaaacttcaggacattcgctgtcgcctgaccactcagaggcaggaaatcgaatcaaccaataagtctcgggagctccgtattgccgagatcactcacttgcaacagcagctgcaggaatcacagcagatgcttggtcgcctcatccctgaaaaacaaatcctgaatgaccagctaaagcaagtccagcagaacagtctgcatcgagattctctggtaaccttaaagcgcgccttggaggccaaagagcttgcaagacaacatctgagagatcagttagacgaggtggagaaggagacaaggagcaaactccaggagatcgacatctttaataatcagctgaaggagctgcgggagatccacaataaacaacagctccagaagcagaaaagtatggaggctgagaggctgaagcagaaagaacaggagagaaaaatcatagagctggaaaaacaaaaagaggaggcccagcgcagagcccaggagagggataagcagtggctggagcacgtccaacaggaggacgaacaccagagaccacgaaaattacatgaggaagagaaactaaagagagaggaatcggtgaaaaagaaggacggcgaggaaaagggaaaacaggaagcacaggataagctgggtaggctttttcaccagcatcaagagccagctaagccagccgtgcaggccccctggtcaaccgcagaaaagggtccactgacgattagcgctcaggaaaatgtcaaagttgtgtactaccgtgctctgtatccattcgaaagccgctcacacgatgagattacaatacaaccaggcgacattgtaatggtgaagggggagtgggttgatgaaagtcagacaggagagccagggtggctaggcggcgagctgaaaggtaaaacagggtggtttcctgcaaattatgccgaaaagattcctgagaatgaggtccctgcccctgtgaaaccagtgactgattccacgtcagccccggcccctaagctcgccctgagggagacccccgcccccttggcggtcacatcaagcgaaccctccaccactcctaataattgggccgacttttcaagtacctggcctacttccacaaacgagaagcctgagaccgacaattgggatgcatgggccgcacagccctcattgacagtcccatccgccggacaattacggcagaggtccgcgttcactcccgctacagctacagggtctagcccctcaccagtactgggacagggtgaaaaagtagagggcctgcaggctcaggccctgtatccatggcgtgctaagaaggacaaccatcttaatttcaacaaaaacgatgtcatcaccgtcttagaacaacaagacatgtggtggttcggcgaggtgcaggggcagaaggggtggtttcccaagtcatatgtgaagctgatcagtggtccaattcgtaagagcacatcgatggattcaggctcttctgagagccccgctagcttaaaaagagtggccagccctgccgcaaagccagtcgtctccggagaggagttcattgcaatgtacacgtatgaatcttccgagcagggcgacttaacattccaacagggtgacgtgattctggtgaccaaaaaggacggagattggtggacagggacagtgggtgataaggccggggtttttccgagtaactatgttcggctgaaagattccgaggggagcggcactgcaggaaagactggaagcctcggtaagaaacctgagattgctcaagttattgctagttacaccgccactggccctgagcagttgaccctggcccctgggcagctgatactgataagaaagaaaaacccaggaggctggtgggagggtgagctgcaagcacggggtaaaaaaagacagatcgggtggttcccggcgaattacgtcaagttactgagccccggtacttctaaaattaccccaacggagcctcccaagtctacagccctggcagcagtctgtcaggttatcggcatgtatgattacacagcgcagaacgatgacgaactggccttcaataaggggcagatcattaatgtgctgaacaaagaggatcctgactggtggaaaggtgaagttaatggacaggtaggcctgttcccatcaaactatgtgaagctgaccaccgatatggacccctcccagcagtggtgtagcgacctgcatttgctcgatatgctcacccctacagaacgcaaacgtcagggttatattcacgaactgatcgtcactgaggagaactatgtgaatgacctacagctcgtcactgaaatttttcagaagcctctgatggagagtgaactcctgactgaaaaggaggtggccatgatctttgtgaattggaaggagttgatcatgtgtaatatcaagcttctgaaagccctgagagttaggaagaagatgtccggagagaaaatgcctgtgaagatgataggagacatcctgagcgctcagctcccacacatgcaaccttatattcgattctgctctcgccagctaaacggcgcagcacttattcagcagaagacggacgaggcccccgatttcaaagaatttgttaagagactggccatggatcctcgctgtaaaggcatgccgctctcctcgttcatcctgaaaccaatgcagcgagtgacccgttatcccctgatcattaaaaacatattggaaaacactcccgagaatcaccccgaccattcccacctgaagcacgcgctggaaaaggcagaggagctgtgcagtcaggtaaatgagggtgtccgggagaaagaaaactccgacaggctggagtggattcaggcccatgtgcagtgcgaagggttgtcggagcagctggtgtttaacagtgtgacgaattgtctcggtccaaggaagttcctgcatagcgggaagctgtacaaggctaaatcaaacaaagaactatacggctttctctttaatgacttccttctcctcactcagattacaaagcccctgggatcttcggggacagacaaagtcttttccccaaagtccaacttgcagtacaagatgtacaaaacacctatcttccttaatgaagtgttagttaaactgcctaccgacccatctggtgatgaaccgatatttcatatatctcacatagacagagtttatacactgcgcgcggaaagtataaatgagcggaccgcctgggtgcagaaaataaaagcggctagcgaactttatatcgagacagagaagaagaaaagagaaaaagcttacctcgtgaggtcacagagagctactgggattggccgactgatggtgaatgtggtggagggcattgagctgaagccatgcagatcgcatggcaaaagtaacccgtactgcgaggtgacaatgggatctcagtgtcatattacgaagacgatccaggacacacttaatccaaagtggaatagcaattgtcagttttttattagagacttggaacaagaggttctatgtataactgtgtttgagcgagaccagttctcaccggacgactttttgggccgtacggagattcgggttgccgatattaagaaagatcaaggaagtaagggtcccgtgactaaatgcttgctgctgcacgaggttccaaccggggaaattgtggtacgactggacctgcagttgtttgacgagccatag

SEQ ID NO: 191899 - DNA, 3048 bp, synthetic construct
  misc_feature 1..3048: note = Description of Artificial Sequence: Synthetic coding sequence
  source 1..3048: mol_type = other DNA
atggcccagttccccacccccttcggcggcagcctggacatctgggccatcaccgtcgaggaacgggctaaacacgaccagcaattccacagcttgaagcccatcagtggctttataactggtgaccaggcccggaattttttctttcagtccggtctccctcagcccgtgctagcccaaatttgggcactcgccgacatgaataacgatggacgcatggaccaggttgaattttcaatcgcaatgaagcttatcaagcttaagttgcagggctaccaactgccttcagccttacctcccgtcatgaagcagcagcccgtagccatctctagcgcccctgctttcgggatgggcggcatagccagcatgccaccccttactgccgtggccccggtgcctatgggaagtatcccagtcgtgggcatgtcaccaacgttagtgagcagtgtccccaccgccgccgtgcccccccttgccaacggcgcccctcccgtgattcagccactgcctgccttcgcccaccctgcggccactctgccaaaatcaagtagctttagccgatccggccccggatcacagctgaatacaaagctccagaaagcacagtcatttgacgtagcctctgtgccccctgtggccgagtgggcagtgccacagtcctcacgcctgaagtaccgccagctgtttaatagccacgacaaaaccatgagcggacacctgacaggtcctcaggccaggaccattttgatgcagtccagcttgccgcaggctcagcttgcttccatttggaatctctccgacattgatcaagacggtaagttgactgcagaggagtttatcctggccatgcacctgatcgacgtggccatgagtggccagcccctcccaccagtgctaccacccgagtatatcccacctagttttcggcgcgttagatcaggcagcggcattagcgtgatatcaagtaccagtgtggaccaaagattacccgaagagcctgtgcttgaagatgaacagcaacagctggagaaaaagttgcctgtgacatttgaagataagaagagggaaaatttcgagagaggcaatttagaactggagaaacggcggcaagcactcttagaacagcagcggaaggagcaggagaggcttgcccagctggaaagagcagaacaagaaagaaaagaacgagaacggcaggaacaggaaaggaagcgacagctcgagctcgaaaaacagctggaaaaacagcgtgaactggagcgccagcgggaggaggaaaggcgaaaagaaatcgaacggagggaagccgccaagcgggaacttgaaaggcaacgtcagttggagtgggagaggaacaggagacaggagttgttgaatcagcgcaacaaggagcaggaggacatcgtcgttctcaaggcaaagaagaagacactggaattcgagctagaagcactgaatgataagaaacaccaactcgagggcaagctgcaagatatcaggtgtcgtttgactactcagcgccaggaaatcgagtccactaacaagtccagagaattgcgaattgcagagataacccacctccagcagcagctacaggaaagccagcagatgctgggccggctgattcctgagaagcagatcctgaatgaccagttgaagcaagtgcaacagaacagccttcaccgtgactctctcgttacactcaaaagggccttagaagcaaaggagctggcgcgtcaacacctgcgtgaccagcttgacgaggtagaaaaggagacgcggtccaagctccaggaaattgacatattcaataaccagctaaaggaactgcgggaaattcacaacaaacagcaacttcagaagcagaaaagcatggaggcagagcgattgaagcagaaggaacaggaacggaagatcattgagctggagaaacagaaagaagaagcacaacgacgggcccaggagagagacaaacagtggctcgaacacgtccagcaagaagatgagcatcaaaggcctcggaagttacacgaggaggaaaaacttaagcgcgaggagtccgtgaagaagaaggacggcgaagagaaggggaaacaagaggctcaggataaactgggacgattgtttcaccaacaccaggaaccggccaaacccgctgtccaagctccctggtccacagccgagaagggccccttgaccattagtgcacaggaaaatgtgaaagttgtttactaccgagctctatacccgttcgaatctaggtcccatgacgagatcaccatccagcctggagacatagtgatggtggatgagtcacagaccggcgaacctgggtggttaggcggagagttaaagggtaaaacaggatggttcccggcgaattacgctgagaaaattccagaaaatgaggtgcccgcacctgtgaagcctgtgactgattccacatcagcgccggcccctaagctcgctctacgggagacacctgcacctttggcggtgacctcctctgagccttctacaacaccaaataattgggctgatttttcctctacatggcctacctcaaccaatgagaagccagaaacagataattgggatgcctgggccgcccagcctagcctcactgttccctccgctggacaactgcgtcagagatcggcgttcacacccgccactgcaacaggctcctcccccagccccgtgttaggacaaggcgaaaaggtggaaggcttgcaggcacaagcgctgtatccgtggagagccaagaaggacaatcacctcaatttcaataagaacgatgttataacggtgcttgaacagcaggacatgtggtggttcggcgaggtccagggccagaagggctggtttccaaaatcatacgtgaagttaatctcgggccccatccggaagagcacctccatggacagcggttcatcagaatctcccgcctctctcaagagggtggctagtcctgcagctaagccagttgtgagcggggaagggctgtggaactgctgggaaaaccgggagtttcgaaaaaagacctag

SEQ ID NO: 191900 - DNA, 3063 bp, synthetic construct
  misc_feature 1..3063: note = Description of Artificial Sequence: Synthetic coding sequence
  source 1..3063: mol_type = other DNA
atggcccagttccccacccccttcggcggcagcctggacatctgggctattaccgtagaggaaagagccaagcacgaccagcaattccattccctcaagcctatcagcgggttcataacaggtgaccaggcccgaaattttttcttccagagcgggttgcctcagcccgtactggctcagatttgggcacttgccgacatgaataatgacgggaggatggatcaggtggaatttagtatcgctatgaaactgatcaaactgaagctgcaaggataccaacttcctagcgccctgccacctgtaatgaaacagcagcccgtggccatctccagtgctcctgcattcggcatgggaggcattgcctcgatgcccccgctcaccgcggtagctcctgtgccaatggggtccatccctgtcgtcggcatgtcacccacactggtatcgagcgtccctactgcagcggtcccaccactcgctaatggggccccccctgtcattcagccccttcccgcctttgcccacccagccgccaccctgcccaagtcctcatcctttagccgcagcggccctggatcccaattgaataccaagctacagaaggcccagtcattcgacgtagctagcgtgccccccgtggctgaatgggccgtgcctcagagcagtcgtcttaagtacagacagctctttaactcacatgacaaaacaatgagcggtcatctgactgggcctcaggcacgaaccatcctcatgcagtcttccctgcctcaggcccagctagcctcgatatggaatctgtccgatattgatcaggatggcaaactgacggcggaggaattcatcctggcaatgcatctgatagatgtggcaatgtctgggcagcccctcccgcccgtgctccctcctgaatatattcctccgagtttcaggagggtccgctctggaagcgggatttcggtcataagctcgacctctgtggatcaaagactcccagaggaacctgtgctcgaggatgagcagcagcaactggaaaagaagcttcccgtgacctttgaggacaagaagcgcgaaaactttgaaagagggaacctggagctggagaagaggcgccaggccctgctggagcagcagaggaaggagcaggagcgcttagctcagctggagagagccgaacaagaaaggaaggaacgagaaagacaggagcaagaaaggaaacgccagctggaattagagaaacaactggagaagcagcgagaattggagcgacagcgggaagaggagcgccgaaaagagatagaacgacgcgaagccgcgaaaagagagctggagagacaaaggcagctggagtgggagcggaaccgacgacaggagctcctcaatcaaaggaacaaggagcaggaagacattgtggtgctcaaggctaagaagaaaaccttggaattcgagctcgaagctcttaatgataaaaaacatcagttagaagggaagttacaagatatccggtgcagactcactactcaacggcaagagattgagtcaaccaacaaatcaagggagctccgcatagcagagattacccacttgcagcagcagttgcaggaatctcaacagatgctggggcgcctgattcctgaaaaacagatcctgaatgaccaactgaagcaggtacaacaaaacagcctccatagagatagcctggttaccctgaaaagggccctggaggcgaaagagctcgcccgccagcacttgagggatcagttggacgaggtcgagaaagagaccagatctaagctacaggagatcgacattttcaataaccagttgaaagaactgagagaaattcacaataagcagcagctacaaaagcagaaaagcatggaggccgaaagactgaagcagaaggaacaggagcggaaaatcatcgagcttgagaagcagaaggaggaggcccagcggagagctcaggagagggacaaacagtggctggagcacgttcaacaggaggacgagcaccagcgtccccggaagctgcacgaggaggagaaactgaagcgggaggaatctgtgaagaagaaggatggagaggagaaaggcaagcaggaggcccaagacaagctcggacgcctgttccaccaacaccaggagcctgcgaagccagcagtccaagcaccatggagtacggcggagaaaggtcccctcacaatcagcgctcaggagaatgtcaaggttgtatactacagggcactctacccattcgagtcccgcagccacgatgagataactatccagccaggcgatatcgtaatggtggatgagagccagactggtgagccaggatggcttggcggcgagttaaaggggaaaaccggctggttcccagctaactatgccgaaaagatcccagaaaatgaggtgcccgcccctgtgaagcccgtcacggacagcacctctgcgcccgctccaaagcttgcacttagagagacccccgcgcccctagctgtgacaagctcggagcctagcactacccccaataattgggccgacttcagctcaacctggcccacatcaaccaacgagaaacccgagaccgacaattgggatgcgtgggccgcacaaccctccctgacagttccatctgcgggccagctgaggcaaaggtccgccttcacccctgcgaccgctaccggatctagtccctctcctgttttgggtcagccagattttctcttgcatccctcgatgcgccttggccacatgcagccgcgcatcgtactgctgtttcccgacccactgcagtgttctacaagcagactcttacctatgctgcgcccacgcccaggcgtgccattccttcgctctccctcttgtcagagtccctcccacccttcccggcccatctccgacgccgcccctagcgttaaatttacgctgatgcccccaggcaggattcacccatgtttcctgttcataccggcagtcaacagccggaattcgttccttgtatatttcatactaccaggagggacactgggatgtttctacctgtgtctcccacactatttgtag

SEQ ID NO: 191901 - DNA, 3435 bp, synthetic construct
  misc_feature 1..3435: note = Description of Artificial Sequence: Synthetic coding sequence
  source 1..3435: mol_type = other DNA
atggcccagttccccacccccttcggcggcagcctggacatctgggccattacagtggaagagcgcgcaaagcacgaccaacagtttcactcactgaagcctattagcgggttcatcacgggggaccaggcccgcaacttcttctttcaaagtggccttccacagcccgtcctggctcagatctgggctcttgctgacatgaacaatgacggtcgaatggatcaggttgagttttctattgctatgaaactcattaagttgaaattgcaaggataccagctcccttcagctctgcccccagtaatgaaacaacaacctgttgccattagctctgcgccagctttcggaatgggtggtatagctagcatgccacccctaaccgcggtggcaccagtgcctatgggcagcattcctgtggtgggtatgagtcccacgcttgtgagctcggttccaactgctgcagtacccccattagccaatggggcccctccagtgatccagcccctgccagccttcgcccaccccgccgctaccctgccaaagtccagctctttttcgagaagcgggccaggcagtcagctgaatactaagctccagaaggctcagtcatttgatgtggcaagtgtaccccctgtcgccgagtgggctgtgccccagtccagtagactgaaataccgacagctgttcaactcgcacgacaaaacgatgagcggccatctcacgggccctcaggcccgaaccatactgatgcagagttccctgccacaggcccagctggccagcatatggaacttaagcgacattgatcaagacggcaagctgacggccgaagagtttatcttagctatgcatcttatcgacgtagccatgagcgggcagcccctcccgccagtactccccccggaatacattccccccagtttcaggagggtgcggagtggatcaggaatctccgtaatcagctcaacctccgtggatcaacggttgcctgaggaaccagttctggaggacgagcagcagcagttggagaaaaagctaccggtcactttcgaggacaagaagagagaaaacttcgagagagggaacttggagctggagaagagaaggcaggcactcctggagcagcaacgcaaggagcaggaaaggttggctcagctggagcgtgctgaacaggagcggaaagagcgcgagcgacaggagcaggagcgcaagcgtcagctggaactggaaaagcagttagaaaagcagagagagcttgaaaggcagcgggaagaagaaagacgtaaggaaatcgaacgccgcgaagcagctaagagggagctggagcgtcagagacagctcgagtgggaaaggaacagacgacaggagttactgaaccagcggaacaaagaacaggaggacattgtagtcttgaaggccaagaaaaagacgctggagtttgaattggaggccctgaatgataaaaagcatcagctcgaaggtaaactgcaggatatcaggtgcaggttaactacccagcgccaggagattgagtctacaaataagagtagagagctacgcattgctgaaataactcatttgcagcagcagctgcaggaaagccagcagatgttaggcaggctgattcccgagaaacagattctcaatgatcagttaaagcaggtgcagcagaactccttacacagggacagcctggtcacgcttaaaagagccttagaggccaaggaactggcccgccagcacctgagggatcagcttgatgaggtggagaaagaaactaggtcaaaactgcaggaaattgacatcttcaataaccagcttaaagaactacgcgagattcataataagcagcagctccaaaaacagaagtccatggaagctgagaggctcaagcagaaggagcaggagagaaagattatagaacttgagaaacagaaggaggaggctcagagaagagcccaggagcgtgacaagcagtggcttgaacatgtgcagcaggaggatgaacatcagcgcccccgcaaactgcacgaagaagaaaagcttaaaagggaggaatctgtcaaaaagaaggatggcgaggagaaagggaaacaagaggcccaagacaagttgggccggctcttccatcagcaccaggagccagcgaaacccgccgtacaggctccctggtctaccgccgagaaaggacctctaacaatctcagcccaagagaatgtgaaagtggtctactaccgggcgctctacccatttgaatcccggagccacgacgaaattacaattcagcctggggatatagtgatggtagacgagtctcaaactggtgagcccgggtggctagggggcgagcttaaaggcaagactggctggttcccagccaactatgcggaaaagatcccggagaacgaggtccctgcacctgtcaaaccagtgacagacagcacgagcgcacccgcacccaagttggccctgcgggagaccccggcacctctggccgtcacttctagcgagccatccactacccctaataattgggcggacttctcctctacctggcccactagcacgaacgaaaagcccgagaccgataactgggatgcttgggccgcacagccttcgttgacagtcccctcagctggccagctgcgacaaagaagcgccttcaccccagccacagccactggctcatccccttctcctgtattgggccaaggggagaaagtggaaggcctgcaagctcaggccctttacccttggcgggcgaaaaaagacaatcacttgaacttcaacaagaacgacgtgataaccgttcttgaacagcaggatatgtggtggttcggggaagtgcagggtcagaaaggctggtttcccaaaagctacgtgaagcttatctctggacctattcgcaaaagtacgtctatggactctggcagctccgagtcccccgcgtcattgaagagagttgcctctccggccgccaaaccggtggtaagcggagaagagatcgcgcaggttatagcctcttatacagccactggacccgagcagctgacgctagcccccggtcaactgatactcattcgaaagaagaatcccggtggctggtgggagggtgaactccaagcccgcggtaagaaaagacagatcggctggtttcccgccaactacgtaaaacttttgtctcccggcaccagtaagattacccccactgagccaccgaagtccactgcactcgcggccgtgtgtcaggttatcggcatgtatgactataccgcccagaacgacgatgagctggcattcaataagggccagataattaacgtgttgaacaaggaagacccagactggtggaagggcgaggtcaacgggcaggttggactgttcccatccaactatgttaagttaacgacagatatggaccccagccaacagtag

SEQ ID NO: 191902 - DNA, 3648 bp, synthetic construct
  misc_feature 1..3648: note = Description of Artificial Sequence: Synthetic coding sequence
  source 1..3648: mol_type = other DNA
atggcccagttccccacccccttcggcggcagcctggacatctgggcaattacggtagaagaacgcgccaagcacgatcagcaatttcacagtttgaagccgatctcgggttttatcactggagatcaggcccgtaactttttttttcagagtggactgccccagccagtgctcgcgcaaatctgggccttggccgatatgaataacgacggacgaatggaccaagtcgagttcagtattgcaatgaaactcatcaagcttaagctgcagggttatcaattgcccagtgcattaccccctgtgatgaagcagcaacccgtggctatttcttccgctcccgcatttggcatgggaggtattgctagcatgccacctctgaccgcagtggcccccgtcccgatgggttccatcccggtcgtgggaatgtcaccgactctggtctcatccgttccaaccgctgccgttccaccactggctaatggagcgccccccgtgatccagcccctgccagcctttgcccaccctgcagcaaccctccctaagtcatccagcttctctaggagtggtccaggctctcaattgaatacgaaactgcagaaggctcaaagcttcgacgtggcgtctgtgccgcccgttgccgaatgggccgtgccccagtccagcaggttgaagtacaggcagctgttcaattctcatgataagacaatgtccggacatcttactggtccccaggcccgcacaatcttgatgcagtcatcattgcctcaggcccagctggcttccatttggaatctgtctgacatagaccaggatggcaaacttacagccgaggaattcattttggctatgcacttaatcgacgtggcaatgtcaggacaacccctacctcccgtgttacctccagaatatattcccccatctttcaggcgagtaagaagtggatcagggatctctgtgattagttccaccagtgtggaccagagactgcctgaggaaccggttctggaagatgaacagcagcagttggaaaagaagctgcctgtcactttcgaagacaagaaacgtgagaacttcgagcgtgggaacctggagctcgaaaaacggaggcaggcactgctcgagcagcagaggaaagagcaagagcgcctcgctcaattggagagggcagaacaggaacggaaagagcgtgagagacaggaacaggaaagaaaacggcagctggagctcgagaaacagctcgaaaagcagcgggaacttgaaagacagcgtgaggaggagcggagaaaagaaattgagaggcgggaggcagctaaacgcgaactggaacgtcagagacagcttgagtgggaaaggaaccgcaggcaggagctgctcaatcagagaaacaaagagcaggaagatatagtcgtgctgaaggcaaagaagaagacactggagttcgagctggaggctcttaatgataaaaaacaccaacttgaaggaaaacttcaagatatccgttgcaggttaacaacgcagagacaggaaatagagtctacaaataagtctagggaactacgcatcgccgaaatcactcacttgcagcaacagttgcaggaatcacagcagatgttgggacgtttaattcctgagaagcagatattgaacgatcagcttaagcaggtgcaacagaattcactccatcgggacagtctggtcaccttgaagcgcgccctcgaagctaaggaactggcccgacaacacttgagagaccagctggatgaagtagagaaagaaaccaggagtaaattacaggaaatagatatttttaataatcaactcaaggaactgagagagattcacaacaagcaacagctgcagaaacagaaatctatggaggctgaaagattaaagcaaaaggaacaggagcggaagataattgagctggagaagcagaaggaggaggcacagcgccgcgcccaggagcgggacaagcaatggcttgagcacgtgcaacaggaggacgagcatcaaagaccccggaagctacatgaggaagaaaaattgaagagagaagagtcggtgaagaaaaaggacggagaggagaagggcaagcaggaggctcaggacaagttgggacggctctttcatcaacaccaggagcccgccaaacccgctgtgcaagccccatggtccacagctgaaaagggtccacttaccatctctgctcaggagaacgttaaggtcgtttattatagagccttgtaccccttcgaatctcgatcccatgacgaaattacaatccagcccggcgacatcgtcatggtggatgagtctcaaactggcgaaccaggatggttaggcggggaacttaagggcaaaaccggatggttcccggcgaattacgctgaaaagatcccagagaacgaggtgcctgcacctgtaaaacccgtgacggacagcactagcgctcccgctcctaaactggctctgcgcgagactccagctccactcgcggtaacctcatccgagcctagtaccacacctaataactgggccgattttagctctacgtggccgacctcaaccaacgagaagccggagacagataactgggacgcttgggctgctcagccctctctgacggtcccttctgccggacaactcagacagaggtccgctttcacgcccgctaccgctactggctcatcaccctcaccggttttaggtcagggagaaaaagtggagggactgcaggcgcaggccctctacccctggcgggcaaagaaagacaatcacctgaattttaacaaaaatgacgtgatcacagtactggaacagcaggatatgtggtggttcggcgaggttcaaggccagaagggctggtttcctaagtcttatgtcaagcttatctccgggcccatacgtaagtcgactagcatggattctggctctagtgagtcgcctgcaagcctcaaacgtgtcgcaagtcccgctgcgaagcctgtagtttccggagaagaattcattgctatgtacacatacgaatcctcggaacagggggacctgaccttccagcagggtgacgtgattctggttacaaaaaaggacggggattggtggactggtaccgtgggggataaagctggcgtcttcccatcaaactatgtcaggctgaaagattccgagggcagcggaacggccgggaagactggatccttagggaaaaagcctgagatcgctcaggttattgcctcatacaccgcgaccggacctgaacagcttaccttagctcccggccaactcattctgattaggaaaaaaaacccaggggggtggtgggagggagaactacaggctagaggaaaaaagcggcagattggctggttccccgccaattatgtgaaacttctctccccaggcaccagcaagataacacctaccgagccccccaaatctactgccctggcggctgtgtgccaagtgatcggtatgtacgattacacagcccagaacgatgatgagcttgcgtttaataaaggtcagattatcaatgttctcaataaggaagaccctgattggtggaagggggaggtaaacggccaggtgggccttttccccagcaattatgtgaagctcaccaccgacatggaccctagtcagcaatag

SEQ ID NO: 191903 - DNA, 3537 bp, synthetic construct
  misc_feature 1..3537: note = Description of Artificial Sequence: Synthetic coding sequence
  source 1..3537: mol_type = other DNA
atggcccagttccccacccccttcggcggcagcctggacatctgggccatcactgtggaggaacgcgccaagcatgaccaacaattccacagtcttaagcctatctcaggattcattacaggcgaccaggccagaaacttctttttccagagtggtctgccccagccggtgctggcccagatctgggcccttgccgacatgaacaacgacggccgcatggatcaggtggagttctcaatcgccatgaagctgattaaactgaagctgcagggctaccagctgcccagcgcgcttccacccgtcatgaagcaacagccggtcgccatctcgagtgcccccgcctttgcagcagtccctcctctggctaatggggctcctccagtgatacagcctttacccgcctttgcccacccagcggcgacactccctaaatcaagctctttcagccggtcgggccccggaagccagttgaacaccaaattgcagaaagctcaatcctttgacgtggccagtgtgccgcccgtggcagaatgggccgtgccgcagtcttcacgactgaagtataggcaactcttcaactcccacgacaaaacaatgtctggacatctgaccggccctcaggcccgcaccatcctgatgcaatcctccttgccgcaggcccagcttgcgtctatctggaatttgtctgatatcgatcaggacggcaagttgactgctgaggaattcattctggctatgcatctgattgatgtcgcaatgtccggacagcctttgccgccggtattacccccagagtatattccgcctagtttccgacgcgtgagaagtggctctggaatctcggtgattagtagcacatcagtagatcagcgactgcccgaagaaccagtgctggaagatgagcagcaacagctagagaaaaaacttcccgtgacgtttgaggataagaagcgggaaaattttgaacgaggcaacttggaattggaaaagcggagacaagcactgcttgagcagcagcgcaaggagcaggagcgcctggcccagttggaacgagctgagcaagaacgtaaggaaagagaacgccaagaacaggaacgcaagagacaactcgagcttgagaaacagctcgagaagcagcgtgagctagaacggcaacgagaagaggagcggcgtaaggagattgagcgtagggaagccgcgaaaagagaactcgaaaggcagaggcagctcgaatgggaacgcaaccggcgacaggagctcctaaatcagcggaacaaagagcaggaggacatcgtcgtcctgaaggccaagaagaaaacgctcgagttcgagcttgaggcgctgaacgacaagaaacaccagctggaaggcaagctgcaggacatccgttgccgcctcacaactcagcggcaggagatcgagagcaccaataagtcccgcgagctccgcatagctgagattacacacctgcagcagcagttgcaggagagtcaacaaatgctgggacgcctcatccctgaaaaacagatcctgaatgatcagctcaagcaggtgcagcagaactctctacatcgtgactccctggtcactttgaaacgcgccctggaagcgaaggagctcgcgagacagcatctgagagaccagctcgacgaggtggagaaggagacgcggtctaaactgcaggagatcgatattttcaacaaccagctgaaggaattacgagagatacataacaagcagcaactccagaagcaaaagtccatggaggctgagcgcctcaagcagaaggaacaagaaaggaagatcattgaactggaaaagcagaaagaggaggcccagaggagagcgcaggaacgggacaagcaatggctagagcatgtacaacaggaggacgaacaccaacgcccgagaaagctgcacgaggaggaaaagctcaagcgggaagaatcggtgaaaaagaaggatggtgaggagaagggcaagcaggaggcgcaggataaactggggaggttgttccaccagcaccaagaacctgccaagcctgccgtacaggccccttggagtacggcagagaaaggccctctcacaattagcgcgcaggaaaacgtgaaggtggtgtattaccgcgcgctctacccatttgagtctaggagccacgatgaaataaccattcagcccggcgatatagtgatggtggacgaatcacaaactggagagcctggctggctcggcggcgagttaaaaggcaagacagggtggtttcctgccaattacgcagagaaaattcccgaaaacgaagttcccgccccagtgaagcctgtaaccgactctactagcgctcctgccccgaagctggccctcagagaaacccctgctccactggctgtgacaagtagtgagcctagtacaactccaaacaattgggctgacttttcaagtacttggcccacatctaccaatgaaaagcccgaaactgacaattgggacgcctgggccgcccagccaagcctcaccgtcccaagcgcagggcagctgcggcagcgatccgcatttaccccagcaactgctacaggatccagcccgtcacctgtgctcgggcagggagaaaaggtggagggccttcaggcccaggctttgtatccgtggagagctaaaaaggataatcacctgaactttaataagaacgatgtgatcacagtgttggagcagcaggatatgtggtggtttggagaggtgcagggccagaaggggtggtttccaaagagctatgtaaaactcatttctggccccatccgcaagtcaacttcaatggactcaggatcatctgagagccctgccagcctgaaacgggtcgccagcccagccgctaaacctgtggtgtccggggaagaattcatcgctatgtatacatatgagagcagcgaacagggggacctcacgttccagcaaggagatgtcattcttgtgacaaagaaagacggcgactggtggacaggaaccgtaggagacaaagcgggcgtgtttccatcaaattatgtcaggttgaaagattcagaggggtccgggactgctggcaaaacaggtagtctggggaagaagcccgaaattgcccaggtcattgcctcatacaccgcaactggtcctgaacaactgactctcgcacccggtcagctgattttaattcggaaaaaaaaccctggtgggtggtgggaaggcgaattacaggcgaggggaaagaagagacagatcggatggtttccagccaactatgtcaagctgctctctcccggaaccagtaaaattacgccgactgagccccccaagtctaccgcacttgccgccgtgtgtcaggtgattggcatgtacgattatacagcacaaaacgacgatgagctcgccttcaacaaaggccagattatcaacgtgctcaacaaggaggacccagactggtggaagggggaggtcaatgggcaggtgggcctctttccttccaactacgtgaagctgaccaccgacatggacccctctcagcaatag

SEQ ID NO: 191904 - DNA, 3450 bp, synthetic construct
  misc_feature 1..3450: note = Description of Artificial Sequence: Synthetic coding sequence
  source 1..3450: mol_type = other DNA
atggcccagttccccacccccttcggcggcagcctggacatctgggctatcacagttgaggaaagggcgaaacatgaccagcagtttcattctttgaagcctatcagtgggttcatcaccggggatcaggctaggaatttcttcttccagagcggtctgccccagcccgtgcttgcacaaatctgggcactagccgatatgaataatgacggcaggatggaccaggtggaattctccatagctatgaagctgatcaaactaaaactgcagggataccagctgccgtctgctttgcccccagtcatgaagcagcagccagtcgctataagttcagctcctgcgttcggaatgggggggattgcctcaatgcctccacttactgcagtggcccccgtaccaatggggtccatcccagttgtcggaatgtcccctactttggtgtcctcagttcccacagcagcagtgccccctctggcgaacggggccccccccgtcatccaaccactgcccgctttcgcccacccagcagccaccttacccaagagctcctccttctctcggagcggtcctgggagccagctaaacaccaagctccagaaggcacaaagctttgacgtggcttcagtgccgccagtggcagagtgggccgtccctcagagcagccgcctgaaataccgacagttgttcaactcccatgataagacaatgtccggccacctgacaggacctcaagcgcgcacaatcctcatgcagtcaagtctgcctcaggcccagctcgctagcatatggaacttatccgacatcgaccaggacggtaagctgactgccgaggaattcattctagccatgcatttgattgacgtcgccatgtccggccaacctcttccacccgtgctccctcccgagtacatccccccaagttttcgtagagtaaggtcgggatccggcataagtgtaataagtagtacaagcgtggatcagaggctcccggaggagcccgttctggaggatgagcagcagcagctggaaaaaaagctgcccgtcaccttcgaagacaaaaagagagagaattttgagcgcgggaacctggaactggaaaaaaggcgacaagctctcctggagcaacagagaaaggagcaagagcgtctggctcagttagagagagccgaacaggagcgtaaggagagggagcggcaggagcaggaacgcaagcggcaactggaactggaaaaacagcttgaaaaacaaagggaattggaacggcagagagaggaagagcgtaggaaagagatcgagcgcagagaagccgctaagcgagagctggagcgtcagcgccagttggagtgggaacgcaatcggcggcaagaactcctcaaccagcgcaacaaagaacaggaagacatagtcgtgctgaaggccaaaaagaagacactagaattcgagcttgaagccctgaacgataaaaagcaccagctcgaaggtaagctacaggacatccgatgcaggctcaccacccaacgtcaggagattgaaagtaccaacaagagcagagaactgcggattgctgaaattacccacctgcagcagcagctgcaagaaagtcagcaaatgcttggcagactaatccccgagaagcagatcctgaatgatcaactgaaacaggtccagcagaacagccttcatagagactcgctggtgacactcaagagagcactggaggcaaaagagttggctcggcagcatctcagggatcagctggacgaagttgaaaaggagactaggtccaagctccaagagatcgacattttcaacaaccagctgaaagaactgagggaaatccataacaaacagcagctgcaaaagcagaagagcatggaggccgagaggctgaagcaaaaggaacaggagaggaaaatcatagagctggagaaacaaaaagaggaagcccaacgacgtgcccaggagagggacaagcagtggcttgagcacgtgcaacaagaggacgaacaccaaagaccccggaaactccatgaagaggagaagctgaaaagggaagaatccgtcaagaagaaagacggagaggaaaaaggtaaacaagaggcccaggataaacttggacggctgtttcatcagcaccaggaacctgccaaacccgccgtacaggctccttggagtaccgctgagaagggacctctcaccatttctgcacaggagaacgtgaaagtagtgtattaccgcgcgctgtatccattcgaatctcgctctcatgatgaaatcaccatccagccaggtgacatcgttatggttaagggtgaatgggttgatgaaagccagactggggagcccggctggctgggaggggagctaaaaggcaagaccggatggtttcccgctaattacgcagagaagatcccagaaaacgaggttccagcaccggtgaaaccagtgaccgactctacatcagctccggccccaaaactcgccctcagagaaacccctgcgccccttgctgtgacttcctcggagcctagcactacacccaataattgggctgacttttccagtacatggcctaccagcaccaacgaaaaaccagagaccgataattgggacgcctgggcagcccagcccagcttaaccgtcccgagcgccggccagctgaggcagaggagtgccttcacacctgcgaccgctacgggctccagccctagtcccgtcctgggtcagggagagaaggtcgagggccttcaggcacaagccctgtacccttggcgggcaaagaaagacaatcacttgaattttaacaaaaatgacgtaatcaccgtgctagagcagcaggacatgtggtggttcggggaagtccagggccagaaggggtggtttcctaaatcgtacgtgaagctgatctccggcccaatcaggaaatcaacttcgatggactcgggatcttcagaaagtcccgcctctcttaaacgagtcgcatcacccgcggcgaaacctgtggtatctggggaagagatagctcaggttatcgccagctataccgctaccgggcccgaacagttaaccttagccccaggacagctgatcctgatccgaaagaagaatccaggtggctggtgggagggcgaacttcaagctcggggcaagaaaaggcaaatcggctggttccccgctaactatgtaaagctgctctctcctggcacttccaagatcactcccaccgagcctcctaagagcactgcattggccgccgtttgtcaggtgatcggcatgtatgactacactgctcagaatgacgacgagctggcatttaacaagggacagataattaatgtgttaaacaaggaagaccccgattggtggaagggggaggtaaacgggcaagtaggtctgtttcccagcaactacgtgaagctgaccactgacatggacccgtctcagcagtag

SEQ ID NO: 191905 - DNA, 5151 bp, synthetic construct
  misc_feature 1..5151: note = Description of Artificial Sequence: Synthetic coding sequence
  source 1..5151: mol_type = other DNA
atggcccagttccccacccccttcggcggcagcctggacatctgggccattacggtggaagaaagagccaagcatgatcaacagtttcacagcctcaaaccaattagcggtttcatcacgggagaccaggcaaggaatttcttcttccaatctggacttccacagcccgtactcgcccaaatttgggccttagccgatatgaacaatgacggccgcatggaccaggtcgagttcagcattgcaatgaaactgatcaagttgaaacttcagggttaccagctgccctccgctctgccccccgtcatgaaacagcagcctgttgcaatctcttccgctcctgcctttggaatggggggtatcgcatcaatgccgcccctgacagccgttgcccctgtccctatggggtccatcccggttgtgggtatgagccctactttagtcagttcggtacccaccgcagccgtgccaccactcgccaatggggcgccgccagtgatacagcccttacccgcctttgcacaccccgcagcaacacttccgaagtcctcctcattttctagatcaggacctggtagccagctgaacacaaagctgcagaaagctcaaagtttcgatgtggcctcagtgccaccagtcgcagagtgggcggtcccccagagctctcggctcaagtatcgtcagctctttaatagccatgataaaactatgtcagggcacctgacaggcccacaagctagaaccatcctaatgcagtcctccctgcctcaggcccagttggcaagcatctggaacctctctgacatcgaccaggatggtaagctgaccgccgaggagtttatccttgctatgcatctgatcgacgttgctatgagtggacaaccactgcctccagtgctgccccctgaatacattccaccctccttccggagagtcaggtctggatcagggatctccgtcataagtagtacttctgtggaccaaaggctcccagaggagcccgtgctggaagacgagcagcaacaactggaaaagaaactgcccgtcaccttcgaagataaaaagcgggagaattttgagcgcggtaatcttgaacttgagaagcggaggcaagctttgctcgaacagcagcggaaagagcaggaaaggctggctcagctcgagagggctgaacaggagaggaaagagcgagagagacaggagcaggaaaggaagcggcaattagaactggagaagcaacttgagaagcagcgagagctggaacgccagagggaggaagagcggcgcaaggaaatagagaggagagaggccgcaaaaagggaactcgaacgtcagcgccaactcgagtgggaaagaaatcgccgccaggaactgttgaaccagcgcaataaagaacaagaggacatcgtcgtcctgaaggctaagaaaaagacccttgagttcgagttggaggctcttaacgacaaaaagcatcagctagaaggcaaactccaggatattcggtgcagacttacaacccagcgacaggagattgaatccaccaacaagagccgcgagcttagaatcgcggagatcacacacctccaacagcagctccaagaatcccagcagatgctcggccgcctgatccccgaaaaacagatattaaatgaccagctcaagcaagtgcagcagaattcgttgcatagagatagccttgtcacactgaagcgcgccctcgaggccaaagaactagcaaggcagcatttacgagaccagctggatgaggtggaaaaagagacgcgaagcaagctgcaggagatcgacatatttaataaccagctgaaggagctgagagagatccacaataaacagcagttgcaaaaacagaagtctatggaggctgagagactcaagcagaaggaacaagagcgaaagataattgaactggagaagcagaaggaggaagctcagcgcagagcccaagagagagataagcagtggcttgaacacgtgcagcaggaggacgagcatcagaggccccggaaactgcacgaggaggagaagttgaagagagaagagtccgtgaaaaagaaagacggcgaagagaagggcaaacaggaggcccaggataagcttgggaggttgtttcaccagcatcaggagcctgcaaagcccgctgtccaggcaccttggtcaaccgcggagaagggcccactcactatctctgcgcaggaaaatgtcaaggtcgtgtactatcgggctctgtaccctttcgaatctcgatcccacgacgagattactattcagccaggagacatcgttatggtagatgagagccagactggcgagcccggatggctcggcggagaactgaagggcaagactgggtggttccccgcaaactatgccgaaaagataccagaaaatgaagtaccagccccagtgaagcctgtgacagattccaccagcgctccagcacctaaacttgccctgcgagagacacccgccccactcgccgttacatctagtgagccgagtactacccctaacaattgggccgatttcagctctacttggcctacctccacaaacgaaaagccggagacagataactgggacgcgtgggctgcacagcccagtctgacagtccctagcgcaggacagctgcggcagaggtcagcgttcactccagccacagctaccggctcctcgccctcccctgtgcttgggcagggggaaaaggtagaaggcctacaggcacaggctctgtatccttggcgcgcgaaaaaagacaaccacttaaacttcaacaagaacgacgttatcactgtcctggagcagcaagacatgtggtggtttggggaggtgcagggtcagaaaggatggtttcctaaatcctacgtgaagttaatcagtgggccaattcggaagagcaccagcatggactcaggaagcagcgagtcaccggccagccttaagcgggtcgccagtccagctgctaaacccgtcgtgagcggggaggaattcatcgccatgtacacttacgaaagcagtgagcagggcgatctgacctttcagcagggggacgtcatactagttacaaagaaagacggagattggtggacggggacagtcggggataaagctggggtattccctagtaactacgtgcggttgaaagattcggaggggtcagggactgccggcaagacaggctcactaggcaagaagcctgagattgctcaggttatcgcatcatataccgctaccgggccagagcagctgacgcttgcccccgggcagctgatcctgatccggaaaaaaaatcccggaggctggtgggaaggcgaactgcaggcaagagggaaaaagcggcagatcgggtggttcccggccaattacgtgaaattgttgagcccaggcaccagtaaaatcactcctaccgaaccgcctaagtccacagcgcttgcggccgtgtgccaggttattggcatgtacgactatactgcccagaacgatgatgaactcgcgttcaataaagggcagattattaatgtcctcaataaggaagatcccgattggtggaagggcgaggtaaatgggcaggttggcttattccccagcaattacgtgaagctcacgaccgatatggacccctcgcagcagtggtgctctgatctccatttgttggacatgctgacgccaacagaacggaaaagacaggggtacatccacgagctcatcgtaacagaagaaaactacgtgaacgatctgcaactcgtgacggaaatattccagaaaccgcttatggaatccgagttattgactgaaaaagaggttgccatgatttttgtgaactggaaggaactcattatgtgcaatatcaagctgcttaaagctctgcgggtgcggaaaaaaatgtccggcgagaaaatgcctgtgaagatgattggggatatcctgagcgcacagcttccccacatgcagccatacatacgcttctgtagtcggcagctgaatggggccgccctgattcagcaaaagactgatgaggcccccgattttaaggagttcgtcaagcgcttagccatggacccccggtgcaaaggtatgccactgtccagtttcattcttaagccaatgcagcgggttactcggtaccctctcatcattaagaatatccttgagaatactccagaaaaccatccagatcattcacacctgaaacatgctctcgaaaaagccgaagaactctgttcacaggtaaatgaaggcgtccgagagaaagagaattctgacaggctcgagtggattcaagcacacgtccaatgcgaaggcctaagcgagcagctggttttcaattcagtgaccaactgccttgggccgcgcaaatttctgcactccggcaaattgtacaaggcaaagtcaaacaaggaactttatggcttcctgttcaatgactttttgctgctgacccagataacaaaaccacttggaagctctggtacagataaggtgttctctccgaaatcaaatcttcagtacaagatgtacaaaacacctatctttttgaatgaggtactggtgaagttgccaacagaccccagcggggatgagccaatctttcacatctcgcacatcgaccgggtatataccctgagagccgagtcaattaacgaaaggactgcctgggtgcagaaaattaaggctgcttcggaactgtatatagagactgaaaaaaagaagcgggaaaaggcatatctagtacgatcccagagagctaccggaatcggacgcctgatggtgaatgttgtggaggggatcgaattgaaaccttgcagaagtcatgggaagagcaacccttattgtgaggtcactatgggctctcagtgccatatcacaaagacgatccaggatacactaaacccaaaatggaactcaaactgtcagttctttattcgcgacctagaacaggaggttttatgtattacagtcttcgaaagggatcagttttctcctgacgatttcctgggacgaaccgaaatccgagtagcagatatcaaaaaagatcagggctccaagggaccagtgacgaagtgcctgctgctgcacgaggtgcctaccggtgagatagtcgtcagactggatctccagctgttcgatgagccttag

SEQ ID NO: 191906 - DNA, 4983 bp, synthetic construct
  misc_feature 1..4983: note = Description of Artificial Sequence: Synthetic coding sequence
  source 1..4983: mol_type = other DNA
atggcccagttccccacccccttcggcggcagcctggacatctgggccattaccgtcgaagagagagctaaacacgatcagcagtttcactcccttaaacccattagcggattcataacaggtgaccaagccagaaacttcttttttcagagcggcctgccccagccggtcctggctcaaatttgggccctcgctgatatgaataacgacggacgtatggaccaggtggaattttcgatcgcaatgaaactcatcaaactgaaactccaagggtaccagctgccgtccgccctcccacctgtcatgaagcagcaacctgtggcgattagtagcgcgcccgcatttggcatgggcggcatcgcctcgatgcctcccctgacagcagtcgcccctgtgccaatggggagtatacctgtggtcggtatgtctccgactctggtatcatctgtgcctaccgccgcagtgccccccctcgccaacggggcccctcccgtaatccaacccctaccagcattcgcacaccctgcagcaactttgccgaaaagttcgtccttctcgcggtccggccccggctcccaactgaatactaaacttcagaaggcacaatcatttgacgtggcctcggttccaccagtggccgagtgggccgtgccacagagttcccggttaaagtacagacagctgtttaactcacacgataagacaatgagcggccacctcacaggcccgcaggcaaggacaatccttatgcaatcaagtctgccacaggcacagttggctagtatctggaacctttccgatatagaccaagacggcaagctcacagccgaggaattcatccttgccatgcatttgatcgatgtcgccatgtcaggacagccactcccaccagtgctgccaccagagtatattccaccttctttccgacgcgtacgctcgggctcgggcatatccgtcatatcatctacatccgtggatcaacggctccctgaggagcctgtcttggaggatgagcagcaacaactcgagaagaaactccctgtgacctttgaggataagaagcgggagaatttcgaaagaggaaatctggagctcgagaagcgccgacaagccctgctggagcaacagcgtaaagaacaggaaagacttgcccagcttgagcgcgctgaacaagagcgaaaagagcgggagagacaggagcaggaaaggaaacgccagttggaattagaaaaacagctggagaaacaacgggagctggagcgccaacgtgaggaggagcgccgcaaggagatagagagacgtgaggcagcaaaaagagaactggaacgacagcggcagctcgagtgggaacgcaatcggaggcaggagctgctgaatcagcgaaataaggagcaagaggacatcgtcgtcctgaaagcgaagaaaaagaccctcgaatttgaactggaggccttaaatgacaagaaacatcaactcgagggcaaactccaagatatccggtgccggctgaccacacaacggcaggaaattgaaagtactaataagtctcgcgaacttcgtatcgcagagataactcacctgcagcagcagcttcaggaaagtcaacagatgcttgggaggctgattccagagaaacaaatcctgaatgaccagctgaagcaagtgcagcagaactccttgcacagagacagtctcgtgaccctcaagagagctttagaggcaaaagagttggcaaggcagcacttacgtgaccagctggacgaagtggaaaaggagaccaggagtaaactccaggagatcgacatctttaacaaccagttaaaggaactcagggagatccacaacaagcagcagttgcagaagcagaagtccatggaagccgagcggctgaaacagaaggaacaggagagaaagattattgaactggaaaaacagaaagaagaggcacagaggcgggcccaggagcgagataaacaatggctagaacatgtacagcaggaggacgaacatcagaggcctaggaagctgcacgaggaggagaagctaaaacgcgaagaatctgtgaagaaaaaggatggagaagagaagggaaaacaggaagctcaggataaactgggacggctcttccaccagcatcaggagcctgctaaacccgcagtgcaggctccgtggagcacagccgagaaagggccactgacaatcagcgctcaggagaatgtcaaagtggtctactatagagcattgtatcctttcgagagccgaagtcacgatgagattactattcagcctggagacatcgtgatggtagacgagagccagaccggtgaaccagggtggttgggcggggaattgaaaggcaagactggatggttcccagccaactatgcggagaagatccccgaaaatgaagttcctgcacctgtcaagccggtcactgattccacatccgcacccgctcccaaactcgcactgcgcgagacgcccgcccctctggcagtgacatcaagcgagcccagcactacacccaacaattgggcagatttctcatcaacttggcccacctcaacaaacgaaaaacctgagacggacaactgggatgcctgggccgcgcagccctctcttactgtgccctctgccggacagcttcgccagaggagtgcgttcactccagcgacagcaacaggttccagcccttccccagtactgggacagggcgaaaaggtggagggtttacaggctcaggccctgtatccctggagagccaaaaaggataatcatttaaattttaacaagaacgacgtcattaccgtcctggagcaacaagacatgtggtggtttggggaggtgcaaggacagaaagggtggtttccaaaatcttacgtcaagttgatctccggcccaatacggaagtctacctctatggatagcggaagctctgagtcgcccgcatcactcaagagggttgccagccctgctgcaaagcctgtcgtatcaggcgaagaatttatagccatgtacacctatgaatcttctgaacaaggagacctgaccttccagcagggtgacgtgatattggtcacgaagaaagacggtgattggtggactggcactgttggagataaagccggcgtgttcccctcgaactacgtacgcttaaaggacagcgaggggagcggcacggcaggcaaaaccgggtccctgggtaaaaaacccgagattgctcaggtaattgcttcttacacagccacaggaccggagcagttaactttggccccagggcagttgatactgatcaggaagaagaaccccggggggtggtgggagggggagcttcaggcaagaggcaagaaacgacaaattgggtggtttccagccaactacgtgaagcttctcagcccggggacaagcaagatcacccccactgaacctcccaagagcacagctctggccgctgtgtgccaagtgattggcatgtatgattacaccgctcagaatgatgacgaactcgccttcaacaaggggcagattataaatgtgctgaacaaagaggaccccgattggtggaagggggaagtgaatgggcaggtgggtctttttcccagtaactacgtaaaattaaccacggacatggacccgagccagcagtggtgctccgacctgcaccttctggacatgttgaccccgacggagcgcaagaggcaggggtatatccatgaacttatcgttacagaggaaaactacgttaatgacctgcagctcgtgaccgagatctttcagaagccccttatggagagcgagttactaactgagaaggaagtcgcaatgatcttcgttaattggaaagaactgattatgtgtaatattaagcttttgaaagcacttcgtgtgaggaaaaagatgtcaggcgaaaagatgccagtgaagatgatcggggacatactgtcagctcagctgccacacatgcagccttacataaggttctgctccaggcagctgaatggggctgccctcattcagcagaagactgacgaagcccccgacttcaaagaattcgtgaaaaggctagccatggacccaagatgcaagggaatgccattgagctcttttattctgaagcctatgcaacgcgtgacccggtaccccctgatcatcaagaaccagttagttttcaattccgttacaaactgcctgggccctcggaaatttttgcactcaggtaagctttacaaggccaaaagtaataaggagctctatggcttcttatttaatgactttctactccttacccaaataacgaaacccctcggctcttccggaacagacaaagtgttctctccaaaatcgaacttgcagtacaaaatgtataaaaccccaattttcctaaacgaagttctggtgaagctgcccaccgatccctccggtgatgaacctatcttccatatcagccacatcgaccgcgtctatacgttaagggcggagagtataaacgaaagaaccgcttgggtgcagaaaataaaagctgcgtctgaactgtacattgagaccgaaaaaaaaaagagagaaaaagcctacctggtacggtcacaaagagcaacaggcatcggacgactgatggtaaatgtggtcgagggcattgagctcaaaccatgcagatcgcacggtaaatcaaacccatattgcgaagtcacaatggggtcccagtgccatataactaaaaccatccaagacaccctgaaccctaaatggaacagcaactgtcagttcttcatccgcgatttagaacaggaggtcctgtgtatcacggtgttcgaaagggaccaattctctcccgatgacttcctcggacgaactgaaatcagggtggctgatattaaaaaagaccagggcagtaagggacccgtcactaaatgtctgctattgcacgaggtgccaactggggaaatcgtagtgaggcttgatctgcaactcttcgatgaaccctag

SEQ ID NO: 191907 - DNA, 348 bp, synthetic construct
  misc_feature 1..348: note = Description of Artificial Sequence: Synthetic coding sequence
  source 1..348: mol_type = other DNA
atggcccagttccccacccccttcggcggcagcctggacatctgggcaataacagtggaggagagggctaagcatgatcaacaatttcactctttgaagcccatttccggcttcatcacgggggatcaagccaggaattttttcttccagagcggcctgccccagcctgtgctggcccaaatttgggctctggcagacatgaacaatgacgggcggatggatcaggtcgagttctccattgccatgaagctaattaagctcaagctgcaaggttaccaacttcccagcgctctgcctcctgtgatgaaacagcagccagtggccatcagctctgcacccgctttttag

SEQ ID NO: 191908 - DNA, 237 bp, synthetic construct
  misc_feature 1..237: note = Description of Artificial Sequence: Synthetic coding sequence
  source 1..237: mol_type = other DNA
atggcccagttccccacccccttcggcggcagcctggacatctgggcgatcacagtcgaagagcgggctaaacatgatcagcagtttcatagtctcaaacccattagcggattcataacaggagatcaggcccgcaatttcttttttcaatcgggccttccccaaccagtcctcgcccagatttgggcccttgcagatatgaataatgacggccggatggaccaggtcgagttctag

SEQ ID NO: 191909 - DNA, 5094 bp, synthetic construct
  misc_feature 1..5094: note = Description of Artificial Sequence: Synthetic coding sequence
  source 1..5094: mol_type = other DNA
atgatggcccagttccccaccgccatgaacggcggccccaacatgtgggcaataaccagtgaagagcggactaaacacgatcgacagtttgataacttaaagccttctggcgggtacataactggcgaccaggcgcgaaatttcttcctgcagtcaggacttcccgcgcctgtgctggccgagatatgggcattgagcgacctcaacaaggacggcaaaatggaccagcaagagttctcaatcgcgatgaagctcatcaagcttaagctgcagggacagcagttgcccgtggtcttgccacctataatgaaacagccccctatgttctcccccttaattagtgcccggttcggcatgggcagcatgcctaacctgtccattccgcagccgctcccgcctgcagcacccatcacctctctgagcagtgctacaagcgggacaaatttgccgccgctgatgatgcctactcctttagttccttctgtttctacatcatcactgccgaatggtactgcttcacttatacaacccttgcctatcccatactcttcttccaccttgccgcacggctccagctactcactgatgatgggtggattcggtggcgcctctattcagaaggctcaatctctcattgatctcggcagttcatccagcacctcaagcacagccagcctttccggaaattcacctaaaaccggcacatcagaatgggcagttccccagcccacaaggctgaagtaccgacagaaattcaatacactggacaagtctatgagtggttacctgagcggcttccaagccaggaacgcactgctccagagtaatctctcgcaaactcagctggctacaatttggacgctggccgatgtcgatggagacgggcagctgaaggctgaggagttcatcctagctatgcacctgaccgacatggctaaggccggccagcctctaccattgacactgccgccagaactcgttccaccctccttccgcgggggtaagcaaatcgattcaatcaacgggacgctgccatcttaccaaaagatgcaggaggaagagccacagaaaaaactgcccgtgacgtttgaagataagaggaaggcgaattacgaacgtggaaacatggagctggagaagcggaggcaggctttgatggaacagcagcagcgcgaagccgaaaggaaggcccagaaggaaaaagaggaatgggaacgaaaacagcgggagctgcaggagcaagagtggaaaaagcagttggaattggaaaagcgcttggagaagcagcgagaacttgagaggcagcgggaagaagagagaagaaaggacattgagagacgggaggccgcgaaacaggaattggaaaggcagcgtcgactggagtgggaacgtatccggcgccaggagctgctgaatcagaaaaacagagaacaggaggagattgttcgcctgaactctaagaagaagaacctgcacttagagttggaggccctgaacggcaaacatcagcaaatttccgggaggcttcaggatgtcaggctcaagaaacaaacacaaaaaactgagctcgaggtgttggataagcaatgtgacctggagatcatggaaattaagcagttgcagcaggagttgcaagagtaccagaataagttaatctacctcgtgcccgaaaagcagcttcttaatgaacgcattaaaaatatgcagttcagtaacacaccagacagtggcgtctctcttctgcataaaaagtctctcgaaaaagaggagctctgccagaggcttaaggagcagctggacgctctcgaaaaggaaacagccagcaagttgtccgaaatggatagttttaacaatcaactcaaatgcggcaacatggacgatagcgtcctgcagtgtttgctgagcctactcagctgcctgaataacttgttccttcttctgaaggagctgcgggaaacctacaacacccagcaactggccctggagcaattatacaaaattaagagggacaaactgaaagagatcgaacgcaaacgtctggagctcatgcagaagaaaaaactggaagacgaggcagccagaaaggccaaacaaggaaaagagaatttgtggaaggagaacctgaggaaggaggaggaggaaaaacagaagaggctgcaggaggaaaagacccaggagaagatccaggaagaggaaaggaaggctgaagagaagcaaagaaaagataaagatacgctcaaggcagaggagaaaaagcgggaaactgcaagcgtgctcgtgaattatagagcactgtacccattcgaagctcgcaaccacgacgagatgtcttttaatagtggggacatcattcaggtggacgaaaaaactgtgggagaaccaggatggctgtacgggtcatttcagggcaacttcggttggtttccatgtaactacgtggagaaaatgccatcaagcgaaaatgagaaggccgtgagtccaaagaaggctctgctccctcccacagtctcactctcagccacctcaacttcgagcgagcctttgtcgtctaaccaacccgcctctgtgactgactaccagaatgtctcctttagcaacctgaccgtgaatacctcgtggcagaaaaagtctgcgttcacccggacagttagtcctgggtccgttagtccaatacacggccagggccaggtcgttgagaacctgaaagctcaggctttatgcagctggacagcaaagaaggataaccatcttaatttcagcaaacacgatataattacagtcctggagcagcaagagaattggtggtttggcgaagtgcacggcggcagggggtggttcccgaagtcctacgtgaagattattcctggaagcgaagtgaaacgcgaagaacctgaagctctctatgccgcggtcaacaagaagccaacgagcgccgcctacagtgttggagaagaatacatcgctctctacccttacagcagcgttgaacccggcgacctgacgtttactgagggtgaggagattctggtgacgcagaaagacggcgaatggtggactggctccatcggagaccggtccggcatttttccaagcaactatgttaaaccgaaggatcaagagtcattcggctcagcctcaaagtccggtgcgtcgaacaagaagccagagattgcccaggttacatcagcctatgtcgcttccggatccgaacagctgtcccttgccccgggacaactgatcctcatactcaagaagaatactagcgggtggtggcagggcgaactgcaagcacggggcaaaaaacggcagaagggctggttcccagccagtcatgtcaaacttttgggacccagtagcgagcgggctactcctgcatttcaccccgtgtgccaagtcatcgccatgtacgattatgccgccaataatgaagacgagctcagttttagcaaaggccagctgatcaacgttatgaataaggatgatccagactggtggcagggcgaaattaatggcgttacagggctgttcccatctaattacgtgaaaatgacaacagacagcgatccaagccaacagtggtgcgccgacctccaaaccctcgatactatgcaacccattgagcggaaacggcaaggctatatccatgagctgatccagacggaggagagatacatggctgacttacagctggtcgtggaggttttccagaaacgcatggctgaatctggtttcctaacagagggcgaaatggctctgatctttgttaactggaaggaacttattatgtccaatacaaaattgctgaaggccctgcgtgtgcgcaaaaagacgggaggggagaagatgcccgttcagatgataggagacatactcgccgcagagctttctcacatgcaggcatacatcaggttctgttcttgccagcttaacggcgccgctctgctccagcaaaaaaccgatgaggatactgatttcaaggaattcctcaaaaagctggcgagcgacccaaggtgcaaaggcatgcctttatctagctttctcctgaagccaatgcagagaattacccggtaccctctgttaattcgctcaatcctggaaaacacacccgaaagtcacgccgatcactcgtctctgaagctggccttagagcgtgcggaggagctctgttcacaagtcaacgaaggagttcgagagaaagagaacagtgaccggctggaatggatccaagctcacgtacagtgcgagggacttgcggagcagctgatctttaatagcctgactaattgtttaggtccaagaaagctgcttcattcgggaaaactgtataagaccaaatccaataaggagctgcatggctttctgttcaacgacttcctcctgctcacatatatggtcaagcagttcgctgtgtcgagtgggagcgagaagctgttctccagcaagagcaatgcacaattcaagatgtataagacacctatctttttgaatgaagtcttggtgaagctgcccacggacccctcttctgacgaacctgtgtttcatatttcccacatcgacagggtgtatactttgcgaaccgacaacattaatgaacgcaccgcttgggtccagaaaatcaaagcggcttctgagcagtacatcgataccgagaaaaagaaaagagaaaaagcataccaggcacggagccagaaaacttccggaatcggacgacttatggtccatgtgattgaagctacagaacttaaggcctgtaagccgaacggcaagagtaatccttactgcgagatttccatgggatcccagtcctatactacaaggactattcaggacactttaaaccccaagtggaactttaattgtcagtttttcatcaaagatctctatcaggatgtgctgtgcctcacgctgtttgatcgggaccagttttcgccagatgactttctcgggagaacagagattccagtagccaagattagaacagagcaggaatctaaaggaccgatgacccggaggctactgttacacgaagttcctaccggcgaggtctgggtccgctttgatctgcagttgtttgaacaaaagaccctgctgtag

SEQ ID NO: 191910 - DNA, 5013 bp, synthetic construct
  misc_feature 1..5013: note = Description of Artificial Sequence: Synthetic coding sequence
  source 1..5013: mol_type = other DNA
atgatggcccagttccccaccgccatgaacggcggccccaacatgtgggctatcacaagtgaggagagaactaaacacgaccgccaattcgacaacttgaagccctctggcgggtatattaccggcgaccaggccagaaacttttttttgcaaagcggcttacctgcgcctgtgcttgctgagatttgggctttatctgatctcaacaaagatggaaaaatggatcaacaggagttcagtatagccatgaaactcattaagctgaaactgcagggacagcagttgccagttgtgctgcccccaatcatgaagcaaccccccatgtttagcccactaatctctgcaagattcgggatgggaagtatgcctaatttgtccatcccacagcccctgccgcccgctgcaccaatcacctcattaagtagcgctacctctggaacaaacttgccccctctcatgatgcccacaccattggtgcctagcgtcagcactagcagcctccctaatggcacagccagtctgattcagccattacccattccttactcaagcagcactttaccgcacggatcatcatactctctgatgatgggtggctttggtggagcatctatacaaaaggctcagagcttaatagacttaggtagcagctctagcacttcttctactgcttcactgtccggcaacagcccaaaaactggtacctctgagtgggccgtccctcagcccacgcggctgaaataccgtcagaaatttaacactcttgataagagtatgtctggttacctgtctggctttcaggcccgcaatgccctgttacagtcaaacctgagccagacccaactggcgaccatctggacactggccgacgtggatggggacggccagttaaaggctgaggaatttatcctggcgatgcacctgactgacatggcaaaagccgggcaacctctgcctcttacactgccaccggagctggtccctccttcattcaggggggggaagcagattgattcaattaacggaacactcccatcgtatcagaaaatgcaggaggaagagccccaaaaaaaattgcccgttacgttcgaagacaagcgcaaagctaattacgagagggggaatatggagctcgaaaaaagaaggcaagctcttatggagcaacaacaacgggaagccgaaagaaaggcgcagaaagagaaggaagagtgggaacgtaaacagcgggagctacaagagcaggagtggaagaaacaattggagctagaaaaaagactcgaaaagcagagggaattggagagacagagagaagaagagaggaggaaagacattgagcggagggaagccgctaaacaggagctggagcggcagaggcggctggaatgggaacgtatccgccgacaagagctgctcaaccagaagaatagagagcaagaagagattgtacggctgaacagcaagaagaagaatctgcatcttgaactggaggctctgaatggaaaacaccagcagatcagcggaagactgcaagatgtccgacttaagaaacagacccaaaagacagaactggaggttttggataaacaatgtgacttggagattatggagatcaagcaattacagcaggaactgcaagagtatcagaataaactgatatacctcgttcccgagaagcagttactgaacgaacgcatcaaaaatatgcagttcagcaacactccggattccggagttagcttgctgcataaaaagagcttggagaaggaggagctttgccaaaggttgaaagaacaacttgacgccctggagaaggagacagcctctaagttatccgaaatggactcattcaataatcagttgaaagaattgagagagacatataacacccaacaacttgcactcgaacagctctataagattaaaagggacaaactgaaggagattgaaagaaaacgtctcgagctcatgcaaaaaaagaaactggaagacgaggccgcacgaaaagcaaagcagggaaaggagaatttgtggaaggagaatctaagaaaggaggaagaggaaaaacaaaaaagactgcaggaagagaagactcaggagaaaatccaggaggaagaacggaaagctgaggaaaaacagaggaaagacaaagatacactgaaggccgaagagaagaagcgcgaaaccgcctctgtactcgtgaactacagggccttgtacccatttgaggcgcgaaaccacgacgaaatgtccttcaactcaggggacattatccaagtcgacgagaaaactgtgggtgagcccggttggctgtacggtagtttccagggaaacttcggatggtttccatgtaattatgtcgagaagatgccttcctcggagaacgagaaggcagtgtcgcctaaaaaagctttactgccgcccactgtgagcctgagcgccacgtccacctctagcgaacccttgtccagcaatcagcctgcaagtgtgaccgactaccagaacgtctctttttccaaccttaccgtgaatacttcctggcagaaaaaatctgcctttactcgaaccgtgtcaccaggatccgtgtctccaatccacggccaaggccaggtggtagagaacctgaaggcacaggcactctgctcttggacagcaaagaaagacaaccacctcaattttagcaaacatgacattattactgtgctggaacaacaggagaattggtggtttggcgaggtgcacggtgggaggggctggttccccaagtcttatgtcaagatcattcctggttcagaggttaagagggaggagccagaagcactgtatgccgccgttaacaagaagccaacctctgcagcatactccgtcggtgaagagtacatcgcattgtatccttattcatccgttgagcccggagacttaactttcacagagggggaggaaatactggtgacgcagaaggacggggagtggtggacaggcagtattggagacagatctggtatattcccgtctaattacgtcaaaccaaaggatcaggagtcttttggtagcgccagtaaaagcggggcaagcaataagaagcctgaaatcgctcaggttacttccgcttatgtagcctctggcagcgaacagctgagcctggcaccgggccagctgatcttgattcttaagaagaacacctcagggtggtggcagggcgaactccaagcccgagggaaaaagcgtcagaaaggatggttccccgcatcccacgtgaagttgttaggacctagttctgagagagccactcctgccttccatcctgtgtgtcaggtcatcgcgatgtacgactatgccgctaacaatgaggacgaactaagtttcagtaaagggcaacttattaacgttatgaataaagacgaccccgactggtggcagggggaaatcaatggggttactgggctgttcccctctaattacgtaaagatgaccacggactcagatccctcccagcagtggtgcgctgatttgcagaccctagataccatgcaacctatcgaaaggaagcgacagggttatattcatgagctgattcagaccgaagaacggtacatggcggatctccagctcgtggtcgaggtgtttcagaagcgaatggctgaatctgggttcttgactgagggcgaaatggcactgatatttgtgaattggaaagagctcatcatgtccaacactaagctcttgaaggccttgcgcgttagaaagaaaactggtggggaaaagatgccagtgcagatgataggcgatatcctcgcggccgagcttagccatatgcaggcctatattcggttctgctcctgccagctaaacggggcagcactcctacagcagaaaacggatgaagataccgattttaaagagttcttgaagaaacttgcatcagaccctaggtgtaaggggatgcccctttccagttttctgcttaagcctatgcaaaggattaccagatatccactcctcatccggtccatacttgaaaatacacccgagagtcacgcggaccattcctctctcaagctggccctggaacgtgccgaagagctctgctcacaggtgaatgaaggtgtccgggagaaagaaaacagcgatcggctggaatggatccaagctcatgtacagtgcgaaggtctggctgaacagcttatttttaactcccttactaattgtctaggacccagaaaactcctgcacagcggcaagctgtacaagacaaagtcgaacaaagaacttcatggtttccttttcaacgatttcttactgcttacgtatatggtgaagcagtttgctgtcagctccggaagcgaaaagctgttctcaagcaagtctaatgcccagttcaagatgtacaagacccccatcttcctgaatgaggtacttgttaagctgcctactgacccgtctagcgacgagcccgtctttcacataagtcacattgacagagtgtatactcttcgtacggacaatattaacgaacgcaccgcttgggtgcagaagataaaggctgcgagcgagcaatatatagacaccgagaaaaagaagagggagaaggcttatcaggccaggtcgcagaagacatcaggcatcggacgactgatggttcatgttatcgaggccaccgaactgaaggcctgcaaacccaacggcaaatccaatccttactgtgaaatcagcatgggctcccaatcttacactacccgcaccatccaggatactctcaatccaaagtggaatttcaactgtcagttttttatcaaagatctctaccaagatgtgctgtgcctcacactctttgacagggaccagttttcgcccgacgattttttgggaagaaccgagattcccgtcgctaaaatccggacagaacaggagagtaaggggccgatgaccaggcgactccttctccatgaagtgcccacgggtgaggtgtgggtgcgcttcgatttgcagctgtttgagcagaaaactcttctgtag

SEQ ID NO: 191911 - DNA, 5013 bp, synthetic construct
  misc_feature 1..5013: note = Description of Artificial Sequence: Synthetic coding sequence
  source 1..5013: mol_type = other DNA
atgatggcccagttccccaccgccatgaacggcggccccaacatgtgggcgatcacctccgaggaacggacgaaacatgaccggcaattcgacaacctcaagccctcagggggttacattacaggggaccaagcccgaaacttctttctgcagtctggccttcctgcacccgtactggctgaaatatgggctctgagcgatctgaacaaggatggaaaaatggaccaacaggagttctccatagcgatgaagttgataaaactcaagttacagggtcagcagctgcctgtcgtgctgccgccaatcatgaagcagccgcccatgttttccccccttatctccgcgcgctttgggatgggcagcatgcctaatctatccatacctcagccattgcccccagccgctcccatcacctcgttgagttctgcgacctctggcacaaatttacccccgctgatgatgcccacacctcttgtcccgtctgtgagcacatccagcctgcccaatggtacggcttcgctgatacagcctttgcccataccgtactcctcctccacactcccacacggttcttcttactcacttatgatgggcgggtttgggggagcctccatacaaaaagcccagtccctgattgatctcggaagctcaagctccacttcatctacagcttctctgagtgggaactccccaaaaactggcactagtgaatgggcagttccacaaccgacgcgtctgaagtatcgccagaaattcaacacattggacaaatcaatgtcaggctaccttagtgggttccaagcacgtaacgccctgttgcaaagtaatttgagccagacacagttggccaccatatggactctcgctgacgtcgacggtgatggacagctgaaagcggaagagttcatccttgcaatgcacctgactgatatggccaaagccggccagcccttaccacttacactcccaccagaactcgtgcctccttcatttcgcggcgggaaacaaatcgatagcattaatggaactttaccgagttaccagaagatgcaggaggaagagccgcaaaagaaactgccggtcacgtttgaggacaaacgcaaggcaaactatgagagaggcaatatggaactggagaaaaggcgccaggcccttatggaacagcagcagagggaagccgagagaaaagcccagaaggaaaaggaggagtgggaaagaaaacaacgcgaactccaggaacaggagtggaagaagcagttggagctcgagaagcgcctggaaaagcagcgcgaactggagagacagcgggaggaggaacggcgcaaggatattgaacggcgagaagcagccaagcaggagctcgagagacagcggcggctcgagtgggagaggattcgacggcaggaactgcttaaccagaagaatagagagcaggaggagattgtgaggctgaactccaagaagaagaatctgcacctggaattggaagcgctcaatggaaagcatcagcaaatctccgggaggttacaagacgttcggcttaaaaagcagacgcaaaagactgagttggaagtcctcgacaagcagtgtgatctggaaataatggagattaaacagctgcagcaggagctgcaggaataccagaacaagctgatctacctggttcctgagaaacagttattgaatgagagaataaagaatatgcagttctcaaacacacccgacagcggcgtctccctcttgcacaaaaagtccctagagaaggaggaactgtgccagaggcttaaggagcagctggacgccctggaaaaagagactgcctccaagttaagcgagatggacagctttaacaatcagctcaaggaattgagagaaacctataatacacaacagttagcacttgaacaactgtacaagatcaaacgtgacaagctgaaggagattgaaaggaaaagactggagctgatgcagaaaaaaaaacttgaggatgaggccgcccgcaaagcaaaacaggggaaggaaaatctctggaaggaaaacctgcggaaggaggaggaagaaaaacaaaaaaggttgcaggaggagaagacacaggagaaaatccaggaagaagagcggaaagcagaagagaagcaacggaaggacaaagatacgctaaaagccgaggagaaaaagagagaaaccgcatcagtgcttgttaactatcgcgctctgtacccctttgaggcacgaaaccatgacgaaatgtcttttaacagtggcgatataatccaggtggacgaaaagaccgtaggcgagcctggatggctttatggatcctttcagggaaacttcggctggtttccttgcaactatgtggaaaaaatgccttctagtgaaaatgagaaggcagtcagtcccaagaaggccttgctgccccccaccgttagcctcagcgccacctctacctcctccgagcctctgagctcaaatcagcccgcctccgtcacagactaccagaatgtaagcttttccaatctcactgtaaatacatcttggcagaaaaagagcgccttcaccaggaccgtgagccctgggtccgtgagtcccatacacggacaagggcaggtcgtggaaaatttgaaggcccaagctttgtgctcatggactgctaaaaaggataaccatctgaacttctctaaacacgatattattaccgttctggaacagcaggagaactggtggttcggggaagtccacggagggcgcgggtggttccctaaatcatatgtcaagatcatccccggatctgaagtcaagcgagaggagcccgaggcactttatgccgcagtcaataaaaagccaacgtccgccgcctatagtgtcggcgaggagtacattgccctgtacccatatagcagcgtggagcctggggacttaacatttacagaaggcgaggaaattttagtaacccagaaagacggagaatggtggacaggcagcatcggagacaggtccgggatcttcccgagtaattacgttaagcccaaggatcaggagagctttggctccgcaagcaagtctggggccagtaataagaagcccgagatcgcacaggtcaccagcgcttacgtcgcctcagggtctgaacaactctccttagccccaggtcagctgatcctgatcttaaagaagaacacctctggctggtggcagggagagctgcaggctagaggaaagaaaaggcagaaagggtggttcccagcctctcacgtgaagctgcttggcccctctagcgaaagagcaacgcctgcctttcaccccgtgtgtcaggtgatcgccatgtacgattacgctgccaacaacgaggatgagctcagcttttcaaaaggacagctaataaacgtaatgaacaaggacgaccccgactggtggcaaggggagatcaatggcgtgacgggcctcttccctagcaattatgtaaaaatgaccacagactctgatccgtcacaacaatggtgcgccgatctacaaaccctcgacaccatgcaacctatcgagagaaaacggcaagggtacattcatgaactgatccagacggaggagcgatacatggctgacctgcagctggtcgtggaggtgtttcaaaaacggatggctgaaagcgggttcctgaccgaaggcgaaatggcattaatttttgttaattggaaagagttgatcatgagcaatactaagctgctgaaagcacttagggtccgcaaaaaaaccggtggcgagaagatgccggttcaaatgatcggcgacattctagccgccgagttaagccacatgcaggcctatattaggttttgtagctgtcagctgaatggtgcagccctcttacagcagaaaactgacgaggacacagactttaaggagtttctaaagaaactggcatccgaccctaggtgcaaggggatgcctctgtctagtttcttacttaagcccatgcagcgcataacacgctaccccctactgatccgctctatcctggagaatactcccgaatcccatgctgaccactcctcactcaaacttgctcttgaaagagctgaggaactgtgcagccaggttaatgaaggagtcagagaaaaagagaatagcgatcgactcgaatggattcaagctcatgtacagtgtgagggcctcgccgaacagctgattttcaattccctgaccaactgtctcggaccacgtaaattgctccattcagggaaactgtacaagactaaatccaacaaagaacttcatggtttcctattcaatgactttttacttcttacgtacatggtgaaacagttcgctgttagttccgggtcggaaaagctgtttagctcaaagtcaaatgctcagttcaaaatgtataagacccccattttcctgaatgaagtgctggtgaagttgcctaccgacccgtcttccgatgagcccgtttttcacataagtcacatcgatcgggtgtacacactcagaacagataacataaacgaaaggaccgcctgggtacagaagatcaaagccgcctccgagcagtacattgatacagagaaaaaaaaaagggagaaggcataccaggctcgttcacagaagacatctggaatcggccgcttaatggttcatgtgattgaagccacagaactaaaagcttgtaagcctaacgggaaatcaaacccctactgcgagatcagcatggggagtcagtcttacactactagaacaattcaggacaccctgaaccctaagtggaattttaactgtcagttctttatcaaggatctatatcaagacgtcctgtgcttgacactgttcgatcgcgaccagtttagccctgatgacttcctgggaagaactgagatccccgtggctaaaatccggacagaacaggaaagtaagggccctatgactcgcaggctactgctgcacgaggtccctaccggagaggtctgggtgaggttcgacctacagctcttcgagcaaaagacgctactttag

SEQ ID NO: 191912 - DNA, 1836 bp, synthetic construct
  misc_feature 1..1836: note = Description of Artificial Sequence: Synthetic coding sequence
  source 1..1836: mol_type = other DNA
atggcccagttccccaccgccatgaacggcggccccaacatgtgggctatcacatctgaggaacggacgaaacacgaccggcagttcgataatctgaaaccgtctggtggatatattacgggtgaccaggcccggaacttcttcttacaatctggtctccccgctccagttctggctgaaatctgggcactttcagatcttaataaggatggcaagatggaccagcaggagtttagcatcgctatgaagctcatcaagctcaagttacaaggacagcaattgccggtcgtccttccgcctataatgaaacagccacccatgtttagccccctgatttccgccagattcggcatgggcagtatgccgaatctctcgatccctcaacccctgcccccagccgcccccatcacttcactgagttccgccacatccggcaccaatctgccccccctcatgatgcccacccctttagtaccttcggtctccacctcctctctacccaacggaactgccagcctcattcagccattacctattccatacagtagtagcaccctgccccacggttcaagctattccctcatgatgggagggtttgggggcgcgtctattcagaaagcccagtccctgatcgacctgggcagctcacgttcttggtctagcggcagctctgcacatagccccgctacgcaccgcgcgcctctctcaagtccagttccaaacagcagcaccagttcaaccgcgtccctcagtggtaactcccccaaaactggaacctcagaatgggctgtaccccagcccacccgtttgaagtaccggcagaaatttaataccctggacaagagcatgtcaggctacttgtcagggtttcaagccaggaacgcattattacaatcaaatctgtcacaaacccaactagccaccatctggaccctcgccgacgtcgatggggacgggcagctcaaagctgaagaatttattctggcaatgcacctcactgatatggctaaagctgggcagccactgcctctgaccctacccccagaactggtgccaccttcttttcgggggggcaagcaaatcgactcgatcaacggaactctgccgtcgtaccagaagatgcaggaggaagagcctcaaaagaagcttcccgtcaccttcgaggacaagcgcaaagccaactacgagcgtgggaatatggagctggagaaaaggaggcaggcccttatggaacaacagcaaagggaagccgagcgcaaagcacagaaagagaaagaggaatgggaacgcaagcagagagagttgcaagaacaggaatggaagaaacagctggagttggaaaagcgattggagaaacagagggagttggaacgtcaaagggaggaggagcggcgcaaagacatagaacggcgcgaagccgctaaacaggaattggagcgacagagacgcctcgagtgggagcgaatacgtagacaggaactgctgaaccagaagaaccgagaacaggaagaaattgtgcgacttaattccaaaaaaaagaaccttcacctggaacttgaagcgctcaatggcaagcaccaacagatatcgggtcgtctgcaagacgttcggctgaagaaacagacccagaaaaccgagctagaagtgctggacaaacagtgcgaccttgagataatggaaattaaacagcttcagcaggaattacaggagtaccagaataaattgatctatctggtgccagaaaaacagctgttaaatgagcggattaaaaatatgcagtttagcaatactcccgatagtggggtctctttactccacaaaaagtctcttgagtag

SEQ ID NO: 191913 - DNA, 3750 bp, synthetic construct
  misc_feature 1..3750: note = Description of Artificial Sequence: Synthetic coding sequence
  source 1..3750: mol_type = other DNA
atgatggcccagttccccaccgccatgaacggcggccccaacatgtgggcaataacgagtgaggaaaggacaaagcacgacaggcagtttgataatttaaaacctagcggaggctatataaccggcgaccaggcaaggaatttttttctgcaatccggcctgcccgcacctgtcctcgccgagatttgggcactttctgacctcaataaagatggcaaaatggaccaacaggagtttagcattgcaatgaagttaattaagctgaagctccaaggccagcagcttcccgttgtcctccctcccatcatgaagcagcccccaatgttcagccccttgatttccgctcgctttgggatgggatccatgccaaatctgtcaatcccacagcccctcccccctgctgctccaatcacaagcctttctagtgccactagtggcactaatctgcctcctcttatgatgcccacccccctggtgccttctgtgtcaacctcttctctcccaaatggcacggctagtctgattcagcctcttccaattccctattcctctagcactctccctcatggatcaagctactctctgatgatggggggctttggtggcgcctccattcaaaaggctcagagcctcatcgacctgggatcaagctcctcaacttcatcaacggcttcattgtcaggcaacagtcctaaaaccggcacgtcggagtgggccgtgccacagcctacgaggttgaagtacagacagaagtttaacaccctcgataagtccatgagcgggtacctctcgggctttcaagcacgcaatgcactgttacagtcgaatctatctcagacacaattggccactatttggaccctcgctgacgtggacggagacggccagcttaaggccgaagaatttattcttgccatgcacctgactgatatggctaaagcaggacagccattgccactgacccttccacctgagcttgtgcccccgtcattccgaggcgggaagcaaatagactccataaatgggacactgcctagttatcagaaaatgcaagaagaggaaccccaaaagaaactgcctgtcacatttgaagataaacggaaggccaactacgagagaggaaacatggagcttgagaaaaggaggcaggcactcatggagcagcagcaaagagaggcagagagaaaagctcagaaagagaaagaggagtgggagagaaagcagcgcgagttacaggaacaggaatggaaaaaacagttagaattggagaagaggctggaaaaacaacgggaactcgagaggcagcgggaagaagagaggcgaaaggacatcgagcggcgggaggcggccaaacaggagctggaaaggcagagacggttagagtgggaaagaattcgtcgtcaagagcttttgaaccagaaaaacagagaacaagaagaaattgtacggctcaacagcaaaaagaaaaacctgcatctcgagctggaggccctgaacggaaagcaccaacaaatcagcggacgtcttcaggatgtacgtcttaaaaaacagacgcagaaaacggagctggaagtcctggacaaacagtgtgatcttgaaattatggagatcaagcagctccagcaagagctgcaggagtaccagaataagctgatatatcttgtgcctgagaagcagctgttgaacgaacggattaaaaatatgcaattctcgaatactcccgatagcggcgtttcccttctgcacaaaaagagtttggagaaggaggagctgtgtcagaggcttaaagaacaattagatgctttggagaaggaaacggcttccaaactgagtgaaatggattcattcaacaaccagctgaaatgtgggaacatggatgactcagtgctccaatgtctgctgtccctgctcagctgtctcaataacctttttctgctgctgaaagaactgagagaaacatataatacgcaacaacttgctctcgagcagctgtataagattaaaagagacaagctaaaagaaatcgagaggaagaggctagaacttatgcagaagaagaagctggaggatgaagctgccaggaaagccaaacagggcaaagagaacctgtggaaggagaatttgagaaaggaagaggaagagaagcagaagagactgcaggaggagaagacacaggagaagatccaggaggaggagcggaaggcagaggaaaaacagagaaaagacaaagatacactaaaggcagaagagaaaaagcgcgagacagcctcagtgctggtgaactaccgcgccctgtatccattcgaggcaagaaaccacgatgagatgtccttcaacagtggagacatcattcaagttgacgagaagaccgtcggggaacccggatggctgtatggaagctttcagggtaatttcggctggttcccttgtaactacgtggaaaaaatgccatcttcagagaatgagaaagccgtttcaccgaagaaagcccttttgccgccgacggtgagcctctccgcaacctcaacaagctccgaacccctgagtagcaatcaacctgcctcagttactgattatcagaacgtgtccttctcaaatcttaccgtgaacactagctggcagaagaaaagtgcctttaccaggacagtttcacctggcagcgtctcccccattcatggacagggacaggttgtcgagaacctaaaagctcaggccttgtgttcctggacggctaaaaaggataaccacctgaactttagcaagcacgatattatcaccgttcttgagcaacaagaaaactggtggtttggcgaagtgcatggcgggcgtggctggtttcccaagtcctacgtcaaaatcatacccggaagcgaggtgaagagggaggagcccgaagcactgtatgccgcggtgaataaaaaaccaaccagtgctgcctatagcgttggtgaagaatacatcgccctgtacccatacagcagcgtcgagccaggagacttaacatttactgagggagaggaaattttggtgacccagaaggacggcgaatggtggactggctctattggcgatcggtccggaatatttcccagtaactacgtaaaacccaaggaccaggaaagtttcgggtccgcgagcaaaagtggagcgagtaacaagaaacccgagattgcccaggtaacctcagcatatgtggcctccggcagcgagcaactgtcactcgccccgggtcaactcatcctcattctgaagaagaacacttctggatggtggcagggcgaacttcaggcaaggggcaaaaaaaggcagaaaggctggttcccagcaagccacgtgaagctgctggggcctagtagcgaaagagcgactcctgcattccatcctgtgtgtcaggtgatagccatgtatgattatgcagctaataacgaagacgagctgtcattttcaaagggacaattgattaatgtcatgaacaaggacgacccagattggtggcaaggtgaaataaatggcgtaaccgggttgtttcccagtaactatgtaaagatgaccactgatagcgacccaagccagcagtggtgtgcggatctccagaccttagacacaatgcaaccgattgagcgcaaaagacaagggtacatacacgaactgatccaaaccgaggaaaggtacatggccgatctgcagctggttgtggaggtgcggcggctgctgctggcaagcagtagggggatctgctgcctatcttag

SEQ ID NO: 191914 - DNA, 1899 bp, synthetic construct
  misc_feature 1..1899: note = Description of Artificial Sequence: Synthetic coding sequence
  source 1..1899: mol_type = other DNA
atgaaccggtacaccaccatccggcagctgggcgacggcacctacggatccgtgcttctggggcgatccattgagagtggggaactgatcgcgataaagaaaatgaagcgaaagttttactcgtgggaggagtgtatgaacttgagagaggtgaagagccttaagaagctaaaccacgccaacgtcgtgaaactgaaggaggtaattcgggagaacgatcatctctatttcatttttgaatacatgaaggaaaatctgtaccagctgataaaagagcgaaacaagctatttcctgaatctgccatccggaacatcatgtaccagatcctacagggactcgctttcattcacaaacacggttttttccacagagacctgaagcctgaaaatttgctctgtatgggaccagaactggtgaagatagcagacttcggccttgctcgcgagatccgttcaaaaccaccctataccgactacgtgtccactcgatggtacagggccccagaagttttactccggtcaaccaattacagcagccccattgacgtttgggcagtcggctgcattatggccgaggtctatacactgcgcccactgttcccaggcgcctcggaaattgacaccatctttaagatctgtcaagtactgggcaccccgaagaaaactgattggcctgagggctaccagctgagttcagccatgaactttagatggcctcagtgcgttcctaacaatctgaagactttgattccaaacgccagctcggaggcggtgcagctgctacgcgacatgctgcagtgggatcccaagaagcgtccaacagcctctcaggcactgcggtatccttactttcaggttggccaccctctcggttcgaccacacaaaacctccaggattctgaaaagccgcagaagggcattctggagaaggctgggcctccgccttacattaaaccagtccctcctgcgcagcccccagcaaagccccatacccgcatcagcagtaggcagcatcaagcttctcagccccctctgcacttaacttatccctacaaggctgaggtgagcagaactgatcacccctctcatctccaggaggacaagccatcccctctgctattcccctctttgcataataagcatccccaatcgaagattacagccggtctcgagcataaaaacggggagattaagccgaaatccaggcgtcgatgggggctgatctccagatcgactaaggatagtgacgattgggcggatcttgatgacctggactttagcccgtccctgtcacgcattgatttgaagaataaaaaacgccagtctgatgatacactctgccgatttgaaagcgtgctcgatctcaagccctccgagccagtcggaacaggcaacagcgcaccaactcagacatcttatcagagaagagacacaccaactcttcgcagcgcagccaagcagcattacttgaagcacagtcgttatctccccggtataagcattaggaatggtatcctgtctaaccccgggaaagaatttataccacccaatccctggagctcctctggattatcaggaaagtcgtctgggacaatgagcgtaattagtaaggtgaatagcgtggggagcagtagcacatcaagctctggactgaccgggaattatgtacctagcttcctgaagaaagaaatagggagcgcgatgcagagggtgcacttggctcccatacccgacccatcacctgggtattcatcgctgaaggccatgcgcccgcacccaggccgccccttcttccatactcagccccgctccacacctggactgattcctcggccacccgcggctcagcccgtacatgggaggacagactgggcaagcaaatacgcctctcgcaggtag

SEQ ID NO: 191915 - DNA, 1899 bp, synthetic construct
  misc_feature 1..1899: note = Description of Artificial Sequence: Synthetic coding sequence
  source 1..1899: mol_type = other DNA
atgaaccggtacaccaccatccggcagctgggcgacggcacctacggatctgtgctgctggggcggagcatcgagtccggagagttaatcgccataaagaaaatgaaaagaaagttttattcctgggaggagtgtatgaatctaagggaagtgaaatccctgaagaaattaaatcatgcaaatgtggtaaagctaaaggaagttatcagggagaatgaccatctttatttcattttcgaatacatgaaagaaaacttgtatcagctgataaaggaacgcaataaactgttccctgaaagcgcaatacgaaatattatgtaccagatactgcagggactagctttcatccacaaacatgggttcttccaccgggatctgaaaccagagaatctcctctgtatgggcccagagcttgtgaaaatcgctgacttcggccttgcccgagaaatccggagtaaaccaccatacacagactacgtgtcgacccggtggtaccgtgcgcctgaagtactcctcagaagcaccaactattcatcgcccatcgacgtctgggccgtcggctgtatcatggcagaggtgtacactctgcgccccttgtttcccggagctagcgaaatcgatacaattttcaagatctgtcaggttctgggcacacccaagaagaccgattggcccgagggctaccagttgtcttcagccatgaacttccgctggccccagtgcgttcctaataatctcaagacattaattccaaatgcttcctctgaggcagttcagctgttgcgggacatgctgcaatgggatccgaaaaagcggccaaccgccagccaggccctccgatatccgtatttccaggtggggcaccctctgggttctacgactcagaatctgcaggatagtgagaagccacagaaaggaattctagagaaagctggtcctcccccgtacatcaaacctgtgccacccgcccagcccccagccaagcctcataccagaatttcctcgcgtcaacaccaggcaagtcaaccccccctccacttgacttatccttacaaagccgaagtcagccggacggatcatccaagccacctgcaggaggataaaccgtccccacttctttttccgtcacttcacaacaaacatccacagtcaaaaattaccgccgggctcgagcataagaacggcgagataaaacctaaatcacgcagaaggtggggcctcataagccgctcaacaaaagatagcgacgactgggccgaccttgatgatcttgacttttcaccgtctctgagcagaattgatcttaagaataagaaaaggcagagtgatgacacattatgtcggtttgagagcgtgctggaccttaagccgtcagagccagtgggaacgggtaactctgcaccaactcagacttcctatcagcgacgggacacaccaaccctgaggtccgccgctaagcagcattacctgaaacacagccgctatctgcccgggatttctattaggaatggtatcctgtcaaaccccggcaaggaatttattcctccaaacccatggtcctcaagtgggctctccggcaaatcctctggcaccatgagcgttatctccaaagttaactcagtcggatcaagctctacttcaagtagcgggctaacaggcaactacgtcccttctttccttaagaaagagattggaagcgccatgcagagggttcaccttgccccaatcccagacccttctcctggatatagctcactgaaagcgatgcgcccgcaccccggcaggcctttctttcatacccagcctcggagtacccccggcctgatacctcggccacctgctgcccaacccgtccacggccgcactgactgggccagtaagtatgcctctcggcggtag

SEQ ID NO: 191916 - DNA, 738 bp, synthetic construct
  misc_feature 1..738: note = Description of Artificial Sequence: Synthetic coding sequence
  source 1..738: mol_type = other DNA
atgtgcgccgaggtgggccccgccctgtgccggggcatggagcggaacagtctcggatgttgtgaggcacccaaaaaattgtccctgagtttcagcatcgaagctatcctgaaaaggccggcgcgtcgatctgatatggacagacctgagggcccaggagaggaggggcctggcgaggccgctgctagcggctccggactcgaaaaacctcctaaggaccagcctcaggagggcagaaagtcaaaacgaagagtacgcactacttttactaccgagcagctccatgaactggaaaaaatttttcacttcacccactaccctgatgtgcatatccgatctcaactcgctgccaggattaatctcccggaagctagagtacagatctggttccagaatcagagagctaagtggagaaagcaggaaaagatcggcaacctaggggccccccaacaactcagcgaagcatccgtggcgctgcctactaacctagatgtggccggcccgacttggaccagtaccgctttgagaaggctggctccgcctacctcatgttgcccatcagctcaagaccaactggcctcagcctggttccccgcatggatcaccctgctgcccgcccatccttgggagacacaacctgtgccgggtctgccgatccatcagacgtgcatcccggttctgtgcattctgcccccgccgcatcccaagtggggatccatctgtgcaaccagcacgtag

SEQ ID NO: 191917 - DNA, 738 bp, synthetic construct
  misc_feature 1..738: note = Description of Artificial Sequence: Synthetic coding sequence
  source 1..738: mol_type = other DNA
atgtgcgccgaggtgggccccgccctgtgccggggcatggagcggaacagcctgggttgttgcgaggctcccaaaaagttgagtctttccttttctatcgaggcgattctaaaacggcctgcccgccgctccgacatggatcgccccgaggggccaggcgaagagggccccggagaagccgcagcctctggttctggtctggagaagccaccaaaggaccagccacaagagggccgcaaaagtaagcggcgtgtgaggactacatttacaaccgagcagttgcacgaactcgagaagatcttccacttcacccattatccggatgtccacattcgatctcagctggccgcccgaatcaacctccctgaggcccgagtacaaatctggtttcagaatcagcgagcaaaatggagaaagcaggaaaaaatcggaaacttgggggctccccagcagctttcggaggctagcgtggccctgccaacaaacctggacgtagctggccccacttggaccagcaccgccttgcgcaggcttgctccccctactagctgttgcccctcagcgcaggatcaactggcttcagcttggtttcccgcctggatcaccctgctgcctgcacacccatgggaaacccagccagttcctggcctcccgatccatcagacatgtatcccagtgctttgcattcttccgcccccccatcccaaatgggggagtatatgcgctacatccacctag

SEQ ID NO: 191918 - DNA, 1749 bp, synthetic construct
  misc_feature 1..1749: note = Description of Artificial Sequence: Synthetic coding sequence
  source 1..1749: mol_type = other DNA
atggccaacgaggactgccccaaggccgccgacagccccttcagcagcgataagcacgcgcaactcattctggcccagattaataagatgagaaatggccagcatttctgtgatgtgcaacttcaggttgggcaggaatcattcaaagctcatcggctcgtgctggctgctagctccccttactttgccgctcttttcacaggggggatgaaggagagcagtaaggatgttgtgccaattttaggcatcgaggccggcattttccagattcttctcgattttatttatacaggcatcgttaacataggagtcaacaacgtgcaggaactgatcattgccgcagatatgctccagttgaccgaggtggtgcatctgtgttgtgagtttctgaaaggtcagatcgatccactcaattgtataggaatttttcagttcagtgagcagattgcttgccacgatctactggaattcagcgaaaactacattcacgttcactttctggaggtccacagcggcgaggagttcttagctctcacaaaggatcagcttattaaaatcctgcgctcagaagaattgagtattgaggatgagtaccaggtctttctggccgctatgcagtggattctcaaagatttgggtaagcgaaggaaacacgtggtggaggtgctcgacccaatcagattccccctcctccctcctcagcgcctcttgaagtacatcgaaggcgtgtccgacttcaacctacgcgttgctctgcaaacgctgctgaaggagtactgcgaagtgtgtaagtcacctaaggagaataagttttgttcattcctgcagacgtctaaggtccggccacgaaaaaaggctagaaagtacttatatgccgttggaggctacactcggctgcagggaggtcgttggtctgactctagagctctctcttgcgttgagcggtttgataccttcagccagtattggaccacagtgagtagtctacaccaggccaggagcgggctcggagtcaccgtgctggggggtatggtctacgctatcggcggcgagaaggattcaatgatcttcgactgtacagagtgttacgatcctgttacgaaacagtggaccaccgtcgccagcatgaaccatccacggtgtggactcggcgtttgcgtttgttacggagcaatttatgccctcggcgggtgggtgggtgctgagatcgggaacactatagaaagattcgaccctgacgaaaacaagtgggaagtcgtgggcaacatggctgtgagcagatattacttcggatgctgcgaaatgcagggcctcatctatgtgatcggcggtattagcaacgaggggatagagctgaggagcttcgaggtgtacgatccactttccaagaggtggtcacctttgccccctatgggcactagaagagcctacctaggcgtggccgccctcaatgactgcatctatagcgtcggcggctggaatgaaacacaggatgccctgcatacggtggagaagtatagtttcgaggaagagaaatgggttgaggtggcttctatgaaagtcccccgcgcaggaatgtgtgtggtcgcagtcaacggcctcttgtacgttagcgggggaagatcctcatcacatgactttctggcccccgatactcacaggtatgaagttttcagattaaaatgggaaaacatgtgcatcctatttaatgatcacaaaactctgaccaaaggtatcttcaatctttag

SEQ ID NO: 191919 - DNA, 1755 bp, synthetic construct
  misc_feature 1..1755: note = Description of Artificial Sequence: Synthetic coding sequence
  source 1..1755: mol_type = other DNA
atggccaacgaggactgccccaaggccgccgacagccccttcagcagcgataagcacgcacaacttattttagcacagataaacaagatgaggaacggacaacacttctgcgatgtccagctgcaggtgggccaggagtcattcaaggcacaccggctcgtactcgccgcctcctccccttattttgctgcccttttcaccggaggcatgaaggagagctcaaaggatgtagtgcccatacttggcattgaagccggaatctttcaaatcctgctggactttatttacaccgggattgtgaacatcggagtaaataatgtgcaggaactgataatcgcagcagacatgctgcagctgaccgaggtggttcatctgtgctgcgagtttctgaaggggcaaatcgaccccttgaactgtattggtatctttcagttttctgaacagatagcatgtcatgatcttctggagtttagtgaaaattacatccacgttcactttctggaagtacatagtggtgaggaattcctggctctgactaaagatcagctgatcaaaatactcaggtctgaagagctcagtattgaggatgagtaccaggtgttcctggccgcaatgcagtggatactcaaagacctggggaagcggagaaaacatgtcgtcgaagttctggatccaattcgattcccactgctgcctccacaaaggctgttaaagtacattgagggcgtgagcgactttaacctgagggtggccctgcagacccttctgaaagaatactgtgaggtttgcaagtcacctaaagaaaacaagttttgctcctttttgcagactagcaaggtgagaccccgtaagaaagcccggaagtacctgtatgccgtaggcggctacactaggctgcagggcggccgttggtctgatagccgagcactcagttgtgtggaacgatttgatactttttcacagtattggaccactgtatccagtctgcatcaggctcggtccggcctgggcgtgacggttctgggaggaatggtgtatgccatcggcggagaaaaagacagtatgatctttgactgtaccgagtgttacgatcccgttactaaacagtggacaacggtggcctcaatgaaccatccaagatgtggtctgggggtctgcgtatgctacggcgccatttatgcgctgggagggtgggtaggcgcagaaattggaaacacaattgagcggttcgacccagatgagaataaatgggaggtggtgggtaacatggcggtctcccgctactacttcggctgttgcgaaatgcaggggcttatatatgttattggaggcatctcaaacgagggtatcgaactccgttcttttgaggtgtacgacccactgagtaaaaggtggtctcctcttccacccatgggcactaggcgcgcctacctgggcgttgcggccctcaatgattgtatatatagtgtgggcggctggaatgaaactcaggatgctctgcatacagtagagaagtattctttcgaggaagagaagtgggtggaagtagctagcatgaaagtcccaagggctgggatgtgcgtggttgccgtgaatggcctgctgtatgtgtccggagggagaagtagcagccacgacttccttgcccccgggacacttgacagcgtggaagtctataatccacattcggatacatggactgaaattggaaacatgatcacctccaggtgtgaagggggtgtggccgtgctatag

SEQ ID NO: 191920 - DNA, 3879 bp, synthetic construct
  misc_feature 1..3879: note = Description of Artificial Sequence: Synthetic coding sequence
  source 1..3879: mol_type = other DNA
atgcgggccgtgctgacctggcgggacaaggccgagcactgcatcaacgatatcgcctttaagcccgatggcactcagctgattctggcagctgggtccaggttactggtgtacgatacctctgatggtaccctcctccaacctctgaaaggccataaagacaccgtgtattgcgtcgcgtacgccaaggatggcaagcggtttgcttccggctccgccgataaatcagtgatcatctggacttcaaaattggaaggtatccttaaatatacctcatggtccgtgatgagcagcctccatttgcaccttcctttcctgggcctgcacaaaacagtgcgagtaacggccacagataaggcccccaagggccagggggggcggattgactgtctcaggccaagtgtgcagaaccagccaggccagaagcacaatgatgccattcaatgcgtgagttataatcccattactcatcagctggcctcatgttctagttctgatttcggcctgtggtctcctgagcagaaatccgtgtcaaagcacaaatcaagttcaaagattatttgctgcagttggactaacgatggtcagtatctagcccttggtatgtttaacggaatcattagtatacgaaacaaaaacggcgaggagaaagttaagatcgaacggccaggcggttctctgtccccaatctggtctatatgttggaacccatcatctcgctgggaatccttctggatgaaccgcgaaaatgaagacgctgaagacgtgatcgtgaaccgttacattcaggagattccttctactctgaaaagcgctgtttatagtagtcagggcagcgaggctgaagaggaggaaccggaagaagaagacgatagtccaagagacgacaacttagaagagaggaacgacatactggcagtcgcggactggggacaaaaggtgagcttctaccagctgtccgggaagcagataggaaaggaccgcgccctaaacttcgacccgtgttgcatctcatacttcaccaaaggcgaatatatcctgcttggaggcagtgacaaacaagtgagcctatttaccaaggacggtgtgagactgggaactgtcggagagcaaaattcatgggtgtggacgtgccaggcgaagcctgactccaactacgtggtcgtcggatgtcaggatggaacaatatcattctatcagctcattttctcaacagtgcatggtctatacaaggacaggtatgcctatagggattctatgacagatgtgattgtccagcaccttattacagaacagaaggtgcggattaagtgcaaggaattggtgaagaaaatcgctatctaccgtaaccgcctcgcaatacagctgccggagaaaattttaatctacgaattatactccgaggatctgtccgatatgcattacagggtgaaggagaagatcattaaaaagtttgaatgtaaccttctagtggtttgcgctaatcacattattctgtgccaggaaaaacggctccagtgtctgagctttagtggtgtgaaagaacgggaatggcagatggaatcattaatccgctacattaaagtgatcggggggcccccaggccgggagggcctcttggtaggacttaagaacgggcagatcctcaagatcttcgtcgacaatctgttcgccatcgttctgctgaagcaagcaacagccgtgagatgtcttgatatgtccgcttctagaaagaagttagcggtggtggacgaaaacgatacatgcttggtttacgacatagacactaaggagttgctgttccaggagcctaatgcaaattctgttgcttggaacacccagtgcgaagacatgctgtgttttagtggcggcggatatctgaacattaaggcctccacttttcctgtgcaccggcaaaagctgcagggttttgtggtaggatacaatggcagcaagattttttgtctgcatgtattttccatctctgccgtggaagtgccccagagcgcacctatgtatcaatatctcgacaggaagctgttcaaggaggcgtatcaaatagcctgtctgggtgtgacggacactgattggcgggagttagctatggaagccttggagggattagacttcgagactgctaagaaagctttcattcgcgtccaggacctgcgctacttagagttgatctctagcattgaggagcggaaaaagcgtggcgagaccaacaatgatctgtttcttgctgacgtgttttcctatcaggggaaattccacgaagcggccaagctatacaagcgcagcgggcacgaaaatctggcgttggaaatgtataccgatctatgtatgttcgaatatgcgaaagatttccttgggtcaggggacccgaaagagaccaagatgctcataacaaaacaggcggactgggcccgcaatatcaaggagccgaaggccgccgtggagatgtatatcagcgccggtgagcatgtcaaagccatcgaaatttgtggagatcatggctgggtggacatgttgatcgatattgcccgaaagttggataaagccgaacgcgaaccattgctcctgtgtgctacatacctgaagaagctggacagcccagggtatgcagctgaaacctatctaaaaatgggtgacctcaaatctttggttcagctgcatgtggagactcagagatgggatgaggctttcgcattaggggagaaacaccccgaatttaaggacgacatttacatgccctacgcccagtggttagcagagaatgatagattcgaggaagcccaaaaggcatttcataaggccggccgtcagcgggaagctgtccaggtgctcgagcagttgactaacaacgccgttgcggaatccagattcaatgacgccgcctactattattggatgctttcaatgcagtgccttgacatagctcaagaccccgctcagaaagacacgatgctgggaaagttctaccattttcaacggttggcagagttatatcacggctatcacgccatccatcgacacacagaagatcccttcagtgttcaccggccagaaaccctatttaacattagtagatttttgctgcattctctgcccaaggatacaccctccggaatcagtaaggtgaaaatcctgtttaccctggccaagcagagcaaggccctcggtgcatatcgtctcgccaggcacgcctatgacaagttgagggggctgtacatcccagcccgtttccagaaatctatcgagttgggaactctgactatccgagcgaagccctttcatgactcagaggagctcgtgcctctgtgctatagatgttccacgaataaccctctgctgaacaacctgggcaatgtgtgtatcaactgccgtcagcctttcatattttccgcctcctcctacgacgtgctgcacttagtggagttctacttggaagaagggattactgatgaggaggccatatcactgatagatctcgaggtgcttcgtcccaagagagacgaccggcagttggagatcgctaataactcatcccagatcctccgtctggtggaaacaaaagatagcatcggtgatgaggatccgtttaccgcaaagctgtctttcgaacaaggtggaagcgaatttgtgcccgtggtggtatcaagactggtcctacggagtatgtcacgaagggacgtgctgatcaaaagatggccgccaccactgcgatggcaatatttccgcagcttattgcccgacgcatctatcacaatgtgtccttcctgttttcaaatgtttcatagcgaagattatgagctgctggtgctgcagcatggctgctgcccctactgtcgccgttgtaaggatgaccctggcccatag

SEQ ID NO: 191921 - DNA, 3549 bp, synthetic construct
  misc_feature 1..3549: note = Description of Artificial Sequence: Synthetic coding sequence
  source 1..3549: mol_type = other DNA
atgcgggccgtgctgacctggcgggacaaggccgagcactgcatcaacgacattgctttcaagcccgatggcacacaactgatcctcgccgccggcagcagattgctggtgtacgatacgagcgatgggactctgttacagcccctgaagggccataaagatacagtgtattgtgtggcgtatgccaaggatgggaaacggtttgcttctggctctgccgataagtctgtaatcatctggacaagtaaactggaggggatcctaaaatatacgcacaatgacgccatccagtgcgtatcctacaacccaattacccatcaactggcatcctgtagtagcagcgatttcgggctctggtcccccgaacagaaatcagtaagcaaacataagagctcatccaagattatttgctgttcttggaccaacgatggtcagtacctcgctttaggcatgtttaacggaatcatttccattaggaataaaaacggagaagaaaaggtaaagattgaacgcccgggcgggagcctctctccaatttggtcaatctgttggaatcctagtcgcgaggaacggaacgatatcctagcggtagcagattgggggcagaaagttagcttttaccagctcagcggtaagcagataggcaaagacagagctttaaatttcgatccttgttgcatcagttacttcactaagggcgaatacatcttgctcggcggttctgataagcaagtgagcttattcacaaaagacggggtgaggctcgggaccgtgggagagcaaaattcatgggtctggacgtgccaggcgaagccagatagcaattatgttgtagtcggttgccaggacggcacaatatccttctatcagctcatctttagcactgttcacggtctgtacaaagatagatatgcgtacagagatagcatgactgatgtaattgtccagcatctgataacagaacagaaagttagaattaagtgcaaggagttagtcaaaaagatagcaatttaccggaatagactagctattcaattgcccgaaaagatcttaatttacgaactctatagtgaagatctctcggatatgcattaccgtgtcaaggagaagattattaaaaaatttgagtgtaatctgctcgtcgtttgcgcaaatcatattatcctgtgccaggaaaagagattgcaatgcctttccttctcaggtgttaaggaaagggagtggcaaatggaatctctgatcagatatatcaaggtaatcggcggccccccgggccgagagggcctcctggtcgggttgaagaatgggcagatactcaagatttttgttgacaatctgttcgccatcgtgctgctcaagcaggcaaccgcagtgcgctgcctggacatgtccgcaagtcgcaagaagctggctgtggtggacgagaatgacacttgtttggtctacgatatcgacacaaaggaactgcttttccaggagcccaatgctaattccgtggcatggaatacccagtgtgaagatatgctctgtttcagcggtgggggatatctcaatattaaggcgtcaaccttccccgtgcacaggcagaaactccagggattcgtggtgggttacaacggaagcaagattttttgtctgcacgtcttttcaatttctgccgttgaggtccctcagtcagcgcccatgtaccagtaccttgatcgaaaactgttcaaagaggcttatcagatcgcctgtcttggtgtgacagacacagactggagggagctggctatggaggccttggagggtctcgatttcgaaactgccaaaaaagcctttatccgagttcaagacctccgctatctggaactaattagttctattgaggaacggaagaagcgcggcgagaccaacaatgatctgttcctggcagatgtgttttcatatcagggcaaatttcatgaggccgctaaattgtataagcggtctggccacgagaacctggctctagagatgtatacggatctgtgcatgtttgagtatgccaaggatttcctgggctctggggaccccaaggagaccaaaatgttgatcacaaaacaggctgactgggcccgcaatataaaggaacccaaggccgccgttgagatgtatatctctgctggcgagcatgtgaaggcgatcgaaatctgcggcgaccacggctgggtggacatgttaatcgacattgcaagaaagctggacaaggcagagcgggaaccattattgctgtgcgccacatatctgaagaaactcgattcgccaggatacgccgccgagacctatctcaagatgggcgaccttaaatcccttgtacagcttcacgttgagacacagcgctgggatgaagcatttgctctgggtgagaaacaccccgaatttaaagacgatatctacatgccatatgcacagtggctggctgaaaatgacaggttcgaggaagctcagaaggctttccacaaagcgggccggcaaagggaagccgtgcaggtcctggaacaattgactaacaacgctgtggcagagtcgaggtttaacgacgctgcttactattactggatgttatctatgcagtgtctggacatcgcccaagatccggcacagaaagatacgatgctgggtaaattctatcactttcagaggctggcagaactctaccacggctaccacgctattcatcggcatactgaggacccattctccgttcatagacctgagactctttttaacatcagcagattcctcctccactcactaccaaaggatacaccctctggaatttcaaaggtgaagatactctttacattggccaaacagagtaaggccctcggagcatatcggttagcccggcatgcctacgataaactaaggggactctacatcccagctcgttttcaaaagtctatcgagctcggcacactcacaatccgggccaaaccatttcatgactcggaggagctggtgcctctctgctacaggtgctccacaaacaatcctctcctcaataacctcggcaacgtgtgtattaactgccgacagccttttattttcagcgcatcttcgtacgacgttctgcacctggtcgagttttatcttgaggaaggaattaccgatgaagaggctatctcgttgattgacttagaggtgctgcggccaaaaagggatgataggcagcttgaaattgcgaacaattctagtcagatcctgaggctcgtggagaccaaggactcgatcggagatgaggacccattcacagcgaaactgtcgttcgaacaggggggatcagagttcgtaccggtcgtcgtgagcaggctagtactgaggtcaatgtctagacgggatgtgcttatcaagcgatggccccctccactgagatggcagtacttccggtctttactgccggatgcatctatcactatgtgcccttcttgcttccagatgtttcactcagaagattacgaactgcttgtgctgcagcatggatgttgtccatattgcagacggtgtaaggacgaccccggtccctag

SEQ ID NO: 191922 - DNA, 3726 bp, synthetic construct
  misc_feature 1..3726: note = Description of Artificial Sequence: Synthetic coding sequence
  source 1..3726: mol_type = other DNA
atgcgggccgtgctgacctggcgggacaaggccgagcactgcatcaacgacatcgcctttaaaccggatggaacacagctaatacttgcagcaggaagccgactgcttgtgtacgacacctccgacgggacccttttgcagcccctgaagggacacaaggatacggtgtattgcgtggcatacgccaaggacggtaagcggtttgcctcaggtagtgctgataagagcgtgattatatggacttcaaaactagagggaatcctgaagtacacacacaacgatgccatccagtgtgtgtcctacaaccctatcacacaccaactggcctcttgctcctcctccgatttcgggttatggtcgccagagcaaaaaagcgtctctaaacacaagtcatccagcaaaatcatttgttgcagctggaccaacgacggtcaatatctcgccctgggcatgttcaacggcatcattagcatcaggaacaaaaacggagaggagaaggtcaagattgaaagaccaggcggttctctgtctcccatttggagcatctgctggaatccatcatctagatgggagagcttctggatgaatagggaaaacgaggatgccgaggatgtcattgttaatcggtacatacaggagattccaagcacactaaagagcgctgtgtattcctctcagggcagcgaagcggaggaggaagaacccgaagaagaggatgacagtcccagagatgataacctggaagagcggaacgatatcctggccgttgccgattgggggcagaaagtgtccttctaccagcttagtgggaaacagattggcaaggacagggctttgaactttgacccgtgttgtatatcttacttcaccaagggcgagtatatcctactgggaggctctgacaaacaggttagcctctttacaaaagacggcgtgagacttggcactgtcggcgagcagaattcgtgggtctggacatgtcaggccaagcccgattcaaactatgtggttgtcggttgccaagatgggacgatttccttttaccagctgatattctcaactgttcatggactatataaagacagatatgcgtacagggatagcatgaccgatgtgatagtccagcaccttatcactgaacagaaagtgcgaatcaagtgcaaggagcttgtcaagaagatcgccatatacagaaatcgactagctatccagttacctgaaaagatcctcatctatgagctatactcagaagacttaagtgacatgcactatcgagtcaaagaaaaaattattaagaagtttgaatgcaacctcctcgtagtatgtgcaaaccacatcattctgtgtcaggagaaacggctgcaatgcttatcattcagcggagtgaaagaacgagaatggcagatggagagccttatccggtacatcaaggtaatcgggggccctcctggtagagagggactgcttgtaggtttaaagaacggacagatcctcaagatctttgttgataatctgtttgccatagttctgctgaaacaggcaaccgcagtccgttgcctggatatgtccgcatcacgcaaaaagttggccgttgtggacgaaaatgatacttgtctggtgtacgacattgataccaaagaattgctattccaggaaccgaatgcaaactccgtcgcgtggaacacccagtgcgaagacatgctgtgctttagcggcgggggctatctgaacatcaaggcctcaactttcccagtccatcggcaaaaactccaaggtttcgtggtgggatacaacggatcgaaaattttctgtctgcatgtgttctcaatctccgccgtagaggtaccccaatcggcccctatgtaccagtatctagatagaaaattattcaaggaagcgtatcagatcgcttgtctcggtgtgacggatacggactggagggaactggctatggaggccctcgaagggttggattttgaaactgctaaaaaggcctttattcgtgttcaagacctgcgatacctggagctgatctccagcatcgaggagcgcaaaaaaaggggggagaccaacaatgacttgtttctcgccgacgtcttcagctaccaaggcaaattccatgaagccgctaaactgtataagaggagtgggcacgaaaacctcgctctcgagatgtataccgacttgtgcatgtttgagtacgctaaggactttctcggatctggagacccaaaggagacaaagatgttgattactaaacaggcagattgggctagaaacatcaaggaacctaaggcagcggttgagatgtacatctccgccggcgaacacgtaaaggccattgagatttgcggggatcacggctgggtcgacatgctgatcgatattgccaggaagctagacaaagccgagagggagccactgctgctgtgcgctacttatctgaagaaactagactctcctggctacgctgccgagacttacctgaaaatgggggatctcaaatctctagttcaattacatgtcgagacacagagatgggacgaagcgttcgcattgggagaaaaacacccagagtttaaggacgacatctatatgccatatgcacaatggctggccgagaatgacaggtttgaagaggctcagaaggcattccacaaggcggggcggcagagggaggccgtacaggtcctggagcagctgactaataacgctgtcgcagaaagtcgctttaacgatgcagcatattactattggatgctgagcatgcaatgtctggatatagcacaggatccagctcagaaagataccatgctgggcaaattctaccatttccagcgactcgccgaactctatcatggctaccacgcaatccatcgtcacaccgaggatccctttagcgtacatcgccctgagacactgttcaacatttcacgctttttgctgcattcactaccaaaggacacacctagtggcatcagcaaggtcaaaattcttttcactcttgccaaacagtctaaggccttaggagcgtacagactggcgaggcacgcttatgacaagcttcgaggtctgtatatccctgcccgcttccaaaagagcatcgaacttggcacccttacgatccgggctaagcctttccacgacagcgaggaactggtccctctgtgctatagatgctctactaacaatccactgttgaataatttggggaatgtgtgcattaactgccggcagccatttatattcagcgcgtctagttatgacgttctgcatctggtcgaattttatctggaagaaggcattaccgatgaggaggccatttctctcatagatcttgaggtcctgcgccctaaaagagacgacagacagcttgagatcgcaaacaatagctctcagattctgagattagtggagaccaaggattccattggcgacgaggatcctttcactgcgaaactctcgttcgagcagggaggatcggagttcgttccagtggtggtgagccggctcgtactacgcagcatgtcacgaagagatgtattaattaaaagatggccgcccccactccgttggcagtacttccgctcattgctacccgacgcatcaataaccatgtgtcctagctgctttcagatgttccactctgaagattacgagttgcttgtgctccaacatggatgttgtccctactgccgcaggtgcaaggatgatccaggcccgtag

SEQ ID NO: 191923 - DNA, 3396 bp, synthetic construct
  misc_feature 1..3396: note = Description of Artificial Sequence: Synthetic coding sequence
  source 1..3396: mol_type = other DNA
atgcgggccgtgctgacctggcgggacaaggccgagcactgcatcaatgatattgcattcaaacccgacggaacccaactcattctggccgcaggtagcagactcctcgtctacgatacttccgatggaaccctacttcagcctctgaagggacacaaagacactgtttattgcgttgcatacgcaaaggatgggctctggtcgcctgaacaaaagtccgtgtccaagcacaagtcctcttccaaaataatttgctgctcttggacgaacgacggtcagtaccttgctcttggaatgttcaacggtattatcagcatcaggaacaaaaacggggaggagaaggtgaagattgagagaccgggtggcagtctgagtccaatctggtccatctgctggaatccatcgcgcgaagagcggaacgatatcctggctgtcgccgactgggggcaaaaagtctccttttatcagctctccggaaagcagatcggtaaggacagggcactgaactttgatccctgttgtatctcatacttcaccaagggtgaatacatcctactgggaggctctgacaagcaggtatccttgtttaccaaggatggggtacgactcggcaccgttggcgaacaaaatagttgggtttggacttgccaagccaagcccgatagcaattacgtggtggtgggatgccaggacgggacgatcagtttctatcaactgattttcagcaccgtccatggactttataaagaccgctatgcttatcgcgattcaatgacagacgttattgtgcagcatctgattacagaacagaaggttcgaattaagtgtaaagaactggtcaagaagatagcaatctaccggaaccgattagcaatccaattgcccgagaaaatcctcatctacgaattatacagtgaagatctatcagatatgcactacagggtcaaggaaaaaattatcaaaaaattcgagtgtaaccttctagtcgtttgcgccaatcatataattctgtgccaggaaaagagacttcagtgcctgtctttttccggcgtgaaagaacgagaatggcaaatggagtcactgattcgctacattaaagtcattggcggcccacccggcagagaagggctgctcgttggactgaaaaacggccaaatcctcaaaatctttgtcgataacctgtttgcgattgtgctactgaaacaggccactgctgtccgttgcttggacatgtccgcttcacgaaaaaagctggccgttgtcgacgaaaatgacacctgtctggtttacgacattgatacaaaggagctgctgtttcaggagcctaacgcaaactctgtggcatggaatactcagtgtgaggatatgctgtgtttctcagggggcggatacctcaatattaaagcatccacgttccctgttcatcggcaaaagttgcaggggtttgtggtgggttacaacggatccaagatattctgtcttcacgtatttagcatcagcgcagtggaggtgccacagagtgctcccatgtatcagtacttagataggaagctcttcaaggaggcttaccagatcgcctgtttgggagtaacagacacagactggagggagttagccatggaagcgttagaggggctcgatttcgagacagctaagaaagcttttatacgggtgcaggacttgagatacctcgagttgataagcagcattgaagagaggaagaaacggggtgaaactaacaacgacttgtttctggccgatgtgttctcctatcagggaaaattccacgaggcggcgaagctctataagaggagtggccacgagaatctggctctggagatgtataccgacttatgcatgtttgagtacgccaaggactttctgggctcaggcgacccaaaagaaaccaagatgctgattactaagcaagccgattgggctaggaatattaaggagcccaaagcagctgtcgaaatgtatattagtgctggagagcatgtcaaagccatcgaaatttgtggagatcatggatgggtggacatgcttattgatatcgcccgcaaactggataaagccgagcgcgagcctctgctcttatgcgcaacttacttgaaaaagcttgattcacctgggtacgcagccgaaacttatctaaaaatgggcgacctcaagagcttggtgcagttgcatgtggagacgcagcgctgggatgaggctttcgccttgggtgagaaacaccccgaattcaaagatgacatctatatgccttatgctcagtggctcgcagagaatgataggttcgaggaggctcagaaggctttccacaaggcaggcagacagcgcgaggccgttcaggtcttggagcagctgaccaataatgccgtggccgaaagccggttcaacgatgccgcttactactactggatgttaagcatgcagtgccttgacatcgctcaggccgaccctgctcagaaggatacaatgctgggcaaattttaccactttcagaggttggcggaactctaccacggttaccacgccatccaccggcacacagaagatccattttctgttcaccgtcccgaaacactattcaatatcagccgcttccttctgcatagtttgccaaaggatacaccaagtgggatatctaaagttaagatcctgtttaccctggccaagcagtccaaggccctgggggcctacaggctggctcgccatgcttatgataaactgagaggcctgtacatccccgctcgatttcagaaatccattgaactgggcacattgacaatccgggcgaagccctttcacgactctgaggagctcgtccccctgtgctatcggtgtagcacaaacaatcccctccttaacaacctgggaaacgtctgcataaattgtcgacaaccattcattttctctgcctctagctacgacgtattgcacctggttgagttttacttggaagaaggtatcaccgatgaggaagctattagccttattgatttggaggtgttaagacccaaaagggacgacaggcagcttgagatagccaataattcaagccagatcctgaggttggtggaaactaaggattcgataggcgatgaggatccttttaccgctaaactaagttttgagcagggcggcagtgagtttgtacccgtcgtcgtgtcccggctagtcctacggtctatgtctcgccgggacgtcctcatcaagagatggccacccccactgcgatggcaatattttcggtcactgctacctgacgcttcaataaccatgtgtccttcctgtttccagatgttccattctgaggattatgaacttctggttttacagcatggttgttgcccgtattgtcgcaggtgcaaggacgatcccgggccttag

SEQ ID NO: 191924 - DNA, 3276 bp, synthetic construct
  misc_feature 1..3276: note = Description of Artificial Sequence: Synthetic coding sequence
  source 1..3276: mol_type = other DNA
atgttcaacggcatcatcagcatccggaacaagaacggcgaggagaaggtgaagattgagagacccgggggaagcctctcaccgatttggtccatttgttggaacccctccagcagatgggaatctttctggatgaaccgcgagaatgaggatgcagaggacgtgatcgtgaatagatatatccaggagatccccagcaccttgaaatctgcagtgtacagcagccaaggctcagaagccgaagaggaggaacctgaggaagaggatgattcgccgagggatgacaacttagaggagcgcaatgatatcctagcagtggccgattggggacagaaagtgtccttttaccaactgtcaggtaagcaaattggcaaagatagagctttaaatttcgacccttgctgcataagttatttcaccaaaggcgaatacatccttctcggggggtccgataagcaagtgagcctgtttactaaggacggggtgaggctcgggacagtgggggaacaaaacagctgggtgtggacatgccaggccaaacctgactccaactatgttgtggttgggtgtcaggatggcacaatcagcttttaccagctgattttctccacagtgcacggcctgtacaaggatcgctacgcttacagagactctatgactgatgttatcgtccagcacctgattacagagcagaaggtaaggattaagtgcaaagagctcgtaaagaagattgctatctatcgaaatcgactcgcaattcagctgcccgaaaagattttaatctatgaactgtatagtgaagacctgagtgacatgcattacagagtgaaggaaaagatcataaagaagtttgagtgcaacttactggtggtttgtgccaatcacattatcctgtgtcaagagaagagattgcagtgtctttcattttccggtgtgaaagaacgggagtggcagatggagagcctgatcagatacattaaagtgatcggggggccccctgggcgtgagggccttttagtcgggctgaagaatggccagattcttaagatcttcgtggacaatttgtttgcaatcgtcctcctgaagcaagccactgccgtgcggtgtttagatatgagcgctagtaggaagaaactggccgttgtggatgagaacgacacatgcctggtttacgacatcgataccaaggaactcctgttccaggagcctaacgctaatagcgttgcttggaacactcaatgtgaggacatgctctgtttttcggggggcggatacctgaatataaaggccagtaccttccctgtacacagacagaagctgcaaggctttgttgtgggctataacggtagtaaaattttttgtctccatgtcttctctatttctgccgtcgaggtgccacagtcagcacctatgtaccagtatctggatcgcaaactcttcaaggaggcctatcaaatagcctgcctgggcgtgactgataccgattggcgtgagctggctatggaggcactggaaggactcgacttcgagacggccaaaaaggcattcatcagggtacaggacctcaggtatctggaactgatctccagcatcgaggaaaggaaaaaaagaggagaaaccaacaacgacctctttctcgccgatgtgtttagttatcagggaaagttccatgaggctgccaaactgtataagcggagtggccatgagaatctagccctggaaatgtacacagatctgtgtatgtttgaatatgcgaaggattttctgggatctggcgaccctaaggagacaaagatgctgattacaaagcaggccgattgggcacgtaacatcaaggaaccaaaagcggccgtggagatgtatatatctgccggggagcatgtaaaagctatcgagatctgcggcgatcatggatgggtggatatgctgattgatatcgctaggaagctggacaaagcggagcgtgagcccttattgctgtgcgctacgtacttgaagaaactggacagcccaggatacgctgccgagacgtatctcaagatgggagatctgaagtctttagttcagctgcacgtcgaaacacagcgctgggatgaagcatttgctctcggcgagaaacaccccgaatttaaggacgatatttacatgccttatgcacagtggctggccgaaaacgatcgattcgaagaagctcaaaaagcctttcacaaagcaggtcgccaacgagaagctgtacaggtgctcgaacagctaactaacaacgcagttgctgaatctcggtttaatgatgcagcatactattactggatgctcagcatgcagtgcttggacatcgcacaggacccggcacagaaggacactatgctcggcaagttctatcactttcaacggctggcagaactttaccatggctatcatgctattcaccgtcacactgaggatccgttttctgtgcacaggcctgagaccttgtttaacattagtagatttttgctgcacagcctaccgaaggacacgccgtcaggtataagcaaggtgaagatcctgtttacattagccaaacagtcaaaagctctgggcgcctaccgcctggcccgccacgcctacgataagctgagaggactctatatcccagcccgatttcagaagtctatcgagttgggaacactcacaatcagggccaagccatttcacgatagtgaagagctggtcccactctgctatcgctgtagcaccaataaccccctcttaaacaatctgggaaacgtctgtatcaattgcagacagccattcatcttttccgctagctcgtacgacgtactgcacttggttgagttctacctggaggagggcataacggacgaagaagctatctcattgattgatctggaggttttgcgaccaaaaagagatgacagacaactggagatagccaacaatagctcccagatcctcagactggtggagacaaaggattcaattggggacgaggaccccttcaccgctaagctgtcttttgagcagggaggatccgagttcgtccccgtggtggtgtccagactggtgctccggagtatgtcaagaagggatgtactgattaagagatggccaccccctttacggtggcagtactttcgctccctcctgccagacgcaagcatcacaatgtgtccatcctgttttcagatgtttcactcagaagactacgaactgcttgttctgcaacatgggtgttgtccatactgcaggcgatgtaaggacgacccaggaccctag

SEQ ID NO: 191925 - DNA, 3099 bp, synthetic construct
  misc_feature 1..3099: note = Description of Artificial Sequence: Synthetic coding sequence
  source 1..3099: mol_type = other DNA
atgttcaacggcatcatcagcatccggaacaagaacggcgaggagaaggtcaaaatcgagaggccggggggctccctttcacctatctggtcgatttgctggaatccaagtagggaggaacggaatgatatcctagctgtggctgactggggacagaaagtttcattctatcagttgagcggcaagcagatcggtaaggaccgcgcattgaatttcgatccgtgctgcatctcatactttaccaaaggggagtacattttgctgggcgggtccgacaaacaggtgagcctgtttacaaaggacggagttaggctcggcactgtcggggagcagaattcgtgggtgtggacatgccaggcaaaaccagatagcaattacgtggtagttggatgtcaagacgggaccatttccttctatcaactgatcttctccacagtgcatggattatacaaagaccgctatgcctatagagactcgatgaccgacgttattgtgcaacacctgattaccgaacagaaggtcagaattaaatgcaaggagctggtgaagaagattgctatttacagaaacagactcgcgattcagctgcctgaaaaaattctaatctacgagctgtactctgaagacctgagtgatatgcactaccgtgtgaaagagaagataattaagaagttcgagtgcaatctactggtggtgtgcgcaaatcacattatcttgtgccaggagaaacgcctacaatgtctgtccttctctggagttaaggaacgagagtggcaaatggagtccttaatacgctacattaaagtcataggcggtccccctggcagagagggtctcctagtggggctgaaaaatgggcaaatcctcaagatttttgtggataatctctttgcgattgtgctgctgaagcaggcaacagctgttaggtgcctggacatgagcgcctcacgcaaaaagctggccgttgtagacgaaaacgatacttgtttagtatacgacatcgacactaaggagctgctctttcaggagcccaacgccaattcggttgcatggaacacacagtgtgaggatatgctctgtttctctggtggcggctacctgaacatcaaagcctctacttttcccgtgcaccggcagaaacttcagggtttcgttgttggctataatggttcaaagatcttttgcctgcacgtgttctccattagcgccgtagaagttcctcaatctgcccccatgtatcagtatctagataggaagctgttcaaggaagcataccagattgcttgtctgggtgtcactgatactgattggcgggagttggccatggaagctctggaaggacttgatttcgagaccgccaagaaggcattcattagagtacaagacttgcggtatctggagctcatctctagtattgaagagcgcaagaaacggggggagacaaataacgatttatttcttgcagatgtgttttcctatcagggcaagtttcatgaggccgccaaactgtataaacgcagcggacatgagaacttggccctggagatgtacactgacctttgcatgttcgagtatgccaaggacttcctgggctcaggtgatcctaaggaaacaaagatgttgatcaccaaacaagccgactgggctcgcaacattaaggagccaaaggcggcagtggagatgtatatttccgccggtgagcatgttaaggcaatcgaaatttgtggcgaccatgggtgggtagacatgctgatcgacatagcccgcaaactggataaggccgagcgcgagcctctgttgttgtgtgcaacctacttaaagaaactggacagccctgggtatgccgcggagacatacttaaagatgggagacctcaagtctctggtccagctgcatgtggagacacagagatgggacgaagcgttcgcgctaggagagaagcacccagaatttaaggatgatatttatatgccatatgcccaatggttagctgaaaatgaccggttcgaagaagctcagaaggccttccataaggcgggtcggcaaagggaagctgtgcaagtgctcgaacaacttaccaacaatgctgtcgcagagagtagattcaacgacgccgcttattattattggatgctgagcatgcagtgtctggacattgcccaggatccagcacagaaggacactatgctggggaaattttatcatttccagcgcctcgccgaactgtaccatggctatcacgccattcacaggcatactgaagatcccttctctgttcataggccagagactctctttaatataagtcggtttctactacatagcctccccaaggacacacctagcggtattagtaaggttaagatcttgttcacactggctaagcaaagtaaggccctcggagcctacagacttgcaagacatgcctacgataagcttagagggttgtacatccccgcgagatttcagaagagcatcgagctgggaaccttaacaatccgcgccaagccattccatgactcagaggaactggttccgctctgctaccggtgttccaccaataatccacttttaaacaatctgggcaacgtttgcattaattgtcgccagccattcatctttagcgcatcttcatacgatgtgctgcatctggtcgagttctatctggaagaaggcatcaccgatgaggaggccatcagcctcattgatcttgaggtgctcaggcctaaacgcgatgaccgccaattagaaattgccaataactcaagtcagatcttgcgactggtggaaaccaaagacagtatcggagacgaggatccttttactgccaagctctccttcgagcaaggaggctcagagtttgtccctgtggtggtaagtcgcctcgtattacgctcaatgtctagaagggatgtgctaattaaacgctggccccctccactgcggtggcagtattttaggtccttactgccggacgcctccatcaccatgtgtccgtcttgctttcagatgtttcattccgaagactatgaactgctggtactgcagcacgggtgctgcccatattgcaggcgctgtaaggatgatccgggaccctag

SEQ ID NO: 191926 - DNA, 3252 bp, synthetic construct
  misc_feature 1..3252: note = Description of Artificial Sequence: Synthetic coding sequence
  source 1..3252: mol_type = other DNA
atgcgggccgtgctgacctggcgggacaaggccgagcactgcatcaacgacatcgctttcaagcctgacggtacccagttaattttagccgcaggatcacggctgcttgtctacgatacctcggatggcaccctacttcaacccctgaaagggcacaaggacacagtctactgcgttgcttacgcaaaggatggattgtggtcaccagagcagaaatctgtgtcaaagcacaaaagttcctccaagataatatgttgcagggaggaaaggaatgatattttggcggtggctgactgggggcaaaaagtgtcattctaccaactttccggtaagcagattggcaaggaccgcgcactgaacttcgatccatgctgtatctcttatttcacaaagggcgagtacatcctgctggggggttctgacaaacaagttagcctgtttacgaaagacggcgttcggctcggcactgtgggcgaacagaattcctgggtttggacctgccaggcaaaacctgactcgaattacgtcgtggtgggctgccaggacgggaccatcagcttctaccagttaatcttcagtaccgtgcacgggttatataaggatcgttatgcctatcgggacagtatgaccgacgtgatcgtgcagcacctcatcaccgaacagaaagtaaggattaagtgcaaggagcttgtgaagaagattgctatctaccgtaaccgcttggcaatccaactccctgagaagatcttgatatatgaactgtactctgaagatctgagcgatatgcactatcgagtgaaggagaagattatcaagaaattcgaatgcaatttactcgtcgtgtgtgccaatcacataattttgtgtcaagagaaacgtctgcagtgtctgtcttttagtggtgtcaaagagcgcgaatggcagatggagtcccttatcagatatattaaagtcatcggtgggcctcccggccgggagggcctccttgttggcttgaagaacggccagatattgaagatcttcgtggacaacctgtttgccatagttctgctcaaacaggccactgccgtcaggtgcctagacatgtccgccagtagaaaaaagctcgcagtggttgatgagaacgacacctgtctggtgtacgacattgacaccaaagaactactgttccaggagccaaacgctaatagcgtggcttggaacacacaatgcgaggatatgctgtgcttttcggggggaggctatctgaacatcaaagctagtacatttccggttcaccgccaaaagctgcaggggtttgtggttggctataatggatcaaagatcttttgcctgcacgttttctccatttcagctgtcgaggtaccacagtccgcaccaatgtaccagtacttggatcgaaaacttttcaaggaggcttatcagatcgcttgcctgggcgtaacagatactgactggagggaactggctatggaagctctggaaggactcgacttcgagaccgctaagaaggcgttcatcagggtccaagatttgcggtacctcgagctcatcagttccatcgaagagcggaaaaagcgaggcgaaaccaacaatgatctttttctcgctgacgtgtttagctaccaaggcaagttccacgaggcggccaagttgtacaaaaggtcaggtcatgaaaacttagccctcgagatgtacacggacctctgcatgttcgagtacgccaaagacttcttaggctcgggagatcctaaggagaccaaaatgttgattactaagcaagctgattgggcccggaacattaaggaacctaaggccgctgtggagatgtacatctccgccggggagcacgtcaaggcgatagaaatctgtggggaccacggctgggtggatatgctgatcgatatcgctcgtaagctcgataaagctgagcgcgagcccctactgctctgcgccacatacctgaagaagctggattcacccggctacgcagccgaaacataccttaaaatgggggatctcaagagtttagttcagctgcacgtggaaactcagagatgggacgaggcgtttgccctgggggagaagcacccagagtttaaggatgacatctatatgccctatgcacaatggctggccgaaaatgatcgatttgaagaggctcaaaaggcctttcacaaggcaggtcggcaaagggaggccgtgcaggttctggaacaactcaccaataacgcggtggctgagagtagatttaacgacgcagcttattactactggatgctttccatgcagtgtctcgacatcgctcaggccgatcccgcccaaaaagataccatgctagggaagttttatcattttcagaggctggccgaactgtaccatggatatcatgctatccaccgccacacagaagatcctttctccgtgcacagaccagaaactctctttaatatttcccgatttttactgcacagcctgcctaaggacacgccatcagggatctcaaaggtgaggaaaatcttattcactctcgccaagcagagcaaggcccttggggcatacagacttgcgaggcacgcctatgacaaactgcgcggcttgtacattccagccagatttcagaagagcatcgagctggggacattgaccatccgggccaagccattccacgactccgaggagctggtcccgctttgctacaggtgctctaccaacaatcctctgctgaataatctaggaaatgtgtgtatcaattgtcgccagccattcatcttttctgccagctcatacgacgtgctgcatctggtggaattctatctggaggagggcatcacagacgaggaggctatctcattaatcgacctggaggtgctgaggccaaaacgtgatgacaggcagcttgagatcgctaataattcttctcagatcctgcgcctggtggaaaccaaagactctatcggagacgaagacccttttaccgcgaagctcagtttcgaacagggcggtagcgagtttgtgccagttgtggtgtcccggcttgtactgcgctccatgtccaggcgcgatgtcctcattaaaaggtggcctccccctctgcggtggcagtactttcgctccctcctcccagacgcttcaataaccatgtgcccatcctgtttccaaatgtttcattcagaggactatgagctgctcgtgttacagcacggctgttgcccttattgccggcgatgcaaggacgatccaggaccttag

SEQ ID NO: 191927 - DNA, 2886 bp, synthetic construct
  misc_feature 1..2886: note = Description of Artificial Sequence: Synthetic coding sequence
  source 1..2886: mol_type = other DNA
atgcgggccgtgctgacctggcgggacaaggccgagcactgcatcaatgacatcgccttcaaaccagatggaactcagttaatcttggctgccgggtcacgcctcttagtctatgacaccagcgatgggactttgcttcagccactcaaaggacataaggacacagtctattgcgtcgcatacgccaaggatggcaagagattcgcaagcgggagcgctgataagtcagtcataatctggacctccaagcttgagggaattctaaaatatacgcataatgacgccatccaatgcgtttcctataatcccataacccatcagctggcaagctgctcatcatcggattttggactgtggtcccccgagcaaaaatccgtcagtaagcacaagtctagttctaaaatcatctgttgttcatggacgaacgacgggcagtacctggcattgggaatgtttaatggtatcatatcaattagaaacaaaaacggagaggagaaagtgaagatcgagcgacccgggggcagtttaagccctatttggagtatttgttggaatccgagccgggaggaacggaacgacatccttgctgtggcagactggggacagaaggtaagcttctaccagcttagcggaaagcagataggcaaagatcgggctctgaatttcgacccatgctgcataagctacttcacgaaaggagagtacattctgttgggcggatccgataagcaagtctctttgttcacaaaggatggcgttcgcctcggcacagtgggcgagcaaaattcctgggtttggacctgtcaggctaaaccagacagtaactatgtcgtggttgggtgtcaagatggaactatctctttctaccagctgattttctctaccgtacacggcctttataaagacagatatgcttacagggattccatgaccgacgtcattgtgcagcatttaatcacagaacagaaggtgcggataaaatgtaaagagctggtcaaaaaaatcgcgatctaccgcaatagactcgctatccaacttccggaaaagatcctaatctacgaactgtattccgaggacctgagcgatatgcactaccgcgtgaaagagaaaattatcaagaaatttgagtgtaacctgctggtcgtttgcgcaaatcacatcatactgtgtcaggagaagagactccaatgccttagcttctctggcgtgaaggaacgcgagtggcagatggaaagtcttattcggtacatcaaagtgattggcggcccccccggcagggagggcttgctagttggcttaaagaacgggcagattctgaagattttcgtggataacttgtttgccattgtactgctgaagcaagctaccgccgttcgttgtctagacatgagcgcgtcgagaaaaaaactcgccgtcgtggacgaaaacgacacttgcctcgtgtacgatattgacaccaaagagttgcttttccaggagcccaacgctaactccgtggcctggaatacccagtgcgaggatatgttgtgctttagcggcggaggataccttaatatcaaggcttcgacctttcctgtgcatcggcagaagcttcagggctttgtggtgggatataatgggagtaagatcttctgcctccatgtcttctcaatatcggccgtggaagttccccagtcggccccaatgtaccaatatctggatcgcaaactatttaaagaagcataccagattgcctgcctgggggtaacggacacagattggagagaactggctatggaggccttggaaggcctcgactttgagactgccaaaaaggcttttataagggtgcaggatctgcggtatctcgagctcattagcagtatagaggagagaaaaaagcgcggcgaaactaataacgatctttttctcgccgatgtattcagttaccagggcaaattccatgaggcagcgaagttgtacaagcggtccggtcacgaaaacctggcccttgagatgtacactgacttatgtatgttcgaatacgccaaagacttccttggatcaggcgaccccaaggagactaaaatgctcattaccaagcaggcagattgggctcgcaatataaaagagcctaaggccgcagtggaaatgtatatcagcgcaggggaacatgtcaaagccatcgaaatttgtggggaccatggctgggtggatatgctgatcgatatcgcccgaaagctggataaggcagagcgagaaccactgctcctgtgcgccacataccttaagaagctcgactcgccaggttacgccgcagaaacatatttgaaaatgggggacctgaagtccctcgtccagttgcacgttgagacccagcgatgggacgaggctttcgccttaggcgagaaacaccctgagtttaaagatgatatctacatgccatacgcacagtggctggccgagaacgatcgattcgaagaagcccagaaagcctttcacaaggcgggacgtcagcgggaggctgtgcaagtgctggagcagctgaccaacaatgccgtggccgagtccagattcaacgacgcagcctactactattggatgctttctatgcagtgcctcgacatcgcccaggatcctgctcagaaagatacaatgctgggcaagttttatcactttcagaggctggctgagctctaccacgggtaccacgccatccatcgccataccgaagaccctttctctgttcaccgcccagagaccctttttaatatttctcgtttcctgcttcattcgttacccaaagacacaccttccggaatcagcaaggtctgcgagaataccctacacctcggccaggccgaacagggtcctcggtgtctgcaggccggcccagcaaggctgtag

SEQ ID NO: 191928 - DNA, 3357 bp, synthetic construct
  misc_feature 1..3357: note = Description of Artificial Sequence: Synthetic coding sequence
  source 1..3357: mol_type = other DNA
atgcgggccgtgctgacctggcgggacaaggccgagcactgcatcaatgacatagccttcaaacctgatgggacccagctgatcttagccgctggctctcgactcctagtttatgatacaagtgacggaacactattgcagcccctcaaaggacacaaggataccgtctactgtgtcgcttacgctaaggatgtgctctgcatcgaaggcctttggtctccggaacagaagtcagtcagtaagcacaaaagttcttccaaaatcatctgttgcagttggacaaatgatggccaatacctggccctcggtatgtttaatggaatcatttccatccgcaataagaatggggaagaaaaagtgaagattgaacggcccggtggctctctgagcccgatctggtcaatatgttggaatccctcaagagaagagcgcaacgatattctcgccgtggccgactgggggcaaaaggtaagcttctatcagttgtcaggcaaacaaatcggaaaggaccgggccctgaacttcgacccctgctgcatatcttatttcaccaagggcgaatacattctcctgggtgggagcgataagcaagtttccctgttcactaaagacggtgtacggcttgggactgtcggtgaacagaactcgtgggtatggacatgtcaggcgaagccagacagtaattatgtggtggttggttgtcaggatggtacaatctccttttatcagctaattttttctaccgtgcacggactgtataaggatcggtacgcctacagggattctatgacggacgtcatagttcaacatctgataaccgaacaaaaggtgagaattaaatgtaaagagctggtcaaaaagatcgcaatttacagaaatcggttagccatacagttgcctgaaaagattctgatctacgaactgtactctgaggaccttagcgacatgcattatcgtgtaaaggaaaagatcattaagaaattcgagtgcaatctgctggtggtgtgcgctaatcatattatcctttgccaagagaaaagactccagtgcctttcgttttcaggcgtcaaggaaagggaatggcaaatggagagtctgatccggtatatcaaagtcattgggggccctcctgggcgggaggggctgctggtggggttgaaaaatggccagatcctgaaaatatttgtcgacaacctgtttgcaatagtgcttctaaaacaggcaacagcagtacgctgcttagatatgagtgcatctcgcaagaagcttgcagttgtagatgagaacgacacttgtctggtttacgacatagatacaaaggagctcctgttccaagagccgaacgctaacagtgtagcatggaatacacagtgtgaggatatgctgtgcttcagcggaggtggttatttaaatattaaagcctcgactttcccagtccacagacagaagctgcaaggattcgtggtgggttacaacggctccaagatcttttgtctccatgtgttttccattagtgctgtggaggtcccacaaagtgctcctatgtaccagtatctcgaccgaaaactctttaaagaggcctaccagattgcgtgtttaggggtcacggacaccgattggcgggaacttgccatggaagcccttgagggacttgattttgaaaccgccaaaaaggagcggaagaaaagaggcgagaccaacaatgatctgttcctggccgatgtgttctcctaccaggggaaattccatgaggccgcaaagttgtataagcgcagtggtcacgaaaatctggccctcgagatgtacaccgatctctgcatgttcgaatacgccaaagacttccttggatcaggagacccaaaagagacaaagatgttgatcacgaagcaagcggactgggcccgcaatatcaaggaaccaaaggccgccgtcgaaatgtatatttcagcaggagaacacgtaaaagcaattgaaatatgtggagatcatggctgggtggacatgcttatcgacattgcaagaaaattagacaaagctgagagggagccattgctcctctgtgcgacatatctgaaaaaactggactcccctggctatgccgctgaaacataccttaagatgggtgatttgaagagcttggtccagttgcatgtcgagacacaacgatgggatgaggcatttgccctcggtgagaagcaccctgaatttaaagatgacatctacatgccatacgctcagtggctagcggagaatgataggttcgaggaagctcagaaggcttttcacaaagcgggccgtcaacgggaggctgtgcaggtactggagcagctgaccaacaatgctgtggcagagagtcgctttaacgacgctgcttattactattggatgctgtcgatgcagtgtctggatatcgcccaggcagatcctgcccaaaaggacacaatgctggggaagttctaccacttccagcgtttggccgaactgtaccacggctaccatgcgatccaccgacataccgaggatccttttagtgtgcatcggcctgagacattgttcaacatcagtaggttccttctgcactcactgcccaaagatacaccttccggtatcagcaaggtgaagatcctcttcactctggcgaagcagtctaaagccttgggggcgtacagactggctaggcatgcctatgacaagttacggggtctgtatatccccgcaaggtttcagaaatccatagagctgggcaccctgacgatccgcgccaagccattccacgacagtgaagagttggttcccctctgttaccgttgttcgaccaacaatccactcctgaacaatctgggcaacgtttgcataaactgtaggcagccattcatcttctccgctagtagctatgacgtgctacatctggtggaattttatcttgaggagggtatcaccgacgaggaggcaatttccctcatcgatctcgaggttctgaggcccaagagggacgataggcagctggaaatcgcgaataactcaagccagatattaagactggtcgaaaccaaggactcaattggagatgaagatcctttcacagcaaagctatcattcgagcaggggggctcagaattcgtccccgtcgtagtgtcgaggctcgtcctccggtccatgagtcgtagagatgtgcttatcaagcgatggccaccaccactacgctggcagtacttccggtctttgttacctgatgcctccatcaccatgtgtccctcctgtttccaaatgtttcactcagaagattacgaactgttggttctccaacatgggtgctgcccttactgtcggcgctgcaaagacgaccctggcccatag

SEQ ID NO: 191929 - DNA, 5250 bp, synthetic construct
  misc_feature 1..5250: note = Description of Artificial Sequence: Synthetic coding sequence
  source 1..5250: mol_type = other DNA
atgcacctgaagcacctgcggaccctgctgagcccccaggacggcgcagctaaagtcacatgtatggcttggtcccaaaacaacgctaaattcgccgtgtgtacggttgaccgtgtagtactgctgtacgacgagcacggcgaacgcagagacaagttcagcacaaaaccagccgacatgaagtacggccgcaaaagctacatggtaaaaggtatggcatttagtcccgacagcacgaagatagcgatcggccagacagataacattatttacgtctataaaattggcgaagattggggcgacaagaaagtgatttgtaataaatttatccagacctccgcagtgacctgtttgcagtggcccgcggaatacattatcgtgtttggcctcgctgagggcaaagttaggctcgccaacacaaagacaaacaagagcagcacgatctacggcacagaatcttatgtggtatctctcaccaccaactgttcaggcaagggtatcctgagcgggcacgcagacgggactatcgtacggtatttcttcgacgatgagggaagcggagagagccaggggaaactggtgaaccacccatgtccaccttatgccctcgcctgggctactaactccatagtggcagcgggctgtgatcgcaaaatagtcgcctacgggaaggagggccacatgctgcagaccttcgactacagccgcgatcctcaggagcgagagttcacgacggccgtctcctctcccggaggacaaagtgtggtgcttggatcatacgaccggctacgggtcttcaactggatacctcggagaagtatctgggaggaggccaaacccaaggaaattacaaacctgtacactatcactgccctggcatggaaacgcgatggctcccgactgtgcgtgggaacactgtgtggcggtgtcgaacagtttgactgctgcctcaggcggtcgatttacaagaataagtttgagctcacatacgtcggaccttctcaggtgatagtgaagaatctctcctctgggacacgggttgtccttaaatctcattacggatatgaggttgaagaggtgaaaattcttggcaaagagaggtatctggttgcccatacaagcgagactttgctgcttggcgatctgaacaccaatcgcttatcagagattgcttggcagggtagcggaggcaatgagaagtatttcttcgaaaacgagaatgtgtgcatgatcttcaacgccggcgagttgactctggttgagtacggtaataatgacactctgggctccgtacgtacggagtttatgaacccccacttgatctctgtgaggatcaatgaaagatgccagaggggcacggaggataacaaaaagctagcttatctgattgacataaagacaattgccattgttgatctgattggaggttataacataggcaccgtgtctcatgagagtcgggtcgattggcttgagctcaacgagaccggccacaagttgttatttagagataggaagctcaggctgcacctctacgacatcgaaagctgtagcaaaacaatgattcttaatttctgttcttacatgcagtgggtgcctggttcagacgtgctcgtggcccagaaccgcaactctctttgtgtgtggtataatatagaggcccctgagagagttaccatgtttaccattcgcggtgacgttatcggcctcgaaaggggtgggggaaagacagaagtgatggtgatggaaggagtcacaacagtggcatacactttggacgagggcttaatcgaattcggcaccgcaattgatgatgggaactacattcgggccacggccttcctggagacactggagatgacacctgagacggaggccatgtggaagactctgagtaagctagctttggaagcccggcagctgcatatcgccgagcggtgttttagcgcgctgggtcaggtggctaaggcaaggttcttgcatgaaacaaatgagatcgcggatcaggtgtcacgggaatatggcggcgagggtactgatttctaccaggtccgtgcccgcctcgctatgctggaaaaaaattacaagctggctgagatgatcttcctcgaacagaatgctgtggaggaggccatgggtatgtaccaagagctgcatagatgggacgagtgtatcgctgtggcagaagcgaaagggcatcccgccttggaaaagctgcgtagaagctattatcagtggctaatggatactcagcaggaagaacgcgccggggagctccaagagagccagggggacggcttagccgccatctcactatatctgaaggctggattgcccgcaaaagcagccagactggtattgactcgggaagagctgcttgccaacacagagcttgttgagcacattacagccgctctgatcaagggggagctctacgagcgggcgggagacctgttcgagaagatccacaacccgcagaaagccttagagtgctaccgcaagggtaatgcgttcatgaaggctgttgagttggctcgattggcttttcccgtcgaggtcgtaaaactagaagaggcttggggagatcatctggtccagcagaagcaactggacgccgcaatcaatcattacatagaagctaggtgttcaattaaagctattgaagccgcccttggcgcgcggcagtggaaaaaagctatttacatcctggacttgcaagatcgcaacaccgctagcaagtattacccactggtagcacagcactatgcctcattgcaggaatatgaaattgctgaagagctctatacaaaaggagaccgcacaaaggatgctattgatatgtatacccaagcgggacggtgggagcaggctcacaagttggccatgaaatgcatgaggcccgaggacgtgtcagttctgtatataactcaggcacaggagatggaaaagcaggggaaatacagggaggcagagagactgtatgttacagttcaagaacccgatctcgccataacaatgtataagaagcacaagctgtatgacgacatgatcaggctggtggggaaacatcaccctgacttattgagtgatacacacctccatttagggaaggaactggaagccgaaggaagactccaggaagctgagtaccactacctagaggcccaggaatggaaggccaccgtgaacatgtaccgggctagtggcctgtgggaggaagcgtatcgtgtcgctagaacgcagggcggagctaacgcacataagcacgtggcatatttatgggccaaaagcctggggggcgaagccgccgtgcggttgctcaataagttgggcctccttgaggctgccgtcgatcatgctgccgataactgttccttcgagttcgctttcgaattaagtcgactggctctgaagcataaaacgcccgaagtccacttgaagtacgctatgttcctggaggacgaaggcaaatttgaagaggcggaggctgagtttatcagagccggaaaacctaaagaagctgtgctgatgtttgtccataatcaagactgggaggccgcccagcgagtggcagaagcccatgatcctgactccgtcgcggaggtgctggttggccaagcccgaggcgctctggaggaaaaagatttccagaaagccgagggcctgctgcttagggcccagcgccccggacttgccctgaattactataaggaggctggcctctggagcgacgcactccgcatctgcaaagactatgtgcctagtcagctcgaagccctccaggaggagtacgaacgcgaggccaccaaaaagggggcaaggggggttgaaggattcgtggagcaggcccgacattgggagcaagcaggggaatattctcgggctgtggattgctatctgaaggtcagggacagcggtaacagcggcctggccgagaagtgttggatgaaggcggccgaactgtcaataaagtttctcccacctcagcggaacatggaggtcgttctggccgtcggccctcagctcatcggaattggcaaacactccgcagcagccgagctgtatttgaatctcgacctggttaaagaggcaatcgatgccttcattgagggcgaagaatggaataaagctaagagagttgccaaagaattggacccccgctacgaagactatgtggatcagcactacaaagagtttctgaaaaaccagggtaaagtggattcgcttgtgggggttgacgtaatcgccgctctcgacctgtatgtagaacagggccagtgggataagtgcatcgagacagccaccaaacagaactacaagatactgcataaatatgtcgcactctacgctacccatttgatccgggagggatcgagtgcacaagctctcgctctttatgtgcagcacggagctccagccaaccctcaaaactttaacatttataagcggatctttacagacatggtctccagccccggcacaaactgcgctgaagcctaccatagctgggcagacctgagagacgtcctgtttaacctctgtgaaaacctggtcaaatccagtgaagctaatagccctgcacatgaggagttcaagaccatgctgcttatcgcacactactatgccacgagatctgccgcccagagtgttaagcagcttgagaccgtcgcagctagattgtcggtgagcctgctgcggcatacccagctgctccccgtggacaaggcgttctacgaagccggcattgcagctaaggcggtggggtgggataatatggcatttatctttttgaaccggttcctggaccttactgatgctatcgaagagggaaccttagatgggctggatcactctgacttccaagacaccgatatccccttcgaagtgcccctgcctgctaagcaacacgtacccgaagccgaacgcgaggaagtgagagactgggtgctgaccgtcagcatggatcagcgccttgaacaggtgctgcctagggacgagcgtggcgcctatgaggcgtcactggttgcagcctccacaggagttagggccctgccatgcctcattactgggtatcctatactgcgcaataagatagaatttaagcggcctgggaaggctgctaataaggacaactggaacaaattcctgatggccatcaaaaccagccacagccccgtctgccaggacgtgctgaagtttatttctcagtggtgcggcggcctcccaagcacatctttcagctttcagtag

SEQ ID NO: 191930 - DNA, 1536 bp, synthetic construct
  misc_feature 1..1536: note = Description of Artificial Sequence: Synthetic coding sequence
  source 1..1536: mol_type = other DNA
atggcctggagccagaacaacgccaagttcgccgtgtgcaccgtggaccgggtggtgctcctttacgacgaacacggggaaaggagggataaattctcgaccaagccagccgacatgaagtacggacgtaagtcctatatggtcaagggcatggcattctcccctgattccacgaagattgctattggccaaacagataatattatttacgtatacaaaatcggcgaggactggggtgacaagaaggtcatatgtaataaattcatccagacttccgcagtcacgtgtcttcagtggcccgcagagtatattatcgtctttggtttggcagaaggtaaggttcgactggccaacaccaagaccaacaagagctccaccatttacggtaccgagtcatatgtggtctccctaactaccaactgcagtggtaaaggcattctgtcaggacacgccgacgggactatcgtcaggtactttttcgacgatgaagggagcggcgaaagccagggtaaactcgtgaaccatccttgtcccccctatgcattagcgtgggccactaattccatcgtggcagccggatgtgatcgaaagattgtggcctacggcaaggaggggcatatgctacagaccttcgattattctcgcgacccccaggaacgcgaatttaccaccgctgtctccagccctggaggtcagtcagtcgttctgggaagttatgaccgcctccgtgtgtttaattggatcccccggcggtctatctgggaagaggccaaacctaaggaaatcacaaatctgtataccataactgccctggcttggaaaagggacggaagccgcctgtgcgtggggactctctgtggaggtgttgaacagttcgactgttgtttaaggagaagcatctacaagaataagtttgagcttacatacgtgggccctagtcaagttattgtgaagaatttgagtagcggaactagggtggtgctgaagtcacattatggatatgaagtggaagaggttaaaattcttgggaaggagcgatatctggtagcccacaccagcgaaaccctgttattgggggatctaaataccaacagactatccgagattgcatggcaggggagcggcggaaatgaaaagtacttctttgagaatgagaacgtgtgcatgattttcaacgccggtgagctcacactggtggagtacgggaacaatgacaccctgggatccgtgcgaaccgaatttatgaacccccacctcatctcagtgcgaatcaacgagcggtgtcaacgaggcacagaggacaacaagaaactggcctaccttattgacataaagacaattgctatagtggatttaatcgggggctataacatcggcacagtgagtcacgaatcgcgggtagactggttagagctcaatgaaacaggccacaaactacttttcagagaccgaaaattaagagtgagaagggctacaaaggccttggggattgggtggcctactgaaggggttaggcaggccgctacgagggactag

SEQ ID NO: 191931 - DNA, 369 bp, synthetic construct
  misc_feature 1..369: note = Description of Artificial Sequence: Synthetic coding sequence
  source 1..369: mol_type = other DNA
atgacccacctgctgctgaccgccaccgtgacccccagcgagcagaacagtagccgcgagcctggttgggagaccgcaatggccaaagacattctaggcgaagctggcctacacttcgacgagctgaacaaactccgggtgttagaccccgaagtgacgcagcaaaccatcgagctcaaggaggagtgtaaggacttcgttgacaaaattgggcagtttcagaagatcgtgggcggtctcattgaactggtggatcaactggctaaggaggccgaaaatgagaagatgaaggtcaggtcggcgtgtctgcctccaacaagctggcccggaacactggttcattaccctctgatccctcttccgtcctag

SEQ ID NO: 191932 - DNA, 447 bp, synthetic construct
  misc_feature 1..447: note = Description of Artificial Sequence: Synthetic coding sequence
  source 1..447: mol_type = other DNA
atggccaaggacatcctgggcgaggccggcctgcacttcgacgagctcaataagctgcgcgtcctagatccagaagttacccagcaaaccattgagctgaaggaagagtgcaaagatttcgtggataagattggccagttccaaaagattgtgggcgggcttattgaactagtcgaccagctcgctaaggaggcagagaatgaaaaaatgaaaagtctagctgtgtccccgcggcttgaatgtactggagctatttcagcccactgtaagctttgtctgagcgacagtagcgatagccctacctccccatcccgcgtggggggcacgaccggccatcgatgttctgagctggcacaaatctattccaaggctgagagaagctccacagctgccacatcatctcccaacagtagaaaggagaacgctgccagaaaggtttcgggatag

SEQ ID NO: 191933 - DNA, 399 bp, synthetic construct
  misc_feature 1..399: note = Description of Artificial Sequence: Synthetic coding sequence
  source 1..399: mol_type = other DNA
atggccaaggacatcctgggcgaggccggcctgcacttcgacgagttgaacaagttacgcgtgctagacccggaggtcacacaacagactatagaattgaaagaggaatgtaaggattttgtagacaagattggccaatttcagaagattgtgggcgggcttattgagctggtagatcagctcgccaaagaggccgaaaacgaaaaaatgaaggcaataggggctaggaacctgcttaagagcatagccaagcagcgtgaggctcaacaacagcaactgcaggctctcatcgccgaaaagaagatgcagctggagcggtaccgggttgagtatgaagctctatgcaaagtcgaggccgaacagaacgagttcattgaccaattcattttccaaaaatag

SEQ ID NO: 191934 - DNA, 216 bp, synthetic construct
  misc_feature 1..216: note = Description of Artificial Sequence: Synthetic coding sequence
  source 1..216: mol_type = other DNA
gacatcctgggcgaggccggcctgcacttcgacgagctgaacaagctgcgcgtgctggatccagaagttactcaacagacgatcgaattaaaggaggagtgcaaagacttcgtcgacaagattggacagttccagaagattgtgggggggctgattgagctcgtagaccagctggcaaaggaagctgagaacgaaaaaatgaaggtgtctggctag

SEQ ID NO: 191935 - DNA, 345 bp, synthetic construct
  misc_feature 1..345: note = Description of Artificial Sequence: Synthetic coding sequence
  source 1..345: mol_type = other DNA
atggccaaggacatcctgggcgaggccggcctgcacttcgacgagcttaataagcttcgtgtgctagaccctgaggtcactcagcagactattgaactgaaggaggaatgcaaagacttcgttgacaagattggtcagtttcagaaaatcgttggtgggctgattgagctggttgaccagttagccaaggaggcggaaaatgagaaaatgaaggcaatcggcgccagaaatctgctaaagtccatcgccaagcagagagaggcacagcaacagcagctgcaggcgctgattgctgaaaagaagatgcaactcgagagaaatgaacttaagatctctttactgtag

SEQ ID NO: 191936 - DNA, 477 bp, synthetic construct
  misc_feature 1..477: note = Description of Artificial Sequence: Synthetic coding sequence
  source 1..477: mol_type = other DNA
atgacccacctgctgctgaccgccaccgtgacccccagcgagcagaattcaagccgcgagccgggctgggagactgccatggccaaggacattctcggcgaagcagggctccacttcgacgaactgaataaactcagggtgctcgatcctgaagtgacccaacagactatcgagctgaaggaagagtgcaaagatttcgtggataaaatcggtcagtttcagaaaatcgtcggaggtctcattgaactggttgatcaactggctaaggaagctgaaaacgagaaaatgaaggcaattggagcgcgcaatctcctcaaatctatagctaaacaaagggaggcacaacaacagcaactgcaggcccttatcgccgaaaaaaaaatgcagctggagcggtaccgcgtcgaatacgaggctttatgcaaagttgaggcagaacagaacgagttcattgatcagtttattttccaaaagtag

SEQ ID NO: 191937 - DNA, 399 bp, synthetic construct
  misc_feature 1..399: note = Description of Artificial Sequence: Synthetic coding sequence
  source 1..399: mol_type = other DNA
atggccaaggacatcctgggcgaggccggcctgcacttcgacgagttgaataagttacgcgtactggacccagaggttacacaacagaccattgagctaaaagaagagtgcaaagatttcgttgacaagattggccagtttcagaaaattgtcgggggactgattgagttggtcgaccaactcgccaaagaagccgagaacgaaaaaatgaaggcaattggggcccgcaatctcctgaaatccatcgccaaacagcgcgaagctcagcaacaacaacttcaagctctcatcgccgaaaaaaaaatgcaacttgagcgttatagggtggaatacgaggcgctgtgcaaggtggaagcagaacaaaatgaattcattgaccaattcatctttcagaaatag

SEQ ID NO: 191938 - DNA, 642 bp, synthetic construct
  misc_feature 1..642: note = Description of Artificial Sequence: Synthetic coding sequence
  source 1..642: mol_type = other DNA
atggaggacctgctggacctggacgaggagctgcggtacagcctggctaccagcagggctaagatggggcgccgggctcaacaagagagcgctcaggccgagaatcacctcaacggcaagaatagctcactgactctgactggcgaaacttcgagcgcaaaattaccccgctgcaggcagggcggctgggctggcgacagcgtgaaggcatcaaacggcacacagactggcaagcagcaacttgatttaaacgcctgttatcataaaacccatcaccgagacctgggcctcgccagcctcgaggaagcagacattcccattattcctgatttagaagaagtgcaggaggaagactttgttctgcaagtggctgccccacctagtatacaaattaagcgggtcatgacttatcgggaccttgacaacgatctcatgaagtatagtgccatccagaccctagatggcgagattgacctgaaactgctgacaaaggtgttagccccggaacacgaggtacgggaggacgacgtgggctgggattgggatcacctgtttacagaagtgtcatccgaagttcttacggagtgggatcctctgcagactgaaaaggaggacccagccggccaagctcggcacacctag

SEQ ID NO: 191939 - DNA, 627 bp, synthetic construct
  misc_feature 1..627: note = Description of Artificial Sequence: Synthetic coding sequence
  source 1..627: mol_type = other DNA
atggaggacctgctggacctggacgaggagctgcggtacagcctggccacatccagggcaaaaatgggccgtcgcgcccaacaggagagcgctcaggccgagaatcacttaaacggcaagaatagctcactcacactgacaggagagacatctagtgcgaagttgccccgttgccgccaaggagggtgggccggcgactccgtgaaggcctctaagtttcgacggaaggcctcagaagagatcgaggattttagactcaggccccaaagtttaaacggcagcgattacggcggtgatatcccaattatccctgatctggaagaagttcaggaggaagactttgtcctccaagtggcagcccccccatcgattcaaattaaacgagtcatgacataccgggacctggacaacgacctgatgaagtatagcgccattcagacgcttgatggggaaattgatctgaagttgctgaccaaggtgctggcgcccgagcatgaagttcgcgaagatgacgtcggctgggactgggatcacctctttactgaagtttcctccgaagtgctgaccgaatgggatccactgcagactgagaaagaggatcccgcaggacaggcacggcacacgtag

SEQ ID NO: 191940 - DNA, 342 bp, synthetic construct
  misc_feature 1..342: note = Description of Artificial Sequence: Synthetic coding sequence
  source 1..342: mol_type = other DNA
atggaggacctgctggacctggacgaggagctgcggtacagcctggcaaccagtcgagccaaaatgggccgtcgggcccagcaggagagtgcacaggcagagaaccacctaaatggaaagaactccagcctaaccttgactggggagacatcatcggccaaactgcccagatgtcggcagggcggttgggcaggcgatagtgtgaaggcctcaaaatttcggaggaaggcttccgaggaaatagaagaatatgtgagctctatcttaattctcatggtcagttatgtggacttgggtcaacagtgctccctgggaggtcacgatttgttccatttgtgttag

SEQ ID NO: 191941 - DNA, 1290 bp, synthetic construct
  misc_feature 1..1290: note = Description of Artificial Sequence: Synthetic coding sequence
  source 1..1290: mol_type = other DNA
atgaccgccgccctggccgtggtgaccaccagcggcctggaggacggagtgccacgcagcaggggcgagggaacaggcgaggtggtgctagaaaggggccctggagctgcttaccacatgtttgtggtaatggaggacctggtggagaagctgaagttgctgagatatgaggaggaatttttgaggaaatccaatctcaaagccccgagccgacactactttgccctgccaactaatcctggggaacagttttatatgttctgcacactcgccgcttggttaattaataaggctgggcggccattcgaacaacctcaggaatatgatgaccctaacgccactatttcaaacatcctctccgaattgagatctttcggacgcactgcggacttcccgccatccaaattgaaatctggatacggagagcacgtgtgctatgtgctggactgcttcgcagaggaagctctgaaatacatcggattcacctggaagcgccctatatatcctgtggaggaactggaggaagagagtgtcgctgaggatgacgctgagctgactctgaataaagtggacgaggagttcgtggaagaggagacggacaacgaagaaaactttattgatctaaatgtgctgaaggctcaaacatatcatctggatatgaacgagacagctaagcaggaagacatcctggaatctacaactgacgcagctgagtggtctctggaggttgagcgagtgctgccccagttgaaggtgacgattagaactgacaacaaggattggcgaattcatgtggatcaaatgcaccagcacagatccggcatcgagtccgcactcaaggagaccaaggggttcctcgataagttacacaatgagattacacgaacactggaaaagattagttcccgggagaagtacataaataatcagctagagaacttggtgcaggagtatagggcggcacaagcccaactgtcggaggccaaagagagataccagcaggggaatggcggtgtcaccgaaagaactagactactgagtgaggtaatggaagaattggagaaggttaaacaggagatggaggagaagggtagcagcatgaccgacggggcccccctggtcaagataaaacagagtctgactaagctgaagcaagaaaccgttgagatggatattcgcatcggaatcgtggaacataccctgctgcagtctaaacttaaagagaaaagtaatatgacaagaaacatgcatgcgactgtgatccccgagcccgcaaccggattttactag

SEQ ID NO: 191942 - DNA, 2334 bp, synthetic construct
  misc_feature 1..2334: note = Description of Artificial Sequence: Synthetic coding sequence
  source 1..2334: mol_type = other DNA
atgcggctgaagatcagcctgctgaaggagcccaagcaccaggagcttgtgtcctgtgttggctggactacagcagaggagctgtactcctgtagcgatgatcaccagatcgtcaagtggaatttactcacatctgaaaccacccagattgtgaagctcccagatgacatttaccccatagattttcactggtttccaaagtcgctgggagtgaaaaaacagacacaagccgagtccttcgtccttacgagcagtgatggcaagttccatctcatatccaagttgggaagagtagagaagtccgtggaggctcactgcggcgctgtactcgccggcaggtggaattacgagggtaccgcactggttacagttggggaggacgggcaaatcaagatatggagcaagactggcatgctgaggagcaccctggcgcagcaggggactccagtttactctgttgcctggggcccagacagcgagaaagtcctatataccgccgggaagcagttgatcattaagccactgcaacccaacgccaaggtgttgcaatggaaagcacatgacggcatcatcctaaaggtagattggaatagtgtgaacgatctgattctaagcgctggagaggactgtaagtataaggtctgggacagctatgggcggcccctgtataacagccagccacacgagcatcctatcacttcagtggcttgggcacctgatggcgagctctttgctgtcgggtcatttcacacactgaggctatgcgacaagacgggatggtcttacgccctggaaaaaccaaacacaggtagcatttttaacattgcctggagtatagacggcacccagatcgcaggggcatgcggcaacgggcacgtggtctttgcccatgtcgtggagcagcactgggagtggaaaaattttcaagtcacactgacaaaacgtagagctatgcaggtgcggaacgtgctgaacgacgcagttgatctgcttgagttcagagatcgggtaataaaggcatccttgaattacgcccacttggttgtttccacctcactccagtgctacgtgttttcaaccaagaactggaatactcctatcatctttgacctgaaggagggcactgtctcactcatcctgcaggcagagagacactttcttctagtggacggcagctccatttacctatattcttatgagggccggtttatctccagtcccaagttcccggggatgaggactgacatacttaatgctcagacagtctcactgagcaatgacactatcgcaatacgcgacaaggcagacgaaaaaattatctttttgttcgaagcgagcactggaaagccactcggagatggtaaatttctgtcccacaagaacgagattctggagatcgcacttgaccagaagggcctgacaaacgacaggaaaatcgcttttatcgataaaaatagggacctctgcataactagcgtcaaacgctttggaaaagaggagcagatcattaaactgggaacaatggtgcatactttagcatggaacgacacctgtaatatcttatgcggcctccaagatacgagatttattgtgtggtactaccccaacacagtgtatgtcgatagagatatcctgcctaaaactctatacgaacgggatgcatctgagttctcgaagaatccccacattgtgagctttgttggcaaccaggtcacaatccgccgcgccgatggatccttggtgcatatttctatcacgccctaccccgccatccttcacgaatacgtatctagctccaaatgggaagacgcagttcgcctgtgcaggtttgtaaaggagcaaaccatgtgggcgtgcctggctgctatggctgttgctaacagggacatgactactgccgaaatcgcatacgccgcaataggtgaaatcgataaagtgcagtacattaattcaattaagaacctgccttctaaagaatcgaagatggcacacatactgctgttcagcggaaatattcaggaggccgaaattgttcttttacaggcaggtcttgtataccaagctatccagattaatataaacctttataactgggagcgcgccctggagctggcagtcaagtacaaaacccacgttgataccgtattggcctacagacagaagttcctggagacatttggcaagcaagaaacaaataagcgatatctccactacgctgaggggctgcagatcgattgggaaaagataaaggctaaaatagaaatggaaattacaaaggagagggaacagagctcttcatcgcaaagtagtaagagcatcggactgaaaccctag

SEQ ID NO: 191943 - DNA, 195 bp, synthetic construct
  misc_feature 1..195: note = Description of Artificial Sequence: Synthetic coding sequence
  source 1..195: mol_type = other DNA
atgcggctgaagatcagcctgctgaaggagcccaagcaccaggagcttgtgagttgtgtgggctggaccacggcagaagagctgtactcctgttctgatgatcaccagattgtcaagtggaatctccttacttctgagactacccaaatagtaaagttgcctgacgatatatatcccatcgacttccactggtag

SEQ ID NO: 191944 - DNA, 1923 bp, synthetic construct
  misc_feature 1..1923: note = Description of Artificial Sequence: Synthetic coding sequence
  source 1..1923: mol_type = other DNA
atgctgcggagcaccctggcccagcagggcacccccgtgtacagcgtggcctgggggcctgacagcgagaaagtgctgtacacagccggaaagcagctgatcattaagcccctgcagcccaatgccaaggtcctccagtggaaggcacatgatgggatcatcctcaaggtggactggaatagtgtgaacgatttgattctgagcgctggcgaggattgtaagtataaggtgtgggactcatacggcaggccattgtacaatagccagcctcacgaacaccccattacatcggtggcatgggctcctgacggggagcttttcgccgtaggatcctttcataccctgcggttgtgcgacaagaccggttggtcctatgccctcgaaaaaccaaatactggctcaattttcaacatcgcatggtctatcgacggaacccagatcgccggagcttgtgggaacggccacgtggtgttcgcccatgtggtggaacaacattgggaatggaaaaacttccaggtaactctgaccaagcggagggcaatgcaggtgcggaacgtgctcaacgatgcagtcgatctgctggagtttcgggacagagtcattaaggcatcactgaactacgcgcacctcgtggtgtctaccagcctgcagtgctacgtgttctccacaaaaaactggaatacaccaataatcttcgaccttaaggaaggaacggtaagccttattctgcaggctgagcgtcacttcctgctggtggacggctcttccatctacctgtactcctatgaaggccgattcatcagttccccgaaattccccggaatgagaacagacattctcaatgcacagacagtgagtctgagcaatgacaccattgccatccgcgacaaggccgacgaaaagattattttcctgttcgaggcctcaacgggtaagcccctcggagacggtaagtttctttcacacaagaatgaaatcctggagatagcgctagaccagaagggcctgaccaacgatcgaaagattgcttttattgacaagaacagagacctgtgtataactagtgtgaaacggtttggaaaggaggaacagataataaagctcggaaccatggtgcataccctggcgtggaacgatacatgcaatattctgtgtgggctgcaggatacacggtttatcgtgtggtattatcctaacacggtgtatgttgatcgggatatattgccgaagaccctctatgagagggatgctagtgagttctccaagaaccctcacattgtctcttttgtagggaaccaggtaaccatcaggagagcagatgggagtcttgtacacatttcaattacaccctacccggctatcctgcatgaatatgtctcgagcagcaagtgggaagacgccgtccggctttgccgatttgtgaaggagcaaactatgtgggcatgtttggccgctatggcggtcgcaaacagagatatgacgacagccgagattgcttatgcggcgatcggtgagattgacaaggtgcaatacattaatagcatcaagaacctccctagcaaggagtcgaagatggctcatatactcctgttctccggcaacattcaagaagcggagattgttctgcttcaggctgggcttgtgtaccaggctattcagataaacattaacctttacaattgggagcgcgccttggagttggccgttaagtacaaaactcacgtggacacagtacttgcttaccggcagaaatttctggagaccttcgggaaacaagaaacaaacaagcgttatctgcactacgccgaggggcttcagatcgactgggagaagataaaagctaaaattgaaatggaaatcactaaagaacgcgagcaatcttcttcctcacagtctagcaaatctatcggcttgaaaccatag

SEQ ID NO: 191945 - DNA, 366 bp, synthetic construct
  misc_feature 1..366: note = Description of Artificial Sequence: Synthetic coding sequence
  source 1..366: mol_type = other DNA
atgcggctgaagatcagcctgctgaaggagcccaagcaccaggagctcgtttcttgcgttggctggacgacagctgaagagctctattcatgttccgacgatcaccagatcgtcaagtggaatctactgacttctgaaaccacacagatcgtgaaactccccgatgacatctacccaatagatttccattggttccccaagagtctcggcgtaaagaaacagactcaggccgagtctttcgtattaacaagcagtgacggcaaattccacctgataagcaagttggggcgcgtggagaaaagcgtcgaggcacattgcggcgccgtcctggctgggagatggaactacgaagggaccgctctttag

SEQ ID NO: 191946 - DNA, 1923 bp, synthetic construct
  misc_feature 1..1923: note = Description of Artificial Sequence: Synthetic coding sequence
  source 1..1923: mol_type = other DNA
atgctgcggagcaccctggcccagcagggcacccccgtgtacagcgtcgcctgggggcccgacagtgagaaagtgctgtacaccgctggtaaacagctgataattaaacctttacaaccaaatgctaaggtgctgcagtggaaagctcacgatggaatcatccttaaggtggactggaattcagtcaatgaccttattctgtccgccggagaagactgtaagtacaaggtatgggattcttatggaagacctttgtataactcacaacctcacgaacaccccataacaagcgttgcctgggcgcccgatggcgagttatttgcggtgggctctttccacacgctgagactgtgcgacaaaactggatggagttatgccttggagaaacccaacaccggcagcatctttaatatcgcgtggtctatagatggcactcagatcgccggtgcatgcggtaacggccatgtcgtcttcgcacatgtcgtggagcagcattgggagtggaagaatttccaggtgactctgaccaaacggagagcaatgcaagtgcggaatgtactcaacgacgcagtcgatctgttagaatttagagatagggttataaaggccagtcttaactacgcccatttagtcgtgagtacatcccttcaatgttatgtgttcagcaccaagaattggaacactcccatcatatttgatctgaaggagggaactgtatccctcatcttacaggcagagagacacttcctactggtcgacggctcctccatctacctgtacagctatgagggcagatttatctcctcccctaagttcccagggatgaggacggacatcctgaacgcccagacggtgagcctttctaacgataccattgccattcgcgacaaggcagatgaaaaaatcatcttcctctttgaagccagtaccggaaagcccctgggagacgggaaatttttgtctcacaagaatgaaatcctggaaatagctctggatcagaagggcctcacgaacgaccgaaaaattgccttcatcgacaagaatcgggacctctgtatcacctcagtcaaaaggttcggaaaagaggaacagatcatcaagctcgggaccatggtgcataccctcgcctggaacgatacatgcaacattctatgcggcctccaggacaccaggtttatcgtctggtactacccaaataccgtctacgtggaccgggacatcctgcccaagacattgtacgaaagagacgctagcgagttttccaagaacccacacattgtgtctttcgtcggaaatcaggtgacgatcaggagggcggatggctctctagtccacattagcatcactccctacccggctattctacatgagtacgtatcatcctctaagtgggaggacgccgtgcgtctgtgccggttcgttaaagagcaaacgatgtgggcctgcctggctgcaatggccgtggctaatcgggatatgacaactgcggagattgcttacgcggccatcggcgagatagacaaagtacagtatattaactccatcaagaatcttccatcaaaagagtcaaagatggcccatatcctcctgttctctggaaatatacaggaagctgagatcgttttgctccaggcaggactcgtctaccaggcaatacagattaacataaacctgtataactgggagcgggctcttgaattggcagtgaagtacaagacacatgtggatacagtcctggcttacaggcagaaatttctggagaccttcggaaagcaggagacaaacaaaagatatttgcattacgccgagggactccagattgactgggaaaagataaaggccaaaatcgaaatggaaatcacgaaggagagggagcagagctcctccagccagtcgtcaaagagcattggattgaaaccctag

SEQ ID NO: 191947 - DNA, 540 bp, synthetic construct
  misc_feature 1..540: note = Description of Artificial Sequence: Synthetic coding sequence
  source 1..540: mol_type = other DNA
atgcggctgaagatcagcctgctgaaggagcccaagcaccaggagctggtatcatgcgttggatggactaccgcagaagaattatatagttgttccgacgatcaccaaatcgtcaaatggaacctgctgacctctgagaccactcagattgtgaagctgccggacgacatctatcccatagacttccactggtttcccaagtcgctgggagtcaagaagcagacgcaggcagagtctttcgtcctgactagttcagacggcaagttccacctgatatcaaaacttgggagagtggagaaatcagtggaagcacactgcggcgctgttctcgccggccgttggaactacgagggcaccgctctggtcacagtcggtgaagatgggcagataaagatctggagtaagacaggcatgctaaggtctaccctggcacagcaaggcaccccagtctattccgtcgcttgggggcccgattccgagaaggttctctacaccgcgggcaaacagttgatcattaaacctctccaacccaacgcttag

SEQ ID NO: 191948 - DNA, 1227 bp, synthetic construct
  misc_feature 1..1227: note = Description of Artificial Sequence: Synthetic coding sequence
  source 1..1227: mol_type = other DNA
atggccagcgtggccagctgcgacagccggcccagcagcgacgagttgcccggggatccatcatctcaggaggaggacgaggactacgatttcgaggaccgagtgtctgattctggaagttactccagcgcctcctccgattacgacgacctcgagcccgaatggctggattccgtgcagaagaacggtgagctgttctacctggagctcagcgaagatgaggaagagtccctgctgcccgagacaccaaccgtcaaccacgtgcgcttctcagaaaacgagatcatcatcgaagacgattataaggagaggaagaagtacgaacctaagctgaagcaattcaccaagattctgagacgtaaacgccttttgcccaagcgttgtaacaagaagaacagcaatgacaacggacctgtgagcatattaaaacaccagtctaatcagaagacaggtgtgattgttcagcagagatacaaggatgtcaatgtctacgtgaatcccaagaagctaacagtcatcaaggctaaagaacagttgaagctgctggaggtattggtgggcattattcatcagaccaaatggagctggcgccgaacggggaagcagggggatggcgagaggctcgttgtgcacgggttactaccaggtggcagcgccatgaaatctggccaagtgctaataggtgatgtactcgtggcagtgaacgacgttgacgtgacaacagagaatatcgagcgggtcttgagctgcattcccggtcctatgcaagtcaagctgacgtttgaaaacgcatatgacgtcaaacgcgagacctctcacccccggcagaagaagacgcagtccaacacctccgatctggtcaaactgctgtggggcgaggaggtcgagggcatacagcagagtgggctgaatacacctcacattatcatgtacctcaccctccagctcgacagcgagacatcaaaggaggagcaggagatactctaccactatcccatgtcggaggctagccaaaaactgaagtcagtcagaggcatcttcctgacactttgtgacatgcttgaaaacgtgaccggcacacaagtgacatctagcagcctgctactcaatggaaagcagatccatgttgcatattggaaggagagtgacaagctcttgcttatcggcctccccgccgaagagatcgaactgcctagcagcgcacacactcacggcgagcggaactag

SEQ ID NO: 191949 - DNA, 2829 bp, synthetic construct
  misc_feature 1..2829: note = Description of Artificial Sequence: Synthetic coding sequence
  source 1..2829: mol_type = other DNA
atggccagcgtggccagctgcgacagccggcccagcagcgacgagctccctggggatccctcctctcaagaagaagatgaagactatgattttgaggaccgtgtctccgatagtggatcatactcgagcgcatcttccgactatgacgacttagaaccagagtggttggattctgtgcaaaaaaatggcgagctcttctacctggaactctctgaagacgaggaagaatccctgctcccggaaactcccacggtgaatcatgtgcgattttcagagaatgagatcatcattgaggacgactataaggaacggaaaaagtatgagccaaaactcaagcaatttaccaagattttgcgtcggaagaggctactgcccaaacgctgtaacaagaagaatagcaacgacaacgggcccgtatccattctgaaacaccagtctaaccaaaaaacgggagtcattgtccagcagcggtacaaggatgtgaatgtgtacgtaaatccaaagaagctcacagtcataaaagccaaggagcagctcaagctcctggaagtgctggtgggtatcatccatcaaactaaatggtcttggaggcgaactggtaagcagggtgatggcgaacgactagtggttcacgggctcctgccaggcgggtccgctatgaagtcgggccaggtgttgatcggggatgtgctggtggcagtgaatgacgttgacgttacaactgagaatatagagagagtcctctcgtgtattcccggccctatgcaggttaaattgacattcgagaacgcatacgacgtaaaacgagagactagtcacccacgtcagaagaaaacccagagcaacacttcagacctagtgaagctgttgtggggagaagaggtggagggtatccagcaatctggtttaaacactccgcatattatcatgtatctcaccctgcaactggacagtgagacctccaaggaggagcaagaaatcctatatcattaccccatgagtgaggcttctcagaaacttaagtcggtgaggggtattttcctgactctgtgcgacatgctcgagaacgtgaccggcactcaggtgacctcatcctccctgctacttaatggcaagcagatccacgtagcatactggaaggagagcgacaagctgcttctcatcggattaccagcagaggaggtcccacttcctcgcttaagaaacatgatcgaaaacgtgatacaaaccttaaaattcatgtacgggtctctcgacagtgcattttgtcaaattgagaacgtccctagacttgaccacttttttaatttgttttttcaacgcgccctccagcctgctaagttacactcaagcgcaagtcctagcgcgcaacagtacgatgcctcaagcgccgttcttctagataacttgcccggcgttcgttggctgactctccccctagagataaagatggagctggatatggctctgtcagatctcgaggccgccgactttgccgagctgagtgaagactattacgatatgagaaggctctacactattttggggtcgagcctgttctataagggttacctcatttgttctcaccttccaaaagatgatctgatcgatatagcggtgtactgtcggcattattgtctgctgcctctggccgctaaacagagaattggacagctgatcatttggcgggaagtgtttcctcaacaccatctgaggcctctcgcagactcaagtacggaggtgttccctgagcccgaagggaggtacttcctcctcgtcgtcggcctgaaacattatatgctgtgtgtgctgctggaggcaggaggctgtgccagtaaggccatcgggtcccccggtccagattgcgtctacgtagatcaggtgaagaccacactgcatcagctcgatggtgtagatagcagaatagatgaaaggctggctagctctcccgtgccgtgcctgtcatgtgcggactggttcctcaccggctcacgcgaaaagacagactcattgacaacgtcccccattttaagtcggctgcaaggaaccagcaaagttgcgacttcgccaacttgtcgccgaaccttgtttggagattacagcctgaaaacaaggaagccatcaccatcctgttctagcggtggttcagacaatgggtgtgaggggggtgaagacgacggctttagcccacacacaactccagatgcagttagaaagcagcgagaaagccaggggtccgacggcctggaagaatcaggaaccctgcttaaggtaacaaaaaagaaaagcactctccctaaccctttccacctggggaatctcaaaaaggatttgcccgagaaagagctggagatttacaatactgtcaagctgacatccggaccagaaaatactctttttcattacgtggctcttgagaccgtccaggggatttttattacccccacattggaagaggtggcacaactttccggttctatccaccctcagctgattaaaaattttcaccagtgctgcctgtccatccgagctgtgttccagcagactctcgtggaagagaagaaaaaagggctgaactctggtgatcactctgatagcgccaagagcgtgagtagcctgaatcccgtgaaggagcacggcgtccttttcgagtgcagccccggaaactggacagatcagaaaaaagcacctcccgtgatggcttactgggttgtaggcaggctgttcttacaccccaaaccccaagagttgtatgtctgcttccacgattctgtgactgaaatcgcaatcgagatcgcctttaaactgttcttcggactcaccctctag

SEQ ID NO: 191950 - DNA, 2688 bp, synthetic construct
  misc_feature 1..2688: note = Description of Artificial Sequence: Synthetic coding sequence
  source 1..2688: mol_type = other DNA
atgaacaagagcgagaacctgctgttcgccggcagcagcctggcctctcaagtccacgccgctgccgttaacggggacaaaggtgctttgcagagattgatcgttgggaacagcgctctcaaagataaggaggatcagttcggtcgaacccctctgatgtattgtgtgctcgcggacaggttagattgcgccgacgcactgttgaaggcaggtgctgacgtaaacaagacagatcactcacagaggaccgccctgcacctagcagcccagaaaggcaactacaggttcatgaagctgctgctcaccagacgagccaattggatgcaaaaggatctggaagagatgaccccactccatttaaccactcggcatcgatctcctaagtgcctggccctgctcctcaagttcatggcaccaggtgaagtcgatacacaggataagaataaacaaactgccctgcattggtccgcttactacaacaaccctgagcatgtgaagttgctgattaagcatgattccaacatcgggatccccgatgtggaagggaagattccccttcactgggcagccaatcacaaagatccctctgcggtgcatacggttaggtgtatcttggacgcagccccgactgaatcgttgctgaactggcaggattatgagggcagaacccccctccactttgcggtcgccgacggaaatgtaacggtggtcgacgtcctgacttcttatgaaagctgcaacattaccagctatgacaacctgtttagaacgcctcttcactgggcggctctactaggacacgcccagatcgtgcacctgcttctcgagaggaacaagagcggcacaataccgtccgattctcaaggagctaccccactgcactatgcagcccagagtaactttgctgagacagtaaaggtctttcttaagcatccgtctgtgaaagatgattccgatctggagggacgtacctcttttatgtgggcagccggcaaggggtcagatgacgtattgaggaccatgctaagcctgaaaagcgatatagatataaacatggccgataagtacggcgggacagctcttcacgctgctgccctttctggccatgtcagtactgttaaactgctccttgaaaataatgctcaggtcgacgccaccgacgtcatgaaacataccccactgttccgggcctgcgaaatgggccacaaagatgtgatacagaccctgattaagggcggagcgcgtgtcgatctcgtggaccaagacggacattccctgctgcattgggctgctctaggcgggaacgctgacgtgtgtcagatactgattgaaaacaagatcaacccaaacgtgcaagactatgccggaaggactccacttcagtgtgcagcatatgggggttacatcaactgtatggctgtcctaatggagaacaacgccgacccaaacattcaggataaagagggccgcaccgcccttcactggagttgtaacaacgggtatctggatgcaattaaactgctgttagatttcgcggccttcccaaatcagatggaaaacaacgaagagaggtacacaccactagactatgcactgctgggtgagagacatgaggtcatccagttcatgctggaacacggggcgctgtctattgctgcaatacaagatattgccgcctttaaaatacaggccgtgtacaagggctacaaagtgagaaaggctttccgtgacagaaagaaccttctcatgaaacatgagcagctgagaaaggacgcagcggccaagaagagagaggaggaaaacaagcggaaggaagcggaacaacagaaaggccgccgatcccccgatagttgccggccacaggccctgccgtgcttaccctccacccaagacgtgccttcgcgtcagtcaagagcaccaagcaagcaaccccccgccgggaacgtggcccagggacctgaacccagggacagccggggctcgcccggaggttctcttgggggggccctgcagaaggagcagcatgtaagctctgaccttcaaggtaccaattcgcggcgaccaaacgagactgctcgagagcactcgaaaggacagtctgcgtgtgtgcatttccggccaaacgagggtagcgacggctcccggcatccgggcgtgccaagcgtagagaagtcccgcgagttaagactacagataatccagcgcgaaaggaggcgtaaggaactcttccggaagaagaacaaagccgccgctgttatccagagagcttggcggagctatcagcttcggaagcacctgtcccatctgagacacatgaagcaactgggtgctggggacgttgaccgctggcgccaggagtcaaccgctcttttactgcaggtgtggcggaaggagctggagctgaaattcccccagaccactgccgtgagcaaagcacctaaaagccctagcaagggtaccagcggaacaaagtctacgaaacactccgtgttgaaacagatatatggttgtagtcacgaggggaaaatccatcatcccacccggtctgtgaaagctagctccgtgctcagactcaacagcgtctccaatctccagtgcattcatctcctggagaattccggtagaagtaagaacttctcgtacaatttacagtccgccactcagcctaaaaacaagacaaagccttag

SEQ ID NO: 191951 - DNA, 3198 bp, synthetic construct
  misc_feature 1..3198: note = Description of Artificial Sequence: Synthetic coding sequence
  source 1..3198: mol_type = other DNA
atgaacaagagcgagaacctgctgttcgccggcagcagcctggcctcccaggttcatgccgcggctgtgaatggtgataagggtgcactccagcgactaatagtgggcaactcagccctgaaggacaaggaggaccagttcgggcggacaccccttatgtactgtgtactcgccgatcgtcttgattgtgcagacgcccttttgaaggccggtgctgatgtcaacaaaactgatcatagccagaggaccgcactgcatcttgccgcccagaagggaaactacaggttcatgaagcttctgctcaccaggcgggccaactggatgcaaaaggacctggaagagatgacgcccttacacctgactacacgccatcgcagtcctaaatgcctggccctcctgcttaagtttatggccccgggcgaagttgatacacaggacaagaataaacagactgccctgcactggagtgcctactacaataacccagagcacgtaaaattgctgatcaagcacgacagcaacataggtataccagacgttgaaggcaagatccctcttcattgggccgctaatcacaaggatccttcagccgtgcatactgtgcggtgcattctggatgccgccccaaccgaaagccttttgaactggcaagactatgagggacggacccccctccattttgctgtcgccgacgggaatgtcactgtcgtagatgtgcttacatcatatgagtcatgtaacattacttcatacgacaacctgtttaggacaccccttcactgggctgcccttctgggccatgctcagattgttcacctgctattggaacggaacaagtctggcactatccccagcgacagccagggagccacccccctgcactatgccgcccagtcgaattttgccgagaccgttaaagtgttcctcaaacacccctcggtcaaggacgactcagatctggaaggacgaacgtcatttatgtgggctgcagggaaaggcagcgacgatgtgcttcgtacaatgctgtctctgaaaagcgatatagatattaacatggccgataagtacggcgggaccgcactgcacgccgccgcactgtcaggccacgtgtccacagttaagctgctccttgagaacaacgcccaggtggacgccacagacgtaatgaagcatacacccctctttcgtgcatgtgagatgggccacaaggacgtgatccagaccctgattaagggaggagcccgcgtagatcttgtggaccaggacggtcattcacttttgcactgggctgcactcggaggcaacgccgatgtctgtcagattctcattgagaataaaatcaacccaaacgtacaagactacgccgggagaacccccttacagtgcgcagcctatggagggtacattaattgtatggcagtcctaatggaaaataatgctgacccaaacatccaggacaaagagggcaggacggcactgcactggtcatgcaacaacggctacctagatgctataaagctcctcctggatttcgccgcatttccaaaccaaatggaaaataatgaggagcgctacacaccactggattacgctttgctgggagagcgccatgaagttatccagttcatgctggagcacggcgcactgtcaatcgcagctattcaagatatcgctgctttcaaaatccaagcagtgtataaggggtacaaagtccgcaaagctttcagagaccgcaagaatctgttaatgaagcatgaacaactgcggaaggatgctgcagccaagaagcgggaggaggagaataagcgaaaagaagccgagcagcagaaagggagacgtagccctgattcctgtcgcccacaagcactaccatgtctgccaagcacacaagacgtgccaagcaggcagtccagggctccttccaagcagcctccggccggcaatgtggctcagggtcccgagcctcgcgactcccgaggctcccctgggggatctctcggtggcgcgctgcaaaaggagcagcacgtctcatcggaccttcaggggaccaattctcggaggccgaacgagacggcaagggaacatagcaaaggacagtcagcctgtgtgcatttcaggcccaacgagggatctgatggctctaggcacccgggggtaccgtctgttgaaaagtcccgcggcgagaccgctggcgacgaaaggtgcgccaagggcaaggggttcgttaagcagccaagttgcatccgagtcgccggccctgacgagaaaggcgaagattcccgccgggccgctgcatctttacccccccatgactcccattggaaaccttcaagaaggcacgatacggaacccaaggccaaatgcgcaccacagaaaagaagaacacaggaacttcgcgggggcagatgttcgccagcagggagttcacgtcctggctctgctcgcggtgaggccgtgcacgccggccagaaccctccccatcaccggacacctcgaaataaagttacacaggcaaagctcacagggggactttacagccacctaccacagtctaccgaggaattaagatccggtgctaggagattggaaacctcaactctgagcgaggatttccaggtgtctaaggagacggatcccgctcccgggcccctctccgggcagtctgtgaacattgaccttctcccagtggagctacgcctccagataattcagcgagagcgaaggcgcaaggagctgttcaggaaaaagaataaagccgctgctgtaatccagagggcctggcgctcctaccagctgagaaagcatttgagtcacctccgccatatgaaacagctgggagcaggtgacgttgaccgctggcggcaagagtcgacggccttacttctccaggtatggcggaaagagctggaactcaaattccctcagactaccgcggtttcaaaagcgccgaagtctccatccaaaggaacttccggcacaaagtcaacaaaacattcggtcctgaagcagatatatggatgtagtcatgaaggtaagattcatcaccccactcgctcagtaaaggcctcttctgtgctccggctgaatagtgtttccaaccttcagtgtatccacttgttagagaattcaggcagaagtaaaaatttcagttacaatttgcaaagtgccacacagcccaagaataagacaaaaccctag

SEQ ID NO: 191952 - DNA, 306 bp, synthetic construct
  misc_feature 1..306: note = Description of Artificial Sequence: Synthetic coding sequence
  source 1..306: mol_type = other DNA
atgaacaagagcgagaacctgctgttcgccggcagcagcctggccagtcaagtgcacgccgcggcggttaatggagacaagggcgccctccagagactgatcgtaggaaacagtgccctgaaagataaggaagaccagttcggaaggaccccgctgatgtattgtgtgctcgccgatcggttggattgtgccgacgcccttctgaaggccggagccgacgttaacaagacagaccatagtcaacgcactgctctgcatcttgcagcccagaaggctctgcggactatctccaccggtcggatttag

SEQ ID NO: 191953 - DNA, 2967 bp, synthetic construct
  misc_feature 1..2967: note = Description of Artificial Sequence: Synthetic coding sequence
  source 1..2967: mol_type = other DNA
atgaagctgctgctgacccggcgggccaactggatgcagaaggacctagaagagatgacgccactgcacttgacaacccgtcatagatcacctaaatgtctcgcgctgctactcaaattcatggctcccggggaagtcgacacacaggacaagaataaacagactgcactgcactggagtgcctactacaacaatccagaacatgtcaagctcctcattaagcacgatagcaacataggaattccagatgttgagggaaagatcccgctccattgggcagccaatcacaaggatcccagtgccgtgcataccgtacggtgcattctcgacgccgcccctacagagtcactcttgaattggcaggactatgaagggcgcacaccgcttcacttcgcggtggctgatggcaatgtgacagtggtggacgtgttaactagttatgaaagctgcaacatcacgagttacgataatctctttcgaactccactccactgggcggctctcctcgggcatgcacagattgtgcacctgcttttagaaaggaacaaaagtggtacaattccttctgacagtcagggggctactccactgcattacgctgctcagagcaatttcgcagagaccgtgaaggtgttcctgaaacacccatccgtaaaagatgacagcgatcttgaaggtcgtaccagctttatgtgggccgccgggaagggaagtgacgatgtactgaggaccatgcttagcctcaaatcggacatcgacatcaacatggctgacaaatacggtggcacagctctacacgctgccgccctctccgggcacgtgagcacagtcaagctgcttttggagaacaatgctcaggttgacgccacggatgtgatgaagcacaccccactgtttagagcatgcgagatggggcataaggacgtgatccaaacacttataaagggcggtgcccgggtcgacttagttgatcaggacggccattcgcttctgcattgggcggccttgggtggtaatgctgatgtctgtcaaatcctaatcgagaacaagatcaaccctaatgtgcaggactacgcggggaggacccccctccagtgtgccgcttacggtggctatatcaactgtatggcggtgttgatggaaaacaacgccgatccaaatatccaggataaagaaggcagaaccgctttgcattggtcttgtaacaacggctacctggatgccattaaacttctcctggacttcgcagccttccccaaccagatggaaaacaacgaggagaggtatactccactcgattacgcgcttctcggggagcggcacgaggtgatccagttcatgttagaacatggagcactcagcatcgcggccattcaggacatcgctgcatttaagatccaggcggtttacaagggctacaaagtccgcaaggcattccgggacagaaaaaacctactcatgaagcacgagcagctgcgcaaagacgctgctgccaaaaagagggaggaagagaacaaacgcaaggaggccgaacagcagaagggcaggcgctcgcccgacagctgccgcccccaggccctgccttgtctgccatctactcaggatgtgccaagccgccaatctagagccccttcaaaacagccccctgcagggaacgttgcgcagggccctgagcccagagacagccggggttctccggggggaagccttgggggggcgctgcaaaaggaacagcatgtctcaagcgatctgcagggcaccaacagtcgacgccctaacgagaccgctcgagaacacagcaagggccagtccgcctgcgtccactttcggcccaatgagggaagtgatggaagccggcaccccggtgtgccctcagtcgagaagagcagaggtgaaacagctggagacgaacggtgcgctaagggaaagggcttcgtaaaacagccctcctgcattcgagtagcagggcccgatgaaaaaggggaggattcaaggcgtgccgctgccagtctgcccccacatgattcacactggaagcctagcaggagacatgacaccgaaccaaaagctaagtgtgcaccccagaaacgcaggacgcaggagcttcgcggtggtcggtgcagcccagcgggcagctccagacccggcagcgctagaggcgaagcggtgcatgcaggccagaatccaccccaccatagaacaccccggaacaaagtaactcaagcaaaattgaccgggggcctctatagccacctgccccagtctacagaggaacttcgtagtggagctaggcgccttgagacctctacactttcagaagattttcaagtcagcaaggaaaccgacccagccccgggcccgctcagcggacagtctgttaacatagaccttcttcctgttgagcttcgcctccagattatacagagggagagaagacggaaagaacttttcaggaagaagaacaaggccgcagctgtgatccagcgtgcctggaggagctatcagctgcgaaagcatttgtcacacttgcgacacatgaaacagctcggtgcaggcgacgtggataggtggcgacaagagagcacggcccttttgcttcaagtgtggcgcaaggaactagagttaaagttcccccaaaccacggctgtttctaaagcaccaaagtcgccatccaaaggaacaagtgggacaaaatccactaaacacagtgtcctgaagcaaatttatggatgcagccatgaggggaaaatccatcatcctaccaggagcgttaaggcttcgtcagtccttcgccttaattcagggaaggcagccaccgcaaagcagatggtgggtaaaaacatggggaaacatttcccactgtttcatccccagagacagaagaccctcgagcagatctggccaggattttccaacggccacctcatctcgtgggattactattgttctcaacatctttcgccctag

SEQ ID NO: 191954 - DNA, 3723 bp, synthetic construct
  misc_feature 1..3723: note = Description of Artificial Sequence: Synthetic coding sequence
  source 1..3723: mol_type = other DNA
atgagcgtgaaggagggcgcccagcggaagtgggccgccctgaaggagaaacttggtcctcaggattctgatccgacagaggcaaacctggaatctgcagatcctgagctgtgtatcagactactccaaatgccctcagtcgtgaactactcaggccttcggaagaggttggaggggagtgatggaggatggatggttcagttcctggagcaatccggcttagacctgctgctcgaggccttggcgcgtctctcgggtagaggtgtggcgagaattagcgacgcactgctacaactgacatgtgtttcctgcgtccgggcagtgatgaacagtagacagggcattgagtacattcttagtaatcaaggatacgttaggcagctgtcccaggctcttgataccagcaacgttatggttaagaaacaagtgttcgaattactggccgctttatgtatttacagcccagaaggccatgtgctgaccctggacgcccttgatcattataaaactgtttgttcccagcagtacaggttttcgattgtgatgaacgagctttcagggtctgacaacgttccctatgtggtgacactactgtccgtgattaacgccgtcatcctgggccccgaagacctaagggcaagaacacagctgagaaacgagttcattggcctacagctgttggatgtgctggccaggcttcgcgatctggaggacgctgatctgctgattcagctggaggcctttgaggaagcgaaagcagaagacgaagaggaattgctacgggtgtctggtggtgtggatatgagttctcaccaagaagtctttgcttctctgttccataaagtatcatgtagccctgttagcgctcaattgttgtctgtgctgcagggtctgctgcacctcgagccaactctccggagctcccagctcctctgggaggcactggagtccctggttaatagggcggtcctgcttgctagcgacgcccaggagtgtactttggaggaggtcgtggaacgactcctctcagtgaaggggaggccgcgcccctccccactggtgaaggcacataagtccgtccaggccaatttggaccagagccagaggggtagttcccctcagaataccactacaccgaagccaagcgtagaggggcagcagcctgcggcagctgcagcgtgtgagcccgtcgatcacgctcagtctgagagcatcctaaaagtatcacagccccgagccttagagcagcaggctagtacccctccacccccaccgccgccccccctcttgcccggatcttccgcggaaccaccgcccccacctccaccacccccactcccctcagtgggggccaaagcactgcctacagccccgccccccccccctctgccgggactgggtgccatggcccccccagctcccccactgcctccacctcttccagggagctgcgaattccttcctccaccacccccgccactgccaggtctgggatgcccccctcctcctccacctctgcttcccgggatgggatggggcccccccccccccccacccccactcctgccatgtacttgtagccctcctgtggcaggtggcatggaggaagttatcgtggcgcaggtggaccacggcctaggaagcgcttgggtgccatctcatagaagggtcaatccaccaacactgaggatgaaaaagttgaactggcagaagctcccgagcaacgttgcacgagaacataatagtatgtgggcctccctatcatctcccgacgcagaggccgttgagccagacttctcctcaatcgagcgtctgttctctttccccgctgccaaaccaaaggaacctacgatggttgcaccacgggcccgaaaggagcccaaggagatcacttttctggatgccaaaaagtccctcaacctcaatattttcttgaaacaattcaagtgttcaaacgaagaagtggccgctatgatccgtgccggcgatacaaccaagtttgatgttgaggtcttgaaacagctgttgaaattactgcccgagaaacatgagattgagaatcttagggccttcaccgaagaacgcgctaagctggccagcgcagatcatttctatttacttctgctggctatcccctgctaccagctgcgcattgagtgtatgcttctctgcgagggggcagccgcggttctcgacatggtacggcctaaagcacagcttgtgcttgcagcctgcgagagcttattgactagccgtcaactgccaattttctgtcagcttatcctaaggatagggaactttctgaactatggttcacacacaggcgatgccgacgggtttaagatctctactctgcttaaactgacagagaccaaaagccagcagaaccgcgtaaccttgctgcaccacgtgctcgaggaagccgaaaagtcacatccagatttactgcagctcccaagggacctggaacagccctctcaagccgcaggcatcaacttggaaattatccgctctgaggcaagtagtaacctgaagaaactccttgaaaccgaacgaaaagtcagcgcctctgttgctgaagtgcaggagcagtacaccgagcgtttgcaagcaagcattagtgccttccgggcactggacgaactgttcgaggctatcgaacaaaaacaacgcgaactcgctgattacctctgcgaagacgcccagcagctgtcactagaggacactttttcaaccatgaaggcatttcgggacctttttttgcgagcactcaaggaaaataaagataggaaggaacaggcagcgaaagctgaacgaaggaagcagcagctcgcagaggaagaagctaggcggccacgcggcgaggacggcaagcccgtgaggaaaggtcctggcaagcaggaagaggtatgcgtaatcgatgccttgcttgccgatatcaggaagggcttccaactccgcaagaccgcccggggacgtggcgataccgacggagggtccaaagctgcatctatggatccccctcgggctacggagcccgtggcaacctccaatcctgctggcgacccagttggctccacaaggtgccctgctagtgagcccggcttggatgcaacaactgcaagtgagagccgggggtgggacctggttgatgccgttactccagggccccaacctactcttgagcaactggaggaagggggcccacgacccctggagcgaaggagttcctggtatgtggatgcatccgatgtcctcaccaccgaagacccacagtgcccccaacctctggagggggcctggccagttaccctgggggatgcacaggcacttaagccactgaagttttcttcgaaccagcccccagccgccggatcatccagacaggacgctaaggatcctacaagcctgctgggcgtacttcaggccgaggccgattccacttccgaaggtcttgaagatgcagttcacagccgcggagctcgccccccagctgccggccccggaggagacgaggatgaggatgaggaagatactgccccagagtctgctctggataccagccttgataaaagcttcagcgaagacgctgtcactgactcctccggttctggtacactccctcgcgcccgcggaagagcatctaagggcactggcaagagaaggaagaagcggccatcgagatctcaggagggtttaagaccccgccctaaggctaaatag

SEQ ID NO: 191955 - DNA, 3750 bp, synthetic construct
  misc_feature 1..3750: note = Description of Artificial Sequence: Synthetic coding sequence
  source 1..3750: mol_type = other DNA
atgagcgtgaaggagggcgcccagcggaagtgggccgccctgaaggaaaaactgggcccccaagacagcgatccaactgaggctaacctcgaatccgcagaccctgagctgtgtattcgcttgctgcagatgccctcagttgtaaactactccggcctgcggaagagactggaaggatccgacggaggctggatggtgcagttcttggagcagtccggcctcgacctcttgctcgaagcacttgcacggttgtccggccgtggtgttgcccgaatatctgatgctctgttacagctgacctgcgtgtcctgtgtcagggcagtcatgaattctcgacagggtattgaatatattttgagtaaccagggctacgtgcgtcagctcagtcaagccctcgatacctccaatgtcatggtcaagaaacaagtgttcgaattactggccgctttatgtatttacagtcctgagggtcatgtgcttacactggatgctttggaccattataaaaccgtttgctcacagcagtaccgattctccatcgtcatgaacgagctgagtgggtccgataacgtgccctacgtggtcacacttctctctgtcattaacgctgtcatcctgggaccagaggacctccgcgccagaacgcaactacgtaacgaattcattggtctccagctcctagacgtattggcgcgcttgagggacctggaggacgcggatctcctcatccagctcgaggcttttgaggaggccaaggcagaagacgaagaggagcttcttcgagtgtcaggcggagtggatatgtcaagccatcaagaggtgtttgcatccctgttccacaaggtatcctgtagtcccgtctccgcacagttgctcagtgtgctgcaggggctactgcacctggagcccactttgcggtcttcccagttgctatgggaagccttagaatctcttgttaacagagcagtcttattagccagcgacgcccaagagtgtacgttggaggaggtggtcgaaaggctgctttccgtgaagggccgccccagaccatctcccctcgtgaaggctcataagtctgtgcaggctaacctggaccaatcccagcggggatctagcccacagaacacgacaacgccaaagccatcagtggagggccagcagccagccgctgctgctgcatgtgagccagtcgaccacgcccaatccgagtctatcctcaaagtgtcccagcctcgtgctctggagcagcaggctagcacgcccccacctcctcccccgccaccattactcccaggaagctccgcggagcctccaccacccccacctccccccccactgccttcggttggagcgaaggccctgcctactgcccctcccccacccccacttccgggactcggtgcaatggctccaccggcaccgccactgcctcctcctcttccaggctcctgcgaattcctgcctccccctcccccgcccttgcccggactgggctgcccaccacccccccctcccctgcttcctggtatggggtgggggccaccccccccacccccaccattactgccctgtacctgttcccctcccgtcgccggcgggatggaagaagttatcgtggcccaggtggatcacggcctaggctccgcatgggtgccttcacaccggcgcgtcaatccacccactttgaggatgaagaagctcaattggcaaaaactgccgtctaacgtcgcccgagagcacaattcaatgtgggcatcattatccagtcccgatgcggaggcggtggaaccggactttagtagtattgagcggcttttctcgttccccgctgctaagcccaaggagcctactatggtcgctccgagggcaaggaaagagcccaaagagatcactttcctggacgccaagaaatccctgaacctaaacatctttttgaaacagttcaagtgttctaatgaagaggtagccgcaatgatacgcgctggcgacacgacgaagttcgatgtggaggtgttgaagcaactcctgaagctgcttcccgaaaagcatgaaattgaaaacctgcgtgctttcaccgaagagagggcgaagctcgcatccgctgatcacttctatttgctcctgttagctatcccatgctatcagctgagaatagagtgcatgctgctctgtgaaggcgctgctgccgtgcttgacatggtgcggcccaaagcccagcttgtcttggctgcttgcgagtcattactgacctcccgtcagttgcccattttctgccaactgattctcagaatcggaaatttcctaaattacggcagtcacacaggggatgctgatggtttcaagatctctactttgctcaaactcactgaaaccaagtcgcagcagaacagagttacactactacatcacgtgctggaggaggcggaaaagagccatccagacctactccagctccctcgggaccttgaacagccgagccaggctgctggcattaatctggaaataatcaggtccgaagccagttccaacctaaaaaagctgctggaaactgagagaaaggtttccgccagcgttgccgaagttcaagaacagtacacagagagattgcaggcatctatctcagctttccgcgcattggacgaactcttcgaggccattgagcagaaacagcgagagcttgctgattacctgtgtgaggacgcccagcagctgagtctagaagacactttctcgacaatgaaggctttccgggatctgtttctccgggcccttaaagaaaacaaggataggaaggagcaggccgccaaggccgagcgtaggaaacagcagttggcagaggaggaggccagaaggccgaggggcgaagacggaaaaccagtgcggaaggggcctggaaagcaagaggaggtatgtgtaatcgacgcccttcttgccgatattcgcaaggggtttcaactacggaagaccgcacgtggtaggggggacaccgacggcggctccaaggccgcatcaatggacccccccagagccaccgaaccagttgctactagcaatcccgctggagatccagttggatctaccagatgccccgcaagcgagccagggctggacgcaaccaccgcctctgaatcacgaggctgggaccttgtcgacgcggtcacccccgggccacaacctactcttgagcagttggaagagggggggcccagacccctcgaacgaagatcaagttggtatgtggatgcctctgacgtgctcacaacagaggatccccagtgtccgcagcctctagaaggagcatggccagtgacactaggcgatgctcaggcccttaagcctctgaagttttcatctaatcagccacctgctgccggttcttcaagacaggacgctaaagacccgacctctctattgggagtacttcaagccgaagccgactctaccagtgagggtttggaagatgcggtgcactcacggggggcgaggcctccggctgctggacctgggggggatgaggacgaggatgaggaagataccgccccggagagcgctctggacacttctctggacaagagtttcagcgaggacgccgtgaccgactcctctggatcagggactctcccccgagcaagaggaagagcgagcaaggggacgggtaagcggcggaagaagcgccccagccgctctcaagaggaagtccccccagattccgacgacaataagaccaaaaaactttgcgtcatacagtag

SEQ ID NO: 191956 - DNA, 705 bp, synthetic construct
  misc_feature 1..705: note = Description of Artificial Sequence: Synthetic coding sequence
  source 1..705: mol_type = other DNA
atgagcgtgaaggagggcgcccagcggaagtgggccgccctgaaggagaagctggggccgcaagacagtgaccctacggaagccaatctggagtctgcggacccggaattgtgcatacgccttctccaaatgccctctgttgtgaattactctgggttacgcaaacggttagaaggatctgatgggggctggatggtgcaattcttggaacaatcgggactcgatctgctgcttgaagcacttgctcgtctatccggccgtggcgttgcacggattagtgatgcgcttctccagctgacctgtgtgtcttgtgtgcgagcagtgatgaatagtagacagggcatcgaatacatcctgtctaatcagggctacgttcgtcaactgagccaggccctggatacatctaacgttatggtgaaaaagcaggtctttgaactattggcagctttgtgtatctattcccccgaggggcacgttctgactctggatgcactcgaccactataagacagtgtgctcccagcagtatcgctttagtatcgtaatgaacgagcttagcgggtctgacaatgtgccttacgtcgtgactctactgtccgtgatcaacgccgtgattttgggtcctgaggaccttcgcgccagaactcagctccgcaatgagttcatcggcctgcagctgctggatgttttagcccgattgcggtag

SEQ ID NO: 191957 - DNA, 1758 bp, synthetic construct
  misc_feature 1..1758: note = Description of Artificial Sequence: Synthetic coding sequence
  source 1..1758: mol_type = other DNA
atgagccagcagcacaccctgcccgtgaccctgagccccgccctgagccaagagctgctgaaaaccgtgcctccccccgtgaacacacatcaggagcagatgaagcaaccaactcctctgcctccaccatgtcagaaagtgcctgtcgagctccccgtggaagtgccaagcaagcaggaagagaaacatatgactgccgtgaagggccttccagaacaagaatgtgaacagcaacagaaggaaccacaagaacaggagctacagcagcagcactgggagcaacacgaggagtaccagaaggccgagaaccccgaacagcagctcaagcaggaaaagactcagcgtgaccagcagctcaacaaacagcttgaggaggaaaaaaaactgcttgatcaacagctagaccaggagctggtcaaaagagacgagcaactggggatgaagaaagaacagctgctggagctgcctgaacaacaagaggggcatctgaaacatttagagcagcaagaaggacagctgaaacatcctgagcagcaggaaggacagcttgagcttcccgagcagcaggaaggtcagctggagttacctgaacagcaagagggacaactggaattgcctgaacaacaggaaggccagcttgagcttcctgagcagcaagagggccagctggagctccctgaacagcaggaaggccagctggagttgcctcagcagcaagagggccaactggaactgagcgagcagcaggagggccagctcgaactttccgagcaacaggagggccagttaaagcacctagagcatcaggaggggcagttggaagttcccgaagaacaaatgggccagttgaagtaccttgaacaacaggaggggcagctcaagcacctagaccaacaggaaaagcagcctgagctgccagagcagcagatgggccaattgaaacacctggaacagcaggaggggcagcccaagcaccttgagcagcaagagggacagttggagcagttagaggagcaggaaggacagctcaaacacttagagcagcaggaagggcaacttgagcacctggaacaccaggagggccagctgggcttaccggagcaacaggtactgcaattaaagcagctggaaaaacaacaggggcaaccaaaacacttggaagaggaggaaggacagctgaaacatttggtgcagcaggaaggccagctcaagcacttagtgcagcaggaggggcaactggagcagcaggagcgtcaagttgagcatctggagcagcaggtgggccagctcaaacatctggaggagcaggaaggccaactgaagcatctcgaacagcaacagggacagctcgaggtgcccgagcagcaagtgggtcagcctaagaacctggaacaggaagagaagcagctggaattaccagagcagcaggaagggcaggtgaagcatctggaaaaacaggaagctcagttggaactccctgaacagcaggtagggcagcctaaacacctagagcagcaggagaagcatcttgaacaccccgaacagcaagacggacaacttaagcaccttgagcagcaggaggggcagctgaaggatctggaacagcagaagggccaattggagcaacccgtcttcgcaccagcccctggccaggttcaagacatccagcccgcgctccctaccaagggagaagtactgctgccggtcgagcatcaacagcaaaaacaagaggtccagtggccaccaaagcacaagtag

SEQ ID NO: 191958 - DNA, 1320 bp, synthetic construct
  misc_feature 1..1320: note = Description of Artificial Sequence: Synthetic coding sequence
  source 1..1320: mol_type = other DNA
atgaagaaggagcagctgctggagctgcccgagcagcaggagggccatctgaaacatctggagcagcaggaaggacagttaaaacacccagagcaacaggaagggcagctggaactgcctgaacagcaagaaggtcaactggagttgccagagcagcaggaaggacagttagagctgcctgagcagcaggagggccaactggaactgccagaacagcaagagggccaactggagctgcccgaacagcaggaaggccaactggagttaccccagcaacaggaaggccagttggaactgtccgagcaacaggaggggcaacttgagttgtccgaacagcaggagggccagctgaagcacctggaacaccaggaaggccagctagaggtcccggaggaacagatggggcagctcaagtacctagaacagcaggaaggtcagctgaagcatctggatcagcaggagaaacagccagaactacctgagcagcaaatgggccagttgaagcatctggagcaacaggagggacagcccaaacacctggagcaacaagaagggcaactggagcagctggaggaacaggagggccaacttaagcacctggaacaacaggagggtcagctcgagcacttagaacaccaggaaggtcagctgggcctgccggagcaacaagtcctgcaactgaagcagcttgaaaagcaacagggccaaccaaaacacctagaagaagaagagggccagctgaagcatctagtgcagcaggaaggtcagctgaagcatctggtgcagcaggagggccagctggagcagcaggagaggcaggtggaacatctggaacaacaagtgggtcagctgaaacacctcgaagaacaggaagggcaactgaaacacctcgagcagcagcaggggcagcttgaggtacccgaacagcaagtggggcagcctaaaaacctggagcaggaggagaaacaacttgagctgcctgagcagcaggagggtcaggtgaagcacctcgaaaaacaggaggctcagctggagctgcctgagcagcaggtgggccagcccaagcatctggaacagcaggagaaacacctggaacacccggaacagcaagatgggcagttaaagcacctagagcagcaggagggtcagctgaaggacctagagcagcaaaagggacagctcgaacagcccgtgttcgcaccagccccaggccaagtgcaggatattcaacccgccttacccaccaagggggaggtgctactgccggtagagcaccagcagcagaaacaagaagtccagtggcccccaaagcataaatag

SEQ ID NO: 191959 - DNA, 1914 bp, synthetic construct
  misc_feature 1..1914: note = Description of Artificial Sequence: Synthetic coding sequence
  source 1..1914: mol_type = other DNA
atgggcctgctgagccagggcagccccctgagctgggaggagaccaagaggcacgcagaccatgtgaggcggcacggtatattgcagttcctgcacatctatcatgctgtcaaagatagacataaggacgtgctgaaatggggcgatgaagttgaatatatgctagtgtctttcgaccacgaaaataaaaaggtgcgactagtcctgagcggcgaaaaagtgctggagacactccaagaaaagggcgagaggaccaatcctaaccaccccaccctgtggcgtcccgagtatgggtcctatatgattgagggaacaccggggcagccctacggggggacaatgtctgagttcaacacggtggaggctaatatgcggaaacggcgcaaggaggctacctctattctggaggagaaccaggccctgtgcacaattacatcttttcctagactgggctgccctggattcactctgccggaagtgaaaccaaacccagtggagggcggagccagcaagtctctgttctttccggacgaggccatcaataaacaccctagattctctactttgacacgcaacataaggcataggcggggcgagaaagtcgtgataaacgtgcctatcttcaaggacaaaaacacaccctctccattcatcgagacattcacagaagatgacgaggctagtagggctagtaaaccagatcacatctacatggacgctatgggattcggcatgggaaactgctgcttgcaggttacctttcaagcttgtagcatcagtgaagccagatatttgtacgaccagcttgccaccatctgccccattgttatggctctgagcgccgcatctccattctataggggctatgtgagcgatatcgactgccgttggggagtgatcagtgcttccgtcgatgatagaactagggaggaaaggggtctggagcctctgaagaacaataactaccgcatcagcaaatcgcggtacgactccattgactcctacttatcaaagtgcggagagaaatacaatgatatcgacttgacaatcgacaaggagatatatgaacagctgctgcaggagggcatagatcacctgctggcccagcacgtggcccatctttttataagagaccccctgactttatttgaggagaagattcatttggacgatgccaatgaaagcgatcactttgaaaacatccagtccacaaattggcaaacgatgaggtttaagcctccaccccccaacagcgacatcggatggcgcgtagagtttaggcctatggaggttcagctgacagatttcgagaattcagcttacgtcgtgttcgttgtgctcctcacgcgtgtaattctgtcttacaagctggactttcttattccgctgagcaaggtggacgaaaacatgaaagtggcccaaaagcgagatgccgtgctacaaggtatgttctactttagaaaggatatttgcaagggcggcaatgctgtggttgacggctgcggtaaggcgcagaactctaccgagttggcagcagaagagtacaccctgatgtcaattgacacgattattaatggaaaagaaggggtgtttcctggcctgatcccaatcctgaattcataccttgaaaacatggaagtagatgtcgacacacggtgtagcatcttgaactacctgaaactcataaaaaaacgcgcttccggcgaacttatgactgtggcaaggtggatgcgggagtttatcgctaaccatcccgactacaagcaggactccgtgattacagatgagatgaattattcactgatcttgaaatgtaaccagattgctaacgagctgtgtgaatgtccggaattgcttgggagcgccttcaggaaggtgaaatatagcggatcaaagacggactcctcgaactag

SEQ ID NO: 191960 - DNA, 870 bp, synthetic construct
  misc_feature 1..870: note = Description of Artificial Sequence: Synthetic coding sequence
  source 1..870: mol_type = other DNA
atgtacttcctgacccccatcctggtggccatcctgtgcatcctggtggtgtggatcttcaaaaatgccgaccgaagcatggagaagaagaagggagaaccacggacacgagcggaagcgcggccttgggttgatgaggatctcaaggatagttcggacctgcaccaagctgaggaggatgctgacgagtggcaggaaagtgaagagaatgtggagcacattccatttagtcataatcactacccagagaaggagatggttaagaggtctcaagaattttacgagcttttaaacaagcggagatccgtccgatttatctccaatgagcaggttccaatggaagtgattgacaacgtcattcgcacagccggcaccgcaccctcaggggcccatactgagccgtggacatttgtcgtggtgaaagaccctgacgtcaaacacaaaattcgcaaaattatagaagaggaggaagaaataaactatatgaaaaggatgggccaccggtgggtgactgatctgaagaaacttcgcaccaattggatcaaggagtacctggatacagcaccaatccttatcctgatattcaagcaggtccacggcttcgcggcgaatggtaagaaaaaggtgcactattataatgaaatttcagtcagcattgcctgcggcattctactggccgcactgcagaatgccggactggtgaccgttactaccaccccccttaattgcgggcccaggttgcgggtgttactgggcagacctgcccatgaaaagctgttgatgttactgccagtggggtatccctccaaagaagcaaccgtccctgatcttaaaagaaaaccactcgaccagatcatggtgactgtctag

SEQ ID NO: 191961 - DNA, 813 bp, synthetic construct
  misc_feature 1..813: note = Description of Artificial Sequence: Synthetic coding sequence
  source 1..813: mol_type = other DNA
atgtacttcctgacccccatcctggtggccatcctgtgcatcctggtggtctggatcttcaagaatgccgatagaagtatggagaaaaagaagggcgaaccaaggactagagcagaagcccgcccttgggtcgacgaggatttgaaggacagctcagacctccaccaggcagaggaggacgccgacgagtggcaggagtcagaggagaatgttgagcatatcccattttcccacaaccactatcccgaaaaggagatggttaaaagatctcaggagttttatgagcttctaaacaagcggcggtctgtaaggttcatttctaacgagcaagttcccatggaggtcatcgacaacgtgattagaactgccgggaccgctcctagcggtgcacacactgagccttggacattcgtggtggttaaggacccagacgtaaaacacaagatcaggaagatcatcgaagaagaagaggagattaattacatgaagagaatgggccacaggtgggtgacagacttaaaaaaactgcgaaccaattggatcaaagagtacctggataccgcccctatcctgatcctgatcttcaaacaggtgcacggtttcgcagccaatgggaaaaagaaagtacattattataatgagatcagtgtgtcaatcgcttgcggaatcctgttggccgccttgcaggtgaataatggaattacaatgaggcatcagactgcaaggcatcgacacctgattgaggggcccggacgctcaagcgaagcctgctctaaactgtcgtcccagggatgcccaggattctactgctag

SEQ ID NO: 191962 - DNA, 744 bp, synthetic construct
  misc_feature 1..744: note = Description of Artificial Sequence: Synthetic coding sequence
  source 1..744: mol_type = other DNA
atgtacttcctgacccccatcctggtggccatcctgtgcatcctggtcgtttggatatttaaaaacgccgatcggtctatggaaaagaaaaagggtgagccccgaactagagctgaggcgcggccatgggtggacgaagacctgaaggattccagcgacctgcaccaggccgaagaagatgctgatgaatggcaagaatccgaggaaaatgtggaacatatccctttctctcacaaccattacccagagaaggaaatggttaagcgaagccaagaattttacgagcttctgaacaagcgccggtcagtccgttttatcagtaatgagcaagtgcccatggaggtcattgataacgtgataagaactgccggcactgctccaagcggcgcccatacggaaccttggacttttgtggtggtgaaagaccccgacgttaaacacaagatcagaaaaatcattgaggaggaggaagaaattaactacatgaagaggatgggtcataggtgggttaccgacctaaaaaagttgcgaaccaactggattaaagagtacttagacactgctcccatccttattctgatttttaagcaagtccacggctttgccgcaaacggcaagaagaaagtccattattataacgagatctctgtaagcatagcttgcggcattctgctggctgccttacaggtgttcggaaagataattctcaaggagttagccctcatatcttttctcaatctttag

SEQ ID NO: 191963 - DNA, 855 bp, synthetic construct
  misc_feature 1..855: note = Description of Artificial Sequence: Synthetic coding sequence
  source 1..855: mol_type = other DNA
atgtacttcctgacccccatcctggtggccatcctgtgcatcctggtggtctggattttcaagaacgctgaccgatcaatggaaaagaagaagggtgaaccccgcacgagagccgaagcacgaccatgggttgatgaggatctgaaggacagctccgatctgcatcaagccgaggaggatgctgacgagtggcaggagtctgaggaaaatgtagagcacattcccttttcacataaccattatccagaaaaggagatggtgaaacggagtcaggagttttatgaactgttgaacaaacgaagatccgtgcgcttcatatcaaatgagcaggtgcccatggaagtgattgacaatgttatccgcaccgccgggaccgctcccagtggagcccatacagagccttggacatttgtagtggtgaaggaccctgatgtgaaacacaaaattagaaaaatcatcgaggaagaggaagaaattaattacatgaaacgcatggggcatcgatgggttaccgatctgaagaaactgcggactaactggataaaggagtatctggacacggcccccatcttgattctgatctttaagcaggtgcacgggtttgccgcgaatggtaagaagaaggtgcactactataatgaaataagcgtttcaattgcgtgtggaatcttattggcggcacttcaagtcaataacggtatcactatgcggcaccagacagcccgccacaggcacttaattgagggtcccggacgttcttcggaagcctgtagtaagttgtccagtcagggctgtccaggcgccagcgctgctggaagtctgtttcactttgcaattgaatttgcagctccttag

SEQ ID NO: 191964 - DNA, 2850 bp, synthetic construct
  misc_feature 1..2850: note = Description of Artificial Sequence: Synthetic coding sequence
  source 1..2850: mol_type = other DNA
atggagccccccggccggagcagccggagcaccgccagccacacccttcaccaatactgttgtcctacccaagtgttagactctatgaaacttacacccagtggcagactggctgagtccagcgttgagggggatgctcccggatccgacctctcgacagccgtagattccccaggaagtcagccaccctatcgcctgagccaactaccgccctcctcctcccacatggggggtccccccgctggagtcgggctgccatgggctcaacgagcccgccttcaaccggcctcagtggccctgcgcaaacaggaagaggaggagatcaaaaggtccaaggcgctgtccgactcttacgaactgtccaccgacctccaggacaaaaaggtagaaatgctggagaggaaatatggcggctcttttctcagcagaagggctgcgcggaccattcagaccgctttccggcaatatcgaatgaataagaacttcgagagattgcgctcatcagcctctgagtctcgcatgtctcgtcggatcatccttagcaacatgagaatgcagttctcttttgaagaatacgaaaaggcacagaatcccgcttactttgagggtaagcccgccagtctggatgaaggcgccatggcaggagctagatctcatcggctcgaacgggggctgccctatggtgggtcctgcggcggtggcatagatggtggggggtcatctgtcaccacttctggagagttcagtaacgacattacggaattagaggacagtttttcgaaacaggttaaatcactcgctgagagcatagacgaagccctcaattgtcatccttctggtccaatgagcgaagagccaggaagtgcccagttagagaagcgagaaagcaaagagcaacaggaagattcatctgccacgagttttagtgatctccccctgtatcttgacgacaccgtgcctcagcaaagtccagaacggctaccctcaacagagccgccacctcagggaagaccagagttctgggcccctgcaccgttgcctcctgtccccccgccagtaccctcaggcacaagagaagacggatcccgggaagagggaacccggaggggcccgggttgcttggaatgtcgcgatttccggctcagagcagcccacctgcctcttctgaccattgaacctccctcagacagctccgtggacctgtccgacaggtctgatagagggtcagtgcaccgacagttagtctacgaggccgacggttgttcaccccacggcaccctcaagcacaagggacctcctggccgtgctccaattccccatcggcactacccggcccctgaaggcccggcccccgctccgccaggcccactgccccccgctccaaattctggaaccgggccaagcggagtggccggcgggcggcgactcggtaagtgcgaagctgctggcgaaaactccgacggcggcgacaatgaaagcctggagtcttcaagcaacagcaatgaaaccatcaactgcagtagcggatcaagctcacgggatagtctgcgcgagccacccgcaacaggactatgcaagcaaacctaccagcgcgaaacccgacactcttgggattcacccgcattcaacaacgatgtcgtgcagcggagacattacagaatcggcctaaatctttttaataagaaaccggagaaagggattcaatatctgattgagcgaggatttctcagcgatacaccagtgggcgtggcacacttcatacttgaacgcaaaggcctgtcacgtcagatgattggtgagttccttgggaatagacagaagcaatttaacagggatgtgctggattgcgtggtggacgaaatggatttctcatcaatggacttggatgacgctctgcgaaagttccagtcccatatccgtgtacagggcgaggcccagaaggtagagcgactgattgaggcttttagccagcgctattgcgtgtgcaatcctgctctggtgagacagtttcgcaatcctgacacaatcttcatcctggcctttgctatcatcctccttaatacagatatgtacagcccttccgtcaaagcagaacgtaagatgaaactggacgatttcattaagaacctgcggggcgtggacaatggagaagatatcccgcgtgacctactggtgggcatctatcaaaggattcagggcagagagctccggaccaatgacgaccacgtgagtcaagttcaggccgtcgagcgcatgattgttggcaagaagccagtcctgtccttaccccaccgccggctcgtgtgctgttgccagctgtatgaggtgccggacccgaaccgccctcagcggctcggcctccatcagcgagaagttttcctctttaatgatctcctcgttgtgacaaaaatttttcaaaagaaaaagatacttgtgacatacagtttcagacagtctttccctttggttgaaatgcatatgcagttattccagaacagctattaccaatttggtatcaagttactaagcgccgtccccggcggagagagaaaggtgctgatcatctttaacgcgccaagcctccaagaccggctgcgatttaccagcgatctcagggagtctatcgcagaggtccaggaaatggaaaaataccgcgttgaatccgagctggagaaacaaaagggtatgatgaggccaaacgctagccagcctggaggggctaaggacagcgtcaacggcactatggccagaagctctttggaagacacctacggcgcaggagatggtctgaagcggggagcactgagctcttccctgagggatctgtccgacgctggtgtgtgttactag

SEQ ID NO: 191965 - DNA, 4437 bp, synthetic construct
  misc_feature 1..4437: note = Description of Artificial Sequence: Synthetic coding sequence
  source 1..4437: mol_type = other DNA
atggaggccggcagcggcccccccggcggccccggcagcgagagccccaatcgggccgttgaatatctcctggagttaaataacattatcgagtcccagcagcagctactggaaacacagcgccggaggatcgaggagctggaaggccagctggaccagcttacacaggaaaacagagatctccgggaggagtctcagctccatagaggcgagcttcacagagatccacatggtgctagggactcccctggaagagagagtcagtatcaaaatctgcgggagactcaatttcaccatcgggagctaagagaaagtcaattccatcaggccgccagggacgtgggctatccaaatcgtgagggcgcttatcagaatcgtgaggccgtttatcgcgataaagaacgcgatgcatcctatccactccaggacacaacaggctacaccgcaagagagcgcgacgttgcccagtgtcatctccatcatgaaaacccggccctaggtcgagaacgtggtgggcgggaagctggaccagctcacccaggacgggagaaggaggccggttactcagctgccgttggggtgggaccacgtccccccagagagcgcggacagctgtctcgcggggctagtcgatcctcttcgccaggggccggcggaggacactcaacaagcactagcactagcccagctacaaccttacagaggaacgtggaaggagatgccccagggagcgacctttctaccgcagtagattctcccggatcgcagccaccgtatcgactttcccagcttccgccgagcagttcccatatgggtggccctccagcaggggtaggtttgccttgggcgcagcgggctagactacaaccagctagcgtggctttgaggaagcaggaagaagaggaaatcaaaagaagtaaggcgctgagcgactcctatgagctgtccaccgacctccaagataaaaaggtggaaatgttggagcggaagtatgggggtagctttctgagcagacgtgccgctagaactatacaaacagcatttcggcagtatagaatgaataagaacttcgagagactgcgcagctccgcttccgagtcccgcatgtccagaagaattatcctatcaaacatgcggatgcaattttccttcgaagaatacgagaaggcccagaatccagcctacttcgaagggaaaccagccagcctagacgagggagccatggctggagccagatcacatcgattggaacgcggcctcccctacgggggaagttgcggaggaggaatcgacgggggcggatcaagtgtaactacctccggagaattttccaatgacatcacagaactggaggatagctttagcaagcaagtaaagagcctagcagagagcatagacgaggccttaaattgtcatccctcaggtcccatgagcgaggaaccaggcagcgcccagctcgagaagcgcgaatccaaggagcaacaggaagactcaagcgctacatctttttcggatctgccactctacctggatgacacagtgcctcagcaatcgccggagcgcctcccctcaacagaaccccccccccagggccggccagagttttgggcgccagcccccctgccacccgtcccgccacccgtgccctctggaacgagagaggatggcagtcgagaggagggaaccaggcggggaccgggctgtctcgagtgcagagacttcagactgcgggccgcccacctaccactgctgactattgagcctccttcagattctagtgtggatctttctgatagaagcgatcgcggcagcgtccatcgtcagcttgtctacgaagcggatggctgcagcccccatgggactctaaagcacaagggtcccccaggtagagcccccatccctcaccgacactaccctgctccagaggggcccgcccccgctccacccggtcctctgcctcccgcaccaaacagcggcactggaccctccggagtggcagggggacgccgtcttggtaagtgtgaggctgccggcgagaattccgacggtggggacaacgaaagcttagagtcatcgtcaaattccaacgagaccattaactgttctagtggatcctcttcaagagactcactgagggagcccccagcaaccggcctctgtaaacagacctatcagagggagacaaggcactcctgggactctccagcttttaataacgatgtggtccagaggcgacattatcgcatcggcctgaatctcttcaataagaagcctgagaagggcatacaatatctgattgaaaggggattcctgtccgacacccctgtgggagttgctcattttatcttagaaagaaagggcctcagcagacaaatgatcggcgaattcctggggaatcgacagaagcagtttaatagggatgtcctcgactgcgtcgtggacgaaatggatttttcaagtatggacctcgatgacgctctccgcaagtttcagtcacatatcagagtgcagggtgaggcgcagaaagtcgaaagactcattgaagctttcagccaacgatattgcgtgtgtaatcctgctcttgtgcgtcagtttagaaacccagacactatttttatcttggcattcgcaatcatcctgttgaacaccgacatgtactccccatctgtgaaggcggaacgcaagatgaagctggatgacttcattaaaaatctgcgtggtgtcgacaatggggaggatattcctcgggatctccttgttggaatttaccagcggatacagggccgcgagctgcgcaccaacgacgaccatgtttcccaagtacaagccgtcgagcggatgattgtggggaaaaagcctgtgctctctctccctcatcgaaggctcgtgtgttgctgccagctttatgaagtccctgaccccaataggccccagcgacttggcctgcaccagagagaagtatttctgtttaatgatctgctggtcgtgactaagatcttccagaagaagaagatccttgtgacctactcattcaggcagtcttttcctctggtggagatgcatatgcagctattccagaactcctattaccagtttgggattaaattactgtcagccgtccctggcggggaacggaaagtcctgattattttcaacgctccatcattacaggacaggcttagattcacttctgatctgagggaatcgattgcggaagtccaggaaatggagaagtatcgagtcgagtccgaactcgagaagcagaaagggatgatgcgtcctaatgcaagccaacccggcggagctaaggactccgtcaacgggacaatggctagatccagcctggaggatacctatggcgcgggcgacggcctcaagaggggagctttgagttcttcgctccgagatctgtcggacgcgggtaaacgcggacggcgcaatagcgtgggctcgctggattccaccatcgaaggatcggtgataagcagtccaagaccacaccagagaatgccccccccccctcccccccctcctcctgaggagtacaaatcccaacgccctgtctccaacagcagcagttttctgggttcacttttcggctccaaaaggggcaagggcccatttcagatgcctccccccccgacaggccaggcaagcgcatccagctcatccgcctcctcaactcatcatcatcaccaccaccatcaccacggccactcacacggaggcctgggagtgttacccgatggacaaagcaagctgcaggctcttcacgctcagtattgtcaaggacctggcccggctcctcccccttacctccctcctcagcaaccttcattgccgccacctccgcaacagccccctcctctaccacagttaggtagtatccctccaccgccagcgtcagcaccacctgtggggcctcaccgtcacttccatgcccacggcccagtgcccgggccccagcactatactctcggtcgacctgggagggcacctaggagaggcgctgggggtcatccacagttcgctcctcatggacgtcacccactccatcagccgacgtcaccactccccctctactctccggcaccccagcaccctcccgcccataagcaggggcctaaacacttcatcttctctcatcatccgcagatgatgcccgccgccggcgctgcaggtggcccagggagtagaccacccgggggatcatactcccatccccaccaccctcagtctcccctttccccgcactccccaattcctccccacccatcctacccgcctttgcctcccccctcccctcacactccacattcgccactgccacctacctccccacatgggcccttgcacgcctccgggcctccaggcaccgcaaacccaccctctgccaaccctaaggcgaagcctagtaggatctcaactgtcgtgtag

SEQ ID NO: 191966 - DNA, 4467 bp, synthetic construct
  misc_feature 1..4467: note = Description of Artificial Sequence: Synthetic coding sequence
  source 1..4467: mol_type = other DNA
atggaggccggcagcggcccccccggcggccccggcagcgagagccccaaccgggcagtcgaatacttgttagaacttaacaacataatcgaatcccagcagcagctgttggagactcaacgtaggcgcattgaggagctggagggccagctggatcagctgacgcaggaaaatagggacctgcgcgaggagtctcagttacacaggggagaactgcatagagacccccatggtgcaagagactcgcctggccgggaatcacagtatcagaatctcagagaaactcagtttcatcacagagaattacgtgagagtcagttccatcaggccgcacgtgatgtgggatatcccaatagagaaggagcctaccagaatcgtgaagctgtgtacagggataaagagcgggacgcgtcttacccactccaggatacaaccggatatacagctcgcgagcgcgacgtagcccagtgtcatctccaccacgaaaacccagccctggggagagagcgagggggcagagaggccggtcccgcacaccctggacgggaaaaggaagcaggctattcagctgcagtgggagtgggccccaggccccctcgggagcggggccagctgtcccgaggtgcatcgcgctccagcagtcccggcgctggcggaggccattcaacctctaccagcacctctccagcgaccacgctgcagcgaaagagtgacggtgaaaacagccggacggtcagtgtcgagggggacgcgcccggctctgacctcagtacagcggtagactctccaggatctcagcccccataccggctcagccagttacctccaagctcctctcatatggggggacctccagccggggtaggcctgccctgggcacagagggctcggttgcagccggcgtcagtggctctgcgaaaacaggaggaagaggagatcaagagatcaaaggctctctcggactcttatgagttaagtaccgacctccaggacaagaaggtcgagatgctggagagaaaatatggcggcagttttttaagccgccgcgctgcacgcaccatccaaacagccttccggcagtacaggatgaataaaaactttgagcgacttcgctccagcgcatcagagtcacggatgtctagaaggattatactctccaatatgagaatgcagttcagttttgaagagtacgagaaggcccagaaccctgcatactttgagggtaaacctgcttccttagacgagggagccatggcgggggccaggtcccaccgcctggaacgggggctcccgtacgggggatcttgtggcgggggcatcgacggagggggatcctccgtgactacctcaggagaattctcaaacgatattacagagcttgaagactccttttctaagcaggtcaaaagcctggctgagagcatagacgaagccttaaattgtcatccatctgggcccatgagcgaggaacccggctcagcccaactggagaagcgggaatccaaagaacagcaggaggactcttctgccacatcttttagcgacctcccgttgtatctggatgacaccgttccacagcaaagcccagagaggctgccatctacggagccaccccctcagggacggcctgaattttgggcccctgctccccttcccccggtcccgcctcccgtgccttcgggcactagggaagacgggtctagagaggaaggcactcgaagagggcccggctgtctggagtgtagggatttccggctacgcgcggctcatctgcccctgcttactatcgagcctccgtcagactcttctgtggatctgtcagaccgttccgaccgtggttcagtccataggcagttggtgtacgaggctgatggctgcagcccccatgggaccctgaagcataaaggaccgccagggagagcccccatcccacatcggcactatcctgctcccgaagggcctgcacccgctcctccgggccccttgccccctgcgccaaactctggtacaggtccaagcggggtggctggcgggcgccgactgggtaaatgcgaagccgctggtgagaattcagatgggggagataatgaatcccttgagtcttcctccaactccaatgagaccatcaattgttcttcagggagcagttccagggactcccttcgagagccccccgctacaggcctatgcaaacagacctatcagagagaaacccgacattcctgggactctccggcttttaacaacgatgtggtgcagaggcgacactatagaattggcctcaatttatttaacaaaaagccagagaagggcattcaatacttgattgagagggggttcctttccgacaccccagttggggttgcacatttcatcctagaacgtaaggggctgagcagacaaatgatcggggaatttctgggcaataggcagaaacaattcaaccgtgacgtccttgactgtgtggttgatgaaatggacttttctagcatggatctggacgacgcactgcgcaaattccagagtcacattagggtccagggcgaggcacagaaggtggagagactgatcgaggctttctcccagcgatactgcgtctgcaacccagcactcgtgaggcagtttaggaaccccgatacaatattcatactggcatttgcgattattctactcaacacggatatgtacagccccagcgtgaaggctgagcgaaagatgaagctggacgattttataaagaacttgcggggtgtcgacaacggggaggacattcctcgtgacctgctcgttggtatttaccagcggatccagggccgcgaactgagaacaaatgatgaccacgtgagccaggtgcaggctgtcgagagaatgatcgtggggaaaaaaccagttctatctctcccccatcgcaggctcgtatgttgttgtcagctgtacgaggtaccagaccctaatagaccccagcggctcgggctgcaccagcgcgaagtttttctttttaatgacttactggttgtgacgaaaattttccagaagaagaagatcctggttacatatagcttccgccagtcatttcctctggtcgagatgcacatgcagctcttccagaatagttattatcagttcggcataaaactactcagcgccgtgcctggcggagaacgaaaggtattaattatctttaacgcgccctcacttcaggaccgactccggttcacttcagacctgagggaatccattgctgaggtgcaggagatggagaagtacagagtcgagtcggagctggaaaaacagaagggtatgatgcgtcccaatgccagccagcctgggggcgctaaggatagcgtaaacgggaccatggctcgctcttctctcgaggatacgtatggagccggagatgggttgaagcggggtgctctaagctcaagtttgagggacctgagcgatgccggaaaaagagggagaaggaactctgtgggtagcctggactccactattgagggtagcgtgatttctagtcctaggcctcatcaaagaatgccacctccaccaccaccaccacctccagaagagtataagtctcagaggcctgtgtccaattccagttcctttctgggcagtctattcggctctaaaaggggaaaagggcctttccagatgcccccaccaccgaccggtcaagctagcgccagcagctcaagtgcatcctccacgcatcaccaccatcatcaccatcaccacggacatagtcacggcggcctgggagtgctgccagatggacagtcgaaactgcaggctttgcacgcacagtattgtcagggccctggacccgccccacccccgtacctgccaccacagcagccatcgttgccgccccctccacaacagccaccgcctctacctcagttgggaagcatacccccaccgcccgccagtgcccctcccgttggccctcaccgacatttccacgcacatggcccagtacccggtccacagcattatacactcggacgaccggggcgtgcgcctcgtagaggcgcaggaggtcacccccagtttgcccctcacggccggcaccccctgcaccagccaacctcgcctcttccactctactctcccgcccctcagcatccccccgcgcacaaacaaggcccaaagcattttattttctcccatcatccgcaaatgatgcccgcagctggcgcagccggggggcctggctcacggccaccaggtggaagctactcgcacccgcatcacccacagagccccctgtcaccccactcgcctattccaccacatcctagttaccctcccctgccacctccctctccccacaccccacactcccccttgcctccaacgtccccccacggccctcttcacgcatccgggcctcccgggacagccaacccccccagcgcgaacccaaaagccaagccgtcacgtatctcaaccgtagtgtag

SEQ ID NO: 191967 - DNA, 3549 bp, synthetic construct
  misc_feature 1..3549: note = Description of Artificial Sequence: Synthetic coding sequence
  source 1..3549: mol_type = other DNA
atggagagcctgctggagaaccccgtgcgggccgtgctgtacctgaaggagttaacagcgatcgtccaaaatcaacagtccctcatccacacacagagggagaggatcgatgaactggagcgaaggctggacgaattgtctgccgagaataggtcactgtgggagcaccagcagctacttcaggcccagcccccacccggacttgttcctccttctagcgcaccactacccgccgcacccgccactgcaccggcagcagcggcgcgcgctcaggagcccctgcaggatcaaggtcagagatcagctgccgccccccaccctgcgcctgacaggccgccacgtcagcaccatggccagctcctggagcagccgcagagaggccccggctctagagcccacactccacagtcaccgcataaacacctcggcactcagggagcagtcaccgacaaagagaaagagagacctccgtcatgttgcgcagctgcgggcgcacttttacagcataagtctccctccgcacttggcaaaggggtgctgtccagaagacccgaaaatgaaaccgtgctacatcagttctgttgtcctgccgctgatgcctgcagcgatctggcctctcagagcgacgggagctgtacccaggctggtggggggatggaagatagcgtggtggccgcagctgctgtggctgccgggcgcccgtccgctcatgcccccaaagcccaagcacaggaactccaggaggaggaagagcgccctggcgcaggagccgcaagccccagggccgggcctcaacacaaagcttctcctggacgccagcaacccgccctggcaacagccttatgtccacacgctcctgcagcatcagactatgagctgtcactggacctgaagaataagcaaatcgagatgctggagcacaagtacgggggccatctagtttccaggagggctgcctgcacaatccagaccgcattcagacaataccaacttagcaaaaatttcgaaaagattcgcaattcactcctcgagagccgcctgccaaggcggattagcctcagaaaggtgcgctctcccaccgccgaaagcctggctgccgaaaaagcactcatggagggatatggcctagttgggttacctttggtgcggagtccctcactgcccccgacgtttgcgggaacactcacggagttagaagactcctttaccgaacaggtgcagagcctggctaaaagtatagacgacgccctctcaacgtggagcctgaaaactatgtgttcactgagggagagcggagcttatcaactgcatcaggctctgcaggctgctgccgggccacctggcctggaggcagaaggtagagccccagaatcagctgggccggggccgggcgacgacgccgccgagactcccggcttgcctccagcacattctggtacccttatgatggcctttcgagatgtgactgtgcagatcgctaatcaaaatatttctgtaagttcctctacagccttgagtgtggccaattgcctgggagctcagactgtacaagcacctgccgagccggctgccggcaaggctgagcaaggggaaacatccggcagggaggctcctgaagcccccgctgttgggcgggaggatgcgtctgctgaagattcctgtgcagaagccgcagcttcgggcgccgctgacggagctaccgctcccaaaacagaagaagaggaagaagaggaagagactgctgaggtcgggcggggcgcagaagctgaggcaggcgatttggaacaattgtcctccagctcaacgagcaccaaaagcgccaagagtggaagcgaggccagcgccagcgcatctaaagacgcacttcaggctatgatactgtcgttgcctcggtaccattgtgagaatcctgcctcttgtaaatcgcctacccttagcacagacaccctaaggaagcggctctatcggataggtctcaacctctttaacatcaaccctgataaagggatccaatttctaatatcccgcggctttattccagataccccaattggagtggctcacttcctgctacagcgcaaaggattatctagacagatgatcggagagttcctcggtaacagcaagaagcaattcaatcgagatgtgctggattgcgtggtggatgagatggatttctcttctatggagttagacgaggcgttgcgcaagtttcaagcccatatacgggtccagggagaagctcagaaggtcgaaagactgattgaagcattttcccaacggtattgtatgtgtaatcctgaggtggtgcagcagttccacaaccccgacactatcttcatcttggccttcgccattatacttctgaacacagatatgtactctcctaatatcaagcccgatcggaaaatgatgttagaagatttcattaggaatcttagaggggtggacgatggggcggacatcccccgggagctcgtggttggtatctacgaacgcattcagcaaaaagaactgaagagtaacgaggatcatgtgacctacgtcactaaagttgaaaaatctatagttgggatgaagactgtgctgtcagtgcctcatcgccggcttgtttgttgttcacgactcttcgaagtaactgatgtgaacaagctacagaagcaggccgcacaccagagggaggtgtttttgttcaatgatctgctcgtaatcctgaagctctgtcctaagaagaagtcttcctctacgtacaccttctgcaaatcggtcgggcttctaggcatgcagtttcagttgtttgaaaatgaatattactcacatggcataacactagtaaccccactgtcgggaagcgaaaaaaagcaggtgttgcatttttgcgcgttaggttcagacgagatgcagaagttcgtcgaggatcttaaagaaagcattgctgaagtcaccgagctcgagcaaattcggatagagtgggagctggagaagcagcaggggacaaaaacgctttcttttaagccttgcggagcacagggggacccccagagtaagcaggggtctcccacagctaaacgagaggcagctctgcgagaaaggcctgccgaatccactgtcgaggtgagcatacataatcgcctccagactagccagcataactctgggctgggcgccgaacgcggggctcccgtaccccctccggatctacagccctccccacccaggcagcagacccccccactgccacccccacctcccacccctccaggcaccctggtccagtgtcagcagatcgtgaaggtgattgtcttagataaaccatgcctggccaggatggaaccactactgtcacaggctctgtcgtgctataccagctctagttctgacagttgcggctctacccccttagggggcccaggatccccagttaaggtgacacaccagccacccctgccacctccacctccaccttataatcatccacaccagttctgcccgccaggatcgctgctgcatggtcatcgctattccagcggtagtcgttcattggtctag

SEQ ID NO: 191968 - DNA, 2280 bp, synthetic construct
  misc_feature 1..2280: note = Description of Artificial Sequence: Synthetic coding sequence
  source 1..2280: mol_type = other DNA
atgctggagcacaagtacggcggccacctggtgagccggcgggccgcttgtacgatccagaccgcctttagacaataccagctatcaaaaaatttcgaaaaaatcaggaacagcctgctggagtctcgactaccaagacggatttccctgaggaaggtgcgcagtccaaccgctgagtcactcgcagctgaaaaagctctgatggaaggctacgggctggttgggttgcccttggtgcggagcccttcgctgccacctaccttcgctggcactctgaccgaattggaggacagctttactgaacaggtgcagagtttggcaaaatcgatcgacgacgccctctctacatggtccctaaaaaccatgtgtagcttgagggagtccggagcgtatcagctgcatcaggcgctgcaggccgccgccgggcctccggggctcgaggcagaaggaagggctcccgagtccgctgggccagggcccggagacgatgccgctgaaacaccagggctgcccccggcacattccgggaccctgatgatggctttccgtgatgtcactgtgcagatagctaaccagaatatctctgtctcatcatccacagctctgtccgtggccaattgcttgggggcccagaccgtacaggcacccgcggagcccgccgccggaaaggccgaacagggcgagacatcgggtcgggaagcccctgaggcccctgcagtcgggcgcgaggatgcctctgcagaagattcatgtgccgaagccgctgcatctggggcagccgacggggcaactgcaccaaagaccgaggaggaggaggaagaagaggaaacagctgaggtgggaagaggagcagaagccgaggcaggggatttagaacagttgagctcatcctccacttctactaagagcgccaagtccggtagcgaagctagtgcttccgcatccaaggatgctttacaggccatgatactgagcctgcctagataccattgtgagaatcccgcctcttgcaagtccccaactctctctacagacactctgaggaaaaggctgtataggataggcctgaatctgttcaatataaaccctgataaaggtatccaattcttgatctctcgtggtttcataccggacacacctataggggtcgcccactttctcctgcagaggaaagggctgtctcgacagatgattggggaattcctcggtaattcaaaaaagcaattcaatcgggatgtccttgattgcgtagtggatgagatggatttcagctccatggaactcgatgaagccctcaggaagttccaggcacacataagggtgcagggagaagcacagaaagttgaaagacttatcgaagcctttagtcagagatattgtatgtgtaaccccgaagttgtgcagcagtttcacaatccagacacgatctttatcttggcttttgccatcatcctgcttaacacagacatgtattcacctaacattaagccggacagaaagatgatgttggaggattttatccggaacttacgtggagttgatgacggagccgacatcccaagagaactggttgtgggaatttatgaaagaatccagcagaaggagctcaaaagtaacgaggaccatgttacctacgtgacaaaggttgaaaaaagcatcgtcggtatgaaaacagtgttgtctgttccccataggaggttagtttgctgcagccgcctgttcgaggtcaccgacgtgaataagctgcagaaacaggccgcacaccagagggaagtgtttctcttcaatgacctgctggtcatactgaagctctgtccaaaaaaaaaaagctccagtacctacacattttgtaaaagtgtggggttactcggcatgcagttccagctatttgagaacgagtattactcccacggaatcacactggtgacaccattgtcaggttctgagaagaaacaagttctgcacttctgtgctctaggaagcgatgagatgcagaagttcgtggaggacctgaaggagagcattgcagaggtcaccgagctcgagcagatccgcatagagtgggagctagaaaagcagcaagggactaagactctgtccttcaaaccctgcggagcccagggagacccccagagtaagcagggatctcctaccgctaaaagagaggccgccctccgggaaagacccgctgaatcaactgtagaagtgttaataaatgctagccctgctagattgacaatcctgcccatttccagagacacaataaagagttactgctag

SEQ ID NO: 191969 - DNA, 3549 bp, synthetic construct
  misc_feature 1..3549: note = Description of Artificial Sequence: Synthetic coding sequence
  source 1..3549: mol_type = other DNA
atggagagcctgctggagaaccccgtgcgggccgtgctgtacctgaaagagttaactgcgatagtccagaaccaacagtccctgatccatacccagagggagcgcattgacgaactcgagcgtcgtctcgatgaactgtctgctgaaaacagatcattatgggagcatcagcagttgctacaggcccagcctcccccaggcctggtacctccaagttcagccccgctccctgctgcccccgccaccgcccctgctgctgcagcacgggcccaggagcccctgcaggatcagggacagcgatctgctgccgctccacacccagctccggaccggcccccacggcagcaccacgggcaactgctggagcagccacagagggggcctggttcacgggcgcacactcctcagtcccctcacaagcacctgggtactcaaggggctgttaccgataaggagaaagagagacctccaagttgctgcgccgccgcgggcgctctgctccagcacaagagcccgagtgcattgggaaagggcgttctcagccgaagacctgagaacgaaactgtgctccaccaattctgctgccctgctgctgacgcctgttcagacctggcatcccagtccgacggctcttgtacacaggccgggggtgggatggaggactccgttgtagccgcagctgcagttgcggccggccgcccttccgctcacgccccgaaagcgcaagcccaagaactgcaggaggaggaggagagacccggagcgggtgccgctagtccccgggcgggacctcagcataaggcctcaccgggcagacaacagcctgccttggcaacggccctgtgcccacacgcccctgcagcttccgactatgagctgagtttggatctcaagaataaacagattgaaatgctggagcacaaatacggcgggcacttggtgtctaggcgcgccgcatgtaccatccaaacagctttcaggcagtatcaactctccaaaaattttgaaaaaatccggaatagcctcctcgagtcccggctgccccgcagaatctccctgagaaaagtcaggtcccctacagctgaatctctcgcagccgagaaagccctcatggagggttatgggctggttggcttgcccctcgtaagaagcccgtccctgcctcccaccttcgcaggtacactcacagaactggaggacagctttacggaacaggtgcagtccctagccaagagcatcgacgacgccctatccacatggagtttgaagacgatgtgctccctgagagagtccggtgcgtatcagttgcaccaggcgctccaggctgcagcagggccacccggactggaggcagaaggccgagccccagagtcagcagggcctggtcccggcgacgacgccgctgagactcccggcctgccacccgcccacagtggaacactcatgatggctttcagggatgttaccgtccagatcgccaaccagaacatcagtgtctccagttccacagcgctttctgtggctaattgcctgggagctcaaacggttcaggccccagcagagcccgccgcaggcaaggctgaacagggggagaccagcgggcgtgaagccccggaagctcctgcggtggggagggaagatgcgtccgccgaagacagctgtgctgaggccgcagctagtggggccgctgacggcgcgacggcccctaagaccgaggaagaagaagaagaggaggagaccgccgaggtgggtagaggagcagaggccgaagccggtgacctggaacaactctctagctcatccacatccacaaagtcagccaaaagcggctccgaagcttccgctagcgctagtaaggatgcactccaggccatgatcctgtcactgccacgctaccactgcgagaacccagcctcatgtaagtcccccacgctcagtaccgatacccttagaaagcggctataccgcataggccttaatctttttaacatcaacccagacaagggcatccagttcctgatctctcggggcttcataccagacacccccatcggagtggctcatttcctacttcaacgcaaaggcctttcccgccagatgattggtgaatttttaggaaattctaaaaaacagtttaatcgcgatgtgctggattgtgtggtagacgaaatggatttcagcagcatggaactagatgaggccctacgaaagtttcaggcacacattagggtacagggcgaggcccagaaggtcgagcggctcatcgaggcctttagccaaaggtattgcatgtgtaacccagaggtagtgcagcagtttcacaaccctgatacgatttttatcctggcctttgccattattctgctcaacaccgatatgtatagccctaatattaaacccgaccggaagatgatgctcgaggacttcattagaaatcttcgcggagtcgatgatggagctgacatcccacgggaactggtggttggaatatacgagcgtatacagcagaaagagctgaaatccaacgaagaccacgtgacctacgtgacaaaggtggaaaagtctattgtggggatgaagacagtgttatcggtgccccaccggagactggtttgctgtagtagactattcgaggtcacagatgtgaataagttgcagaaacaggctgcccatcagagggaggtttttctgtttaatgacctgctggtgatcctcaaattgtgtcctaagaaaaagtcttcttccacatatactttctgcaaatccgtgggactgcttgggatgcagttccagctattcgagaatgaatattatagccacggcatcaccctggtcactccgctgagcggcagcgaaaagaagcaagtgctgcatttctgcgctttaggttctgacgagatgcagaaattcgtggaagacctgaaggagtccatcgcagaagtcacagaactggagcaaataagaatcgaatgggaactggagaagcagcaaggaacaaagaccctatccttcaaaccttgcggggcacagggggacccccagtccaaacagggatcccctacagcgaagagggaagctgccctgagggaaaggccagcggagtctactgtagaagtctctattcacaatcgtctgcaaaccagtcaacacaatagcgggctgggtgccgagcggggtgccccagtgcctccacctgacttgcaacccagtccaccccgccagcagacgccgcctctgccgccacccccaccaaccccacccgggaccttggtccaatgccagcagatcgtgaaggtgatcgtgctggataagccctgtctggcgcgcatggaacctctcttgagtcaagcactgtcatgttacacctcctcctcctccgactcctgcggctctacccctctgggtggcccaggttcgccggtgaaggtgacacaccaacccccactgccgccgcctccacccccatataaccacccacaccagttttgtccacccgggagtctgcttcatggtcataggtatagttcaggcagtcgtagcctagtatag

SEQ ID NO: 191970 - DNA, 1797 bp, synthetic construct
  misc_feature 1..1797: note = Description of Artificial Sequence: Synthetic coding sequence
  source 1..1797: mol_type = other DNA
atgaagcccaccggcaccgacccccggatcctgagcatcgccgccgaagtggcaaagtccccggagcagaacgtccctgttatcctgctgaagctaaaggagatcattaatatcacacccctcggcagcagcgaactcaagaagatcaagcaggacatttattgctatgacttaatacagtattgtctgttagtgctttcccaggattatagccggattcaggggggatggaccaccatctctcagctgactcagattttaagtcattgctgcgtgggcctcgaacctggagaggacgccgaagagttttacaacgaactcctgccttcagctgccgagaactttctagtgctcggaaggcagcttcagacttgttttataaatgccgccaaggccgaagagaaagatgagcttctgcactttttccagatcgtgactgactctcttttttggctcctgggaggccatgtggagctcatccaaaacgtgctgcagtccgaccattttctgcacttgctacaggcagataatgtgcagatcgggtctgcagtaatgatgatgcttcagaatattctgcagattaactccggcgacctcctgagaatcggcagaaaagcgctctactcgattctggacgaggtgatttttaagctgttctcaacaccatctccagtaattagatctactgccactaagctattactgcttatggccgaatcacaccaggaaatattaatcctgctgaggcaaagcacttgctacaagggcctccgtagactcttgtccaagcaagagactgggactgagttctcccaggaactacgccagctcgttgggttattgtccccgatggtgtaccaagaggtagaagagcagaagctacaccaggcggcctgcctgatccaagcatactggaaggggtttcagacgagaaaaaggcttaagaaactgccatcagccgtgattgccttgcaacggtcctttaggagcaagcgttccaaaatgctgttagaaatcaatcgccagaaagaggaggaagacctcaagctacaacttcagctgcagagacagcgcgccatgaggctttctcgcgagctacagctgagtatgctggagatagtgcatccaggacaggtggagaagcattacagggagatggaggaaaaaagtgcgttaattatacagaagcattggcgcggatatcgtgagaggaaaaactttcaccagcaaaggcaatccctgattgaatataaagcggcagtcacgttgcaacgggctgctttaaagttcctggcgaaatgccgcaagaagaaaaagctgttcgctccatggaggggactgcaagaattaaccgatgctaggagggtcgagctcaagaagcgggttgatgattacgtgcgcagacacctaggctctcctatgagcgacgtcgtcagtagggagctgcatgctcaggcccaagaacgtctgcagcactacttcatggggcgcgcactcgaggaaagggcacagcagcaccgcgaagcattgatagcccagatttctactaatgtagaacaattgatgaaagcgccgagtctcaaggaagccgaaggaaaggaaccagaactgtttctttctcgatccagacccgtggccgcaaaggcaaagcaggctcatctgaccacactcaagcacattcaagccccttggtggaagaagctaggcgaagaatcaggagatgagatcgacgtccccaaagatgagctgtctatcgaattggaaaatcttttcattggggggacaaagcccccatag

SEQ ID NO: 191971 - DNA, 1398 bp, synthetic construct
  misc_feature 1..1398: note = Description of Artificial Sequence: Synthetic coding sequence
  source 1..1398: mol_type = other DNA
atgaagcccaccggcaccgacccccggatcctgagcatcgccgccgaggtcgccaagagcccagagcagaacgttcccgtaatactgctcaaactaaaagagatcatcaatattacccctctcgggtctagcgagttaaagaagattaagcaagacatttactgttacgaccttattcagtactgcttgctggtgctgagtcaggactactcacggatccagggcggctggaccaccatcagtcagcttacccagatactatcccattgttgtgttggcctcgagccaggggaggatgccgaagagttttacaacgagttgctccctagcgcagccgagaattttcttgtgctcgggagacaactgcaaacatgtttcattaatgcagcgaaagccgaggagaaggatgaactcctccacttttttcagattgtcactgatagcttgttttggctgttgggcggccatgtggaactgatccagaatgtactccagtctgatcactttctgcatttgctacaggccgataacgtgcagatcggcagtgcggtgatgatgatgctgcaaaacattttacagattaacagatctaaaagaagcaaaatgctgctcgagattaacaggcaaaaagaggaggaagacctcaagcttcagcttcaattacagcgacaacgagcaatgcgtctctccagagagctccagctttctatgctggaaatcgtgcaccccgggcaggtagagaagcactatcgcgagatggaggagaagagcgccttgatcatccaaaaacattggcggggatacagggaaagaaagaactttcatcagcagcgccagagtctgatagaatataaagccgcggtgaccctccagcgcgctgctctgaaattcttggcaaaatgtcggaagaagaagaagctgtttgccccctggcgcggtttacaggaactcactgatgccagaagggttgaactgaaaaaaagggtcgacgattacgtgcggaggcacctggggtcacccatgtccgacgtggtaagtcgcgaactccacgctcaggctcaggagaggctgcagcactactttatgggtcgtgctctcgaagaaagagctcagcagcatagggaagccctgatcgcccagatctctacgaacgtggaacaactcatgaaggcccccagtctgaaagaggcagaggggaaggagcctgaattgtttctgtctcggagcaggcccgtggcggcaaaagctaagcaggcccacttgaccaccctgaaacatattcaggcaccatggtggaagaaactgggagaagagtcgggagatgagatcgatgtaccgaaggatgaactgtctatcgaactggagaacctctttatcggcggtactaagcccccttag

SEQ ID NO: 191972 - DNA, 264 bp, synthetic construct
  misc_feature 1..264: note = Description of Artificial Sequence: Synthetic coding sequence
  source 1..264: mol_type = other DNA
atgaagcccaccggcaccgacccccggatcctgagcatcgccgccgaggtcgccaaaagccctgagcagaacgtgcccgtgatccttcttaagctgaaggaaattatcaacattacgcctctgggctcatccgaactgaagaaaattaagcaggatatttactgctacgaccttatccaatattgtctccttgtgttatcccaagattacagtaggatccagggcgggtggacgaccatctcccagcttacccagattctgtag

SEQ ID NO: 191973 - DNA, 1332 bp, synthetic construct
  misc_feature 1..1332: note = Description of Artificial Sequence: Synthetic coding sequence
  source 1..1332: mol_type = other DNA
atggaggaggacagcctggaggacagcaacctgccccccaaggtgtggcattccgagatgactgtgagtgtcaccggagagcctccttctaccgtggaagaggaaggaattcccaaggagactgacatagaaatcattccggaaatcccagagactctagagcccctatcccttcccgacgtgctgcggatttccgccgtgctggaagacactactgaccagttgtctattctgaactatattatgccagttcagtacgaggggaggcagtccatctgcgttaaatcacgagaaatgaacctcgagggaactaacctggataaattaccgatggcaagtactatcacgaaaatcccttcaccccttatcactgaggaaggaccaaatctaccggagattcgccatcgggggaggttcgccgtcgagtttaataaaatgcaggatcttgtgtttaaaaaacccacacggcagactatcatgacaactgaaactctgaaaaaaattcagatagacagacagttcttttcggacgtgatcgccgacaccataaaagagctgcaagacagtgctacatacaatagtctgctgcaggccctctctaaggaaagggagaataaaatgcacttctacgatattattgctcgcgaagaaaaaggcagaaagcagataatctcgctgcaaaagcagctgattaatgtaaagaaagaatggcagtttgaggtacaaagccaaaatgaatacatcgcgaacttaaaggatcagctccaggagatgaaggccaagagcaatctggaaaaccgctacatgaaaaccaatacagagctacagattgcgcaaacacagaagaagtgcaacaggacagaggagctcttggttgaagagatcgaaaaactgaggatgaagacagaagaagaggccagaacacacacagaaatcgaaatgtttctcagaaaggaacagcagaaactggaagaaagattggagttctggatggagaaatacgacaaggacaccgagatgaagcaaaatgagctgaacgccctgaaagccactaaggctagcgacctggcacatttgcaggacctcgcaaagatgataagagagtatgaacaggtgatcatagaagataggatcgaaaaggagagaagtaagaagaaggtaaagcaggacctcctggagcttaaatctgtcatcaagttacaggcctggtggagaggcacgatgatcagacgagagattggaggttttaagatgcctaaggacaaagtggactcaaaggacagcaagggcaaaggaaaagggaaggataaacgtaggggaaagaagaaatag

SEQ ID NO: 191974 - DNA, 165 bp, synthetic construct
  misc_feature 1..165: note = Description of Artificial Sequence: Synthetic coding sequence
  source 1..165: mol_type = other DNA
atggaggaggacagcctggaggacagcaacctgccccccaaggtgtggcactcagaaatgacagtctcagtgaccggtgagcctccatccacagtcgaagaggagggcattcccaaggaaactgacatagaaatcatacccgagatcccagaaaccttggagtag

SEQ ID NO: 191975 - DNA, 1332 bp, synthetic construct
  misc_feature 1..1332: note = Description of Artificial Sequence: Synthetic coding sequence
  source 1..1332: mol_type = other DNA
atggaggaggacagcctggaggacagcaacctgccccccaaggtgtggcatagtgagatgactgtgagcgtcactggggaacctcctagtacggtcgaggaagaaggtatacctaaagagacagacattgagattatacccgagatcccggaaactcttgaacctctgtctttgccggatgtgcttagaatatccgcagtccttgaagacacaacagatcagctatcgattctcaactacataatgcctgttcaatacgagggaaggcagagtatttgtgtcaaatctcgtgaaatgaatctggagggcaccaacctggacaaattgccaatggccagcacgatcactaaaatcccttccccattgatcacggaggaaggacccaatctgcccgagatcagacatagagggcgctttgcagtggagtttaataagatgcaggaccttgtctttaagaaacctacccgtcagaccatcatgaccacggagactcttaagaagattcaaattgatcgccagtttttctctgatgtgattgccgataccattaaggagctacaggattctgccacctataacagcctgctacaggccctttcgaaagaaagggagaacaagatgcacttctacgatattatcgctagagaagaaaaaggacggaagcagattatatctctgcaaaagcagctgattaatgtgaagaaagaatggcaattcgaggtccaatcgcagaacgaatacatcgcaaatcttaaagatcaactgcaagagatgaaggcaaagagtaatctggaaaaccgatacatgaaaactaacacagaactgcagatcgctcagactcagaaaaaatgtaatcgcaccgaagaactcctggtggaagaaattgagaaactgcgcatgaaaacagaggaggaggcacgaacccatacagagatcgaaatgttcttacggaaagagcagcaaaagcttgaggagcgtctggagttctggatggaaaagtacgataaagatacagaaatgaaacagaatgaattgaacgccctgaaggctaccaaagcgtctgaccttgcgcatttacaggatctggcgaagatgatccgggagtatgaacaagtcattattgaggatcggatagagaaagaaaggagtaagaaaaaagttaaacaggaccttctagagctcaagtccgtcatcaaactgcaggcctggtggcgtggtaccatgattcggcgagagataggggggttcaaaatgcccaaagacaaggtcgactccaaagattccaaaggaaaagggaaaggcaaggataagaggagaggcaaaaaaaagtag

SEQ ID NO: 191976 - DNA, 4974 bp, synthetic construct
  misc_feature 1..4974: note = Description of Artificial Sequence: Synthetic coding sequence
  source 1..4974: mol_type = other DNA
atgagcgccgccgacgaggtggacggcctgggcgtggcccggccccactacgggtcagtccttgataatgaacgcttaaccgctgaagagatggacgagcgaagacgacaaaatgtagcctatgaatatttatgccacctcgaagaagccaagcgctggatggaagcctgtttgggagaggatctccctcctactacggagcttgaagagggcctaagaaacggggtgtatctggcaaagctgggcaatttcttcagccccaaagtagtgtctctcaagaagatttacgatagagagcagacaagatataaagctacaggtttacatttcaggcacaccgacaacgtcatacagtggctgaacgccatggacgaaatcgggttgcccaagatcttttatcccgagaccactgacatctacgacagaaagaacatgcctaggtgcatttattgcatacacgcactgagtctctacctgttcaaactgggacttgcgccccagattcaggatctctacggaaaagtcgatttcacagaagaggagatcaacaacatgaagactgagctggaaaagtatggcatccaaatgcctgccttcagtaagatcggcgggatactcgcgaacgagctgtcagtcgatgaagccgccctgcatgcagcagtgattgccattaatgaggctatagacaggcgcataccagccgatacatttgccgccctaaaaaatcccaatgccatgctggttaaccttgaagagcctctggcctccacttaccaggacatcctgtaccaggcaaaacaggataagatgactaatgccaaaaaccgcacagaaaatagcgagcgcgaaagagatgtatatgaagaacttctcacacaggcggagatccaaggaaatatcaacaaagtcaacacttttagcgcccttgccaacattgacttggctctcgaacagggtgacgccctggcactctttcgcgccctgcaatctccagctctgggactgcgaggcctgcaacagcaaaattctgactggtatctcaagcagctcctgtccgacaagcagcagaagcgccagtctggtcagacggatccactgcagaaggaggagctgcagtccggagtcgacgctgcgaatagcgcagcacagcagtaccaacgacggctggccgcagtggctctgatcaacgctgctattcagaaaggggtcgcagagaaaaccgtcctcgagctgatgaatcctgaagcacaactgccacaggtgtacccgttcgcggcggatctgtaccagaaggaacttgccactctgcagcgacagtcccctgagcataaccttactcatcccgagttgtccgtagctgtggagatgctatcctcagttgccttgattaatcgggctcttgaatcaggcgatgtgaatacagtgtggaagcagctatcaagtagcgtgaccggacttaccaacattgaagaggagaactgccagaggtacttggacgagctcatgaaactgaaggctcaagctcacgctgagaataatgaatttataacctggaatgatattcaggcctgcgttgaccacgtaaatttggttgtccaggaggagcacgagcggatcctagcgatcggtttgattaacgaagcgctcgatgagggtgacgctcagaagacactgcaagcgctgcagattcccgccgccaaactggaaggagtccttgccgaggtggcccagcattaccaggacacacttatccgggccaagcgagagaaagcccaggagattcaggacgaatcagccgtcctctggctggacgaaattcagggtggaatttggcaatccaacaaggacacccaggaggcacaaaagtttgcactgggtattttcgcaatcaacgaggcagtggagtcaggggatgttggcaagaccttgtctgcacttcgatcgcccgatgttggattgtacggcgttattccagagtgcggagagacctaccacagcgatctggctgaggctaagaaaaagaagctagctgttggggataacaattctaagtgggttaaacattgggttaagggcggttactactactaccataacttggaaacccaggaaggtggctgggatgaacctcccaactttgtgcaaaatagcatgcagctttcccgagaggagatacagagctccattagtggggtcaccgccgcatataacagggagcagctatggctggcgaacgaggggctaatcacacggcttcaagctcggtgcagagggtaccttgtgaggcaggaatttagaagcagaatgaacttcctgaagaaacagattcctgccataacatgcatccagtctcaatggcgaggatacaagcagaaaaaagcctaccaagaccggctggcctacttgcggtcccacaaggatgaagtcgtcaagattcagtccctcgccaggatgcaccaagccaggaaacgctatagagatcgcctgcaatactttcgcgatcatattaatgatataatcaagattcaggccttcattagggctaataaagcaagagatgattataaaacgctgataaatgccgaggatccgcccatggtggttgtcagaaagttcgtccaccttctggaccagtctgatcaggactttcaggaggaactggacctcatgaagatgcgcgaggaggtgatcaccctgatccgttctaatcagcagctggagaatgacctgaatctgatggacattaaaataggccttttggtgaaaaacaagatcaccctgcaggatgtggtgtcacattcaaagaaactgacgaagaagaacaaagaacagctgtctgacatgatgatgataaataagcagaaggggggcctgaaggccttaagtaaagagaaaagggagaagctggaggcgtaccaacatctgttttacctgctgcagacgaatcccacctatctggctaagctgatctttcaaatgccccagaataaatctaccaaattcatggattctgtgattttcacgctctataactacgcgtctaaccagagagaagagtacctgcttttgcgcttgttcaagactgccctgcaggaggaaatcaagtctaaggtggatcagatccaggaaatcgtcaccggcaaccctaccgtgataaaaatggtcgtctccttcaatcgcggcgcccgaggtcagaacgccctgcggcagatccttgccccagtcgtgaaggaaattatggatgacaagtctttgaatattaaaacagatcccgtcgacatttacaagtcttgggtgaatcagatggagagccagacaggggaggctagtaagcttccgtacgatgtgaccccagaacaggccctggcgcatgaggaggtgaagaccagactggatagctcaatacgtaatatgagggctgtcactgataaatttttgtccgccatagtatcaagtgtggataaaatcccctatggtatgaggttcatcgcaaaggtgcttaaggatagcctgcatgagaagttcccagatgcgggagaagacgagttgctgaagattataggaaatctgctgtattaccggtatatgaacccggccatcgtggctccagacgcttttgatatcatcgacctctccgctggagggcagcttactaccgaccagcgccggaacctgggttccatagccaaaatgctgcagcatgctgctagtaacaaaatgttcttgggtgataatgcccatctgagtatcatcaacgaatatctgtctcagagctaccagaagttcagaagattctttcagaccgcctgcgatgtgcctgagctgcaggataaattcaacgtggatgaatacagcgacctagtcactctcacaaagcccgtcatctatatctcaatcggggagattataaatactcatacacttctgctggatcaccaggacgctattgcacctgaacataatgacccaattcacgaactgctggatgacctgggcgaagtgcccaccattgagtctctcatcggggagagttctggtaatctgaatgatcctaacaaagaggccttggcaaaaactgaggtttccctaacactgactaataagttcgatgttcctggggacgagaacgctgaaatggacgctcgcaccatcttactgaatacgaagcgcctgatcgttgacgttatcaggttccagcccggtgaaacgcttactgagatactggaaaccccagcaacctctgagcaggaagcagagcaccaaagggctatgcaaaggagagccattcgtgacgctaaaactcccgacaagatgaaaaagagcaaatccgttaaagaagattccaatcttaccctgcaggagaagaaagagaagattcaaaccggactaaagaagctgactgaactcggtacggtggatcctaaaaataaataccaggagctgattaacgacattgctcgcgacattaggaatcagcgcaggtatagacaacgacgcaaagccgaactggtgaaactgcagcagacatatgccgccttgaattctaaggcaaccttttatggtgaacaggtagattactataagagttacattaaaacttgtctagacaacctggccagtaagggtaaagtctctaaaaagcctcgggaaatgaaaggtaagaaatccaaaaagatcagtctcaagtatactgcagcccgtctgcacgagaagggtgtcctgcttgagatcgaagacttgcaggtgaatcaattcaagaacgtaatctttgaaatttctcccacggaagaagtgggcgactttgaagtgaaggcaaagtttatgggggtgcaaatggagacctttatgctgcattatcaggatttgctgcagctacagtatgaaggtgtggccgtgatgaagctttttgaccgcgccaaggtgaacgttaacctgctgatttttctgctaaacaagaagttctatgggaagtag

SEQ ID NO: 191977 - DNA, 4728 bp, synthetic construct
  misc_feature 1..4728: note = Description of Artificial Sequence: Synthetic coding sequence
  source 1..4728: mol_type = other DNA
atgccccacgaggagctgcccagcctgcagcggccccggtacggctccattgtggacgatgagagactgtccgctgaagagatggatgaacgtcggcggcaaaacatcgcatatgaatacttgtgccacctggaagaagcgaagaggtggatggaagtatgcttagtggaagaactccctccaaccacggagctggaggagggcctgaggaatggagtgtatcttgccaagctggccaagtttttcgcacccaagatggtgagtgagaagaagatctatgatgttgagcagaccagatataagaaatccggccttcacttccgccacaccgacaatacagtccagtggctgagagctatggaaagcattgggcttccaaaaatcttctatcctgaaaccacagacgtctatgaccgaaaaaatatcccgcgtatgatttattgtatccacgccctttctttgtaccttttcaagctgggtatcgcccctcagattcaggacttactcggtaaggttgattttaccgaggaggaaatcagtaacatgaggaaggaacttgagaagtacgggattcagatgccttctttttctaagataggcgggatactagcaaatgagctgtctgtggatgaggctgccctgcacgcagcagtcatagccattaatgaagctgtagaaaaaggtatagctgagcagaccgtggtaactctgagaaacccaaacgcagtcctgaccctggtcgatgacaacctggcccctgaataccaaaaggaactgtgggatgcaaagaaaaagaaggaggagaacgcgcgtttaaaaaattcttgtatttccgaggaggaaagggacgcctatgaggagctgctaactcaggcggagatccaaggcaacatcaacaaggtgaacaggcaggcagcggttgaccacataaatgcagttattcccgaaggagacccagaaaatactctgctcgctctgaaaaagcctgaagcgcagctaccagcggtgtacccttttgccgccgctatgtatcagaacgagctcttcaacttgcagaagcagaacacgatgaattacttggcacacgaagagctgctgatagctgtggaaatgctatcagcggtcgctctcctgaaccaagcactggagagcaatgatctcgtgtccgtccagaatcagctgcgctcccccgctatcggtctgaataatctagacaaggcctatgttgaaagatacgctaatacactcctttctgtaaaactggaggtgctatcccaaggccaagataacctgagctggaacgaaatccagaattgtattgatatggttaatgctcagatccaggaggaaaacgatagggttgttgctgtggggtacattaacgaggctattgatgaaggcaatccgctcagaacccttgaaactcttcttctgcctactgcgaacatctctgatgtggatcccgcacacgctcagcactatcaggacgtcctttaccatgcgaagagtcagaaacttggggactccgagagcgtgtcaaaagtcctgtggctagatgaaatccagcaagccgtggatgacgctaatgttgataaggaccgggctaaacagtgggttaccctcgtcgttgatgttaatcaatgccttgaagggaaaaagagctctgatattctgagtgtcctgaagagtagcacatccaacgctaatgacataattcctgaatgtgcggataagtactacgacgccctcgttaaagctaaggagttaaagtctgaacgggtttcatccgatggctcgtggctcaagttgaacctccacaaaaagtatgattactactataatacggacagtaaagaaagctcctgggtcactccggagagttgcctgtataaagaatcttggctgacaggcaaggagattgaggatataattgaggaggtgaccgtgggttacatacgcgagaatatctggagcgcttctgaagagttgcttctgcgcttccaggccacatctagcggtccaattctgcgcgaggagtttgaggcgcgaaagtccttcttgcacgagcaggaagagaatgtggtcaagattcaggccttctggaagggatacaaacaacggaaagagtacatgcaccggcgtcagactttcatcgacaacacagacagcattgttaagatccagagctggtttcgcatggctacggcacgcaagtcttacctgagccggctgcagtatttcagggatcataataacgaaattgtaaaaattcagtcactgctgcgagccaataaggctcgcgatgattataagaccttggtaggctcagaaaacccacccctcaccgttatccggaagtttgtgtacctcctggatcagagcgatctcgactttcaagaagaactggaggtggcccgactgagggaggaggtggtcactaagataagggcaaatcagcaattggaaaaagatctcaaccttatggatatcaaaattggacttctggttaagaatcgaatcactctggaagacgtgatctcacactcaaaaaaacttaataagaaaaaaggaggtgaaatggagattcttaataatacagacaatcaggggattaaaagcttgtctaaagaacgcaggaagaccctcgaaacctatcagcagcttttctatctccttcaaacaaacccactttatttagctaagttgattttccagatgccgcaaaataagtccacaaagttcatggacacggtcatattcacgctatataactatgcgtctaatcagagagaagaatacctgcttctgaaattgttcaaaaccgcattggaggaggagatcaaatctaaggtggaccaggtccaggacatagttaccggcaatccaacagtgatcaagatggttgtctcttttaacaggggtgcgcgaggccagaacactctgcgccaattactcgcccctgtggtgaaagagatcatagatgacaagtccctgatcattaatacgaacccagtggaggtttacaaggcctgggtgaatcagctagaaactcagactggggaggcatccaagctcccctatgacgtcactaccgagcaagccctcacgtaccctgaggtcaagaataaacttgaggcatcaatcgagaacttgcgacgggtaacggacaaggtgctgaacagtattataagctccctcgacttgcttccctacggattacgctacatcgccaaggtgctgaaaaactctattcacgagaagttcccggacgcaaccgaagatgagctgctgaagattgtgggcaacctcttgtattaccgttacatgaaccccgccatcgtggcacctgacggcttcgatattatcgatatgactgctggagggcagatcaatagtgaccagagacgcaaccttggctccgtggcaaaagtgttacagcacgccgccagtaacaaactgtttgagggcgagaacgagcatctgtcctctatgaataactacctcagcgagacctatcaggaattccgaaaatattttaaagaggcatgtaacgtgcccgagcccgaagaaaaatttaacatggacaaatacaccgacctggtcactgtctccaaaccagtgatctatatctccattgaagagattatctccactcactccttacttcttgaacaccaggatgccattgcccccgagaaaaacgatctcctatctgagttgctaggaagcctaggtgaggtccctactgtggaaagctttctgggcgagggcgccgtcgacccaaatgacccaaacaaagctaatacactctcgcagctgtccaagaccgagatttccctggtcctcacatcaaaatatgatatcgaagatggtgaagcaattgattctcggagcctgatgataaaaactaagaaactgatcatcgatgtcatacgaaatcaacctggaaacactcttacagaaatacttgaaacacctgccacagcccagcaagaagtggaccatgccaccgacatggtctcccgcgcaatgatcgacagcagaacccctgaggaaatgaaacacagtcagtctatgattgaggatgcccaactcccgttggagcaaaagaagaggaaaatccagcgtaacctccgcacgctggagcagaccggtcatgtcagctcagagaacaaataccaggatatcctgaacgaaatagcgaaggatattagaaatcagaggatctaccggaagctgagaaaagccgaactggccaaactgcaacaaactctaaatgcgctgaataaaaaggctgctttttatgaagaacagatcaattattatgacacctatatcaagacctgcctggataacctgaagaggaaaaacactcgcagaagtattaaacttgacggcaaaggagaacccaagggggcgaagcgcgccaagcctgttaagtacaccgcggcaaagctgcacgagaagggtgtcctgctggacatcgatgatctgcaaactaatcaattcaaaaatgtgacattcgacatcatcgcaacggaagacgttgggatcttcgacgttcggtcaaagttccttggggtggagatggaaaaagttcagctgaatatccaagacctgcttcagatgcagtacgaaggcgtcgcagttatgaagatgttcgacaaggtaaaagtcaacgtgaatttgctcatctacctgctgaacaagaagttctacggaaaatag

SEQ ID NO: 191978 - DNA, 3234 bp, synthetic construct
  misc_feature 1..3234: note = Description of Artificial Sequence: Synthetic coding sequence
  source 1..3234: mol_type = other DNA
atggtgaacgcccagatccaggaggagaacgaccgggtggtggccgtcggatatattaacgaggccattgatgagggcaacccattgcggactctggagactttgttgctgcctaccgccaatattagcgatgtggatcccgctcacgcacagcactatcaggatgtcttgtaccatgcaaagagtcaaaagttgggcgactcagagagcgtctcgaaagtactgtggctggatgaaattcagcaggcagtagacgatgcgaatgtggacaaggatcgggccaaacagtgggtgactttagtagtagatgttaaccagtgtctagaaggcaaaaaatcatccgacattctttccgtactgaagtcgtcaacttctaacgctaatgacatcattccagaatgcgctgataaatactacgatgccttggtgaaggcaaaagagctgaagtctgagcgggtgagctcggatgggtcttggctcaagctgaatctccataagaagtacgactattactataacacagatagcaaagagagtagctgggtgacaccggagtcttgcctgtacaaggaatcatggctgacaggtaaagagatcgaggccttttggaagggctataagcagaggaaggagtatatgcatcgacggcagacattcattgataatacagactcaattgtgaaaatccaaagctggtttagaatggccactgcacgaaagtcttacctgtccagactgcagtacttcagagatcacaataatgaaatagtcaaaatccagagcttattaagggccaacaaggccagggacgactacaaaacgttggtggggtcggaaaacccccctctgaccgtcatccggaagttcgtctatctcctggatcagtctgacctggactttcaagaagaactggaagtcgccaggctgcgggaggaagtagtcaccaagatccgcgcaaaccagcagcttgagaaagacctgaatctgatggacataaagatcgggctgctggtgaaaaaccgcatcacgctagaggatgtgatcagccacagcaagaaattgaataagaaaaagggaggcgaaatggagatcctcaataacaccgacaaccaagggataaagtcactctctaaggagcggcggaaaaccctggagacttatcagcaattgttctatctcctgcagactaaccctctttacctggccaaattaattttccagatgccacaaaataaatccactaagtttatggatacagtgatctttaccctgtataactacgcatcaaatcaaagggaggaatacttgcttctcaagctctttaagactgccctcgaggaagaaattaagagcaaggttgaccaggtacaggacatcgtgactggaaaccccaccgtaattaagatggtagtgtctttcaatagaggtgctcgggggcaaaacaccttgagacaattactagctcccgtggtgaaggaaattattgacgataaatccctcattatcaacactaatcccgtcgaggtctacaaggcttgggttaatcagctcgagacgcagaccggggaagcctcaaaactgccctatgacgttacgacggagcaggctttaacttacccagaggtgaaaaacaagctggaggcatcaatcgagaaccttcgacgggtgaccgataaggttcttaatagcatcatcagctccctggacctacttccctacggcctcagatacatcgcaaaagtgctcaagaatagtatacacgagaagttccctgacgccactgaggacgaacttctgaaaatcgtaggcaatctgctctactaccggtatatgaatccggcaatcgtggccccagatgggtttgacatcatagacatgaccgctggcggacagatcaactccgatcagaggcgcaacctcggctctgtggctaaggtgctccagcatgctgccagtaacaagctgtttgagggcgagaatgaacatctgtcctcgatgaacaattatctgtctgagacttatcaggagttccgtaaatacttcaaagaggcctgcaacgtgcctgagcctgaagaaaagtttaatatggacaaatatacagacctcgtgacggtttccaaaccagtaatatatatcagtatcgaggaaataatctctacacacagcttactccttgagcaccaggacgccattgcccctgaaaaaaacgacctgttgtcagagttgctgggtagcctaggcgaggttccaacggtcgaatcttttctgggggagggcgccgtcgatccaaatgatcccaataaagccaacacactcagtcagctgtccaaaacagaaataagcctggtgctaacatccaagtacgacatagaagacggtgaggccatcgactcccgaagcctaatgatcaaaacaaagaaactgattatcgacgttatacgcaaccagcccggaaataccctcactgaaatactggagaccccagcgaccgcccagcaggaagtcgaccatgcaaccgacatggtcagcagagccatgatcgacagtagaactcctgaagaaatgaaacattctcagtctatgattgaggacgctcagctgcctctcgaacagaagaaaagaaagatccagagaaacctgaggacactggaacagactgggcatgtgagttcagaaaataagtatcaggatattctcaacgagatcgccaaggacatcagaaaccagcggatctacaggaaactgaggaaagccgaactggctaaattgcagcagaccctgaatgctctcaataagaaggccgccttctatgaggagcagatcaattattatgatacctacatcaagacatgcctagacaatttgaaacgaaaaaacacgagaagatctattaaattggacgggaaaggcgagccaaaaggtgccaaacgggctaagccggtgaagtacactgccgccaagttgcatgagaagggcgtgctcctggatatcgacgatcttcagacaaatcagtttaagaatgtgacttttgatataatagctaccgaagatgtcggcattttcgatgtgagaagcaagttccttggagtggagatggagaaggtccagttaaacattcaggatctactacaaatgcaatatgaaggcgtggccgtgatgaagatgttcgataaggtcaaggtcaacgtcaatctgctcatttacctcttgaacaagaagttttacggaaagtag

SEQ ID NO: 191979 - DNA, 3216 bp, synthetic construct
  misc_feature 1..3216: note = Description of Artificial Sequence: Synthetic coding sequence
  source 1..3216: mol_type = other DNA
atgcacagcctgcccggcgtggtggccgtgggctacatcaacgaggcaatagatgaggggaaccccttacgcacacttgagactttgctactcccaacggctaatatcagtgatgtggacccggcacacgctcagcactaccaggacgtgttgtatcacgccaaaagtcagaaattgggagattcagaatcagtatcaaaagtgttatggcttgatgagatccaacaggctgtggatgatgccaatgtggacaaggatagggccaagcagtgggttaccctggttgtcgatgttaatcagtgtttagagggtaaaaagagctcagacattctgagtgtcctgaaaagctccacctccaacgccaacgatattatccccgaatgtgccgacaagtactatgatgcccttgttaaagccaaggagcttaaaagtgagagagtgtccagtgatggtagctggttgaagctgaatcttcataagaagtatgattactactataacaccgattctaaggagagcagttgggtgacacctgagagttgtttgtataaggaatcttggctcacaggcaaggaaatcgaggcattctggaaaggctataagcagcggaaagagtatatgcaccgccgacagacattcatcgacaacaccgatagcattgtgaaaattcagtcctggtttaggatggctacagcacgtaagtcgtacttaagtaggctgcaatatttccgtgatcataacaatgagatcgttaaaatacagtccctgctgagggcaaacaaagcgagggacgactataaaacgctggtcggttccgagaatcctcccttgactgttatccggaagtttgtttatctgctggatcagtccgatctggattttcaggaagaactagaagtcgcgcggctcagggaggaagtggttacgaaaatacgggccaaccaacagctcgagaaggatcttaaccttatggacatcaaaatcggattgttagtaaagaacagaataactttggaagacgtgatctcccattccaaaaagcttaacaaaaaaaaaggcggcgaaatggaaattctcaataatacagataaccagggtatcaagagcctgtcaaaagaacgcagaaagactctggaaacctatcaacagctgttttatttgttacagaccaaccccctgtacctggccaaactaatctttcagatgccccagaacaaaagcactaaatttatggataccgttatctttacactctacaactatgcaagtaaccaacgagaggagtatctgctcctaaagttattcaaaacagccctggaggaggagatcaaatcgaaagtggatcaggtgcaggacatcgtgacaggtaatcccacagttataaaaatggtggttagcttcaaccgcggggcgagagggcagaacacgctccgacaacttctggcccctgtggtgaaagagatcatcgacgacaaatccctgattataaatacaaaccccgttgaggtgtataaggcttgggtcaatcagctcgaaacgcagacaggggaagcctcgaaactaccctacgatgtcaccaccgaacaggctctaacatatccagaggtgaagaacaaattggaagcaagtatcgagaacctacgcagagtgactgataaggtcctgaactccataatctcgagtttggatttgttgccttacgggctcagatacatcgccaaagtgcttaagaatagcatccatgagaaatttcccgatgctactgaagatgagctccttaaaatagtcggaaatttactgtactatagatatatgaaccccgccattgtcgccccagacggcttcgatatcatcgacatgactgctggagggcaaattaactctgatcagcgtcgcaatcttgggagtgtggccaaggttctccagcatgcggcctctaacaagttgttcgaaggtgagaatgaacatctaagctccatgaataactatctgtctgagacgtaccaggagttcaggaagtacttcaaggaagcctgcaatgtgcccgagcctgaggagaaatttaacatggacaaatataccgacctggtgacagtgtcaaaaccagtgatttatatttccattgaagaaatcatatcaacccactctctcctgctcgagcatcaggacgcaattgctcccgagaaaaacgatttgctgagtgagttactgggctccctcggggaggtcccgactgtggaaagctttctcggtgagggagccgtggatccaaacgatcctaataaagccaacaccctgagtcagctatccaaaaccgagatcagcctcgtcctgacatcaaaatatgacatcgaggatggcgaggccatcgacagccgcagcttaatgatcaaaaccaaaaagctcattatcgacgtaatccggaaccagccgggcaacaccttgacagagatactggagactcctgccacggctcagcaagaagtcgaccacgcaacagacatggtttcaagggcgatgatcgattccagaactcccgaagaaatgaagcacagccagtccatgatagaggacgcacaactgcctttggagcaaaagaaacgaaagatacagcggaatctcagaaccctcgaacaaacggggcatgtatctagcgaaaacaaataccaggacattctaaacgaaattgccaaggacattaggaaccagaggatttaccgcaagctgcgcaaggctgagctagccaaactgcagcagactcttaacgctctcaacaagaaagctgcattctacgaggagcagattaattattatgacacttacatcaagacctgtctcgataaccttaagcggaagaacaccagacggtctatcaagctggatgggaaaggagagccaaaaggggctaaacgggcgaagccagtaaagtacactgcagccaagttgcatgaaaaaggagtcttactcgatattgacgatctgcagacaaaccagttcaaaaatgttactttcgatattatagccacggaagatgtcgggattttcgacgttcgatctaaattcctaggcgtggaaatggagaaagtacagctgaatatccaggacctgctgcagatgcagtatgagggggtggccgtcatgaaaatgttcgacaaggtaaaagtgaacgtcaatctgctcatatatctcctcaataagaagttttatggaaaatag

SEQ ID NO: 191980 - DNA, 1134 bp, synthetic construct
  misc_feature 1..1134: note = Description of Artificial Sequence: Synthetic coding sequence
  source 1..1134: mol_type = other DNA
atgggctgcttcaagggcgtggtggccgtgggctacatcaacgaggctatcgacgaggggaacccactgagaacccttgagacactgctcctaccaacggctaatatttccgatgttgatccagcacacgcccagcattatcaggacgtgctctatcacgccaaaagccagaaactcggcgacagcgagagtgtgtccaaagttctttggttagatgagatccagcaggctgtcgatgatgcgaacgtggataaagacagggccaagcagtgggtcactcttgtagtcgacgtcaatcagtgtctggaaggaaaaaaatccagtgatatcctgagtgtgctcaaatccagtacctccaatgctaacgatatcatccctgagtgtgccgacaaatattacgacgctctggtgaaggccaaagagctgaagtccgaaagagtctcctccgacgggtcatggcttaagctgaacctgcataagaaatacgattattactataacactgatagcaaagagagctcttgggtgacacccgagagttgcttgtataaagagtcctggctgacagggaaggaaatagaagatattattgaagaggtcaccgtggggtatatcagggagaacatctggtctgcgtcagaggagctgctgctcaggttccaggccacgagctcaggaccaattctgcgggaggagtttgaggcgcggaaaagctttctgcatgagcaggaggaaaatgttgtaaaaattcaggccttttggaagggatacaaacaaaggaaggagtatatgcaccggaggcagacgtttattgataatacggattccattgttaagattcagtcgtggtttagaatggccactgcacgtaagtcatatctctccagactgcagtactttagggatcacaacaacgaaatcgtcaagatccagagcctcctcagagcaaacaaagcgagagatgactataaaacactggttggctccgaaaatccccccttgactgtgattcggaaatttgtctacctgctcgatcagagtgatctggactttcaggaagaactggaggtagcaaggctgcgcgaggaggtcgtgacgaagatcagggcaaaccagcagctagaaaagacgtag

SEQ ID NO: 191981 - DNA, 3084 bp, synthetic construct
  misc_feature 1..3084: note = Description of Artificial Sequence: Synthetic coding sequence
  source 1..3084: mol_type = other DNA
atggcccagaacaccgagaaccacgaccccgtgggcagcatcctgatccagatccatgaggatttgtatcagctgaaagagaaacttacaaagttttctcccgaggagaagggggagaccctggatattcagtctttggaaactgccattaagagaacggaagtcggcctccggatccatatcgagaagtatctaaacgtggtgaaccagaacgtgctcaccacaagcgtaaacgacgaatcgctgtacacacctcaagcttctaagtggcttctgccaaccgtgatagatcagaagagcttcatttttccccaggaaagtgaaggcactttttggcaacctcagcgccaacatagcagctctctacccgtgtttcctagggcaaaaattaaggtgagtaagctgattaagggatccaacataagctcgctaaccgtgctgccttcatcacactgcacggatccttacttcacccctattccagtgttgcaggccgacgcacacaaggggatactgtctatgattgaacgggggctgataccacccacggctcgcattacctttcagaacccaccaattacccccagggccgctcctctgcactcatttgatgaagccaggaaaattccaaccgttgccaccttcaccattcctagagagccaccgccatcgcccgctgaggtcaaatttttccccaagaagcagagatctaagggaaaatctcgtaggagccgcggtcatcacgatagaaaggccatgaaggtgaagacccctttgcgagccctcaaatcactatgggactatgatttcctcatatacgacggtgttattgataataccgcacccgacttcttggctttcaaggagcatttctccctggcttgggggggcattttttcactactggaacatgtcgagaaattcttgaggaattacgcgattccagaggttaagatcaaggggaataacctggtcgccttactgcccgagttcgaactaacgaacaagctcaccagatatgacttgctgtccgtccttgaagaccctgcccatgtgcagatgctcattaatctccccggacaaagatacaagggtcaggacggcaactctgaggccgcaatgaaaatccaagccacctggaaatgttacaaagctcggaagttcttcctgttttaccgccagcagaagtgggctagcggtgtcatagccatcgcgtggttactgtactgtcacaaaactcggctcaagaaaattctgaaggagagccggcaaaggcatctggagaatttcaggataagggctaagcacttggctgcaaattggaatcggatcagaacctctcgtaggaccattatacatatccccagccttgggtattcgcaacctgttcgggagcacatcgctgacttcaacacccagcagaacatgcagcttgggcgactctgtgacatattagatgcaaatgtgaacgtgatatacatatgttcccatcacatgaatgatgaattggtgctttactataagaaaattctatctttgcacgccgcagtgaagtcgggcaaccttgaggatcggtcagacttacaggataggttcaagatcatcacccccgaggccgtgaatatattcccaaaacaccatatgtgtctggcaacacatttaatgtacagcccaaaggctattaagaggattaaaaatctaattaggggtaccgaagcctacatagtcagtgggctcctgcatcgggacgaccttgccgtggctgacatgttggacattcccatccttgggagcgagcccgagctcgcacatctgtactcgactaagtctggtggaaagagggtgttcgattccgcaaacgtcgcagtaccacctggtatttatgacatatacagtcagcagcagatgattgaacagctgagtcaattgatcacagatcatcttcaaattcagaggtggctcttcaaaatggacagcgagtttaggggcaacgggacggcgttctgcgacataccaagttatcttaagtgctacaagtgggtgttgaaagagtcttcgcgttacggattggaggattggcggaaaaagtgggcacaggagcccgcactggtcaaaatcagtgaggagcttgccgggatcttggcacagcatgcccagccggtgaacgaaaagcgcttccctacgtggcgtaagtttttgcagacctttctttcacagggaggagtgatcgaggcctttccccctgcagataatgtcaccaaccttactgtagacatgctgatagagcccaatgggaagatctctgtgctgtccaccggagatcagttacatgcggaaagcccattcataagttctgggaccaccgtgccacagacaagtgttgacccacaggtccttacatacctctgcttacagattgggaaggcttgccgcatgagggatgtcgtgggatacttttcaattgatctggtgaccttcattgatccaagtacattggaacagcaggtctgggcaacagggctcaacctggcctacagcgaccaactggcgcttactcagctcacactttacctgactaacgggcaccttgattgctctctgagtactctagaggtcccaaggttcgtgcctaaggagaggaagaaaacaaagtgcatgtccgctctgtccatgcctatgctggccacttcaagatacgctgtgatgacgacccagctgcgccacagcaatctcagcctcgtatttcactacgtttttctgcagatctgccgggcccatggcatcggctacgatgtggaggaacgtcagggaactgtatttatcctatatgaacaccttaaacggcataagcttgggatgttaaccatcggggaggacttgcagggcgttctgatgactttcgctaggcaccttttcatcatccaccaagaaatttctgcccccaacatgcagggggagaccaatttcaagaccaccattgctgacattgagactattctgcgggtgaccaaagagaataagatgcggtttgaggaggaacagcagtccaaagacgataagaacctgagcaagcctaaaaaatag

SEQ ID NO: 191982 - DNA, 2091 bp, synthetic construct
  misc_feature 1..2091: note = Description of Artificial Sequence: Synthetic coding sequence
  source 1..2091: mol_type = other DNA
atgatcgagcggggcctgatcccccccaccgcccggatcaccttccaaaacccccccataacgccccgcgctgcaccgctgcattcattcgacgaagcccggaaaattccaacagtcgcaacatttacaatcccacgggaaccacccccctcaccagccgaagtaaagttcttccctaagaagcagcgatccaagggaaaatcacggcgcagtcgtggtcaccacgaccggaaagccatgaaagtcaaaacccccttgagggccctcaaaagcctttgggactacgatttcctcatctatgatggcgtgatcgataatacagcacccgactttcttgcgtttaaggagcactttagcctggcgtggggcgggatcttctccctgttggaacacgttgaaaagttcctcaggaactatgctattccggaggtaaaaatcaagggaaataacctggtggcactcttgcctgagtttgaacttactaacaaactgacgcgctacgatttgctgagcgtcttggaggatcctgcccatgttcaaatgctgatcaatctgcccggtcaaagatacaagggacaggatggcaattcagaagctgcaatgaagatccaggcaacgtggaagtgttacaaggcgcgcaagttcttcctcttctaccgtcagcagaagtgggcaagtggcgtcatagcaatcgcctggttgttatattgtcataaaaccaggctgaaaaaaattctcaaggaaagcagacagcggcatttggagaactttcgcatcagggccaagcacctcgccgcgaactggaatagaatcaggaccagtcgccggactatcatccacattccctcactgggatacagccagccagtgcgcgagcacatcgctgacttcaacacccagcaaaatatgcagctgggcaggctctgtgacatccttgatgctaatgtgaacgtaatttacatatgctcacaccacatgaatgatgaattagttttgtattacaagaagatcctgtctttacacgccgctgtgaagagcggtaatctggaggaccgctcagatttacaggacagattcaagattatcactcccgaggctgttaacatattccccatgatcgagcagctatctcagctgataactgatcatctccagatccaacgttggctgttcaagatggatagcgagtttcgaggcaacggtacagccttctgcgacattccctcttacctaaaatgctataaatgggttcttaaagagagtagtcgatacggactggaagattggcgcaaaaaatgggctcaggaaccagccttagttaagatatctgaagaactcgcgggcatcctggctcaacatgcccagcccgttaatgaaaagagattcccaacttggagaaagtttctgcagacatttctgtctcagggtggggtgatcgaagcgttcccgccagccgacaatgtgactaatttgactgttgacatgttaattgaacctaatggaaagatctccgttctaagcactggcgatcagctgcacgccgaatccccattcatttcatccggcacaactgtgccacagaccagcgtggacccccaagtgctgacctatctctgtttgcagatcggcaaagcatgccggatgcgagatgttgtgggctatttctcgatcgatttagtcacttttatagacccgagcaccttagagcagcaggtctgggctactggcttaaatctagcctactccgatcagctggcgctgacccaactaactctctatctcactaatgggcacttggattgctccctgagtacgttggaggtccctcgcttcgtgccgaaggagcggaagaagacaaagtgcatgtccgccctgtcgatgcccatgctggcaacaagtaggtacgcagtgatgactacccagctccggcactctaacctatctctggtgttccactatgtcttcttgcaaatttgccgcgcccatggtatcggctacgacgtagaaaacaaccggaggggatctcctgggggaccacacgatctttgttccccgtccctgcaccacccttcccgtaacatatccacttag

SEQ ID NO: 191983 - DNA, 1866 bp, synthetic construct
  misc_feature 1..1866: note = Description of Artificial Sequence: Synthetic coding sequence
  source 1..1866: mol_type = other DNA
atgaccaaggccatgaaggtgaagacccccctgcgggccctgaagtccctctgggattacgattttctcatctatgacggcgtaattgataacactgctccggattttctggccttcaaagagcacttcagcctggcctggggcggcatattttccctgctggagcatgtggaaaagtttctaaggaattatgcaatacccgaagttaaaataaaggggaataacctggtggcgctcctgcctgagttcgagctgactaataaattgacgaggtacgatctgctgtcagtcctcgaggatcctgcccacgttcagatgcttattaacctgcccggccagcgctacaagggccaggacgggaacagtgaagcagcaatgaagatccaagccacctggaaatgctacaaggcacggaaattctttctattttacagacagcagaaatgggcttccggcgtgattgctatcgcatggttgctctactgccacaagacgcgtctgaagaaaatcctcaaagaaagccgacagcgtcatctggagaattttcgtataagggctaaacatcttgctgccaactggaataggatccggaccagtcggcggacaattattcatataccttcccttggctattcccagccagtccgcgaacacattgccgatttcaatacccagcaaaacatgcaattgggcagactctgcgacattttagacgcgaacgtcaacgtaatatatatatgttctcatcacatgaatgacgagctcgtgctgtattacaaaaagattctgtcattacacgctgcagtcaagtccgggaatctcgaggataggtccgatctgcaggaccggttcaagatcatcaccccagaggcagttaatatattcccaatgattgagcagctctcccagttgattaccgaccatctccagattcagcgctggctgttcaagatggattcagaatttagaggtaacgggactgccttctgcgatatccccagctacctgaagtgttacaagtgggtactaaaagaatcctctagatacggattggaagactggaggaagaagtgggcccaggagccagccctagttaaaataagtgaggagcttgcaggcatcctggcccagcacgcccagcctgtgaacgagaagaggttccccacctggaggaagttccttcaaacctttcttagccaaggaggcgtgatcgaggccttcccccccgctgacaacgtcacgaacctgaccgtggatatgctaatcgagccgaatggcaagatctccgtgctcagtacaggtgatcaactgcacgcagagtcacctttcatcagttctgggactactgtccctcaaacaagcgttgacccccaggtgcttacatatttgtgtttacagatcggaaaggcctgccgtatgagggatgtagtaggctattttagcatcgacctagtcacttttattgacccgtccactctggagcaacaggtctgggccacagggcttaacttagcgtacagtgatcagcttgcccttacccaacttacactgtatctgacaaatggccacttggactgctccctttcaacactggaagtacctcggtttgtccctaaagagcggaaaaaaaccaagtgcatgagtgctctgtccatgccaatgctcgctacatcaagatacgccgtcatgaccacccagctgcggcattctaacctgtccttggtttttcactacgtgttcctgcagatctgccgcgcccacgggataggttatgatgtggagaacaataggcgtggaagcccaggtggaccgcacgacctctgcagtccatcacttcaccacccatcaagaaatatctccacctag

SEQ ID NO: 191984 - DNA, 2055 bp, synthetic construct
  misc_feature 1..2055: note = Description of Artificial Sequence: Synthetic coding sequence
  source 1..2055: mol_type = other DNA
atgaaggtgaagacccccctgcgggccctgaagagcctgtgggactatgactttctgatatatgatggcgtgatcgacaatacggcccccgactttttagcttttaaggagcattttagcttggcctggggtggcatcttcagtctcctggagcacgtggagaagttcctgcgtaattacgctattcctgaggtgaagatcaagggaaacaatttagtcgccctgctgcctgaattcgagctcacgaataaattaacgagatacgacttgctgtcagttctcgaggatccagcccatgtgcagatgttaattaacctacccgggcaaagatataaaggccaggatggcaacagtgaagcagccatgaagatacaggcaacatggaagtgctataaggctcgcaaattttttctgttttacagacagcagaagtgggcctcaggtgtgattgcaatcgcttggcttctgtattgccacaagaccagactaaagaagatcctgaaggagtcgcggcagcgccatctagaaaattttagaattagagccaagcatcttgctgctaattggaaccgtattcgtacgagtcgccgaacaataatccacataccctccctgggctactctcagccggttagggagcatatcgccgacttcaacactcagcagaatatgcaactgggacgcctgtgtgacatcctggacgctaacgttaatgttatctacatttgtagtcatcacatgaacgatgaacttgtcctgtattataaaaaaattctcagcttgcatgcagccgtgaagtctggaaacctcgaagaccggtccgacctccaggataggttcaagatcataactcctgaggccgtgaatatctttcctatgatcgagcagctaagccaattgattactgatcatttacagatacagcgatggctattcaagatggattctgaattcaggggaaatggtaccgccttctgcgatattccttcctacttgaagtgctataagtgggtgctcaaagagtcgtccaggtacggactagaagattggcgcaagaagtgggcccaggaacccgccctggtgaagatttcggaagagctcgccggaattcttgcccagcacgctcagccagtcaacgagaaacgctttcccacatggagaaagttcctccagacttttcttagccaggggggcgtgattgaggcgtttccccccgcggacaatgttaccaatttaacagtcgacatgctcatcgagcccaatgggaaaattagcgttctctctaccggcgatcagctgcacgcggagtccccatttatttcttctgggactacagtgccacagacatctgtcgaccctcaagtactcacctatttgtgtctgcaaatagggaaggcttgcaggatgcgagacgtggtcggttatttttcaatagatctggtcacattcattgatccaagcaccctggagcagcaggtgtgggcaaccgggctcaacctcgcctactctgatcagctcgcactgacacaactgaccttgtacctcaccaacggccacctggactgcagcctttcaacgttggaagttccccgcttcgtgcccaaggagcggaaaaagactaaatgtatgtcagctctgagcatgccaatgctggcgacctcacgctacgcagtgatgacaactcagcttcgccactccaatttatcacttgtgttccactatgttttcttgcagatctgcagagcacacggcattggatacgacgtggaagaaagacagggaaccgtgttcatcttgtacgagcaccttaagagacataagctcggcatgttaacaatcggcgaagatctgcagggcgttttgatgaccttcgccagacacctttttattattcaccaagagatctcggctcccaacatgcaaggagaaaccaattttaaaacgacaatagcggacatcgaaacaatcctgcgagtgacaaaggagaacaagatgcgctttgaggaggagcaacaatctaaagacgataaaaatctgtctaagcctaaaaagtag

SEQ ID NO: 191985 - DNA, 507 bp, synthetic construct
  misc_feature 1..507: note = Description of Artificial Sequence: Synthetic coding sequence
  source 1..507: mol_type = other DNA
atggcccagaacaccgagaaccacgaccccgtgggcagcatcctgatccagatccacgaggacctctaccagctgaaggagaagctaaccaagtttagtcctgaagagaagggagaaactctagatattcagagcttggaaacagcaataaaacgcacagaggtcgggctccgcattcatattgaaaagtatctcaacgtcgtgaaccaaaacgtactgacaaccagcgttaacgatgaaagcctctatactccgcaagcgtccaagtggctcttgcccacagtaattgaccagaagagctttatctttccccaagaatcagaagggacattctggcagccccaacgtcaacactcctcatccctgcctgtgttcccaagggcgaaacggaagatcggactcaatgtcaaaatcctgcaggatcccgagaacattcatcacagggctgcagttaacgccaactacggaatctcactcccgtacattaaccagagaaaggcatgttag

SEQ ID NO: 191986 - DNA, 339 bp, synthetic construct
  misc_feature 1..339: note = Description of Artificial Sequence: Synthetic coding sequence
  source 1..339: mol_type = other DNA
atgcggctggaggagctgaagcggctgcagaaccccctggagcaggttaatgacgggaagtatagcttcgagaaccaccagctcgcaatggatgcggagaacaacatcgagaaatatccgttaaacctacaaccgctggaaagcaaagtgaaaattatccagcgtgcctggagagaatatcttcagaggcaggaaccactgggcaagcgaagtccctcccccccctccgtgtcatccgaaaagctctcgagttcagtgagcatgaacacgttcagtgatagcagcactcccgtgtcagttatgttcctgttcctttgtcccgacctcaccttcaactag

SEQ ID NO: 191987 - DNA, 480 bp, synthetic construct
  misc_feature 1..480: note = Description of Artificial Sequence: Synthetic coding sequence
  source 1..480: mol_type = other DNA
atgcggctggaggagctgaagcggctgcagaaccccctggagcaggtgaacgacggtaagtactcctttgaaaaccatcagctggccatggacgccgaaaacaacatcgagaaatatcctctaaacctgcagccgcttgagtcgaaagtgaagataatccagagggcgtggagggagtacctgcagagacaggagcccctggggaagaggagtcctagcccacctagcgtgtcatccgaaaaattgtcttcttcagtatcaatgaatacattctcagattccagcaccccttttgctagggctccagtgggtaagattcacccatacatcagctggcgactccagtcccccggcgacaagctgccaggcgggagaaaggttatcctgctgtacctggaccagctggcaaggcctaccggctttatccatacactaaaggagccacagatagaacgactcggtttcttgaccctccagtag

SEQ ID NO: 191988 - DNA, 399 bp, synthetic construct
  misc_feature 1..399: note = Description of Artificial Sequence: Synthetic coding sequence
  source 1..399: mol_type = other DNA
atgcggctggaggagctgaagcggctgcagaaccccctggagcaggttaatgatggcaagtacagtttcgagaatatccagagagcttggagggaatatctgcagcgtcaagagcccctggggaaaagatcacccagcccaccaagcgtgagctctgagaaattgagctccagcgtgtcaatgaatactttttccgactcgagcactcccttcgcccgcgccccagtcggtaagattcacccctacatctcttggcgcctgcaaagtcccggcgataagttacctgggggccgaaaagtgatattactatatttagatcagctggcccgtccgacaggtttcattcatactttgaaggagccccagatagagagactgggcttcctgaccctgcagtag

SEQ ID NO: 191989 - DNA, 2892 bp, synthetic construct
  misc_feature 1..2892: note = Description of Artificial Sequence: Synthetic coding sequence
  source 1..2892: mol_type = other DNA
atggacgcccccaaggccggctacgccttcgagtacctgatcgagactctcaacgactccagtcacaagaagttcttcgatgtgagcaagctggggactaaatatgacgtgctgccatattcaattcgagtccttctggaggcagctgtgcgcaattgcgatggcttcctgatgaaaaaggaagacgtcatgaatatcctcgactggaaaactaagcagtctaatgttgaggtgccattctttcctgccagagttctgttgcaggacttcacgggcatccctgccatggtagatttcgccgcaatgcgagaggccgtgaaaactcttggaggcgacccagagaaggtgcaccctgcctgccctacagatctgacggtggaccactcgttgcagatcgatttctccaaatgcgctattcagaatgcccctaaccccggcggaggcgatttgcagaaagccggaaagctgtcacctgttaaagtgcagcctaagaaactcccttgtcgtggccagacgacctgccgtggatcatgcgatagtggagagctcgggcggaacagcggcactttctcatcacagatcgagaacactcccatcctgtgccctttccacttgcagccggtacccgagccagagaccgtgctgaaaaatcaggaggttgaattcggtcgtaaccgtgaaaggctacaattctttaagtggagcagcagagttttcaagaacgtagccgttattcctcctggcaccggcatggcgcatcagattaatttagaatacctttctcgcgtggtgttcgaagagaaggacttgttgtttcccgactccgtagtcgggaccgattcccatattacgatggtgaatgggctcggcatccttggctggggagtcggggggatagaaacagaggccgtaatgttgggattgccagtgtcgctgacactacccgaggtggtcggatgtgaacttacgggcagcagcaacccatttgtcacatctatcgatgtggtcctaggaatcactaaacacctccggcaggtgggtgtggcgggaaagttcgtggaattctttggttcgggggtttcccagctcagcattgtggaccgaactactatcgccaatatgtgccccgaatacggagccatcctctccttctttcccgttgacaatgtgacacttaagcatttggaacacaccgggttcagcaaagccaaattagagtctatggaaacctatttgaaggccgtgaagctctttaggaatgaccaaaattcctccggcgaaccagagtatagtcaggtgattcagattaaccttaattcaatcgtgccgtctgtgtcagggccaaagcgtcctcaggaccgagtggcggtgaccgacatgaaaagcgattttcaggcatgcctgaacgagaaggtggggtttaagggctttcagatagcagccgagaaacagaaagacatagtgtcaatacactatgagggaagcgagtataagctatcacatggctcggtggtgattgctgccgtgatttcatgcacaaacaactgcaaccctagtgttatgctggctgcgggtttactcgctaaaaaggcggtggaggcaggccttagagtgaaaccctacatccgcacgagcttatctccggggtccggaatggtcacgcactacctgtcttcttcaggtgttctgccttatctgagtaaactcgggttcgaaattgtcggatatggatgttcgatttgcgtgggcaacacagcacccctgagtgatgctgttctaaacgcggttaagcagggggacttggttacatgcggaatcctgtctggcaataagaactttgaaggccgcctgtgcgattgcgtccgtgcaaactatctggcaagcccacctttggttgtcgcgtacgccatcgctggaacggtgaatattgatttccaaacagaaccattgggaaccgatcccactgggaaaaatatctacctgcacgacatctggccgagccgggaagaagtccatagagtcgaagaggagcacgtgatcctgagcatgttcaaagccctgaaagataagatcgagatgggcaataaacgatggaacagtctggaggctcctgactccgtgctttttccatgggatcttaaatcaacctacattcgctgtccgtcattttttgataaattgaccaaggagccgatcgccctccaggctatcgaaaacgcacatgttctcttgtacctgggtgactccgtcacaacagaccatatctccccagccggctcaatcgccaggaattcagcagccgccaagtatttgaccaacagaggactaactcccagagagttcaacagttacggtgcccggagaggcaatgatgcagtcatgacacgcggaacgttcgcaaatatcaaattgttcaataagttcatcggcaagccggcgcccaagacgatccactttccttccggccagaccttggatgtttttgaagctgctgaattgtaccagaaggagggaatcccactgattatcctggcagggaaaaaatacggtagtggcaacagccgcgactgggccgcgaagggcccctacctgctgggtgtgaaggcagtactcgcggaaagttatgaaaaaatccacaaggatcatctgatagggataggtatcgctcccctacagttcctgcccggagagaatgcagacagcctgggcctttctgggcgcgagactttttcgcttacttttcctgaggagctgagtccagggatcaccctgaacatacaaaccagcactggcaaggttttttcagtgatcgcatccttcgaagatgacgtcgagattactctctataaacatggaggactcctcaatttcgtggcccgcaagttctcctag

SEQ ID NO: 191990 - DNA, 96 bp, synthetic construct
  misc_feature 1..96: note = Description of Artificial Sequence: Synthetic coding sequence
  source 1..96: mol_type = other DNA
atggactacgtggaggacaagctgagcagcgagttcgtgttcaacaacccgaacattaaggggacctgtggctgtggcgagagcttcaatatctag

SEQ ID NO: 191991 - DNA, 261 bp, synthetic construct
  misc_feature 1..261: note = Description of Artificial Sequence: Synthetic coding sequence
  source 1..261: mol_type = other DNA
atgagcgccagcctggtgcgggccaccgtgcgggccgtgagcaagcgtaagctgcaaccaacccgggctgcactaaccctgacgccctcggccgtcaataaaattaagcagctccttaaggacaagcccgaacatgtcggcgtgaaagtcggagtgcgaacaaggggctgcaacggcctgagctacactctggagtacacaaaaacgaaaggggactctgacgaggaggtgatacaggacggatggtcggcagtcgtctag

SEQ ID NO: 191992 - DNA, 390 bp, synthetic construct
  misc_feature 1..390: note = Description of Artificial Sequence: Synthetic coding sequence
  source 1..390: mol_type = other DNA
atgagcgccagcctggtgcgggccaccgtgcgggccgtgagcaagcgcaagttacaaccaacacgcgctgccctcaccttaacaccaagcgccgtaaacaagatcaagcaactgttgaaagacaagcccgagcatgtgggagtgaaggtcggtgtcaggacaaggggatgtaacggcctgtcatatacactggagtacacaaaaaccaaaggagactccgatgaagaggtcatccaggacggagtcagggtttttatagagaaaaaagcccagctcacgctgttggggacagagatggactatgtcgaggacaagctgtcaagtgagtttgtgttcaataacccgaacatcaaaggcacgtgtggctgcggggaatcctttaatatttag

SEQ ID NO: 191993 - DNA, 531 bp, synthetic construct
  misc_feature 1..531: note = Description of Artificial Sequence: Synthetic coding sequence
  source 1..531: mol_type = other DNA
atggtggccgccggcggcggcgcccggaccgagggcgccgtgcggaggtcactatggagacagtgtgctaggagggtacacggagagaaactcagaagacctacttttggacctagacatcgtggagccggaacagcaaagatgagtgcttccctggttcgcgcaactgtgcgcgccgtgtccaaaagaaaactgcagccgactagagccgcgctgactttgactccatcggctgttaacaagatcaagcagctgttaaaggataaaccagagcatgtcggagtgaaggttggcgtgcggacaagggggtgtaacgggttgtcctatacactggagtacaccaagactaaaggcgactccgacgaggaggtcatccaggacggcgtgcgggtgtttatcgagaagaaggcgcagctgaccctgttagggaccgaaatggattatgtcgaggataaactgagctcggagtttgtttttaataaccctaatatcaagggcacgtgtggctgcggggagtctttcaacatctag

SEQ ID NO: 191994 - DNA, 504 bp, synthetic construct
  misc_feature 1..504: note = Description of Artificial Sequence: Synthetic coding sequence
  source 1..504: mol_type = other DNA
atggccgccgccggcgccttccggctgcggcgggccgccagcgccctgcttctccgctccccaagactgccagctcgggagctctctgcccccgccagattataccacaagaaagtagtcgaccactacgagaatccaaggaatgtggggagtctagataaaaccagtaagaatgtgggcaccggtctggtgggtgcgcctgcctgtggcgatgtgatgaagcttcaaatccaagtcgacgaaaaaggaaagatcgttgatgccagattcaaaaccttcggctgtggaagcgccatagcaagcagctccctggctaccgaatgggtaaagggaaagactgtcgaggaggcccttactattaaaaacaccgacatcgccaaagagctgtgtttgccaccagttaagttacattgctccatgcttgctgaggacgctataaaggccgccctggccgactataaattaaagcaggaaccaaaaaaaggggaagccgagaagaagtag

SEQ ID NO: 191995 - DNA, 390 bp, synthetic construct
  misc_feature 1..390: note = Description of Artificial Sequence: Synthetic coding sequence
  source 1..390: mol_type = other DNA
atggtgctgatcgacatgagcgtggacctgagcacccaggtggtggaccactacgaaaatcccaggaacgtggggtctctcgacaaaacctctaagaatgtcggcactggactggtgggggcgcccgcttgcggggatgtgatgaaactccaaatccaagtggacgagaagggaaagatcgttgacgcaaggttcaaaactttcggttgtggcagcgcgatagctagcagctctcttgctactgagtgggtgaaagggaaaactgtggaagaggcattgacaattaagaatacagatatagcgaaggagctttgtctgccacccgttaaactgcactgttccaagtctgtcctgttcccggccgaagaaaagactcagttaagtccatag

SEQ ID NO: 191996 - DNA, 429 bp, synthetic construct
  misc_feature 1..429: note = Description of Artificial Sequence: Synthetic coding sequence
  source 1..429: mol_type = other DNA
atggtgctgatcgacatgagcgtggacctgagcacccaggtggtggatcattatgagaatcctcgaaacgtagggtctctggacaagaccagcaagaacgtgggcacgggcctcgtgggcgcacctgcctgcggcgatgtcatgaagcttcagatccaggtggatgagaaaggcaaaattgtcgatgctcggtttaagacttttggctgtggctccgctattgccagctcctcgctggcaactgagtgggtcaagggcaagacggttgaggaggcattgacaatcaagaataccgatattgccaaagagctttgcctgcccccagtgaagttgcattgctctatgcttgccgaagacgccatcaaggccgctcttgccgactacaagctgaagcaggagcccaagaagggagaagctgaaaaaaagtag

SEQ ID NO: 191997 - DNA, 1443 bp, synthetic construct
  misc_feature 1..1443: note = Description of Artificial Sequence: Synthetic coding sequence
  source 1..1443: mol_type = other DNA
atgagcttcccccagctgggctacccccagtacctgagcgccgccggacctggagcctacggcggtgaaagaccgggcgtgctagcagctgcggctgcagccgccgcagcagcatcttcgggacgacctggtgcagcagaattgggcgggggggccggagctgcagccgtgactagtgtgcttggtatgtatgccgccgcagggccttacgctggggcacccaattattcggcctttcttccgtacgccgctgatttgagcctgttttctcagatgggaagccagtacgaactcaaagacaaccccggtgtccatccagccaccttcgcagcacacactgctccggcctattacccctatggccagttccagtatggagaccccggcaggccgaaaaatgcaacacgggagagcacatcgacactgaaggcttggctaaatgagcaccgcaagaatccttaccccacaaaaggagagaaaataatgctcgcgatcataacgaaaatgacgctgactcaggtgtctacttggtttgcgaacgccaggagacgtctgaaaaaagagaacaaggtgacatggggggcacgtagcaaagaccaggaagatggggctctattcgggtctgataccgaaggagacccagagaaagccgaagatgacgaagagatcgacctcgagagcatcgatattgataagatagatgagcacgacggcgaccagtctaacgaggacgacgaagataaggccgaggcccctcatgctcctgccgccccgagcgctcttgcccgggatcagggaagccccttagccgccgccgatgtgttgaaacctcaggattcaccattgggtctcgcaaaggaagcaccggaaccaggcagtacaagactgttgagccccggtgctgctgctggtgggctacaaggggccccacacggaaagcctaagatttggagcttggcagaaacagctacgtctcctgatggggccccaaaagccagtccaccaccgcctgccggacatcccggtgcacatgggccctctgcgggcgcccctttgcagcacccagcattcctgcctagccacggtttgtatacctgccatatcggcaagttctcaaattggacgaattcggctttcctggcacaagggagtctgctgaacatgcgctccttcctcggcgtcggcgccccccacgccgctcctcacggacctcatcttcccgctccccctcccccccaaccacctgtggccatcgcgcccggagctctcaatggcgacaaggctagtgtgcgatccagccctactctccccgagcgcgacctggtgcccaggcctgactctcccgcccagcagttgaaaagtccttttcagcccgttagagacaactcactggcaccgcaggagggaactccaaggattctcgccgcgctaccctcagcttag

SEQ ID NO: 191998 - DNA, 1416 bp, synthetic construct
  misc_feature 1..1416: note = Description of Artificial Sequence: Synthetic coding sequence
  source 1..1416: mol_type = other DNA
atgagctacccccagggctacctgtaccaggcccccggcagcctggctctgtacagttgccctgcttatggcgcaagcgcattagctgccccccgcagtgaggaactagctcgaagcgcatctgggtcagccttcagcccctaccccggctcggcggcgttcacggcgcaggccgcaactgggttcggttcgcctttacagtactctgctgacgccgccgctgcggcagcaggctttccatcttacatgggagcaccatacgacgcacacactactgggatgaccggcgcaattagttatcatccatacggatctgctgcttacccataccagttgaacgatcctgcctataggaagaatgccaccagagacgccacagcaaccctgaaggcatggttaaatgagcacagaaaaaacccctatcctactaagggagagaaaatcatgctagccattattacgaaaatgactctgacacaggtttccacctggttcgctaacgcacgtagaaggctcaagaaagaaaacaagatgacttgggctccccgtaataagagcgaagacgaagatgaggacgagggcgacgctactagatcaaaagacgaatcacccgataaggcccaggaaggtactgaaacaagcgctgaagatgaagggatttcattgcatgtagacagcttgacagaccactcctgctcggctgaatcggacggcgaaaaactgccgtgccgggccggggaccccttatgtgaatccggaagcgaatgtaaggataagtatgatgacttggaggatgatgaggatgacgatgaagagggagagcgggggctggcccctcctaagcctgttacaagttctcctctgactggtctggaagcccccctcctatccccacccccagaggcagcccctcgggggggaaggaagacgccccaggggtcccggacatccccgggcgcaccacctcctgcctcaaagccaaagttgtggtccctcgccgaaattgccacctccgacctgaaacaaccatccctgggaccgggttgtggacctcctgggttgcccgcggctgctgccccagcttcaaccggtgcccccccaggcggcagcccctaccctgcttccccgttgctcgggaggcccctctactatacgtcccctttttacgggaactatactaattacgggaacctgaatgccgccttgcaggggcagggccttctgagatataattctgccgccgcagctcctggggaagctctgcacacagctcccaaggcggccagtgacgccgggaaggcaggagcgcatccacttgagagccactatcgctctcccggcggcggttacgagcccaagaaagacgcctccgaaggatgcaccgtcgtgggagggggagtgcagccctatctgtag

SEQ ID NO: 191999 - DNA, 1416 bp, synthetic construct
  misc_feature 1..1416: note = Description of Artificial Sequence: Synthetic coding sequence
  source 1..1416: mol_type = other DNA
atgagctacccccagggctacctgtaccaggcccccggcagcctggcgctttactcatgtccggcatatggagcttctgcccttgctgcccctcgaagcgaggaattagcccgctcagcatctgggtccgctttcagcccttaccccgggagtgctgcattcacggctcaggcagccactggctttgggtcaccacttcagtattccgcagacgctgctgccgccgctgccggtttcccttcgtatatgggagcaccctacgatgctcataccacggggatgaccggtgctatctcttatcatccgtacggcagcgccgcctacccctatcagctaaacgatcctgcctatcggaaaaatgcaaccagggacgccaccgcgacactcaaggcttggctgaacgagcaccgcaagaacccgtacccaaccaagggcgaaaagattatgttggcaatcatcaccaagatgacgctgacacaggtgtcaacttggttcgccaacgcgaggcgccgcttgaagaaggagaacaagatgacgtgggccccacggaacaagtccgaggatgaagacgaagatgagggggacgcaacgcgctcaaaagacgaatcccctgataaagcccaggaagggacggagacgagcgcagaggacgagggtatctccctccatgttgacagcctcacagatcattcctgtagtgctgaaagtgatggagaaaagctaccatgccgggcaggggaccctctgtgtgagagtggcagcgaatgtaaggacaaatacgatgacctagaagatgacgaggacgatgatgaagaaggcgaacgaggattggccccaccgaaacctgtaaccagttcaccactgacggggctggaagcacctttgctgagcccccccccggaggctgctcccagaggagggagaaaaaccccgcagggctctcggacgtcccctggtgctccccccccagcaagtaaacctaagttgtggtctttggccgaaatagcaactagtgatttaaaacagccctcactcggccccggatgtgggccccccggtctgccagcagccgcggctccagcttctaccggcgcaccacctgggggctctccctaccccgcatctccactgctgggtcgccccctctattatactagtcctttttatggcaattacactaactatggcaacttaaatgcagctctgcagggccaaggattactcaggtacaattccgccgccgcggctcccggtgaagctcttcacacagcccccaaagccgcatcggacgctggcaaagcaggcgcccacccactcgagtcccattatcgttccccgggtggaggttacgagcctaagaaggatgctagtgaggggtgcaccgttgtgggcggcggggtgcagccatatctttag

SEQ ID NO: 192000 - DNA, 1506 bp, synthetic construct
  misc_feature 1..1506: note = Description of Artificial Sequence: Synthetic coding sequence
  source 1..1506: mol_type = other DNA
atgagcttcccccagctgggctaccagtacatccggcccctgtaccccagtgaacgccccggtgccgctgggggctccggcggctcagccggcgccagagggggcctgggcgcaggggcatccgagctgaacgcctctggatctctgagtaacgtcttgagcagcgtgtacggtgcgccctatgcagccgcggccgctgcagcagcagctcagggatacggggccttccttccttatgcggccgagcttcccatctttccccagttaggggcacaatacgagctcaaggactctcccggggtgcagcatcccgctgcggccgcggcttttccacatccacaccctgccttttatccctacgggcaataccagttcggtgacccatcccggccaaagaacgccacccgcgagtcaacttctacgctgaaagcttggttgaatgagcatcgcaaaaacccttacccaaccaagggtgaaaaaatcatgcttgccattattacaaagatgacactgacccaggtttccacctggtttgctaatgccagacggcgcctgaagaaggaaaacaaaatgacctgggctccacggagccggacagacgaagaaggtaatgcctatggcagcgaacgggaggaagaggacgaggaggaagacgaagaagatggcaaacgggaattggagctagaggaggaagaacttggaggagaagaagaagacacaggaggggaaggtctcgcagacgacgacgaagacgaagagatcgaccttgaaaatctggatggagcagccacggagccagagctcagtctggcaggggctgctcggcgggacggagatctgggcctgggccccatctccgactctaagaactcagactctgaagacagttctgaaggattggaggatcggcctctcccagttctatcgctcgctcctgcacctccacccgttgctgttgcatcacctagcttaccgtcgccgccggtctcactagacccatgcgctccggcacccgccccagcctctgccttacagaagcccaaaatttggtccttggcagaaactgctacgtcccccgataaccccagaaggtcccctccaggcgctgggggcagccccccaggtgcggcagtagctccatccgcactccagctttccccagctgcagcagcagcagccgctcaccgcctggtgtctgcacctctcggcaaattccctgcttggaccaacaggccattccccggacctcccccgggccccaggcttcacccactctccctccttggatcggccccaccccacctgctggggctgcctggggccgcaggacatccagccgcggccgccgcattcgcaagacccgctgagcccgaaggggggacagacagatgctctgccctggaagtggagaagaagctgctaaagaccgcttttcaacctgtgccaaggcgacctcagaaccacctggacgctgcactggtcctatccgcgctgagcagttcatag

SEQ ID NO: 192001 - DNA, 741 bp, synthetic construct
  misc_feature 1..741: note = Description of Artificial Sequence: Synthetic coding sequence
  source 1..741: mol_type = other DNA
atgctgtggcggcagctgatctactggcagctgctggccctgttcttcctacccttttgcctgtgtcaggacgaatatatggagtccccgcaaacaggcgggctgccccccgattgtagcaagtgctgtcatggtgattactccttccgtggctaccaggggcctcctggaccacctggcccccctgggattcccggtaaccacggcaacaacgggaacaatggagcaactggccatgagggagccaaaggagagaagggtgataagggcgatcttggccctcggggagaacgggggcagcatggaccaaagggggagaaaggatatcctgggatcccacctgagcttcaaatagcgtttatggcttctttggcgactcattttagtaaccagaattccggcataattttcagcagcgtggagacgaatatcggcaacttctttgacgtgatgaccggaagattcggcgctcccgttagcggtgtctacttcttcacattctcgatgatgaagcacgaggacgtggaggaagtgtacgtttatctcatgcacaacggcaacacagtgtttagtatgtactcgtacgaaatgaagggcaaatcagatacctcaagtaatcacgccgtattgaaattggcgaaaggtgacgaggtgtggctacggatgggtaacggcgcactccacggggatcaccagaggttctctaccttcgcaggatttctcttatttgaaacgaaatag

SEQ ID NO: 192002 - DNA, 1560 bp, synthetic construct
  misc_feature 1..1560: note = Description of Artificial Sequence: Synthetic coding sequence
  source 1..1560: mol_type = other DNA
atgagctacccccagttcggctacccctacagcagcgccccccagttcttaatggctaccaacagtctgagcacctgctgtgagtccggagggagaacattggctgacagcggcccagcagcctctgcgcaggcacctgtatactgcccagtgtacgaatcaagattattggccacggcacgtcacgagctgaacagcgccgctgcactgggcgtgtacggcggaccctacggaggctcacaggggtacggtaactatgtgacctatggcagcgaggccagcgcattctacagcttgaactcttttgattccaaggatggatcagggtcagcccacgggggactggcccccgctgcggccgcgtactacccgtatgagcctgcactaggtcagtacccctatgatcggtacggcacaatggactccggtacccggagaaagaatgccacacgggaaacgacctctaccctcaaggcgtggctgcaggagcaccgaaagaacccgtatccaaccaagggtgagaagattatgttggcgattattactaaaatgacattaacccaggtttctacctggttcgccaatgcacgtagacgccttaaaaaggagaataaaatgacctggcccccgcgaaataaatgtgccgatgaaaagcggccgtacgctgagggagaggaagaggaaggaggagaagaggaagcccgggaagagcccctgaaaagctctaagaatgcagagcccgtcggaaaggaggagaaagaactggagttgagcgatttggatgatttcgatcccttggaggcggagcctcctgcatgtgagttaaaacctccctttcactctttggacggcggcctggaaagggtgcccgcagccccggacggcccggtcaaggaagcgtcaggagcactgaggatgagtttggccgcaggagggggtgctgccttggatgaagacctcgagcgcgcgaggagttgcctgcgctctgcggccgcaggccccgagccgctacctggagctgagggagggcctcaggtctgtgaggcaaagctgggctttgtccctgcaggggcctccgctggtctggaggccaagcctaggatctggtcgctcgcacacacagccactgcagctgccgcggccgcaacatctctttcgcaaaccgagtttccctcttgcatgcttaagagacagggccctgctgcacccgccgcagtcagctccgcccctgctacatcaccatcagtggcccttccgcattctggcgcccttgatagacatcaggactcaccagttaccagcctgcgcaactgggtggacggagtgttccacgaccccattcttaggcatagcacactgaaccaggcgtgggccacagctaaaggtgccctgctagatccgggtccactgggacgttccctgggtgccggcgccaacgtgctgaccgccccactggccagagctttccctcctgctgtgccccaggacgcacccgcagcaggcgccgcaagagaactcctagccctgccaaaggctgggggcaagccgttctgcgcctag

SEQ ID NO: 192003 - DNA, 1560 bp, synthetic construct
  misc_feature 1..1560: note = Description of Artificial Sequence: Synthetic coding sequence
  source 1..1560: mol_type = other DNA
atgagctacccccagttcggctacccctacagcagcgccccccagtttctaatggctacaaattctctgtcaacttgctgtgaatctggcggacggactcttgccgactcggggcccgcagccagcgcccaggccccagtatactgccccgtatatgagagtcgcttactcgcgacagcccgccacgaactgaatagcgcagccgccctaggcgtctacggagggccctacggtgggagtcaagggtacggcaactacgtgacctatggcagtgaagcttcagccttctattctctgaatagctttgacagcaaggacggcagcggctctgcccacggcggactggcacctgcggcagccgcctattatccctatgaaccagccctgggacagtatccttacgataggtatggcactatggatagcggtacaaggcggaagaatgcaacccgagagaccacttccactctgaaagcatggcttcaggagcatcggaagaatccatacccaactaagggtgagaaaattatgttagcgatcattactaagatgaccttaacccaggtatcgacttggtttgccaatgctcggcgccgacttaaaaaagaaaacaaaatgacctggccgcctagaaacaagtgcgccgacgaaaagaggccctatgctgagggggaggaagaagagggaggcgaggaggaggcccgggaggagcccctcaaaagctcgaagaatgctgagcccgtcgggaaggaagagaaggaactcgaattaagtgatctggacgactttgatcctctggaggctgagccacctgcatgcgaattgaaaccaccctttcacagcttggatggcggcctggaacgtgtgccagcggcacccgacggcccagtcaaggaggcatccggggctctgagaatgtccttggccgctggtggcggggcagcgttagatgaggatctagagagggcgagaagttgccttcggtcagccgccgctggacctgaaccactgcctggagccgaaggaggccctcaggtgtgcgaagcaaagcttgggttcgttcccgcgggggccagcgcgggactggaggctaagccccgtatctggagcctcgctcacactgcaactgcggccgccgcagctgccaccagcctgagccagactgagttccctagctgcatgctcaaacgtcaagggcccgcggctccagccgcagtttctagcgcccctgctacaagtcctagcgtggcactgcctcatagtggtgctcttgaccgacatcaggattccccagtgacatcattgcggaattgggtggatggagtgttccatgatcccattctgcggcacagtaccttgaaccaggcctgggcaacagcaaaaggagccttattggatccgggacctctcggccggagtcttggcgcaggcgctaatgtgctgaccgcccccctcgccagggcgtttcccccagctgttccacaggatgcgccagccgctggagcggcgcgggagctgctagcgcttcctaaggcaggaggtaagccattttgtgcatag

SEQ ID NO: 192004 - DNA, 1452 bp, synthetic construct
  misc_feature 1..1452: note = Description of Artificial Sequence: Synthetic coding sequence
  source 1..1452: mol_type = other DNA
atgagctacccccagggctacctgtaccagcccagcgccagcctggctctgtacagttgccctgcatattcgactagtgttataagcggtccccgtacagatgagttgggccgctcgtctagcggatctgctttctctccctacgctggcagcaccgccttcaccgcccccagcccgggttacaactcccacctgcagtacggcgcagatcccgccgcggcagctgctgcagccttttcctcctacgtcggcagcccttatgatcatacacctggaatggctgggagcctggggtaccatccttatgctgcccccctggggtcttatccttacggagatcccgcctatcgtaagaacgccacgcgggacgctaccgcgacattaaaggcctggctgaacgagcatcgcaagaatccctaccccactaaaggagagaaaattatgctggctatcataaccaagatgacactcacacaggtgagtacctggttcgccaacgcccggcgtagactgaagaaggagaacaaaatgacctggacccctagaaaccgcagcgaagacgaggaggaagaggaaaacatcgacctcgagaaaaacgatgaggacgaacctcaaaaaccagaagacaagggggatcctgaagggccagaagcaggcggggcagagcagaaagcggcgagcggatgcgaaaggctgcagggccccccaactccagctggtaaagagaccgaaggttccctcagcgattccgatttcaaggagccaccaagtgaaggcagactggacgcacttcagggccctcctcgcaccggcggcccctcccctgcaggcccggctgccgcgcgcctggccgaggacccggcgcctcattatcctgcaggggccccagctccaggcccacatcccgctgcaggcgaagtgcccccagggcctggcgggcccagcgtaatccatagcccgccaccgccccctccacctgcagttcttgctaaacccaagctgtggtctctagccgagatcgccacttccagcgataaggttaaggacggcggaggcggaaacgaggggtctccttgtcccccgtgccccgggccaatcgcagggcaggccctgggaggttctcgtgcctcgcctgctcccgcccctagcaggagcccctccgctcagtgcccatttcccggcggcactgtgctgagcagaccactctattatacggcccccttttaccctggctacaccaattacggcagcttcgggcatctgcacggacaccccggtcccggtccaggacccaccaccggccctggatcacactttaacggactaaaccaaacggtgctgaaccgcgccgatgctctggccaaagatcccaaaatgcttaggagccagagccaactggatctttgtaaagactccccgtacgagttgaagaaaggaatgagtgatatttag

SEQ ID NO: 192005 - DNA, 441 bp, synthetic construct
  misc_feature 1..441: note = Description of Artificial Sequence: Synthetic coding sequence
  source 1..441: mol_type = other DNA
atgagctacccccagggctacctgtaccagcccagcgccagcctggccctctacagttgccccgcgtatagcacttccgtcatctcagggccgaggacggacgagctggggcgaagtagctctggctccgccttttccccatatgccggctccactgcattcaccgcaccatcccccggctacaatagtcatctgcagtatggagccgaccccgcagccgccgctgcagcagcattcagcagctacgtgctgctgaagaaggagaagaaaagtttggatttcccatgttttcctcccttaaggcccacctgcgtacgctctcctgcagaaagaggagtcgcctccgtagcccaggcatcaatatgtatggaaggacgcgccgccgtggcacggtccgcccatggcggttcaccctatgctcaccgcgttccagggccatag

SEQ ID NO: 192006 - DNA, 498 bp, synthetic construct
  misc_feature 1..498: note = Description of Artificial Sequence: Synthetic coding sequence
  source 1..498: mol_type = other DNA
atgggctgggacctgaccgtgaagatgctggccggcaacgagttccaggtcagcctgagtagctcaatgagcgtgtccgaactgaaggctcaaatcactcagaagatcggcgtccacgccttccagcaacggctggccgttcaccctagtggggtagccttgcaggatcgggttcccctggccagccaggggctcggcccaggctccactgtcctactggtagtggataagtgtgatgagccgctgtctattcttgtacgcaataataaagggaggtcttcaacctatgaagtgcgactgacacagacggtggcacatttgaagcagcaggtatccggacttgagggcgtccaagacgatctgttttggctcactttcgaaggcaaaccgctggaggaccagctgcctcttggtgaatatggcctgaaaccactcagcacagtgtttatgaatctgcggttacgcggtgggggtactgagccaggaggtagatcttag

SEQ ID NO: 192007 - DNA, 3129 bp, synthetic construct
  misc_feature 1..3129: note = Description of Artificial Sequence: Synthetic coding sequence
  source 1..3129: mol_type = other DNA
atggccgacgccttcggcgacgagctgttcagcgtgttcgagggcgacagtacaaccgccgcgggcactaaaaaggacaaggagaaggacaaaggcaagtggaagggtcctcccggtagcgcagataaggccggaaagcgctttgatggaaagctgcagagcgaatccaccaataacggcaagaataaacgcgacgtggatttcgaggggacggatgagccaattttcggtaagaaacctagaatcgaggagtcaatcaccgaagacctgagtctcgccgacttgatgcctcgggtgaaagtacagagcgtagagactgtagagggctgcacacacgaagttgcactgccggccgaagaagactacttgccgcttaagcctagagtggggaaagctgccaaagagtacccattcatcctggacgccttccagagggaagcgattcagtgcgtcgataataaccagtctgtcttggtgagcgcgcacacttcggccggcaagaccgtgtgtgcagagtacgcgatcgcactggcacttagggaaaagcagagggtcattttcacaagcccaataaaggctttgtccaatcagaagtaccgggaaatgtatgaggaatttcaggacgtgggacttatgacaggggacgtcaccattaatccgactgcctcctgtctggtgatgacaactgaaatcttaagaagcatgctctataggggatccgaggtgatgcgggaggtggcgtgggtcatcttcgacgagatccactacatgagagatagcgagcggggcgtggtgtgggaggagaccatcattctcctgccagataacgtccattacgttttcctttcagctacgatacctaacgcgaggcagttcgccgaatggatctgccacctgcacaagcagccttgtcacgttatctatacagactacaggccgactcccttacaacactacattttccccgccggaggagacggattgcatctagtcgttgacgagaacggcgattttagagaggataactttaacacagccatgcaggtgctgagagatgcaggggatttggccaaaggggatcaaaaggggcggaaaggtggcacaaaggggccgtctaacgtgttcaagatcgtcaaaatgatcatggagaggaacttccagcctgtgatcatcttcagtttttctaaaaaagactgcgaggcctacgctctgcaaatgaccaagcttgattttaatacagatgaagaaaaaaagatggtcgaggaggtttttagcaacgccattgactgtcttagcgatgaagataagaaactgccgcaagtggaacacgtcctcccacttctcaaacgagggatcggcatccatcacggaggtctgttgcccatccttaaggaaacaattgaaatcttatttagcgagggactcatcaaagcattattcgccactgagacatttgccatgggaatcaacatgcccgcacgaacagtattgtttaccaacgctcgaaaattcgatggaaaggattttaggtggattagcagcggcgagtatattcagatgtccggccgggcaggacgcaggggaatggacgacaggggtatcgtgatcttgatggttgacgaaaaaatgtctcctactatcggtaagcagcttcttaaaggaagtgcagatccgctgaacagtgccttccatctcacctacaacatggtgttaaatctccttcgcgtcgaggaaattaatccagagtatatgctggagaaatctttttatcagttccagcactatcgggccatcccaggggtcgtggaaaaggttaaaaatagtgaagaacagtataataagatcgttattccgaacgaagagtctgtggtcatctactacaagatccgtcagcagctggctaaactgggtaaggagatagaagagtacattcacaaaccaaaatattgcttgcccttcttgcagccaggccgtctcgttaaagtgaagaatgaaggagacgactttggctggggtgtagttgtgaacttcagcaaaaagtcaaatgtcaagcccaactctggcgaactcgacccattgtacgttgtcgaagtcctgctgaggtgttcaaaagagtcactcaagaatagtgccaccgaagcggcgaaaccagctaagcctgacgagaagggcgagatgcaagtcgtgccagtcttggtgcacctgctgtctgccatcagcagtgtccggttatacatccccaaagacctgagaccagtggacaacaggcagagcgtgctgaaaagtatccaagaggtgcagaaacgatttccagatggcatcccactactggatccgatcgatgacatggggatacaggaccaaggcctgaagaaagtgattcaaaaggtggaagccttcgagcacaggatgtactcacaccccctccataacgatcccaacctggaaaccgtttacactctgtgcgagaagaaagcgcaaattgccattgacattaagtcagcaaaacgcgagctgaaaaaggccagaaccgtactgcaaatggatgagctgaaatgtaggaaacgcgttctgaggaggttaggattcgcgacaagctccgacgtgatcgaaatgaaagggagagtggcctgtgagattagttcagcagacgaattattgctgacagagatgatgtttaacggactattcaacgatctctcagccgagcaggccacagccttgctcagctgcttcgtattccaagagaactcttctgagatgcccaaactcacagaacaactggctgggccgcttagacagatgcaagagtgtgcaaaacgcattgccaaggtgagcgcagaagccaagctcgaaatcgatgaggagacctacctgagctccttcaaacctcatttaatggacgtcgtgtacacctgggctaccggcgctacatttgctcacatttgtaagatgaccgatgtgtttgaaggtagtatcattagatgtatgaggagactggaggagctgctgaggcagatgtgccaagcagcaaaagctatcggaaacaccgagttggagaacaaatttgctgagggcataaccaagattaaaagggacatcgtctttgcagcctcactgtacctatag

SEQ ID NO: 192008 - DNA, 981 bp, synthetic construct
  misc_feature 1..981: note = Description of Artificial Sequence: Synthetic coding sequence
  source 1..981: mol_type = other DNA
atgggcgacatgggcgacccccccaagaagaagcggctgatcagcttgtgcgttggatgcggcaaccagatccacgaccagtacatattacgggtgtccccagacctcgagtggcatgccgcgtgtctgaaatgcgctgagtgcaatcaatatcttgacgagtcttgtacctgtttcgtgcgagacgggaagacctattgcaagcgcgattacatacgtctctacggcatcaagtgcgccaaatgttctatcggcttcagcaagaacgacttcgtgatgagggccaggagcaaagtctaccacatcgaatgcttcagatgcgtggcatgttcacgccaattgatccctggtgatgaatttgctctccgagaggacggcctattttgtcgagctgatcacgacgtcgtcgagcgcgcatccctgggagcgggcgatccactgagccccctccatccggcgaggccgctacaaatggccgctgagcccatcagcgcccggcagccagctctgagaccccatgtgcataaacagcccgaaaagacaacaagagtgaggacagtgctgaacgagaagcagctccacacactccggacctgttatgctgctaatcctcgtccagacgctctgatgaaggaacaactggtcgagatgacgggcttatccccccgagtgataagggtatggttccagaataagcgatgcaaggataagaagaggagtataatgatgaaacaactccagcaacagcagccaaacgataaaaccgccaacccggtcgaagtgcagagttaccaaccgccatggaaagtcctgtctgacttcgctctgcagagtgacattgaccagccagcttttcagcaattggtcaacttttctgagggcggcccaggttcgaattctaccggttccgaggtggcaagcatgtcctcccagttacccgacactccaaatagcatggtggcttcaccaatcgaagcttag

SEQ ID NO: 192009 - DNA, 270 bp, synthetic construct
  misc_feature 1..270: note = Description of Artificial Sequence: Synthetic coding sequence
  source 1..270: mol_type = other DNA
atgggcatcctgaagctgcaggtgttcctgatcgtgctgagcgtggcattaaaccacctgaaggccaccccaatcgagtcacatcaggtcgagaagaggaaatgtaatactgccacctgcgctactcagagactggccaacttcctcgtgcactcctcaaataacttcggggccattctgtctagcaccaacgtcggttcaaacacgtacggtaagcggaacgcagtcgaggttctcaaacgcgaacccttgaattacctgccactgtag

SEQ ID NO: 192010 - DNA, 240 bp, synthetic construct
  misc_feature 1..240: note = Description of Artificial Sequence: Synthetic coding sequence
  source 1..240: mol_type = other DNA
atgggcatcctgaagctgcaggtgttcctgatcgtgctgagcgtggcactcaatcacctgaaagccacaccaatcgagtcccaccaggttgagaagagaaaatgcaatacagccacatgtgcaactcagcgactggcgaatttcctcgttcattccagcaacaacttcggcgccatactgtctagcacaaacgtgggaagcaatacatacggaaagcgtaacgccgtggaggttttatag

SEQ ID NO: 192011 - DNA, 270 bp, synthetic construct
  misc_feature 1..270: note = Description of Artificial Sequence: Synthetic coding sequence
  source 1..270: mol_type = other DNA
atgggcatcctgaagctgcaggtgttcctgatcgtgctgagcgtggcattaaaccatctcaaggctaccccaattgaaagccatcaagtggaaaagagaaagtgcaatacagctacttgtgccacccagagactggctaattttctcgtccactctagtaataattttggggctatcctgtctagcactaatgtagggagcaacacctacgggaaaagaaacgcagtagaagtgctgaagcgagagccacttaattatctgccactgtag

SEQ ID NO: 192012 - DNA, 1449 bp, synthetic construct
  misc_feature 1..1449: note = Description of Artificial Sequence: Synthetic coding sequence
  source 1..1449: mol_type = other DNA
atgagcggccacaagtgctacccctgggacctgcaggaccggtacgctcaggacaagtccgtggtcaataagatgcagcagaaatattgggagaccaagcaggcattcattaaggcaacaggcaagaaggaggatgagcatgttgttgctagtgatgcagacctggatgccaaactcgaactgttccatagtatacaaagaacttgtttggacctgagtaaggcaatcgtactctaccagaagcgcatttgtttcctcagtcaggaggaaaatgaactggggaaatttttaaggagccagggctttcaggataagacacgcgctggcaaaatgatgcaggcaactggaaaggccctgtgcttttcctcacagcagagactggctctccggaaccctctgtgtcggttccatcaggaggtcgaaacgttccggcatcgagcgatctccgatacttggctcactgtcaatagaatggaacaatgtcggacagagtacagaggtgctttactctggatgaaggatgtgtcacaggagttggatccagacctgtacaagcagatggagaagttcagaaaggtacagacacaggtgagacttgctaagaagaactttgataaattgaaaatggacgtgtgtcaaaaggttgacctgctcggagcctccaggtgtaatctgctctcccatatgctcgccacctatcagacgaccctgttgcacttctgggaaaagacaagccacaccatggccgcaattcatgaatctttcaagggctaccagccatatgaatttacaacattgaagagtctccaggaccccatgaagaaactggttgagaaagaggagaagaagaagattaaccagcaggaaagtactgatgctgccgtgcaagagccctcacagctgatttcactggaggaagaaaaccaacgtaaggaatccagcagcttcaaaactgaggatggcaaatcgattctgagcgccttggacaaaggatccactcacacagcatgttccggtccgattgacgaactgctggacatgaaaagtgaggagggagcgtgtttgggcccagtggctgggaccccagaacccgaaggagcggataaggacgatctgctccttctctccgaaatcttcaacgcttcaagcctggaggaaggcgaattctctaaagaatgggctgcagtgtttggcgacggacaggtaaaggagcctgtccccacaatggcactgggcgagcctgaccccaaggcccagacaggatctggttttctgccctcccagctgctcgaccagaacatgaaagatctgcaagccagtcttcaggaaccagctaaagcggcgagcgatttgacagcgtggttcagtctgttcgctgacctggatccactatccaacccggatgctgtcggaaaaactgacaaggagcatgaattgctcaatgcttag

SEQ ID NO: 192013 - DNA, 774 bp, synthetic construct
  misc_feature 1..774: note = Description of Artificial Sequence: Synthetic coding sequence
  source 1..774: mol_type = other DNA
atgagcggccacaagtgcagctacccctgggacctgcaggaccggtacgcccaagacaaaagtgttgtgaataaaatgcagcagaagtactgggaaacgaagcaggcctttatcaaagccaccggcaagaaagaggatgagcatgtggtggccagtgacgcagatctggacgctaagcttgaactttttcatagtattcaaagaacttgtttggacttgagcaaggccatagtgctctatcagaagcggatctgttttttatcccaggaagagaacgaacttggcaagtttctcagatctcagggctttcaggacaaaaccagggccggcaagatgatgcaagctaccggaaaagctctgtgcttctcatcacagcaacgcttagcactgcggaaccccctgtgccggttccaccaggaggtcgagactttccgacatcgggccatatctgatacttggcttaccgtgaaccgaatggagcagtgccggacagaataccggggagcacttctctggatgaaagacgtcagccaggagctggatcctgatctgtacaagcagatggagaagttccggaaagtgcagacccaagtccgattagcaaagaaaaattttgataagctgaaaatggatgtatgtcagaaggtagatttgctgggtgcatcgagatgtaacctcctgagccatatgctggcaacctaccagctggcctgggaccagtggcaagggccaaggaatctcaaggttctgaccaagatgacttgctgttgctag

SEQ ID NO: 192014 - DNA, 1452 bp, synthetic construct
  misc_feature 1..1452: note = Description of Artificial Sequence: Synthetic coding sequence
  source 1..1452: mol_type = other DNA
atgagcggccacaagtgcagctacccctgggacctgcaggaccggtatgcccaggataaaagtgtggtgaacaagatgcagcagaagtactgggagactaaacaagctttcatcaaggccaccggcaaaaaagaggatgagcacgtagtggccagtgatgctgatttggatgctaagctggagcttttccattccatacagcgcacatgtctggacttgtcaaaagctatcgtactgtatcagaagaggatctgctttctctctcaggaggagaatgaactgggcaaattcctgcgcagtcagggattccaggacaaaactcgggcgggtaagatgatgcaggcaaccgggaaagcactgtgcttctccagtcagcagagattggcgctccggaatcctttatgcagatttcaccaggaggtggaaaccttccgccatcgggcgatctctgacacatggttaacagtgaacaggatggagcagtgcagaacagagtacagaggcgcactactgtggatgaaagacgtcagtcaagaactagatcccgatctctacaagcagatggagaaatttcgtaaggtgcagacccaggtgagactcgcaaaaaagaatttcgacaagctgaagatggacgtgtgccagaaagtggatctattgggggcttccaggtgtaatcttctgtctcacatgctcgctacataccagactactttattgcacttctgggagaaaaccagccacacgatggctgccatccatgagtcttttaagggttaccagccatacgagtttaccaccttgaaaagcctccaagaccccatgaagaaattggtcgaaaaggaggaaaagaaaaagattaaccagcaggagtctactgacgctgcagttcaggagccttcgcagctcatctccctggaggaggagaatcagaggaaagagtcttcttccttcaagacagaggatggaaagtcgatcctcagcgccctggataaggggtctacgcacaccgcatgctccggccccatagacgagcttcttgatatgaagagtgaggagggagcttgcttgggaccagtggctggtacaccggagcctgaaggcgcagataaagacgacctccttcttctctctgaaatctttaacgcctcttccctcgaggagggcgagtttagtaaagaatgggcagccgtctttggcgacgggcaggtcaaagagccggtgccgacgatggcattgggggaaccagacccaaaagcccagacgggatcggggtttctgccatcccaattactagatcaaaatatgaaagacttacaagctagcctccaggaacctgccaaggccgccagcgacctgacggcttggttctccttatttgccgatctggatcccctctcaaaccctgatgccgttggaaagacagataaagagcacgaactgctgaacgcctag

SEQ ID NO: 192015 - DNA, 1452 bp, synthetic construct
  misc_feature 1..1452: note = Description of Artificial Sequence: Synthetic coding sequence
  source 1..1452: mol_type = other DNA
atgagcggccacaagtgcagctacccctgggacctgcaggaccggtacgcccaggacaagagcgttgtgaataaaatgcagcagaaatactgggagacgaagcaggcatttattaaagccacgggaaaaaaggaggatgagcatgtagtggcctcagacgcggacctggatgcaaaactcgagctctttcatagtatccaaaggacctgcctagatttatctaaagctatcgtcctgtaccaaaaaaggatctgctttttgtcacaggaagagaacgaactagggaaattccttagaagccagggattccaggacaaaaccagggccggtaagatgatgcaagcaaccgggaaggcgctgtgctttagtagtcagcagagacttgccttgaggaatccactgtgccgcttccatcaggaggtggaaacttttaggcacagagcgatttccgatacatggttgactgtcaaccgcatggagcagtgtcgaacagagtataggggtgccttactctggatgaaagatgtttctcaggaacttgaccccgacttgtacaagcagatggaaaagtttagaaaggtacagacacaggtcaggctggccaagaaaaacttcgataaactgaagatggatgtttgccagaaggtggatttactcggcgcatccagatgcaatctccttagccacatgctggctacatatcagaccactttgttacatttctgggaaaaaacttctcatacaatggcagctatccatgagagctttaaagggtatcaaccttacgaattcacaacactaaaatcactgcaggaccctatgaaaaaactggtggaaaaggaagagaagaagaaaatcaaccagcaggagtcaacagacgccgccgtgcaggagccctctcagctgatctctttagaagaggaaaaccaacgaaaagagtctagttccttcaagaccgaggatggcaagagcatcctatctgcattggacaagggtagtactcacaccgcttgttctgggcccattgatgagctactggacatgaagtccgaggaaggcgcctgtctggggcctgttgctggcacgccagagcctgaaggtgctgacaaggatgacttattgcttctgtcagagatcttcaacgcttcttccctggaagagggggaattttccaaggagtgggctgccgttttcggggacggccaggtaaaggagcccgtgcccaccatggccctcggcgaaccggaccctaaggctcaaacagggtccggttttctgcctagccagttattagaccaaaatatgaaggaccttcaggctagtcttcaggaaccagccaaggccgcaagcgacttaacggcgtggttctccctgttcgctgacctggatccactgtccaatccggatgcggtcggtaagacagataaagagcatgagctgctgaacgcctag

SEQ ID NO: 192016 - DNA, 1452 bp, synthetic construct
  misc_feature 1..1452: note = Description of Artificial Sequence: Synthetic coding sequence
  source 1..1452: mol_type = other DNA
atgagcggccacaagtgcagctacccctgggacctgcaggaccggtatgctcaggacaagagcgtcgtgaacaaaatgcaacagaagtactgggagactaaacaggctttcataaaggcaactggcaagaaagaggacgagcatgttgtagctagtgacgccgacctcgatgctaaactggaactgtttcattcaattcagaggacttgcctagatttatccaaggccatagtcctgtatcaaaagaggatctgcttcttaagtcaggaggagaatgaactgggcaagttcctacgatcacaggggttccaggacaaaacaagagccgggaagatgatgcaggctaccgggaaggcgctttgtttttcgtcacagcagagactggcacttaggaacccgctgtgtaggtttcatcaagaagtggaaacctttcgacatcgtgccatatctgatacttggctcacagttaacaggatggaacagtgcagaaccgaatatcgaggcgctttactgtggatgaaagatgtatcacaggagctcgaccccgacctgtacaaacaaatggagaaatttaggaaagtccagacccaggtccgcctggctaagaaaaattttgataagctcaagatggatgtgtgtcaaaaagtggacttactcggggcttctcgctgtaatttattatctcatatgctggccacttatcagacaaccctgctgcacttctgggagaaaaccagtcacactatggctgctattcatgaatcgtttaaggggtatcagccatacgagttcactactcttaaaagcctgcaagatcctatgaaaaagttggtagagaaggaagaaaagaagaagatcaaccagcaagaatccacagatgccgccgtgcaggaaccgagtcagctgatatcattggaagaggaaaaccaacgaaaggagtctagcagttttaagactgaggacgggaagtcaatcctgtccgccctcgacaagggatccacccacaccgcgtgttcaggaccaatcgacgagctgctcgatatgaagagtgaagagggcgcgtgtctgggtcctgtggcgggaacaccagagcctgaaggggctgataaggatgatctgcttttactctctgagatctttaacgcttctagcctggaggaaggagagttctccaaagaatgggcagccgtgtttggcgatggacaggttaaggagccagtgcccaccatggccttgggcgagccagaccccaaggcacagacaggcagtgggttcctgccgtcgcagctgctagatcagaatatgaaggatcttcaggcctccctgcaggaaccggctaaggctgcgagcgatctgaccgcctggttcagcctttttgccgacttggatcctcttagcaacccggatgccgtgggaaaaaccgataaggaacatgagctgcttaatgcctag

SEQ ID NO: 192017 - DNA, 1539 bp, synthetic construct
  misc_feature 1..1539: note = Description of Artificial Sequence: Synthetic coding sequence
  source 1..1539: mol_type = other DNA
atgagcggccacaagtgcagctacccctgggacctgcaggaccggtatgctcaggacaaaagcgtcgtcaacaaaatgcagcaaaaatactgggaaactaagcaagcatttattaaagctacaggcaagaaagaagatgagcacgttgtcgccagcgacgccgacctcgacgctaagctggagctgttccattccattcagagaacatgcctcgacttgtccaaggcaatcgtcctgtaccaaaagcgtatttgctttctctctcaggaggagaatgaactgggcaaatttctgagatcgcagggttttcaagacaagactcgtgccggcaaaatgatgcaagcgacaggcaaggcactctgcttctctagccagcagagacttgccctccggaatccactctgtcgattccaccaggaagtggaaacgttccgtcatagagccattagcgatacatggctcaccgtgaaccgaatggaacaatgccggactgaatatcgcggggcactcctttggatgaaagacgtaagtcaggaactagatcctgacctctacaagcaaatggagaaatttcggaaggtgcagacacaggtgcggttagccaaaaagaacttcgacaagctcaagatggacgtttgtcagaaagtggatttgttgggcgcttctcgctgcaacctcttgagccacatgctggccacatatcaaactaccctgctgcacttctgggagaaaacatcacatacaatggctgccatccatgagagtttcaaagggtaccaaccttatgaattcaccaccctcaaaagcctccaggatcccatgaaaaaactggtggaaaaagaagagaaaaagaagatcaatcagcaggaaagcaccgacgccgccgtgcaggaacccagccagtacttacagaacatctgcctggaaatgaaggccaacagtgacatcaaaatgttgcagaaaggaaaggagggccagcaaattggcattctcatcagcctagaagaggagaaccagagaaaggaatctagttctttcaagacagaagacgggaaatctattctgtccgcacttgataagggttccacacatactgcatgttcaggaccaattgatgagcttctcgatatgaagtctgaggagggtgcctgcttaggacccgttgccggcacccccgagccagaaggtgccgacaaggatgatttgcttcttctgtcggagatttttaatgcatctagtttggaggaaggagagttctccaaggaatgggctgctgtgttcggcgacggccaagtgaaggaacctgtgccaacgatggctctgggtgaacccgacccaaaagcacagacagggagtggattcttacccagccagctgctggaccagaacatgaaagacctgcaagctagtctgcaagagcccgccaaggctgctagtgacctcactgcctggttttccctgttcgccgatcttgatcctctgtcaaatcctgacgctgtgggcaagactgacaaggagcacgagttactcaacgcgtag

SEQ ID NO: 192018 - DNA, 405 bp, synthetic construct
  misc_feature 1..405: note = Description of Artificial Sequence: Synthetic coding sequence
  source 1..405: mol_type = other DNA
atgagcggccacaagtgctacccctgggacctgcaggaccggtacgctcaagacaagagcgtcgtgaacaagatgcagcagaagtactgggaaactaaacaggctttcatcaaggcgaccgggaaaaaagaagacgaacatgtggtggcgtctgatgcagacttggacgccaagctggagctctttcactctatccaaaggacttgcctcgacctgtctaaagcaatcgtgctctatcaaaagcggatctgtttcttgtcacaggaggaaaacgagctgggcaaatttctccgctcccaaggctttcaggataaaacacgagccggaaagatgatgcaggcaaccggaaaggccctgtgcttctcctcacaacagcgtcttgccctgagaaaccccttatgctag

SEQ ID NO: 192019 - DNA, 489 bp, synthetic construct
  misc_feature 1..489: note = Description of Artificial Sequence: Synthetic coding sequence
  source 1..489: mol_type = other DNA
atgagcggccacaagtgcagctacccctgggacctgcaggaccggtacgctcaagacaaatccgtcgttaacaagatgcaacagaaatactgggaaacaaagcaagcttttatcaaagcaactggcaagaaggaggacgagcacgttgtggcctccgacgctgatctggatgcgaagttagagctgtttcatagtatccagagaacgtgcctcgatttatccaaagcaatcgtgttgtaccaaaagagaatctgcttcctgagccaggaagagaacgagctgggtaaattcctgcgctctcaagggtttcaagacaagactcgtgccgggaaaatgatgcaagctacagggaaggctttgtgtttttcaagccagcaaaggctagcgcttcgcaatcccctctgtagattccaccaggaggtcgagacattcagacatcgtgccatcagtgatacttggttaacggtcaatcggatggagcagtgctag

SEQ ID NO: 192020 - DNA, 666 bp, synthetic construct
  misc_feature 1..666: note = Description of Artificial Sequence: Synthetic coding sequence
  source 1..666: mol_type = other DNA
atggccgccgcccggcccagcctgggccgggtgctgcccggcagcagtgtgcttttcctgtgtgatatgcaggaaaaatttcggcataatatcgcctattttccccagattgtcagcgtggcagcccggatgctgaaagtggctagactcctggaggtgccggtcatgctgactgagcagtaccctcaaggcttaggcccaactgtgcccgaactgggaaccgaagggctcagacctctcgcgaagacctgttttagtatggtacctgctttgcagcaggagcttgacagtcgaccacagttaaggtctgtgcttttgtgcggaatcgaagctcaggcttgcatccttgacccacggagctatcctggcctggctttgaccagtttgtatccgcagaataccactctggatctgttggacagaggtctgcaggtgcacgtggtcgtggacgcttgttcttccaggagtcaagtcgataggttggttgcattggctcgaatgcggcaatccggggcattcctcagtacaagcgaaggcctgatcctgcagctcgtgggcgacgcggttcacccacagtttaaagagattcagaaactgattaaggagcctgcgccagactctggactcctgggcctatttcaaggtcagaactccttactccattag

SEQ ID NO: 192021 - DNA, 618 bp, synthetic construct
  misc_feature 1..618: note = Description of Artificial Sequence: Synthetic coding sequence
  source 1..618: mol_type = other DNA
atggccgccgcccggcccagcctgggccgggtgctgcccggcagctcagtgttgtttctgtgcgacatgcaggaaaagttccgacacaacatcgcttattttccacagatcgtgagcgtcgcagccagaatgctcaaggtcgctcgcctactcgaagtgcccgtcatgctaactgaacagtatccccagggcctggggcccacggtgccagaactaggcactgaaggactccggccactagctaaaacttgttttagcatggtgcctgccctgcagcaggagctggactcccgccctcagcttcggtccgtgttgttgtgtgggattgaggcgcaagcttgcatcctcaacacaactctggaccttttggaccgaggtttacaggtccatgtggtggttgatgcttgcagctcaagaagccaggtggaccggctggttgcgctggctagaatgaggcagagcggggcctttctgagtacctcggagggtctcattctgcaactggtaggcgacgccgtgcatcctcagttcaaagagatacagaaactcattaaagagccagccccagattcgggactgctggggctgttccagggacagaatagtcttttgcactag

SEQ ID NO: 192022 - DNA, 408 bp, synthetic construct
  misc_feature 1..408: note = Description of Artificial Sequence: Synthetic coding sequence
  source 1..408: mol_type = other DNA
atggccgccgcccggcccagcctgggccgggtgctgcccggcagctctgttctttttctttgcgacatgcaggaaaagttccgccataatatcgcttacttcccccagatcgtgagcgtggccgccagaatgttgaaaaatacaactctagatctgctcgaccgcggactccaagtacatgtggtagttgatgcatgcagctcccgcagtcaagtggatcggctcgtggccctggctcggatgaggcaaagcggtgcatttctgtctacatccgagggtctcatactgcaacttgtgggcgatgccgttcacccacagtttaaagagatccagaagcttatcaaagagccagcccctgattcaggtttactgggcctttttcagggtcagaatagcctcctgcattag

SEQ ID NO: 192023 - DNA, 1101 bp, synthetic construct
  misc_feature 1..1101: note = Description of Artificial Sequence: Synthetic coding sequence
  source 1..1101: mol_type = other DNA
atggccggccccgcctggatcagcaaggtgagccggctgctgggcgcgttccacaaccctaagcaagttacccggggcttcacagggggagtgcaaaccgtaaccctcatccctggagacggaattggtccagagattagcgcagctgttatgaagatattcgacgccgcaaaagcacccattcagtgggaggagcgtaacgtgaccgctattcagggtcccggaggcaagtggatgatcccttccgaagcaaaagaatcgatggataagaacaagatggggctgaaagggccattgaaaacaccaatcgccgccgggcacccttcaatgaacctcctacttcgtaagaccttcgacctgtatgctaatgtcagaccatgtgttagtattgaaggctacaagactccctacacggacgttaatattgttaccatcagggaaaacacagaaggggaatatagtgggattgagcacgttatcgtcgatggggttgtgcaaagcatcaagcttattaccgaaggagcttccaagaggatcgcagaatttgcattcgaatatgcaaggaataatcacagatctaacgtaacagccgttcacaaggcgaacattatgaggatgtccgacgggttatttctacagaagtgccgtgaagtggcagaaagttgtaaggatatcaaatttaatgagatgtacctggacacggtctgcctcaatatggtgcaagatcctagccagttcgatgtgctggtcatgccaaacctctacggcgatatcctgagcgacttgtgcgcgggactgattggggggctgggcgttacccctagcgggaacattggggccaatggtgtagccatttttgagagcgttcacggcacagcccccgatattgccggaaaagatatggcaaatcctacagctcttctgttgagtgctgtgatgatgctgaggcacatgggtttattcgaccacgcagcccgcattgaagcagcttgttttgccacgataaaggatgggaagagccttacgaaggacctcggtggaaatgctaaatgctcagacttcacagaggaaatctgccgccgggttaaagatttggattag

SEQ ID NO: 192024 - DNA, 774 bp, synthetic construct
  misc_feature 1..774: note = Description of Artificial Sequence: Synthetic coding sequence
  source 1..774: mol_type = other DNA
atgaacctgctgctgcggaagaccttcgacctgtacgccaacgtgcggccatgcgtttcaatcgaaggatacaagaccccctacacagacgtcaatatagtgaccatcagagagaataccgagggagagtactccggcatcgagcacgtgattgtggatggagttgtgcaatcgattaagctgattacggagggcgcgtctaagcgtatcgcagagtttgcgtttgagtacgctagaaataaccatcgttcgaacgtaacagccgtgcataaggctaatatcatgcggatgagtgacggcttgttcctgcagaagtgtcgtgaagtggccgagagctgtaaggatatcaagttcaatgaaatgtatctcgacactgtgtgtctgaatatggtgcaggatccttcacagttcgatgtgctggtcatgcctaacctgtacggagatattttgagtgacctgtgtgcagggcttatcgggggtctgggggtgaccccatccggtaatattggtgctaacggggtcgcaattttcgaatcagttcatggaacggcccccgacatcgctggcaaggacatggcgaatcctaccgctctgctgctgagcgctgtgatgatgctgagacacatgggtttatttgatcacgccgcgaggatcgaagccgcctgttttgcaactattaaggatgggaagagcctcactaaggacctggggggaaacgccaagtgcagtgacttcaccgaggagatctgccgcagagtgaaagaccttgattag

SEQ ID NO: 192025 - DNA, 495 bp, synthetic construct
  misc_feature 1..495: note = Description of Artificial Sequence: Synthetic coding sequence
  source 1..495: mol_type = other DNA
atggccgccctgagcggcgtgcggtggctgacccgggccctggtgtcagcaggtaatccaggtgcgtggcgaggcctgagtacgtcggcagcagctcacgccgcgagccggagccaggccgaggatgtgcgtgtagagggcagcttccccgtgaccatgctgcctggcgacggagttgggccagaactgatgcatgctgtcaaagaagtgtttaaggccgctgcagttccagtggagtttcaggaacaccacctatctgaagtgcagaacatggcctctgaagaaaagctggaacaggtcctctcatctatgaaagaaaataaagtggctattatcgggaagattcatacgccgatggagtacaaaggcgaattagcttcctacgacatgcggttgaggcgaaaactggatctgttcgctaacgtggtccacgtgaagtcactgcccgggtatgattccgcccaacagagcagacctggcgatcatagcagatag

SEQ ID NO: 192026 - DNA, 1158 bp, synthetic construct
  misc_feature 1..1158: note = Description of Artificial Sequence: Synthetic coding sequence
  source 1..1158: mol_type = other DNA
atggccgccctgagcggcgtgcggtggctgacccgggccctggtgtccgccggaaatccaggagcgtggcgcgggctgagcacatctgctgctgcacacgccgcaagtcgatcacaagctgaggacgtgagggttgagggttcttttcccgtgactatgctgcccggggacggcgtggggcccgaactgatgcatgcggtgaaggaggttttcaaagcggcagcagtccctgtcgaatttcaggagcaccatttaagtgaggttcagaacatggcctccgaggagaagctggaacaagtgctgagcagcatgaaagagaataaagtcgccataattggcaaaatacataccccaatggagtacaagggggagcttgcgtcctacgatatgcgtctgaggaggaaactggatctgtttgccaatgtggttcatgtgaaatccctccctgggtatatgactcggcacaataatctcgacctcgtcatcattagggaacagacggaaggtgaatactcttccctggaacatgagtcggcacgtggtgttatcgagtgcctgaaaatcgtgacgagggcaaaatcacagagaattgcaaagttcgcctttgattatgctacaaaaaaaggacgcgggaaggtgacggccgtgcacaaggccaacatcatgaagctgggggacggactgttcctgcagtgctgcgaagaagtcgccgaactctaccctaagataaaattcgaaaccatgatcatcgataattgttgcatgcagctggtccagaacccttaccagttcgacgtgctggtcatgcccaatctctacggaaacattatcgacaatctggctgctggattggttggcggcgccggagtggtgcccggtgaatcctactccgccgagtatgcggtctttgaaacaggagccaggcacccttttgctcaggccgtgggacggaatattgctaaccccactgcgatgctgctatccgccagtaacatgctccgacacctgaatctagagtaccattcctcgatgatcgctgatgccgtgaagaaggttatcaaggtggggaaagttcgtaccagggatatgggcggttacagcacaacaactgatttcatcaaatctgtgattggacacctgcagacaaaggggtcctag

SEQ ID NO: 192027 - DNA, 1152 bp, synthetic construct
  misc_feature 1..1152: note = Description of Artificial Sequence: Synthetic coding sequence
  source 1..1152: mol_type = other DNA
atggccgccctgagcggcgtgcggtggctgacccgggccctggtgtccgctgggaacccaggagcatggcggggcttatcaacaagtgcggcggctcatgcagcttctcggagtcaggccgaggatgtgcgagtggagggcagttttccagttaccatgctgccgggcgatggcgtaggacccgagctcatgcacgcagtgaaagaggtgttcaaggcggccgccgtgcctgtcgagttccaagaacaccacttgtccgaagtgcagaatatggcaagcgaagagaagttggaacaggtgttgtcttccatgaaggagaacaaggtcgctatcattggcaaaattcacacacccatggagtacaaaggtgaacttgccagctacgatatgaggctgaggagaaagctcgacttgtttgcaaacgtcgttcacgtgaaatcactgcccggatatatgacccgccataacaacctggacctcgttattatccgggaacaaacagaaggagaatactccagcctcgagcacgaatcagcaaggggggttattgaatgcctcaagattgtcactcgcgcgaagagccagcgcatagccaagtttgctttcgattacgcaacaaaaaaaggaagaggcaaggtcacagcggtccataaagctaacattatgaagctaggtgatggcctgttccttcagtgctgcgaagaggtcgctgagttgtatcccaagattaaatttgagactatgatcatcgacaactgttgtatgcaactggtccagaacccctaccagtttgatgtgcttgtaatgcccaatctatatggcaacatcattgataacctcgccgccggcctagttggaggagccggcgtcgtgcccggtgagtcatactccgcagagtacgcggtgttcgagacaggcgcccggcatccttttgcccaggctgtcggccggaacatagccaaccctaccgccatgctgttatctgcctctaatatgctgcgacacttgaatctcgagtatcactcctctatgattgcggatgccgtgaagaaggttataaaggttggcaaagttaggacaagtgacatgggtggttacgctacctgccacgacttcacagaagcagtcattgctgctctcccgcacccctag

SEQ ID NO: 192028 - DNA, 702 bp, synthetic construct
  misc_feature 1..702: note = Description of Artificial Sequence: Synthetic coding sequence
  source 1..702: mol_type = other DNA
atgaagatgggcgagcggtggagcagcctgttccccttccccgtgtctccctcttgctgtttcctgcttacccagagcgcacggggcgttattgagtgtctgaagatcgttacccgtgccaagtcacagcgaattgccaaattcgcttttgattatgctaccaagaaaggaaggggcaaggtgacagccgtgcacaaagccaacataatgaagctgggtgatggtctgtttttacagtgttgtgaagaggtggccgaactgtatcccaaaataaagtttgaaactatgataattgacaactgctgtatgcagctggtccagaatccttaccagtttgatgtcttggtcatgcctaacctatacgggaatataatcgacaatctggccgccggccttgtcggcggcgcgggagtcgtgcccggcgagtcgtatagcgccgagtatgccgtgtttgagaccggagctcgacacccattcgcccaggctgtaggccgaaacattgccaaccctacagctatgttactttcagccagcaacatgctgcggcacctgaatcttgaataccacagctcaatgatcgctgacgctgtcaagaaagtgattaaggttggaaaggtccgaacaagagacatgggcggttatagcacaacaacagactttataaagagcgttatcggccatttacagacaaaggggagctag

SEQ ID NO: 192029 - DNA, 795 bp, synthetic construct
  misc_feature 1..795: note = Description of Artificial Sequence: Synthetic coding sequence
  source 1..795: mol_type = other DNA
atggagagcggcaagaccgccagccccaagagcatgcccaaggacgcccagatgatggctcagattcttaaagacatgggcatcacggagtatgaacctagggtgataaatcagatgctggaattcgcctttcgctatgtgactactatcctcgacgacgctaagatctactcaagccatgctaagaaggccaccgtggacgctgatgacgtgcggctggccattcagtgcagggctgatcaatcttttacctcccctcccccgagagacttccttctcgacattgctagacagcgtaatcaaaccccactgcccctgatcaagccttattccggcccgaggttgccaccagatcgctactgcctcactgcacctaattatcggctgaagagcctgcagaagaaggccagtacttctgccggcaggatcacagtacctcggctgtcggtgggctcggttacctcccgaccgagcactcccacactcggcacgcccactccacagaccatgtctgtgtccactaaggtcggcacgccaatgtccctgacagggcagcggttcactgtccagatgccgaccagccagagcccagccgtcaaggcatccataccagccacctccgccgtccagaacgtcttaataaaccccagcctaatcgggtctaaaaatattctgatcactaccaacatgatgtctagccaaaacaccgctaatgagagcagcaacgccctaaagagaaaacgagaggatgatgacgacgacgacgacgacgacgatgactatgacaacctgtag

SEQ ID NO: 192030 - DNA, 906 bp, synthetic construct
  misc_feature 1..906: note = Description of Artificial Sequence: Synthetic coding sequence
  source 1..906: mol_type = other DNA
atggccatccggcggaaccgggtggccctgaagggcaacatcgagaccaaccataatctgccacctagccacaaatcaaggaataatattctgagaaccagcctggatctctacgctaatgtcatccactgcaagtccttaccgggagtcgtgacacggcataaagatatcgatatcctgattgtgagagagaatacagagggggaatactcatctttggagcacgaatctgttgctggcgtcgtagaaagcctgaagatcattacgaaagccaaaagtcttaggatcgcagaatacgcctttaaactcgcgcaggagtctgggcgtaaaaaggttacagcagtgcacaaagctaatattatgaaacttggcgacggtctctttctgcaatgctgtcgggaggtggccgcacggtacccgcagatcactttcgaaaatatgatcgtagataacactacgatgcagctcgtctctagacctcagcaattcgacgtcatggttatgcctaacttgtacggtaacattgttaataacgtatgtgccggcctagtgggaggacccggcctcgtggcaggcgctaattatggtcacgtttatgccgtgtttgagactgccacgcgcaatacagggaaatcaatcgccaacaaaaacatagcaaaccctacagcaacactgttagctagttgtatgatgttggatcacctgaagcttcactcttatgccacttctattcgcaaggccgttctggcctccatggacaatgaaaatgggctggtgtgcgccgagccggcatgtgtgctgcagatgcatacacccgacattggaggccagggaacgactagcgaagcgatccaagacgtgataaggcacatccgagtgatcaacggcagagcagtagaagcctag

SEQ ID NO: 192031 - DNA, 1143 bp, synthetic construct
  misc_feature 1..1143: note = Description of Artificial Sequence: Synthetic coding sequence
  source 1..1143: mol_type = other DNA
atggccctgaaggtggccaccgtggccggcagcgccgccaaggccgtgctaggaccggcacttctttgccggccttgggaggtgctgggggcacacgaggttcccagtcgaaacatcttcagtgagcagacaatcccaccatccgcaaagtatggcggccgacacacagtgaccatgatcccaggggacggaatcggacccgagctcatgctgcatgtcaaatctgtttttcgccacgcctgtgtccctgttgattttgaggaagtacacgtctcctccaacgccgatgaggaggatatcaggaatgccatcatggcaatccggcgcaaccgagttgctctgaagggcaatattgaaaccaaccacaatctacctccgagccacaagtcccggaacaatattctgcggacatcgctggatctgtatgctaacgtcatccactgcaagtccctccctggcgtggttactagacataaggatattgacatccttattgtccgggaaaacacagagggcgagtattcatccctcgaacatgagtctgtggcaggcgttgtggagtcgttaaaaattatcacgaaagctaagtcactccgtatagcagagtacgcattcaagctggcacaggaaagcggcagaaagaaagtgacagcagtgcacaaggccaacattatgaaactgggcgacgggctgtttctgcagtgctgtcgggaagtggccgccaggtacccccaaattacctttgagaacatgatcgttgataacaccactatgcagttggtctcccgtccacaacagtttgacgtaatggttatgccaaatttgtatggcaacatagtaaacaacgtctgtgcaggtctagtggggggcccaggcctggtggctggtgcaaattatgggcacgtttacgccgtattcgagaccgcaacccgcaacactgggaagtccatcgccaacaagaacatcgccaacccaaccgcgacgctgttagcgtcatgcatgatgttggaccatctgaaactgcacagttatgccacctccatacgaaaggccgtcctcgcttctatggataacgaaaatgtccgcttcccttctcacccgacgctgttaccccggccggtttcaccctgtagcctgctctag

SEQ ID NO: 192032 - DNA, 525 bp, synthetic construct
  misc_feature 1..525: note = Description of Artificial Sequence: Synthetic coding sequence
  source 1..525: mol_type = other DNA
atgtacaccttcgaccaggccaccggcggcaccgcccagttcgaggcccactcagatgctcaggccttggtccttctggatgtcactcctgaccagagcatggtggatgagggaatggcaagggaggtgattaacagaatccagaagcttagaaaaaagtgtaacctcgtcccaactgacgaaatcaccgtatattacaaggcgaaatctgagggtacctatttgaattcagtgattgagagccacacagaattcatttttacaacaatcaaagctccactgaaaccttaccctgtaagcccgtcggataaagtcctgattcaggagaaaacccagctgaagggtagtgagttagaaatcaccctgactcgtggctccagcctcccaggtccagcatgcgcctacgtgaacctgaacatttgtgccaatggatctgaacagggcgagatgcagtggattatccctgaaatttaccatttctggaagcctcgatggtcaattgccccaggaaagtcaaagaggtag

SEQ ID NO: 192033 - DNA, 525 bp, synthetic construct
  misc_feature 1..525: note = Description of Artificial Sequence: Synthetic coding sequence
  source 1..525: mol_type = other DNA
atgtacaccttcgaccaggccaccggcggcaccgcccagttcgaggcccacagcgatgctcaagcattggttctgttagacgtgactccggatcagtcaatggtggatgaggggatggctcgagaagtcattaatagaatccagaaactgaggaaaaagtgtaatctggtgcccacggatgaaataaccgtatactacaaggcaaagagcgagggaacgtatctgaacagtgtgattgagtcccatactgaattcatattcactacaatcaaggctccactaaaaccctacccggtgagtccctcagacaaagtgctgatccaggaaaaaacccagttaaaaggatctgagctggagattactctgacccgcggttcttcacttcctgggcccgcgtgcgcctatgtgaatctgaacatttgcgccaatggttcagaacagggagagatgcaatggatcatcccggagatttaccacttttggaaacctaggtggagcattgctcccggcaaatcaaagcggtag

SEQ ID NO: 192034 - DNA, 3789 bp, synthetic construct
  misc_feature 1..3789: note = Description of Artificial Sequence: Synthetic coding sequence
  source 1..3789: mol_type = other DNA
atgctgcagcaggtgcccgagaacatcaacttccccgccgaggaggagaaaatattggaattctggaccgagttcaactgttttcaggaatgtttgaaacagtcaaaacataagccgaaatttaccttttatgacgggccgcccttcgcgaccggcctaccccattacgggcatatcctggccggaacgattaaggacatcgtgacaagatacgctcaccagagcgggtttcacgttgaccgtcggttcggttgggactgtcacggtctccctgtggagtacgaaattgataaaacgctcgggatcagaggccctgaagatgttgctaagatggggatcacagaatacaataatcagtgtcgcgctatagttatgcgctatagcgcagagtggaagtctacagtcagcaggctggggagatggatcgacttcgataatgactacaaaactctgtaccctcaatttatggaaagtgtctggtgggtattcaaacagctctacgataagggactcgtgtaccgaggtgtgaaagtcatgccgtttagcaccgcctgcaacaccccgctctcgaactttgagagccaccaaaattacaaagacgtccaggacccctcagtgttcgtcacattccctctggaggaggatgagacagtgtcgctggtcgcctggacgactaccccctggacgctgccaagcaacctcgccgtgtgcgtcaatcctgaaatgcaatacgtgaagatcaaagatgtggcgagaggtcgactgttaatattaatggaagcccggttatctgccctttacaaacttgagtccgattacgagatcctggaacgctttcccggggcctacctgaagggcaagaagtacaggcctctattcgattactttttgaaatgcaaggagaacggagccttcaccgtacttgtggataactacgtcaaagaagaagaaggaactggagtggtgcaccaggcaccttactttggcgcggaagactatcgggtatgcatggattttaacattattcgaaaggattctctgcctgtctgccccgtggacgctagtggctgctttacaacagaggtcacggattttgccgggcaatacgtgaaggatgcagataaaagcataatcaggacccttaaagagcaaggccgtttactggttgctaccacattcacccacagctatcctttctgttggaggagtgacactccacttatttacaaagcggttcccagctggtttgtgagggtcgagaatatggttgaccagcttctgagaaataatgacctgtgttactgggtccccgaacttgtcagagagaaaagatttggtaactggctgaaggacgcccgggattggactatctcaagaaataggtattggggtacccccatccccctttgggtgtccgacgactttgaggaggtggtatgtatcggtagtgtggccgagctagaggagctgagcggcgccaagatttcggacctgcatagagagtctgtggaccacctgaccataccctctcgatgcgggaagggcagccttcacaggatatcagaggtttttgattgctggtttgaaagcgggtctatgccatatgcacaggtacactacccattcgagaataaacgggaattcgaagatgcttttccagctgactttatcgctgaaggtatcgaccagacacgtggatggttttataccctcctggtgttggctaccgcgttgtttggccagccccccttcaaaaacgtgatcgtgaatggattagtgctagccagcgacggacaaaaaatgagcaaaagaaaaaagaattatcccgaccccgtaagcatcatacagaagtacggcgcagacgccctgcgtctatatctcattaactctcccgtcgtgagagctgagaatttgcgctttaaagaagagggggttcgtgatgttttgaaagatgtactcctgccctggtataatgcctaccggtttctgatccagaacgttctgcggctgcaaaaagaagaggagattgagttcctctataatgagaacactgtccgggaatctcccaatattaccgacaggtggatcttatccttcatgcagtccctgatcggattcttcgaaacagaaatggcagcgtacaggttatacactgtcgtgccacggctcgtgaagttcgtggatatcttaacaaactggtacgtcaggatgaacaggcgtcgacttaaaggggaaaatggcatggaggattgcgtgatggctcttgagacattgttcagcgtgctcctctcgctgtgccgcctcatggctccatatacgccatttctgacagagttgatgtaccaaaatttaaaagtcctgattgatcccgtgtctgtgcaagacaaggacactctcagtattcattacctaatgctgccccgtgtgagggaggagttaatcgataagaaaacagaatctgctgtcagccagatgcaatccgtgatcgaactggggagagtgataagagacagaaagaccattcctattaagtacccactcaaagagatcgtcgtcattcatcaggatcccgaagccctcaaggacattaagtcattagaaaagtatattatcgaggaattgaatgtgcgaaaggtcactctgtccacagacaagaacaaatacgggatccgtctccgagccgaacccgatcacatggttctgggcaaacgtctgaagggtgcttttaaagcagttatgactagtatcaaacaactctcttcagaagagctcgagcagttccagaagacgggcacaattgtagtcgaaggccatgaactgcacgacgaagacattagactgatgtacacctttgatcaggctactggcggcactgctcagttcgaggctcacagcgatgcacaggccctggtgctgttggacgtgaccccagatcagagcatggtcgacgagggaatggcgagggaggtgattaaccgaatccaaaagttgaggaagaagtgtaacctggtacctaccgacgaaataaccgtgtactacaaagccaagtcagagggaacatacctgaactcagtgatagagagccacacagagtttatctttacaacgatcaaagctcccttaaaaccataccctgtgagtccctcggacaaggtgctcatccaggaaaagacccaacttaaaggttccgaactcgaaatcactttgacaagggggagctctctgcccggcccagcttgtgcctatgtgaatctcaacatttgtgcaaacggctcggagcagggtggcgtccttctgctcgagaatcccaagggcgataataggcttgacctcctaaagctgaaatcagtggtgacttccattttcggggtgaaaaataccgagctggctgtgttccatgatgagaccgagattcagaatcagaccgacttgctgtccctctcgggaaagacattatgtgtgactgccgggtctgcaccctctcttatcaattcatctagcaccctgttgtgccaatacatcaacctccagcttctgaacgcaaaaccccaagagtgtctgatgggcaccgtgggaaccctcctgttggaaaatcccttgggccagaacgggcttacgcatcagggcctgctgtatgaagcagccaaagtgttcgggttgaggtcccggaaactaaagctctttctgaatgagactcaaacccaggagatcaccgaggatatccctgtcaaaaccttgaatatgaaaacagtttatgtgagcgttttaccgacgacagccgacttctag

SEQ ID NO: 192035 - DNA, 3729 bp, synthetic construct
  misc_feature 1..3729: note = Description of Artificial Sequence: Synthetic coding sequence
  source 1..3729: mol_type = other DNA
atgctgcagcaggtgcccgagaacatcaacttccccgccgaggaggaaaaaatcctggagttttggactgagtttaactgtttccaggaatgcctgaaacagagcaagcacaaacccaagttcacgttttatgacggccctcccttcgctactggcctcccccactacggccatatcctggctggaacgataaaggatatcgtaaccagatatgcccatcaatcgggcttccacgtggaccgccggttcggctgggactgtcacgggttgccagttgaatacgagatcgataaaactttgggtatacggggaccagaggacgtggctaaaatgggcattacagaatacaataaccagtgtagagcaattgtgatgcgctactccgctgagtggaagtcaaccgtatccagacttggacgatggatcgacttcgacaacgactacaagaccttatatcctcaatttatggaatccgtttggtgggtttttaagcaactttacgataaggggctcgtgtacagaggggtgaaagttatgccctttagcaccgcctgcaacacacccttatcgaacttcgagtctcatcaaaattataaggatgtgcaagatccatccgtgttcgtcacattccccctggaagaagacgagaccgttagtctggttgcctggacgacgaccccttggaccctcccttccaacctggccgtttgtgtgaatcctgagatgcagtatgtcaagattaaggatgtggcccgaggaagactgcttatcctaatggaagcacgtctgtcagctctgtataagcttgaatcagattatgaaattctggaaaggtttcctggggcctatctcaagggaaagaagtatcggccactgttcgattacttcctgaaatgtaaagagaacggggcattcacagtgctcgtggataattatgtgaaggaggaggaggggaccggggtcgtgcaccaggccccttactttggggccgaagactatagagtttgcatggatttcaacattatcaggaaagactctctaccagtgtgtcctgtggacgcctctggttgcttcactaccgaagtgacggattttgccggccagtatgtcaaagatgctgacaaaagcattatccggaccctgaaggagcaaggcagactcctggtggctactacgttcacccactcttaccccttttgctggagatccgacacccccctgatttacaaggccgtgccctcctggtttgtccgagttgagaatatggtagatcagctacttcgcaataatgacctatgctactgggtgccagagctggtgcgcgagaaacgctttggcaactggctgaaggacgcccgggactggaccatctcgcgaaatcgttactgggggacacctatacctctgtgggtatcggatgattttgaagaggtcgtatgtataggatctgtggcggaactggaagagctcagcggagccaagatatccgacctacacagggagtctgtcgaccatctaaccattccttctcgctgtgggaaggggtccctacatcggatctccgaagtatttgattgttggtttgaaagcgggtctatgccgtacgcacaggtccactatccttttgaaaataagagagagtttgaagatgcgttcccagccgattttattgctgaaggaatcgatcagacgcgagggtggttttatactctcttggtactcgctaccgcactctttggccagccccctttcaaaaacgttattgtgaatgggctggttctggcatcagacggccagaaaatgtccaaacggaagaaaaattatcccgacccggtctccataatccagaagtatggggcggatgccctgaggctatatctgattaatagccctgttgtgagggctgagaaccttaggttcaaggaggagggcgtgagggacgtgctcaaggacgtgctattgccctggtataacgcctatcgattcttgattcaaaacgtcctcaggttgcagaaggaggaagaaattgaattcttgtacaacgaaaacaccgtccgggaaagcccaaatatcactgatagatggatcctctcttttatgcagtcactgattggcttctttgagacagaaatggcagcttatagattgtatacagtggtcccaaggctggtgaagtttgtggatatactgacaaactggtatgtgcgcatgaacaggaggcgcctgaaaggtgagaatgggatggaagactgcgtgatggcactggaaacactgttcagtgtgcttttaagtttgtgtaggttgatggctccctatactcctttcctaacggaactcatgtaccaaaatctgaaggtccttatcgatccggtgtccgtacaggacaaagacacactctccatccactacttgatgctacctagagtgcgcgaggagctaatcgataaaaaaacagagtcggccgtatcccagatgcagagtgtgatcgaactggggcgagtgattagagaccggaagaccataccaataaagtatcctctgaaggagatcgtagttattcatcaggacccagaagctctgaaggatataaagtctctggaaaaatatatcatcgaagagttgaatgtgaggaaagtcaccttgagcaccgacaagaataagtatggaatcagactgagagcagagcctgatcacatggtgttggggaaacgcctcaaaggagccttcaaggccgttatgacatctataaagcaattgtccagtgaggagctggaacagtttcaaaagacaggaaccatagtggtggagggccatgagttacatgacgaggacattcgactgatgtacacgttcgatcaggccactggcggcacagcccagttcgaggctcactctgacgcccaggccctggtcttgctggacgtcaccccagaccagtcaatggtagatgagggcatggcgagggaggtcataaacagaattcagaagcttcgcaagaagtgcaacctggtcccaacagatgagattaccgtgtactacaaagcaaagtctgagggcacctatttgaacagtgttatagagtcccacaccgaatttattttcaccactatcaaggcgccactcaagccctacccagtgtccccttctgacaaggtgctcatccaagagaagacacaactgaagggttcagagctcgaaataaccctcactcgcggctccagcctgcccggtcctgcatgtgcctatgtcaatctcaacatctgcgcgaacggctcagaacaaggtggcgtcctgctgcttgagaatccaaagggagacaatcgtctggatttgcttaagttgaaatcagttgtcacctcgatatttggggtgaagaatacagagttagccgtgttccacgatgaaactgaaatccaaaaccaaaccgatttactatcactgtcaggtaagactctctgcgttactgcaggaagtgcccccagtctgatcaactcctcatccactttgctttgtcagtacattaatcttcagcttcttaacgctaagccccaggagtgcctgatggggaccgtggggaccctgctgttagaaaatcccctgggccagaacggactgactcatcagggcttactctacgaggcagccaaagtttttggcctccgcagcaggaaactgaaactcttcctgaatgagacacagacacaagaaattactgaagacatcccttag

SEQ ID NO: 192036 - DNA, 993 bp, synthetic construct
  misc_feature 1..993: note = Description of Artificial Sequence: Synthetic coding sequence
  source 1..993: mol_type = other DNA
atgctgcagcaggtgcccgagaacatcaacttccccgccgaggaggaaaagatccttgaattctggacggagttcaattgcttccaggagtgtctgaagcagtctaagcacaaaccaaaatttactttctatgacgggccacccttcgctacaggactcccccactacggccacatactggctggaaccatcaaagacatcgttactcggtacgctcaccagtctgggtttcatgttgacaggcgattcggctgggactgccatgggcttcccgttgagtatgaaattgataagacactgggcattagggggcccgaggatgtggcaaagatggggattacagaatataacaaccagtgccgggccatcgtaatgcgctattcagctgagtggaagtccaccgtgagcaggcttggtagatggattgacttcgataatgattataagaccttgtatccccagtttatggagagtgtctggtgggtttttaagcagctttatgacaaagggctcgtgtaccggggtgtgaaggttatgcccttttcaaccgcatgtaacaccccactgtccaattttgagtcacaccagaactataaggacgtgcaggacccttcggtattcgttactttccccttggaagaggatgagacggttagcttggtagcctggacgactaccccttggactctaccaagcaatttagccgtgtgtgttaaccccgaaatgcagtacgtgaaaatcaaggacgttgcccgaggtcggctcctgattctaatggaggccagactgagcgccttgtacaaactggagtcggattatgagattctcgagcgtttccccggcgcttatctgaagggaaaaaagtaccgacccctgtttgactacttcctcaaatgtaaagaaaacggcgcctttaccgtgttggtggacaattacgtcaaagaggaggaggggaccggcgtggtgcatcaggcaccatacttcggcgcatag

SEQ ID NO: 192037 - DNA, 513 bp, synthetic construct
  misc_feature 1..513: note = Description of Artificial Sequence: Synthetic coding sequence
  source 1..513: mol_type = other DNA
atggccccctacacccccttcctgaccgagctgatgtaccagaacctcaaggttctgattgacccagtgagcgtccaggacaaggataccttaagcatccattacctgatgctaccacgcgtgagagaagaactcattgacaagaagaccgaatccgctgtgtcacaaatgcagtcagtgatcgagctaggaagagtgattagggatcgaaaaaccatcccaattaaattgaaaggcagcgaattggagatcacgctgacccgggggagctcattacctggtcctgcttgcgcatatgtgaacttgaatatctgcgctaatggttccgaacaaggaggtgtgctgttgcttgaaaaccccaagggggacaaccgtctcgatttactcaagcttaaatcagtggtgacctcgatattcggtgtcaagaatacggagttagcagtgttccacgacgaaacggagatacagaaccagaccgacttgctcagtctttccggcaaaacactgtgttag

SEQ ID NO: 192038 - DNA, 3789 bp, synthetic construct
  misc_feature 1..3789: note = Description of Artificial Sequence: Synthetic coding sequence
  source 1..3789: mol_type = other DNA
atgctgcagcaggtgcccgagaacatcaacttccccgccgaggaggaaaaaatcttggagttctggactgagtttaactgttttcaggaatgtttgaagcaatccaaacataagccaaagtttacgttctacgacggcccccctttcgcaaccggccttccacactacgggcatatcctggctggcactattaaggatattgtaactcggtatgcacatcagtcagggtttcatgtagacaggaggtttgggtgggattgccatgggctgcctgtggagtacgagatcgataaaacgctcggaattcgcggaccggaggatgtggccaaaatgggaataacggagtataacaaccaatgtcgagccattgtgatgaggtacagtgcggaatggaagagtacagtgtctcgtctgggacgctggattgattttgacaatgattataagaccttgtacccacagtttatggagagtgtctggtgggtcttcaaacagttgtacgataagggcctggtgtatagaggagtgaaagtgatgcccttttctacagcatgcaacactcccctgtctaactttgaaagccaccagaactacaaagatgtgcaagatccttctgtcttcgtgacattccccctggaggaagatgagactgtaagtctagtcgcctggactactacgccctggacgcttccatcaaatttggctgtgtgtgtgaatccagaaatgcagtacgttaagataaaagacgtggccaggggtcgcttactcatcctcatggaggcccggctctcagcgctgtataagttggaatccgactacgagatcctggagcggtttcctggagcttaccttaagggtaagaagtataggcccctgtttgactactttttgaaatgtaaagagaacggcgcttttaccgtgctcgtcgataactatgtgaaagaagaggagggtacaggcgtcgtgcatcaggcaccttatttcggtgctgaggactatagggtttgcatggatttcaacattattaggaaagactcactgccggtctgccctgttgacgcctcaggctgcttcaccaccgaagtgactgactttgcagggcaatacgtcaaagatgctgacaaatcaattatcaggactctcaaggagcagggaaggctgcttgtagctaccacctttacccattcctaccccttttgttggcggagcgatactcctcttatctataaagccgtgccatcctggttcgtgcgagtcgagaacatggttgatcagctgctgcgaaataacgatttgtgctactgggtgcccgagttagtgcgagagaagcgcttcgggaactggctgaaggatgcacgcgactggaccatctcgaggaaccgctattgggggacacctattcctctttgggtgtccgacgattttgaagaggtggtctgcattggctcggtcgcagaactggaagaattatccggcgcaaagatatcagaccttcatcgtgagagtgtggaccatctgacgattccgtcgcgctgtggaaaaggtagtctgcataggatcagcgaagtcttcgattgctggtttgagagcgggagtatgccatatgcccaggttcattaccccttcgagaacaaacgggagtttgaggacgcgttccctgcggacttcatcgctgaagggattgaccagaccaggggctggttttacacattgctggtgctagcaactgccctatttgggcaaccaccctttaaaaatgtcatagtgaatggcttagttttggccagcgacggccagaaaatgagcaagcgaaaaaaaaattatcctgatcctgtgtcaatcatccagaaatacggagccgacgcattgaggctgtacctgattaatagtccagtggtgcgcgctgagaaccttagatttaaagaggagggggtgcgggatgtcctgaaagacgtcctgctcccgtggtacaacgcgtatcggtttcttatccagaatgtcctgagactgcagaaggaagaagagattgagttcctgtacaacgagaacactgtccgggagagcccaaacatcacagaccggtggatcctcagttttatgcaatcgctgatagggtttttcgagacagagatggcggcctaccgactatacactgttgttccacggctcgtgaaatttgtcgacatcttaaccaattggtatgtgcggatgaatcgccgaagactgaagggggaaaacggcatggaggactgtgtgatggcactcgagaccctcttctctgtgctgctcagcctttgtcgcctgatggcaccttataccccattcctaacagaactgatgtaccagaacttaaaggtcttaattgatcccgtgagcgtccaggacaaagacacactgagcatccactatttaatgctcccacgggtccgggaggagcttattgacaagaagacagaatctgctgtgtctcaaatgcaatccgtcatagaactcggaagggtgatcagggaccgcaaaactatccccatcaaataccccctgaaggagatagtggtgatacatcaggaccccgaggccctgaaggacatcaagtcgcttgaaaaatacatcattgaggaactgaatgtgcggaaagttaccctaagcaccgataagaacaaatacgggattcgcctgcgggcagagcccgatcatatggtgctcggcaagcgcctcaaaggcgcgtttaaggcagtcatgaccagtatcaaacagctgtcaagcgaggagctggagcagttccaaaaaacaggtaccatagttgtggagggtcatgagctgcatgacgaggacattagactgatgtacacattcgaccaggctacaggcggcaccgcccagtttgaggctcatagtgacgcccaggctttagtgttgctggatgtgacacccgatcagagcatggtggacgagggcatggcccgcgaagtgatcaaccgtattcagaaactccgaaagaagtgtaacttagtccccaccgacgagatcaccgtgtactataaagccaagtcagagggcacctacctgaactctgtgatagaatctcacacagagttcatattcactaccataaaggctcccctgaagccatatcccgtttctcccagcgataaggttcttattcaagagaaaacacagttaaaaggcagcgagctggaaattaccctgacgcgggggtcttctctgcctgggcccgcgtgtgcttatgttaacctcaacatttgcgcgaacgggtctgagcagggtggagtgttgctattggaaaaccctaagggagacaatagactagacctattgaagcttaagagtgtggtgacttcaatttttggcgtgaaaaacaccgaattggctgtgtttcatgacgaaactgaaatccagaaccagaccgacttgctgtccttatccgggaagacactctgcgtgacggcaggttccgcaccatctctgattaactcaagctccacgctcctctgtcagtatataaacttacagcttttgaacgctaaaccccaggagtgtctcatgggcactgtcggcacgctgctcctcgagaatcccctgggccagaatgggcttacgcaccagggactcttatatgaggcggcgaaagtttttggcctgagaagcagaaaattaaagctgtttctgaacgagacccagacccaggagatcacagaggacattcctgtcaagacgctgaatatgaagaccgtgtacgtgtctgtgttgcctactactgcagatttctag

SEQ ID NO: 192039 - DNA, 3459 bp, synthetic construct
  misc_feature 1..3459: note = Description of Artificial Sequence: Synthetic coding sequence
  source 1..3459: mol_type = other DNA
atgggcatcaccgagtacaacaaccagtgccgggccatcgtgatgagatacagtgccgagtggaagtcgaccgtgagtagactggggagatggatcgatttcgataacgactataaaacactctatccacagtttatggagtccgtgtggtgggtgttcaagcagttatatgacaaaggactggtttacaggggtgtcaaggtgatgccttttagcactgcctgcaacactccgctttctaatttcgagtcacaccagaactacaaagacgtccaggatccttccgtgtttgtaaccttccccctggaggaagacgaaacagtttcgcttgttgcatggaccacaacaccatggacattaccttctaatttggcggtgtgtgtcaatcccgagatgcaatatgtgaaaattaaagacgtcgctcggggaaggttactgatcctgatggaggcccgccttagtgccctatataaactggagtcagactacgaaattctggagcgctttcccggcgcttacctcaaggggaagaaatacaggccgctgttcgactattttctaaagtgcaaagaaaacggtgcctttacagtcttggtggataactatgtcaaggaagaagaagggacaggcgttgtccaccaggcaccctattttggcgcagaagattatagggtttgcatggatttcaatattataaggaaggattcacttcccgtttgccccgtcgacgccagtgggtgcttcaccaccgaagtaaccgatttcgcaggccagtacgtcaaagatgcagacaagtccatcatacggaccttaaaggaacaggggaggcttctggtggccactacatttacccacagctaccccttttgctggaggtccgacacccctcttatctataaggcggttcctagctggtttgtgagagtggaaaacatggtggaccagctgctccggaataatgatctgtgttattgggttcctgaattagtgagagagaaacgctttgggaactggctgaaagatgcgcgggactggactatcagtcgcaaccgatactggggaaccccaatcccactatgggtgtccgatgattttgaggaggtagtgtgtatcgggtctgtggccgaactagaagaattgagtggcgccaagatctcagacctacacagggagagcgtggaccatctgaccatcccttcgcggtgtggtaaaggctcactccacagaatctcagaggtgttcgattgttggtttgaatccggctctatgccctacgcacaagtacactatccttttgaaaacaagcgcgagttcgaagatgcgttccctgctgattttatcgcagagggcatcgaccagactagagggtggttttacacccttctggtcctcgctacggcactattcggacagccgccattcaagaacgtcatcgtgaacggtttggtcctcgcgtccgacggccagaagatgtccaagaggaagaaaaactatcccgacccggtgtctatcatccagaaatatggcgcggatgcccttagactttacctcataaatagccccgtggttagggctgaaaatttgagattcaaggaggaaggtgtgagagatgtgctcaaagatgtgctgctgccctggtacaacgcttatcgttttctcattcagaacgttttgaggctccagaaggaggaggagatagaattcctctataacgagaacactgtcagagagagccccaatatcaccgacagatggatactgtcctttatgcagtccctgatcggattttttgagacagaaatggcagcctatcggttatacacggttgtgccaagattagtgaagttcgtggatattctgaccaactggtacgttcgcatgaaccgacgtagactcaaaggggaaaatggaatggaggattgcgtgatggccctcgaaacattgtttagtgtattactgtcactctgtcgcctaatggctccatatacccctttcctcactgagctgatgtaccagaatttgaaagttcttatcgatcccgtgagcgtgcaggacaaggataccctgtcgattcattatctaatgctgccacgcgtgcgggaggaattgatagataaaaaaactgaatccgcagtgtcccaaatgcagtcagtcatcgagctgggccgagtgatccgcgataggaagacaatccccatcaaatacccactgaaagagattgtggtgatccatcaggaccctgaggcactgaaagatatcaaatctctcgagaaatacatcatcgaagaactgaacgtgagaaaagtgactctatccacagataaaaataaatatggcataagactcagagctgaacccgatcacatggtgttagggaagaggctgaagggagcattcaaagctgtcatgacatcaattaagcagttgagtagtgaggaactggagcagttccaaaaaactggcactatcgttgtggagggtcacgagttgcatgacgaagatatcagactgatgtacacctttgatcaagctaccggaggcaccgcacagtttgaggctcacagtgatgcacaggctcttgtactgctggacgttacccctgaccagtctatggtagatgagggcatggcccgcgaagtgatcaacagaattcagaaactgaggaagaaatgtaacctggtgccaacagatgaaatcaccgtgtactacaaggcgaagtcggaagggacataccttaattccgttattgagtcacataccgagtttatattcaccactatcaaggccccacttaaaccctatccagtgtccccctctgacaaagtgctcatccaggagaaaactcagttaaagggctcggagctagagattactttgacacggggaagcagcttgccaggcccagcttgcgcatacgtcaatttgaacatttgtgcaaacgggtccgaacaaggcggtgtgctgctgctggaaaaccccaagggggataatcgcctggatctactcaaactgaaatccgtcgtcacttccatcttcggcgtgaagaacactgagctcgcggtctttcacgacgagacggagatacagaatcagactgatttgctgagtctcagcggcaagacactatgcgtgaccgccgggagcgccccttctctgatcaattctagtagtaccctgttatgtcaatatattaacctgcagctgctgaatgcaaagccccaggagtgtttgatggggacagtgggaacgttgctgttggaaaaccccctgggacagaatggcctgacacaccaaggcctcctgtacgaggccgccaaagtattcggactgcgctcacgcaagcttaaattatttctcaatgaaacacagacccaagaaattactgaggacatcccagtgaagactctgaacatgaagacagtctatgtctccgtgctcccgacaaccgcggatttttag

SEQ ID NO: 192040 - DNA, 750 bp, synthetic construct
  misc_feature 1..750: note = Description of Artificial Sequence: Synthetic coding sequence
  source 1..750: mol_type = other DNA
atggccccctacacccccttcctgaccgagctgatgtaccagaacttaaaagttttgatcgacccagtgagcgtgcaggacaaagatactctgtctatacactacctgatgttacctcgcgtgagggaggagctaatagacaagaaaactgagtctgccgttagccagatgcagtccgtgattgaactgggccgcgttatccgggacaggaagacaattcctataaagtatcccctcaaggagatcgttgtcattcatcaggaccctgaggccctgaaggatattaaatccctcgaaaaatacattatcgaagagcttaatgtgagaaaagtcacattgagtaccgataagaacaaatacggcattaggttgagagcagagccagatcatatggtgctcggtaaaaggttaaagggcgctttcaaggccgtcatgacctcgattaagcagcttagctcagaggaattggagcagttccaaaaaacaggaactattgtggtggaggggcacgagctgcatgatgaagacatccggttgatgtatacattcgaccaggccacaggtggtacagcccaattcgaggctcattctgacgcacaagcactcgtgctgttagacgtcaccccagatcaatccatggtggacgaagggatggcgagagaggtaattaataggattcagaaactgcgcaagaagtgcaatttggttccaaccgacgagattactgtctattataaagcaaaatcttag

SEQ ID NO: 192041 - DNA, 513 bp, synthetic construct
  misc_feature 1..513: note = Description of Artificial Sequence: Synthetic coding sequence
  source 1..513: mol_type = other DNA
atggccccctacacccccttcctgaccgagctgatgtaccagaacctgaaggttctcatcgaccccgttagcgtgcaggataaggatactctgtcgatacactacctaatgctgccccgggttagggaagagctcattgataaaaaaactgaatcagccgtatcccagatgcaatccgtgattgagctggggagggtcattcgagacagaaaaacgatacccattaaattaaagggatctgagctggagattacgctgactcggggctcatccctccctggcccagcttgtgcatacgtgaacctaaatatctgtgccaatggctccgagcaggggggagtgctgctcttggagaaccccaagggcgacaataggctggacctgcttaagctcaagtctgtagttacctctatctttggcgtgaagaacaccgaactggccgtgttccatgatgagaccgagattcaaaaccagacggatctgctatctctgtctggtaaaaccctctgctag

SEQ ID NO: 192042 - DNA, 816 bp, synthetic construct
  misc_feature 1..816: note = Description of Artificial Sequence: Synthetic coding sequence
  source 1..816: mol_type = other DNA
atgatggtgctgctgctgcagctggactgcctgaccatggacatctatctccgagacaaagacactctgtctatccattacctgatgctgcccagagtccgtgaggaactgatagataaaaaaaccgaaagcgctgtgtcgcaaatgcaatctgtcatagaattaggccgcgtgattcgtgacagaaaaactattcccatcaaattaaagggctcagagctggagattacactcacgcgcgggtcttcactccccgggcccgcttgcgcatatgtgaacctaaatatatgcgctaacggttctgaacaggggggggttctgctcttggagaaccctaagggggataacagactggacctgctaaagttgaagtcagtggtgaccagcatcttcggcgtcaaaaatactgagctcgccgtgtttcatgacgagactgagatccaaaatcaaacggacttgcttagcttgagtggtaaaacactgtgtgtgacagccggatccgccccgtctctcattaatagctcatccaccctgctgtgccaatatattaacctgcagctcctgaacgccaagcctcaggaatgcctgatgggtacagtcggcaccctgctgctggagaatccactgggtcagaatggcttgacgcatcaaggactgctctacgaagctgcaaaagtgtttggtctccgctctcgaaagttgaaactctttctgaacgagacccagacccaagagatcactgaggacattccggtgaaaacactcaatatgaaaacggtctacgtgtctgttctgcctactacagccgacttttag

SEQ ID NO: 192043 - DNA, 3039 bp, synthetic construct
  misc_feature 1..3039: note = Description of Artificial Sequence: Synthetic coding sequence
  source 1..3039: mol_type = other DNA
atgcggtggggcctgcggccccggggccccggcgccgccgccctggccactgcccgctccctttggggcacgccacgactgccttgcagtcctgggtggcagggcgctacaaagagactgctggttcggagcgttagcggcgcctcgaatcatcagcccaactccaattccggaagataccgcgatacagtgctgcttccacagacctcttttccaatgaagttgttaggacgccaacagccagataccgaactggagatccagcaaaagtgtggcttcagcgagctgtactcctggcagcgtgaaagaaaagtgaagacagagttctgtttgcacgacggtcccccctatgccaatggtgaccctcacgttggccacgcactgaacaagattctcaaggacatagccaacagattccacatgatgaacggcagcaaaatccacttcgttccaggctgggactgccacggcctgccaatcgagattaaagtcctcagcgaactcggccgcgaggctcagaatctgtctgccatggaaatccggaaaaaggcacgtagctttgcaaaggccgccatcgagaaacagaagagcgcgtttataagatggggcatcatggcagactggaataactgttactacaccttcgacggtaagtacgaagccaagcagctccgcacattttatcaaatgtacgataaaggtctggtatacagatcgtataagcctgtgttctggtctccatcctctcgcacagcccttgctgaggctgaactagaatacaatcctgagcacgtaagccggtctatatatgtgaagtttccattgcttaagccatctccaaaactggcgtcactgatcgacggtagctcccccgtgagcatattagtttggaccacccagccttggactattcccgcgaatgaagcagtgtgctacatgcccgagtccaagtacgccgtcgtgaaatgctccaagtcaggggacctttatgtcctggccgccgataaagtcgccagtgtagcttccaccctggaaaccacctttgagacaattagtacccttagtggcgtggacttggaaaacggaacctgttctcatccacttatccctgacaaagcgtcgccactgctgcctgccaatcatgtaaccatggctaagggtacaggtctggtccacacagccccagcccacgggatggaggactacggcgtggccagtcagcataacctacccatggattgcctggtggatgaggacggagtgttcactgatgtcgccgggcccgaactgcagaataaggccgtcctggaggagggcacagacgtggtcattaagatgctgcagaccgctaaaaacctgctcaaggaagaaaaactggtccatagctatccgtatgattggaggaccaaaaaaccagtggtgatcagggcatcaaagcagtggtttataaacatcacggacatcaaaacagctgccaaggagttgctaaagaaggtcaagttcataccggggagtgccttgaatggtatggtcgagatgatggatcgccggccctattggtgcatcagccgccagcgcgtgtggggagtgcccatccccgtttttcatcacaagacaaaggatgaatatctgataaacagccaaactaccgagcacatagtgaagttggtggagcagcacggctctgacatttggtggactctcccacctgaacagctgctccctaaagaagtgctgagtgaggtaggcggtcctgatgccctggagtatgttccggggcaagacattctggatatttggtttgattccgggacatcctggtcttatgtgctcccaggcccggaccagcgggcagatctgtacttagagggcaaggaccaacttggtgggtggtttcagagctcattgctgacgtctgtagctgcacgaaagagagctccctacaaaaccgtcatcgtccatggtttcacactgggagagaagggagaaaagatgagtaaatccctcggaaatgtgatccacccggacgtggtcgtgaacgggggccaggatcaatcaaaagagccaccctacggcgctgatgtgcttcgttggtgggtggcggattccaacgtctttactgaggtcgcaattggccccagcgtcttaaacgccgctcgggatgacatatctaagctgcgtaacacactcaggtttttgttgggaaatgttgcagacttcaacccagaaacagacagcatcccagtgaatgatatgtacgtgatagatcagtatatgctccatctcctgcaggacttagctaacaagataactgagctgtacaaacaatacgattttgggaaagtagtgcgacttttgcgcacgttttatacccgggaacttagtaacttttatttttccatcattaaagacaggctgtactgtgaaaaggagaatgatcctaaaagaagatcttgtcagactgccctagtggagattctagatgtgatcgtgaggagctttgcccccattttaccccacctcgcggaagaagtctttcaacatatcccgtatattaaggaaccgaagtctgtgtttaggaccggctggatatcaacgtcttccatatggaagaaacccggcctggaagaagccgtcgagtctgcctgcgcgatgagggactctttcctcggatcaattcctggcaagaacgccgccgaatacaaggtcattaccgtgattgaacctggcctgcttttcgagatcatcgaaatgctgcaatcagaggagacaagctccacttcccagctcaacgaattgatgatggcctccgagagcaccttactcgcacaggaaccccgggaaatgactgcagatgtcatcgaactcaagggtaaattccttatcaatctggaggggggtgacatcagagaagagagttcatataaggtgatcgtgatgcccaccaccaaggaaaagtgccccaggtgctggaaatacaccgccgagtcatctgataccctgtgtccacgttgcgccgaagtggtctccggtaaatag

SEQ ID NO: 192044 - DNA, 2823 bp, synthetic construct
  misc_feature 1..2823: note = Description of Artificial Sequence: Synthetic coding sequence
  source 1..2823: mol_type = other DNA
atgaagctgctgggccggcagcagcccgacaccgagctggagatccagcagaaatgcggattctcggagctgtattcatggcagagggaacgtaaggtgaagacagaattctgtctacatgatggccctccatatgctaacggagatccacatgtggggcacgcattgaataagatccttaaagacattgcaaaccgcttccacatgatgaatgggagcaagatccatttcgttcccggctgggactgtcatggcctacccatcgaaatcaaggtactgtctgaactggggagagaggcccagaatttaagtgctatggagatcagaaagaaggccagatctttcgccaaagctgcaatcgagaagcaaaagagcgcattcatccggtgggggatcatggccgattggaacaattgttactacacttttgatggaaagtacgaggccaagcagctgaggacattctatcagatgtacgataaggggctggtataccggtcctataagcccgttttttggtctccttcatctcggactgccctagccgaagccgagcttgaatataaccccgagcatgtaagtcgttctatctacgtaaaattccctctcttaaagccctcccctaagctggcctcgcttattgacggttccagccctgtgagcatactcgtgtggaccacacagccctggactatcccggcaaacgaagccgtctgttacatgccagaatcaaagtacgctgtagtcaagtgtagcaaatccggtgatctgtatgttctggccgccgataaggtcgccagtgtggccagcactctggagacaacgtttgaaacaatttcaacgcttagcggagtggacttggagaacggcacatgcagtcatcctctgatccctgataaggctagtcctctcttgcccgctaatcatgtcaccatggcgaagggcaccgggcttgtgcacaccgcaccagctcatggaatggaggactatggggtggcgtctcagcataacctgcccatggactgccttgttgatgaggacggggtgttcaccgacgtagctgggcccgaattgcaaaataaagcagtcctggaagaggggaccgacgtagtcattaaaatgttgcaaaccgccaagaacctacttaaggaggagaaactggtgcatagctacccatacgattggagaacgaagaagccagtggttattcgcgcttcgaagcagtggtttattaatattacagacatcaaaactgcagccaaagagctgttaaaaaaagtcaaattcattcctggctctgctctgaatggaatggttgagatgatggacagacggccctactggtgcattagtaggcagcgggtgtggggtgtacctatccctgtgttccaccacaagactaaagacgagtatctgatcaattcccagactaccgaacatatagtaaagttggtggaacagcatggctctgacatttggtggacacttccacctgaacagctcctgcctaaagaggtgctgtctgaagtaggcggacccgatgccctggaatacgtgcctggtcaggatattctcgatatctggtttgacagcggcacgagttggtcttatgttcttcccgggcccgatcagagagccgacctgtacctggagggcaaggatcagttgggcgggtggttccagtcatccttactgaccagcgtagcggcccggaaaagagcgccctataaaactgtgattgtgcacggctttactttgggcgagaagggagagaagatgtcaaaatccctgggaaacgtgattcaccccgacgtcgtggtcaacggcggccaagatcagtccaaggaaccgccatatggcgcagacgtgcttagatggtgggtagctgattctaatgtttttactgaggttgcaatcggtccgtccgtcttgaatgctgccagagacgatattagcaagctgcggaatactcttcggttcctgctcggaaatgtggcagattttaacccagagaccgactctatacccgttaatgatatgtacgtgatagaccagtacatgctccacctcctgcaagatctcgccaacaaaatcacggagctctataagcagtacgatttcggtaaagttgtgcggttattgcgcaccttctatacacgcgagctttccaacttttatttttctattatcaaggatagactgtactgtgagaaagaaaacgaccctaagagacgaagctgtcagacagcacttgtcgagatcctggacgttatagtccggtcatttgctccgatactcccacacctggctgaggaggttttccaacacatcccgtatattaaggaaccaaagagtgttttcagaaccggttggatttcaacttcttctatttggaagaagcctggcttggaggaggcagtagagtctgcatgtgccatgagagacagcttccttggatcaattcctggcaagaacgccgctgaatataaggttatcactgttatcgaacctggactgttattcgagattatcgagatgcttcagagtgaagagacctcctccacgtcacagctgaacgagctgatgatggcctcagaatccacactcttggcccaggaaccccgcgagatgaccgctgacgtgattgagctaaagggaaagttcttaatcaatctggagggaggcgatatccgggaggagtccagttataaggttatcgttatgcctaccaccaaggaaaagtgcccccgctgttggaagtatacagcagagagcagtgacacactttgccccaggtgcgccgaagtagtctctggtaaatag

SEQ ID NO: 192045 - DNA, 855 bp, synthetic construct
  misc_feature 1..855: note = Description of Artificial Sequence: Synthetic coding sequence
  source 1..855: mol_type = other DNA
atggccggctgcgccgcccgggccccccccggcagcgaggcccggctatcactcgccacttttctgttgggcgccagcgtgcttgctctgcccctccttacccgcgcaggtctccagggacgcaccgggctcgctctgtacgtggctggcttgaatgccctgctgttactactgtaccgcccgccacgctaccagattgctataagagcttgttttctagggtttgtgttcggttgtggcaccctactctctttcagccagtcctcctggagccatttcggctggtatatgtgctcacttagtctcttccactacagtgaatacctggttaccgcggtgaacaaccccaaaagcctgagccttgattcatttctgctgaatcattctctcgagtataccgtggccgctttgagctcatggctggaatttacccttgaaaatatattttggccagagctgaagcagataacctggttatcggttaccggactcctgatggtcgttttcggcgagtgtctgcgcaaggccgccatgtttacagccgggtccaattttaaccacgtggtccagaatgaaaaatccgatacacatactctggtgacttccggcgtatatgcctggttccgacaccctagctacgtgggttggttttactggtcaattggcactcaagtcatgctgtgcaaccctatttgcggtgtctcctatgctctcacagtctggcgctttttcagggacaggactgaagaggaggagatcagcctgatacatttcttcggcgaggagtacctcgagtacaagaagcgtgttccgacgggcttacctttcatcaaaggggtgaaagtcgacttgtag

SEQ ID NO: 192046 - DNA, 351 bp, synthetic construct
  misc_feature 1..351: note = Description of Artificial Sequence: Synthetic coding sequence
  source 1..351: mol_type = other DNA
atggccggctgcgccgcccgggccccccccggcagcgaggcccggctcagtctggctactttcctgcttggcgccagcgttcttgccctgcctttactcacccgggctggccttcaggggaggacgggtttggcgctttatgtcgccggactcaatgctctgctactgctgctctaccggcctccacgctaccagatagccatacgggcttgcttcttggggttcgtcttcggctgcgggacattgctctcgttctctcagtcttcctggtcccatttcggttggagtcacttggttcacccgcactcccattgtagaatattcccgtacacaatgatctctgtgccttag

SEQ ID NO: 192047 - DNA, 567 bp, synthetic construct
  misc_feature 1..567: note = Description of Artificial Sequence: Synthetic coding sequence
  source 1..567: mol_type = other DNA
atgtgcagcctgagcctgttccactacagcgagtacctggtgaccgctgtgaataaccccaagtctttatccttggactcattcctgctgaaccattccctggaatacactgtggctgccttgtcctcgtggctggagtttaccctggaaaatatcttctggccggaactgaaacaaatcacttggctttcagtcactgggctgttgatggtcgtctttggggagtgccttcggaaggccgcaatgtttacggccggcagtaacttcaaccatgtggtgcagaacgaaaagtctgacacccacacgctggtgactagtggggtgtatgcgtggtttaggcacccttcatacgtggggtggttctactggtctattggtacgcaggtgatgctgtgcaatcccatttgcggggtctcttatgctctgaccgtttggcgctttttccgcgaccgtacggaggaggaggaaatatccctgatccatttcttcggagaggagtacttggagtacaagaaacgcgttcctacagggctgccattcatcaagggcgtgaaggtggatttgtag

SEQ ID NO: 192048 - DNA, 1272 bp, synthetic construct
  misc_feature 1..1272: note = Description of Artificial Sequence: Synthetic coding sequence
  source 1..1272: mol_type = other DNA
atggccaccgccacccggctgctgggctggcgggtggccagctggaggctgcggcctccactggcagggtttgtgtctcagcgggctcactctctccttccagttgacgacgcaatcaacgggctgtccgaggagcagaggcaactccgacaaaccatggcaaagttcttgcaagagcacttggcaccaaaggcgcaggaaattgaccggtcaaacgagtttaagaatctccgcgagttctggaagcagctggggaatctgggtgtgctcggtataacggcccctgtccaatacggaggttccggcttggggtaccttgagcatgtgctggtcatggaggaaatcagccgggcttcaggagcagtaggcttgtcctacggagcccatagcaatctgtgtatcaaccagttagtccgaaatggcaacgaggcccagaaggaaaaatacctccccaagcttatcagcggcgaatacatcggcgcccttgcaatgtcggaacccaatgccggctctgatgtggtgagcatgaaactgaaagcggagaaaaagggcaaccactatatactcaatggaaataagttctggattaccaacggtcctgatgcagacgtcttgatcgtgtacgccaagaccgacttggctgcagtacccgcaagccgcggcattacagcgtttattgtcgagaaagggatgccaggtttcagtacaagcaagaagctggataagctcggtatgaggggtagtaacacctgcgagttgatattcgaggactgcaagataccggctgccaacattctgggacatgagaataagggcgtgtacgtgttgatgtcagggctggatctcgaacgcttggtgctggccgggggacccctgggtctgatgcaggctgtgctggatcacactatcccgtaccttcacgtgagagaggcgttcgggcagaagattggccacttccagctcatgcagggtaagatggccgacatgtatacgaggctgatggcttgcagacaatacgtgtacaatgtggctaaggcctgtgacgaaggacactgcactgcgaaagattgcgccggcgttattctttatagtgcagaatgtgccacacaggtggcacttgacggcatacaatgctttggcggcaacgggtacatcaacgattttcccatgggacggttcctgagggatgcaaagctatacgagataggcgcaggaacatccgaggttcggcgcctggtgattggtcgcgctttcaacgcggacttccactag

SEQ ID NO: 192049 - DNA, 1191 bp, synthetic construct
  misc_feature 1..1191: note = Description of Artificial Sequence: Synthetic coding sequence
  source 1..1191: mol_type = other DNA
atggccgagatggccaccgccacccggctgctgggctggcgggtggcctcctggagattgcgccctcctctcgccggtttcgtgagtcagcgagcacactctctgcttcccgtcgatgacgctatcaatggcctatccgaggagcagcgacaggaattctggaaacagttagggaatctgggtgtgttgggtataaccgcgcccgttcagtacggtggctcagggctggggtatctggaacatgttcttgtgatggaggaaatttccagggcctctggcgccgtcggtctgtcatacggcgcccactccaatttatgtataaaccagctggttagaaacggaaacgaggcacaaaaggaaaagtatctgccaaagctcatcagcggcgagtacataggtgcccttgccatgtcagaacccaatgccggcagcgacgtagtttccatgaaattgaaagctgagaagaaagggaatcactatatcctgaacggtaacaaattctggatcactaacggccccgacgcagacgttctgatcgtctacgctaaaactgatctggcagccgtccccgcttcccgaggaatcactgcctttattgtcgagaagggcatgcccggtttctcaacttctaagaagctggataagctgggcatgcgcggtagcaacacctgcgagctaatattcgaggactgtaagatcccagcagctaacatcctgggtcatgaaaacaagggcgtttatgtgctcatgagcggcctcgatctcgagcgcctggtgcttgctgggggtcccctgggactgatgcaggccgtcctggaccataccatcccatacctgcatgtgagagaggcctttggtcagaaaatcgggcactttcagcttatgcaaggtaagatggctgacatgtacacacgactgatggcctgtaggcagtacgtttataacgtggccaaggcgtgtgatgaagggcactgtacagctaaggattgcgccggcgtgatactgtacagtgcagaatgcgctacccaagttgcccttgatggaattcagtgttttggtggtaacgggtacatcaatgatttccccatgggaaggttcctgcgcgacgcaaaactgtatgaaattggtgcgggcaccagcgaggtccggcggttagtgatcggccgggccttcaacgctgatttccattag

SEQ ID NO: 192050 - DNA, 1281 bp, synthetic construct
  misc_feature 1..1281: note = Description of Artificial Sequence: Synthetic coding sequence
  source 1..1281: mol_type = other DNA
atggccgagatggccaccgccacccggctgctgggctggcgggtggcttcttggcgccttcgcccacctctggccggatttgtgagtcagcgcgcccatagcttactgcccgtagacgatgccataaatgggctgagcgaagaacagcgtcagttacgccaaacgatggccaagtttttacaggagcacctagcccccaaagcacaagagatcgacaggtccaatgaattcaagaacttgagagagttctggaagcaactgggtaatctgggagtgcttggaattacagctccggtacagtatggcggctcaggactggggtacttagaacacgtcctcgtaatggaagaaatctctagagcatcaggtgcggttggtctgtcttatggcgcccatagcaatctgtgtattaatcaattggttcggaatgggaatgaggctcaaaaggagaagtatctccccaagctgatctcaggtgagtacatcggggccctcgcaatgagtgagcccaatgctggttccgacgtcgtgtctatgaagctgaaggctgaaaagaagggaaaccactatatcctcaacggaaacaaattctggattacaaacggacctgatgctgacgtgctgattgtatacgcaaagactgacctagccgctgttccagcttcacgaggcatcaccgccttcatagtcgagaaaggcatgccggggtttagcaccagcaagaaactggacaagctcggcatgcgagggagcaacacgtgcgaactgatttttgaagactgcaaaatccctgctgctaacatcctgggtcatgaaaacaagggtgtatatgtgctgatgagtggtctggatcttgagcgtcttgtactggccgggggccccctgggactgatgcaggctgtgcttgatcacactatcccatacttacacgtgagggaagctttcggacagaaaattggacactttcagctgatgcagggtaaaatggccgatatgtatactcgactaatggcttgccgtcagtacgtgtataatgtggctaaggcgtgtgatgagggccactgtacagcaaaagactgcgccggagtaatcctttacagcgccgagtgcgccactcaggttgctctggacggcatccaatgctttggggggaatggatacattaatgatttccccatgggtcggtttctaagagacgctaaactgtatgagatcggggccgggacctcagaggtcaggagattagttatcgggcgtgctttcaacgctgacttccactag

SEQ ID NO: 192051 - DNA, 1716 bp, synthetic construct
  misc_feature 1..1716: note = Description of Artificial Sequence: Synthetic coding sequence
  source 1..1716: mol_type = other DNA
atgcgggccctgcgggaccgggccggcctgctgctgtgcgtgctgttgctggcagcccttctagaagcagccctgggcctgcccgtgaaaaaacctcgtctgcgcggcccaaggccaggatctctgactcggctcgccgaggtcagtgcgtcccctgaccccagacctctgaaagaggaggaagaggcacctcttttgccacgcactcacctgcaagcagagcctcaccagcatgggtgttggactgtgacagaacccgccgcaatgacccctggcaatgctactcccccccggactccggaggttacccccctgagattggaactgcagaaactacctggcctcgcgaatacaactttgtccacaccgaaccccgacacccaggcctctgccagccccgaccctcggccacttcgcgaggaggaggaggcaaggttgctgcctcgcactcaccttcaggccgaactgcaccaacacggttgctggactgtgacagagccggccgccctgacccctggcaacgcaacccccccaaggacccaagaagtaacgcccctgctgttggagcttcagaaactgcctgagctggttcatgccacactgtccacacctaatccagataaccaggtgactatcaaggtagttgaagacccccaagctgaggtttcaattgacttgttggctgagccttccaatccaccgccacaggacacactgagctggctccctgcgctctggtcttttttatggggtgattacaaaggagaggagaaagatcgtgcccccggagaaaaaggcgaggagaaagaagaagatgaagattacccctccgaggacatcgagggggaggaccaggaggataaggaagaggatgaggaagaacaggccctgtggtttaatggcacgacggataattgggatcaggggtggcttgcccctggggattgggtgtttaaggacagtgtatcgtacgattacgagccgcagaaagagtggtctccctggtccccatgttcaggcaattgttctaccggtaagcaacagcgcaccaggccttgcggatacgggtgcaccgcgactgagacaaggacctgcgatcttccctcctgcccaggtaccgaggataaggacaccctaggactgcctagtgaagaatggaaactcctggccaggaacgcgacagatatgcacgaccaggacgttgattcttgtgaaaaatggttaaactgcaagagcgactttctgatcaaatatctttcacagatgctgcgagacctcccctcatgcccatgtgcttatccactcgaagcaatggattctcccgtgagtctgcaggatgagcatcaaggcagatcctttagatggcgcgatgcctcgggtcctcgcgaacgcctggatatataccagccaactgcacggttttgtctgcggtccatgttaagcggagaatcatctaccctcgcagcccagcattgctgctacgatgaggactcacgtctgctcactcgaggaaagggcgccggtatgccgaatctgattagcaccgactttagtcctaagctccattttaaatttgatactacgccctggatcctatgcaagggagattggtctcgccttcacgcagtcttgccacccaataacgggcgtgcctgcacagataacccgcttgaggaagagtatctggcccagttgcaggaggccaaggagtactag

SEQ ID NO: 192052 - DNA, 1452 bp, synthetic construct
  misc_feature 1..1452: note = Description of Artificial Sequence: Synthetic coding sequence
  source 1..1452: mol_type = other DNA
atgacccccggcaacgccacccccccccggacccccgaggtgacccctctccggctcgagctgcagaagctccctggcctggctaacacgacgctctccaccccgaatccagacacacaggcatccgcgtctccggatcctcgccccttgcgcgaggaggaggaggcgaggctgctgcctcggacccatctacaggcagaactacaccagcacgggtgttggacagtgactgagcctgccgctttgaccccaggcaatgccactccacccagaactcaggaggtaaccccgctgctgttagagcttcaaaagctgcctgaactggtacacgccacgctctctacccctaaccccgacaaccaagtcactataaaggtcgtggaggatcctcaggctgaagtaagcatcgaccttctggccgagccctcaaaccctcctccccaggatacactgtcttggttgcccgccttgtggtcttttctctggggagattataagggggaggaaaaggaccgcgcccccggggagaaaggagaagagaaggaggaggacgaggactatccctcggaggacattgagggagaggaccaggaggacaaggaggaggatgaggaagaacaggctctgtggttcaacggcacaacagataattgggaccaggggtggctcgctcccggcgactgggtgtttaaggattcggtgtcatatgactacgagccacagaaagagtggagcccctggtctccatgctctgggaactgcagcactggaaaacagcagaggaccaggccctgcggatacggctgcacagccactgaaactcgtacttgtgacctgccctcatgccctggaactgaggacaaggacacccttggcctgccgagtgaggaatggaagctattggctcgcaacgccaccgatatgcacgaccaggatgttgactcttgcgagaaatggttgaactgtaaatccgactttttaataaagtacctgtcccagatgctaagggatctcccttcctgcccttgtgcctatcccctagaagctatggactcccctgtctccctgcaggatgagcatcagggcaggtctttcagatggcgcgacgcatccggccctcgtgaaaggttagatatttaccagcccactgcccgcttttgtctgcgctctatgctgagcggtgagtcttccacactcgcagcccagcattgttgctatgacgaggatagtagattactgacccgaggaaaaggcgctggaatgcctaatctaatttctactgatttttctcctaagttgcacttcaagtttgacacaaccccatggatcctctgcaagggcgactggtccagattgcacgccgtcctgccccccaataacggccgggcgtgcaccgataaccccctggaggaggagtacctggcacaattgcaggaggccaaggaatactag

SEQ ID NO: 192053 - DNA, 1473 bp, synthetic construct
  misc_feature 1..1473: note = Description of Artificial Sequence: Synthetic coding sequence
  source 1..1473: mol_type = other DNA
atgcgggccctgcgggaccgggccggcctgctgctgtgcgtgctgctgctggcagctcttttggaggcggctcttggcctacccgtcaaaaaacccagactgagagggccaaggccaggctcccttaccagactcgcggaggtgtcagcttcgcctgacccccgccccctgaaagaggaggaggaggcgccactgttgccccgtacacatctccaggcagagccacatcaacatggttgctggacggtgacagaacccgctgccatgacacccggcaatgctactcctcctagaacacctgaagtaacacccttgcgccttgagttgcagaagctgccaggcttggcgaacactacactctctacacctaaccctgacacccaggttactattaaggtggtggaagacccccaggctgaggtatctattgacttactcgcggagccgtcgaatcctccgccccaggataccctctcatggttgccagcactttggagtttcctttggggtgactataaaggcgaggaaaaggacagggcacccggcgaaaaaggagaggaaaaggaggaggatgaggattatcctagcgaagatatcgagggtgaggatcaggaagataaagaggaggatgaggaagagcaggcattatggttcaacggcaccacagacaactgggatcaagggtggctggcacccggcgattgggttttcaaggattctgtctcctacgattacgaaccccagaaggaatggagcccatggtccccctgttccggcaattgctctaccggcaagcaacagcgtacgagaccttgcggctatggatgcacagctactgagacacggacctgtgacctgccatcatgcccaggaactgaggataaggataccttgggactccccagtgaggaatggaagctactggctcggaacgcgaccgatatgcacgatcaggacgtcgatagttgtgagaagtggctcaattgcaaatccgattttctgattaaatacctgagccagatgctgcgggacctcccaagctgcccttgcgcgtacccccttgaagccatggactcaccggtaagcctgcaggatgagcatcaagggagatcctttcgatggcgcgacgcatccgggcctcgcgaaaggttggacatataccagccgacagcccggttctgtttgcgatccatgctgagcggagagagtagcactctggccgctcagcattgttgttacgacgaagactcccgactgcttacacggggtaagggagcagggatgccgaatctgatctccacagactttagtcccaagctgcactttaaattcgacacaaccccatggatcctgtgtaaaggcgattggagccgcttgcatgccgtgctgccacccaacaatgggagagcttgtaccgacaatccgctggaggaagagtatcttgcccaattgcaggaagctaaggagtattag

SEQ ID NO: 192054 - DNA, 1473 bp, synthetic construct
  misc_feature 1..1473: note = Description of Artificial Sequence: Synthetic coding sequence
  source 1..1473: mol_type = other DNA
atgcgggccctgcgggaccgggccggcctgctgctgtgcgtgctgctgttggccgctctgctcgaggccgcactcggtctccccgtcaagaaaccaaggctgcgtggcccacggcctggtagtttaacacgcctggccgaagcgtcagccagtccagatcccagaccccttcgggaagaggaggaagcacgcctattaccaaggacacatttacaggccgaactgcaccagcacggatgctggacagtgactgagcctgccgcactcacacccgggaacgccaccccaccgaggacgcaggaagtaactcccctgctgctcgagttgcagaagctgcctgagctagtccacgcaaccctgtctacccccaatccggataatcaagttactatcaaggtggtggaggatccccaggcggaagtgtccatcgatctcctcgctgagccatccaatcctccaccacaggataccctctcttggctgcctgctctgtggtcatttttatggggagactacaaaggtgaggagaaggaccgcgcacctggggaaaaaggtgaggaaaaagaggaagatgaggattaccctagcgaagatatcgagggagaagaccaggaggataaagaagaagatgaggaagagcaggcgctgtggtttaacgggacaactgacaactgggatcagggatggctcgcccccggagattgggtgtttaaagactccgtgagctacgattacgaaccacagaaggagtggtctccctggagcccttgctccggaaactgtagtacaggaaagcaacagaggacccggccctgcggatacggctgtaccgccaccgagactaggacatgcgacttgcccagctgccctgggactgaagacaaagacacgctcggcttgcccagtgaagaatggaagttgctggctagaaacgctacagatatgcacgatcaggacgtagactcatgcgagaagtggctgaactgtaagtcagactttttgatcaagtacttgtcccagatgttacgggacctgcccagctgcccctgtgcctatccactggaggcaatggatagtcccgtaagcctgcaagatgagcaccagggccgatcgtttaggtggcgcgacgccagcggcccacgggagcgactggacatatatcaaccaacagcccgtttctgtttgcggagcatgttgtctggtgagtctagcaccctcgcagctcagcactgctgctacgatgaggatagtagactcttgacccggggtaagggtgcggggatgccaaacctgatttcaacagatttctcccccaaactgcatttcaaatttgacactaccccttggatactgtgcaaaggtgattggtctaggctccacgcagtgcttccccccaacaacgggagggcctgtaccgacaatccactcgaggaggagtatctggcgcagctccaagaagctaaagagtactag

SEQ ID NO: 192055 - DNA, 879 bp, synthetic construct
  misc_feature 1..879: note = Description of Artificial Sequence: Synthetic coding sequence
  source 1..879: mol_type = other DNA
atgcgggccctgcgggaccgggccggcctgctgctgtgcgtgctgctgctagcggctctgcttgaggcagccttggggctccccgtgaagaaacctcggctgcgcgggccccggcccggctccctcacacgcctggccgaggtttcagcatctccggatcctcgcccactgaaggaagaggaagaggctccgctactgcctagaacacatctgcaggccgagccccaccaacatggatgctggacggtcaccgagcccgctgccatgacacccgggaatgcaacccctcctcggactccagaggtgaccccccttcgcctggagctgcaaaaactgccggggctggcgaatactaccctgtctactcccaacccggatacacaggccagcgccagtcccgaccccaggcctctgcgcgaggaagaagaggctagactactcccccgcactcatctgcaggcagagctacaccagcacggatgctggactgtaaccgaacccgccgcccttaccccgggcaatgccacccctcctagaacccaagaggtcacccctctcctactggaattgcagaaactgcctgaactggtgcacgctacactgagcactcccaatccggataaccagacaatgagccttaggcgcagcggcgttcctggactcccggctgtgggtaccgccgcgctggctagttctcgaggcctcggtccagttgctatggcagccctgcctcctcgccccgttccagtcacttgtccgcccgttctcgcattgaggaccaggaccccctgggcttcccccgtgaggtccggctccagctggcccgcgatgctccgaacatgcatgataaagatgtggactgctgttagaagtggttag

SEQ ID NO: 192056 - DNA, 924 bp, synthetic construct
  misc_feature 1..924: note = Description of Artificial Sequence: Synthetic coding sequence
  source 1..924: mol_type = other DNA
atggcccggaacgccgagaaggccatgaccgccctggcccggttccggcaggctcagctcgaagagggcaaagttaaagagagaaggccatttctggcctctgagtgtactgaattgccaaaggccgagaaatggcggcgacagatcatcggcgaaatatccaaaaaggtggcccagattcagaatgctggcctaggggaatttagaatcagagacttgaacgacgaaattaacaagcttctgcgtgaaaaagggcactgggaggtaagaataaaagaactggggggccccgattatgggaaagtaggcccgaagatgctggaccatgaagggaaagaggtaccaggtaaccggggctacaaatacttcggggctgccaaggatctcccaggtgtgcgcgagctcttcgagaaggagaggcaggtcaggtggttgatgcccgtaatccctgcactatgggaagccgaggcaggcggcagtcaggccctgcctccccctcgcaagacccgggctgaactgatgaaggccattgactttgaatattacgggtatcttgatgaagacgatggagtgatcgtcccactcgaacaggagtatgagaagaaactgagggccgaacttgtggaaaaatggaaggcagaaagagaggctcggctggctagaggcgagaaagaggaagaagaggaagaggaggaggagattaatatctacgccgtgacagaagaggagtccgacgaggaggggtcccaggaaaaaggcggcgacgactcgcagcaaaaattcatcgcccacgtgcctgtcccgagccagcaggagatcgaggaagccctggtcaggaggaagaaaatggaactccttcagaaatatgcttctgagacactgcaggcccagtcagaagaggcccgacgactcctcggatactag

SEQ ID NO: 192057 - DNA, 858 bp, synthetic construct
  misc_feature 1..858: note = Description of Artificial Sequence: Synthetic coding sequence
  source 1..858: mol_type = other DNA
atggcccggaacgccgagaaggccatgaccgccctggcccggttccggcaggcccagctggaagaaggcaaggtgaaagagaggagaccttttctggcatcagaatgtaccgagctcccgaaggctgaaaaatggcgccggcagataatcggggaaatttccaaaaaggtggcgcagatccaaaatgctggactgggcgaatttcgcatccgagaccttaatgatgaaatcaacaagttgctaagagagaagggccactgggaggtgagaatcaaggaactgggcggccccgattacgggaaggtcgggccgaaaatgttagaccatgaaggcaaagaggtgccaggcaaccgcggttacaagtactttggcgcagcaaaggacctgcctggtgtgcgcgaattgttcgaaaaagagccactgccacccccaaggaagacacgcgcagagctaatgaaggccattgactttgagtactacgggtacctagacgaagacgacggcgtgattgtgccactggaacaggaatacgagaaaaaacttcgcgccgagttggtggaaaaatggaaagcggaaagggaggcccgcctggcgagaggagagaaggaagaggaagaggaggaagaagaggagattaatatttacgccgttactgaggaagaatccgatgaggaaggaagtcaggagaaaggcggagacgactctcaacagaagtttatcgcgcatgtgccagtcccaagccagcaggaaattgaagaggcattagtccgacgcaagaaaatggagttgcttcaaaagtatgcatctgagactcttcaggctcagtctgaggaggcgaggagacttctcggatattag

SEQ ID NO: 192058 - DNA, 2712 bp, synthetic construct
  misc_feature 1..2712: note = Description of Artificial Sequence: Synthetic coding sequence
  source 1..2712: mol_type = other DNA
atgagcgacagcggcagccagctgggcagcatgggcagcctgaccatgaagtctcaactccaaatcaccgtgattagtgccaagctgaaggaaaacaagaaaaactggttcggtcctagtccttatgtagaagtgactgttgacgggcagagcaagaagaccgaaaaatgtaataataccaattccccaaagtggaagcagccactgaccgtgatagtgacacctgttagtaaactgcattttcgcgtctggtctcatcagactttgaaaagcgatgtgctgttgggcactgctgccctcgacatttacgaaactctcaagagcaataacatgaagttggaagaagtagttgtgaccttgcagctcgggggtgataaggaacccacagaaactatcggcgacttgagcatttgtctggacggtttgcaattggaatccgaggttgtgacaaacggagagacgacctgtagcgaaaacggcgtatcactgtgtttacccaggttagaatgtaatagtgcaataagcgcacattgcaacctttgtctgcctggcctgagcgattctccaatcagcgcgagcagggtggccgggtttactggcgctagccagaacgacgacgggtctagatccaaggacgagactcgggttagtaccaacggttcagacgatcccgaagatgccggtgccggcgaaaaccgcagggtctcgggtaataatagtccatctctgtccaatgggggcttcaaacctagccgaccgccacggcccagccggcccccaccacccacccctagacgtccagcttctgtaaacggcagcccctcagctactagcgagtctgatggttcaagcacaggttcactaccccccaccaacaccaatacaaacacctccgagggcgctaccagcgggctgatcattccccttacaatctctggcgggtctggcccccgaccccttaatcccgtcactcaagctcccttacctccaggctgggagcagcgggtcgatcaacatgggagagtatactacgtggatcacgtcgagaagaggaccacttgggacaggccagagcctttgcccccaggttgggaaagaagagtggataacatgggccgcatttactacgtagatcacttcaccagaaccacaacctggcagaggcccacgttagagagcgtccggaactacgaacaatggcagctgcagcgctctcagcttcagggcgctatgcaacagttcaaccagcgctttatatatggcaatcaagatctgtttgccaccagtcagtccaaagagttcgatcctctggggcccctccctcccggatgggagaagcgcacagactccaatggcagggtgtacttcgttaaccataatactaggattactcaatgggaggacccccgcagtcagggccagctcaacgagaaacctttaccagaaggctgggagatgagattcacagtggatggaattccctatttcgtcgatcacaatcggcgcaccactacctatatcgacccacgaacaggaaagtccgccctcgataatggacctcagatcgcatatgtgcgcgacttcaaggcaaaggtgcaatatttcagattctggtgccagcaactggcaatgcctcagcatataaaaattacggtcactcgaaagactctctttgaggattctttccaacagattatgtctttcagcccccaggacctgcgccgccgcctatgggtgatctttccaggtgaggaggggctcgactacggtggagtagcacgcgagtggttcttcctcctatcacatgaggttctgaatccaatgtactgtttattcgaatacgccgggaaagacaactactgcttgcaaatcaatcccgcttcctatattaaccctgaccatctcaagtacttccggttcattggccggttcatcgccatggccttgtttcatgggaaattcatcgatacaggtttcagtctgcccttttacaagcggatactcaacaagcccgtcggtctgaaggatcttgaatccatcgatccggagttctataattctttgatctgggtcaaggagaacaacattgaggaatgcgacttggagatgtacttctccgtggataaagaaatcttgggtgagatcaagagccatgatctcaaacctaacggtggaaacattctggtcaccgaggagaacaaagaggagtacattcggatggttgctgagtggcggctctctagaggcgttgaggagcagacccaagccttctttgaaggcttcaatgagatcctgccccagcaatacctccagtacttcgacgcaaaggaattggaagtcctactgtgcggaatgcaagagattgatctcaacgactggcagcgtcacgcaatatataggcactacgcccgaacatcaaagcagataatgtggttttggcagttcgttaaagaaattgacaatgaaaagcgtatgcggctgctgcaattcgttacaggcacatgtagactcccagtgggtggctttgcggatcttatggggtccaatggcccgcagaagttctgcatagaaaaagttggcaaggagaactggcttcctcgatcacatacttgcttcaatcggctagacctccccccttacaagtcatatgaacagcttaaagagaaactcctgtttgcaatcgaggaaacagagggctttggccaagagtag

SEQ ID NO: 192059 - DNA, 2589 bp, synthetic construct
  misc_feature 1..2589: note = Description of Artificial Sequence: Synthetic coding sequence
  source 1..2589: mol_type = other DNA
atgagcgacagcggcagccagctgggcagcatgggcagcctgaccatgaagtctcaactccaaatcacagtaatctccgcaaagctgaaagaaaataagaagaactggttcggaccctccccttacgtcgaggtgaccgttgatgggcaaagtaaaaaaaccgagaaatgcaacaacactaactcacctaagtggaaacagcccttgactgtgattgtaaccccggtctccaagctgcattttagggtctggtcccatcaaactttgaagtcagacgtgctcctagggacggctgctctcgatatttatgaaactctgaaatctaacaacatgaaactcgaagaggtcgtggtaactctgcagctggggggcgataaggagcctactgagactatcggcgatctttcaatttgcctcgacggcctccaactggagagtgaagtagttactaacggcgaaaccacatgtagcgaaagtgccagccaaaacgatgatgggtccagaagcaaagacgaaacgcgggtgagcaccaatggaagtgacgatccggaggatgctggggctggggaaaatcgtagggtgagcgggaacaactctccgagtctgagcaatggaggatttaagccatctaggcctccacggccctcgcgccctccgcctcccactccaagacggcctgcttccgtaaacggctcaccctctgctacctccgagtctgacgggtccagtacgggttctcttccacccacaaataccaatacgaatacatctgagggggccacaagtggattaattattcctcttaccatttcaggcggtagcggaccacggcccctcaaccccgtcacccaggcccctctgcctcctggctgggaacagcgcgtggaccaacatgggcgcgtgtattacgtagaccacgtcgagaagagaactacttgggacagacctgagccactgccacccggctgggaacggagggtggataacatgggccgcatttattatgtggatcacttcactaggaccacgacctggcagcgccccacacttgagagcgtgcggaattacgagcagtggcaacttcagcgttcccagttgcaaggggccatgcagcagttcaaccaacggtttatttatggcaatcaggacctgttcgcaacctctcagtcaaaagagtttgaccccctggggcccttaccgccaggctgggagaaaaggaccgattcgaatggaagagtttacttcgtaaaccacaacactcggattacacaatgggaagatccgcgcagtcagggacagctgaacgagaaacctctgcccgaggggtgggagatgcgcttcacggtcgatggaattccatatttcgtcgaccataacagaaggactacaacttacattgaccccagaactggaaaaagtgccctggacaatggtcctcagatcgcatacgtgcgcgacttcaaagccaaagtccagtattttagattctggtgccagcagctggccatgccccagcatatcaaaataacggtgactcgcaaaacattgtttgaagattcttttcagcagataatgagcttcagcccccaggatttgcggcgtcggctctgggtgatcttccccggggaggaagggctggattatggaggcgtggccagggagtggttcttcctgctgtcacatgaagtgttgaacccaatgtactgtctgtttgaatatgcgggtaaggataactactgcctgcagatcaaccctgcttcctacattaaccctgatcatctgaaatacttccggttcattggacgatttattgctatggcgctctttcatgggaaatttatagacactggattcagcctcccattttacaagcggatactcaacaagccagtgggactgaaagaccttgagtccatagatcccgaattttacaacagtctcatttgggtgaaggagaataatatcgaggagtgcgatctggaaatgtacttttcagttgacaaagaaatcctgggagagatcaagtcacatgacttgaaaccgaatggagggaacatccttgtgactgaggagaacaaggaagagtatatccggatggttgccgaatggagactatcaaggggggtagaggagcaaacacaggccttcttcgagggctttaacgagatattgccccagcagtacctacagtactttgacgctaaggagctggaggtgctcttgtgtggtatgcaggagatcgacttaaacgactggcagcggcacgcaatttatagacactatgcccgcaccagcaaacagataatgtggttctggcagtttgtgaaagagatagacaacgagaaacggatgagactgctgcagtttgtgaccgggacctgccggttgccagtcggcgggttcgcggacctgatgggatctaacgggccacagaagttttgcattgagaaggttgggaaggagaattggttaccgaggagccacacctgcttcaataggttagacctcccgccttataagagctacgagcaattgaaggaaaagctcctttttgccatcgaagagaccgaggggtttggccaggagtag

SEQ ID NO: 192060 - DNA, 2259 bp, synthetic construct
  misc_feature 1..2259: note = Description of Artificial Sequence: Synthetic coding sequence
  source 1..2259: mol_type = other DNA
atgaagctggaggaggtggtggtgaccctgcagctgggcggcgacaaagaacccacagagacaattggggacttgtctatctgtctggacggccttcagcttgagtctgaggtcgtcaccaatggggagacgacctgctcagagtctgcatcacaaaacgacgatggatcaagaagtaaggatgaaacccgcgtatccactaatggaagcgatgaccccgaagacgctggagcaggagaaaacagaagggtgtctgggaacaattctccatctctctccaatggggggttcaagcccagtcgcccaccacgcccttcccgacctccccctccaacccccagaagacccgcttctgtaaacggtagtccctctgctacatccgaaagtgatggcagtagtactgggtcccttcctcccacaaatacaaacacaaatacatcagaaggcgccacttctggcctcataattccactgacgatatcaggagggtccgggcctcgccccttgaatcccgtgacacaggcgcctctaccccccgggtgggagcagcgggtggaccagcacggaagggtatattatgtggaccacgtcgaaaagcgaaccacctgggatagacctgagccgctgcctcccggatgggagcgaagggttgataatatgggcagaatttactacgtagaccatttcaccaggacaaccacatggcaaaggccgacattggagagcgtgaggaactacgagcaatggcagctgcaacgtagccagcttcagggtgcgatgcagcagtttaatcagcgatttatctatgggaaccaggatctattcgccacaagccagtccaaggaattcgaccccctaggcccacttcctcctgggtgggagaagcgtacagattcaaacggcagggtgtactttgttaatcacaacactcggataacccagtgggaagatccaaggtcacagggccagttgaacgaaaagcctttaccggaaggttgggaaatgagatttaccgtggatggaatcccgtactttgtcgaccacaacaggcggactaccacctatatagatccccggactggcaagagcgccctagacaacggaccccagatcgcatacgtgagggatttcaaagccaaggtccagtattttagattttggtgtcagcaactagccatgccacaacacattaaaattacagtgactcggaaaactctcttcgaggactcttttcaacaaataatgtcttttagcccgcaagaccttagaagacgactgtgggtgatctttcctggcgaagagggtctagattatggtggcgttgctcgtgagtggtttttcttactgagtcatgaagtgctgaaccccatgtattgtctgtttgaatacgcgggaaaagataattattgcttgcagatcaaccccgcctcctatatcaacccggaccatctgaagtactttaggtttataggacgtttcattgcaatggcactgtttcatgggaaatttatcgacacggggttctccttaccattttataagaggatcttaaacaaaccagtgggtttgaaagatctggaaagcattgatcccgaattttacaactcactgatttgggttaaggagaacaacatcgaggagtgcgatctagaaatgtactttagcgttgacaaagagattctgggggaaatcaagagccatgaccttaagcccaacggtggaaatatactggtcactgaagaaaacaaggaagagtacatccgaatggtcgccgaatggcgcctgtcgcgaggagtggaggagcagacgcaggccttcttcgaggggttcaacgaaatactgccacagcaatatctgcaatatttcgatgccaaggagctagaggtattactctgcggaatgcaagaaatagatctaaacgattggcagagacatgctatctaccggcattatgccagaaccagtaaacagattatgtggttttggcagttcgtcaaagagattgacaatgaaaaaagaatgagattgcttcaatttgtgacagggacatgcaggctgccagtcggagggttcgccgatctgatgggttccaatggcccccagaagttctgtatcgaaaaggtgggaaaagagaactggctgcctcgaagtcatacttgtttcaaccgccttgacctccccccttacaagtcttatgaacagctgaaggagaagctcctatttgcaatagaagaaacggaaggatttggccaggagtag

SEQ ID NO: 192061 - DNA, 3717 bp, synthetic construct
  misc_feature 1..3717: note = Description of Artificial Sequence: Synthetic coding sequence
  source 1..3717: mol_type = other DNA
atgcgggcccagggccggggccggctgccccggcggctgctgctgctgcttgctctttgggtccaagccgctcggcccatggggtacttcgaactccaactttcagctctccgcaatgtcaacggggagctcttgtctggggcctgctgtgacggggatggccgcacaacaagggccggagggtgtggacacgacgaatgcgacacatatgtccgcgtttgtttaaaagagtatcaagccaaagtcactcctaccggaccatgctcgtatggacacggggcaacgcccgttctgggtggcaactctttctacctgccgcccgcaggagctgccggcgacagagcaagggctcgtgccagagcgggcggagatcaggacccaggactagtcgtcatcccatttcaattcgcttggcccaggtccttcacacttatcgtggaagcatgggattgggacaacgacacaactcccaacgaggaactgctaatagagcgtgtctctcacgccgggatgatcaaccctgaagacagatggaagagcctgcatttctctggccatgtagctcatctggagctgcaaatacgagttaggtgtgacgagaattactacagcgcaacgtgtaataaattttgtcggcctcgaaacgacttctttggacactacacatgcgaccaatatggcaataaagcatgtatggatggttggatgggcaaagagtgtaaggaggccgtctgcaaacaggggtgtaatctgctacatggtggctgtaccgtacccggggaatgtcgctgctcgtacggttggcagggccgattttgcgacgaatgcgtgccctacccaggatgtgtgcacggttcatgcgtggaaccctggcagtgcaactgcgagacaaattggggcggattgctgtgtgacaaagacctgaattattgcggaagtcaccacccctgtaccaacgggggaacttgcattaacgctgagcccgatcagtataggtgcacttgtccagatggctactcaggcaggaactgcgagaaagcagagcacgcttgtacaagcaatccttgtgctaacggcgggtcctgccacgaagttcccagcggatttgagtgccattgtccatcaggatggtcaggcccaacctgcgccttagatattgacgaatgtgctagtaatccctgcgcagctggagggacatgtgtggatcaggtggacggtttcgagtgcatctgccccgaacagtgggtgggggccacatgtcagctggacgctaacgagtgtgagggcaaaccttgtctgaatgctttttcctgtaaaaacctcattggagggtattattgcgactgtatacccggctggaagggcatcaattgtcacattaatgtcaatgactgccggggtcagtgccaacatggcgggacatgtaaggatctggtgaacggttatcagtgtgtttgccctaggggattcggcggaaggcactgcgaattggagagagatgagtgtgctagctctccgtgccatagcggggggctgtgtgaagatctcgcagacggtttccattgtcactgtccgcagggattcagcggtccactgtgtgaggtggatgtcgacctttgtgagcctagcccctgccgcaatggtgctaggtgctacaacctcgagggagactattactgcgcatgtccagatgattttgggggcaagaactgttctgtgcctagagaaccctgtcctggcggcgcttgccgagtaattgatggatgcggctctgacgccggtcctggaatgcctggaactgcggccagcggcgtctgtgggccccacggaaggtgcgtctcccagcccggcggaaacttcagctgcatatgcgattccggattcaccgggacgtattgtcatgagaacattgacgactgcctaggccagccttgtcgcaatggcggcacatgcatcgacgaagtggacgccttccgatgcttttgtccttccggctgggaaggcgagctatgcgataccaaccccaatgattgtttaccagacccttgccacagccgcggacgttgttacgatctggtaaacgatttttactgtgcttgcgatgacggatggaagggcaaaacttgtcatagtcgcgaattccagtgtgacgcctatacatgttctaacggaggaacatgctatgacagcggtgatacatttcggtgcgcctgtcccccggggtggaagggaagtacctgtgcggtggctaagaacagctcgtgtttaccaaatccttgtgtgaatggagggacatgcgtgggaagcggggcctcgtttagttgcatttgtagagacggctgggagggtagaacatgtacacacaacactaatgactgcaatcccctgccgtgctataatgggggaatttgtgtggacggagtgaactggtttcgctgtgagtgcgctccagggtttgccggccctgactgccgaatcaatattgacgaatgtcagagctctccctgtgcatatggtgctacatgcgtagacgaaatcaatggatataggtgtagctgcccacccggacgagctggcccccgatgccaagaggttatcggcttcggacggtcttgctggtcacggggaacacctttcccacacggatcctcttgggttgaggattgcaactcctgtcgctgtctcgacggcaggagagactgttcaaaagtttggtgtgggtggaaaccctgtttgttggccggacagcctgaagcattgagtgctcagtgtccgcttggccagcggtgtctggaaaaggcgccaggacagtgcctgagaccaccgtgtgaagcctggggggaatgcggagccgaagaaccgccttcaaccccatgtttaccccgctctggccacctggataataattgtgcacgcttgaccttacattttaaccgtgaccacgtgcctcagggaacaaccgtcggtgccatatgttctgggattcgcagtctcccagccacgcgcgctgttgccagggacaggctcctggtgctgctgtgtgaccgggccagcagtggagcctccgctgtagaagtggcagtcagcttttctcctgcacgcgacctgcctgactcttctcttatccaaggcgctgctcatgccatagtggcagccataacacagcgcgggaatagtagcctgctcctggctgtcactgaagtaaaagttgaaacggtcgtgaccgggggttcctcgactggcttgctcgtgccggtgctgtgcggtgcattttccgtgctgtggctagcttgtgtcgttctgtgcgtttggtggactcggaagcgaagaaaagagcgtgagagaagtcgcctgccgcgggaggaaagtgccaataatcagtgggccccacttaatcctatcaggaatcctatcgagcggccaggaggacataaggacgtgctgtaccaatgcaaaaatttcacaccgcccccacgaagagccgacgaggcactgcccggcccagctggacacgccgccgttcgcgaggatgaggaagacgaggacttgggccgtggggaggaagatagtttagaggcagagaagtttctgtcacataagtttactaaggatccaggacggtctcctggacggccagcccattgggcctccggcccaaaggtagataatcgggctgtccggtcaataaacgaagctcggtatgctggcaaagaatag

SEQ ID NO: 192062 - DNA, 3603 bp, synthetic construct
  misc_feature 1..3603: note = Description of Artificial Sequence: Synthetic coding sequence
  source 1..3603: mol_type = other DNA
atgcgggcccagggccggggccggctgccccggcggctgctgctgctgcttgccttgtgggtgcaggcagcacgccctatgggctattttgaacttcaattatcggccttacgaaacgtcaacggggaactgttgtccggagcctgttgcgacggagacggccgtactacgcgcgccggcggctgtgggcacgacgagtgcgatacatacgtccgcgtgtgtttaaaagagtaccaggctaaggttacccctacagggccatgtagctatggacatggcgcaacaccagttttgggaggaaactctttttacttacctccagcaggagctgctggcgatagggctagagcccgagctcgcgccggcggggaccaggatcctggcctcgtggtcatacctttccagtttgcttggccccggagctttaccctcatcgttgaagcttgggattgggacaatgacacaactcccaacgaggaactgctcattgagagagtgtctcacgctggcatgattaatcctgaggacaggtggaaaagcctgcacttctcaggccacgttgcacatctggagctacagataagagtgaggtgcgatgaaaactactatagcgccacatgcaataaattttgtagacctcgaaatgatttcttcggacattacacttgtgaccagtatggaaataaagcctgtatggatggatggatggggaaagaatgtaaagaagcggtttgcaagcagggttgtaacctcctgcacgggggctgcacagttccgggcgagtgccgctgttcctatgggtggcaaggccggttctgtgatgagtgtgtgccctaccccggttgtgtgcacgggagttgtgtggagccctggcagtgcaactgcgagaccaactggggaggacttctctgtgataaagatctcaattactgtgggagccaccatccttgtaccaacggcgggacctgcatcaacgctgagccagaccaatatcgctgtacctgcccagacgggtacagtggaaggaactgcgaaaaggccgagcacgcatgcacgagcaatccatgcgctaatggtgggagttgtcacgaggtcccttcgggtttcgaatgtcattgcccctccggatggagcgggcctacgtgcgccctcgatatagatgagtgcgcgtctaatccatgcgctgcgggaggcacatgtgtcgatcaggtcgatgggtttgagtgtatttgcccagagcagtgggtgggtgccacatgccaactggatgtgaacgactgccgcggccagtgccagcatggcggcacttgcaaagacctcgtcaatgggtatcagtgcgtatgtcccaggggctttggcggacgccactgcgaattagagcgcgacgaatgtgcatcctcaccatgccacagcgggggtctttgcgaagatctggccgacggctttcactgccattgcccacagggattttcaggtcctttatgtgaggtggacgttgacttgtgcgaaccgtcaccgtgtcggaatggcgccagatgctataatctggaaggggactattattgtgcctgcccggatgacttcggcggcaagaactgttcggttcctcgggagccttgccccggaggagcatgccgggtgatagacggatgtggctcggacgccgggccagggatgccgggcacagccgctagcggggtttgcggcccccacggacggtgcgtgagccaacctgggggcaacttctcatgcatctgcgacagtggattcaccggaacctattgtcacgagaacattgacgactgtctgggtcaaccatgtaggaatggtggaacttgtatcgatgaagtggatgctttcagatgcttctgtcctagtgggtgggaaggtgaattatgtgatacgaaccctaatgactgcctcccagatccatgccattctagaggccggtgttacgacctcgttaacgacttctactgtgcgtgtgacgacggatggaaaggaaagacatgccacagtcgtgagtttcagtgtgatgcttatacctgctctaatgggggaacctgctatgattcaggcgacacgttccgctgtgcgtgtccaccaggatggaaggggtctacatgtgcagtggcgaagaactcatcttgcctgccgaatccttgcgtgaatggcgggacttgcgtgggtagcggcgccagcttctcatgtatatgtagggacgggtgggaagggcggacatgcacccataataccaacgactgcaaccccctgccttgttacaatggcgggatctgtgtggatggagtgaactggtttagatgtgaatgcgctcccggcttcgccggaccagactgcaggattaacatcgacgaatgccagtcttcgccctgcgcctatggggccacctgcgtagacgaaatcaacggttataggtgttcgtgtccacccgggagggccggacctcgctgtcaggaagtgattgggtttgggcgctcttgctggtcccggggcactccatttccccacgggtcttcttgggtggaagattgcaatagctgtcgttgtttggatggtcggcgcgattgttcaaaggtgtggtgtggctggaaaccatgcctcctagccggccaacctgaggcccttagtgcacagtgtcctctgggccagaggtgtttagaaaaggcccctggccagtgtctgagaccaccttgcgaggcctggggggaatgcggcgctgaggagcctccaagcaccccatgcttgccccggagtggccatttagataacaattgcgcccgtctgacattgcatttcaacagggaccacgtgccgcaagggacgacggtcggggcaatatgcagcggcatcaggtccctccccgctacacgggctgtcgcccgcgacagactcctggttctgctctgcgacagggcttcatcaggcgcttcagccgtggaggtggcagtcagttttagtccggctagagatcttcccgactcctctttaatacagggagccgcccatgctatcgtggcagccatcacacaacgtggtaattcttctctgctgctggctgtgaccgaagtgaaggtggagacggttgtgaccgggggatcctcgacaggtctgctggtgccagtgttgtgtggcgcgttttccgtactgtggcttgcctgcgttgtactgtgtgtgtggtggacgcgcaagcggcggaaggaaagggagaggagcagactgcctcgggaagaatcagccaacaatcagtgggcaccattaaatcccattcgcaatccgatagagcgccccggggggcataaggacgtgctgtatcaatgtaagaacttcacgccaccccccagaagagcagatgaagccctgcccgggcctgccggtcatgcggccgtgcgggaggacgaggaggacgaggacctggggaggggcgaagaggactcacttgaggcggagaaatttctgtctcataaattcactaaagatcccgggcgctctccaggccgcccggcgcactgggcgtccggaccaaaagtcgataacagggccgtgagatctatcaatgaagccagatatgcaggtaaggagtag

SEQ ID NO: 192063 - DNA, 3465 bp, synthetic construct
  misc_feature 1..3465: note = Description of Artificial Sequence: Synthetic coding sequence
  source 1..3465: mol_type = other DNA
atgcagtacctgaacatcaaggaggactgcaacgccatggccttctgcgccaagatgcgcagctccaaaaaaactgaagtgaacttagaggctccagagccgggagtcgaggttatattttacctgtccgacagagagcccttgaggctgggatccggcgagtacaccgccgaagaactttgcatccgcgccgcacaagcatgtagaatttccccactttgccacaatttgtttgctctgtacgatgagaatactaaattatggtacgctccaaatcgaaccattactgtagacgacaagatgagccttaggttgcactaccgaatgagattttattttactaactggcacgggacgaacgacaacgagcagtcagtttggagacactctccaaagaagcaaaaaaatggctacgaaaaaaagaagatccccgatgccactccacttctggacgcctcatccttagagtatctgtttgctcaagggcagtacgacctggtaaagtgccttgcccctatccgggacccgaaaaccgaacaagatggccacgatatcgaaaatgagtgtttaggtatggccgtcttagcaatcagccattacgctatgatgaagaagatgcagctgcctgaactgccaaaggacatctcttataaaaggtatataccggaaactttgaacaagtccatccgccagaggaacttgctaactcgcatgcgaatcaacaacgttttcaaagacttcctgaaagaatttaataataagactatttgtgattcgtcagtgtcgactcacgacctcaaagtgaaatacctagctacgctggaaactctcacgaagcactacggagcagagattttcgagacctctatgctccttatatcctccgaaaacgagatgaattggttccatagtaacgatggcggtaatgtcctatattacgaggttatggtgactgggaaccttgggatccaatggagacacaaacccaatgtggtctcggtggaaaaggaaaagaacaagctcaagagaaaaaaattagaaaataagcacaagaaggacgaagagaaaaataaaatcagggaagaatggaacaacttcagctactttccagagatcacacatatagtgatcaaggagagtgttgtatcgattaacaaacaggataataagaaaatggagctcaaactgagttcgcatgaggaagccctgagcttcgtgagcctcgtcgacggctatttccgcctgacagctgacgcccaccattatctctgcactgacgtggccccccccctgattgtccacaacatccaaaatggatgccatggacctatttgtacagaatacgcaataaataaactgcgacaggagggctcagaggaggggatgtatgtcctccggtggtcttgtacagattttgacaacatactgatgacagtaacatgttttgagaagtcagagcaagttcaaggagcccaaaagcagtttaaaaactttcaaatcgaagtccagaagggcagatacagtctgcacgggtccgacaggtcctttccatcgctgggtgatctgatgtctcacctgaagaaacagattctgagaactgacaatatttccttcatgctaaaaagatgttgtcagccaaagccccgggaaatcagcaacctgctggtagctacaaagaaggcccaggaatggcaacccgtgtaccccatgagtcagctttcattcgatcgtattctgaagaaagacctggtgcaaggcgagcatctgggccgcggcacaagaacacacatttactccggcacccttatggactacaaagacgacgaggggacctctgaggagaagaaaatcaaggtaatcctgaaggtactggacccctctcacagagatatcagcctggcattttttgaggcagcttccatgatgagacaagtcagccataaacacattgtgtacctgtacggggtgtgcgttcgcgatgtggagaatatcatggtagaagagtttgtcgaaggcggcccgctggacctgtttatgcatcggaagtccgacgtgctgaccacaccatggaaattcaaggttgccaaacagcttgccagcgccttgagctacctagaggataaggatttggtgcacggtaacgtgtgcacaaaaaacttgttactcgctcgcgagggcattgactcagaatgcggcccttttattaaattaagcgatccgggaatcccgataacagtactctctcgacaagaatgtatcgaaagaattccgtggatcgctcccgaatgtgtcgaggacagtaagaatctttccgttgctgccgacaaatggagtttcggcacgaccctgtgggagatttgttacaacggcgaaatccccctgaaggacaagaccctgattgagaaggagagattctatgaatcccgttgccgacccgtgacgccttcttgtaaagaactcgcggaccttatgacaagatgtatgaattatgatccaaaccaaagacctttttttagggccataatgcgtgatattaacaaacttgaagaacagaatcccgacatcgtgtcagagaagaagcctgcgactgaagttgacccaactcattttgagaaacggtttctcaagcgaatccgggaccttggcgaggggcattttggaaaggtcgagctctgtaggtacgatcctgagggtgataacacgggggagcaggtcgcagttaagtccctgaagccggagagcggcgggaaccacatcgcggacctgaagaaagagattgagatcctgcgtaacctgtatcacgagaacattgtgaaatataaaggaatctgcaccgaggacggcggcaatggtatcaaacttattatggaattcctcccttcgggctctctcaaggaatacctgcctaagaataaaaacaagatcaatctgaaacagcagctcaagtacgctgtgcaaatatgcaagggaatggattacctgggaagcagacaatacgtgcatcgtgacctggctgctcgaaatgtcctggtcgaatctgaacaccaggtcaaaataggtgatttcggtctgacaaaggctatcgaaaccgacaaggagtactacacagttaaggacgaccgggacagccccgttttctggtatgcccccgaatgcttgatgcagtctaaattctatattgcatcagacgtctggtcttttggagtgacactgcacgaattacttacatattgtgactctgatagctcgcccatggccttatttctaaaaatgatcggacctactcacgggcagatgactgtgaccaggctggttaacacgctaaaggaaggtaagcgtctgccctgtcccccaaattgtcccgatgaagtgtaccaattgatgcggaaatgctgggagtttcagccttcaaatcggacttcattccaaaacctgattgagggctttgaagcactcctcaagtag

SEQ ID NO: 192064 - DNA, 1860 bp, synthetic construct
  misc_feature 1..1860: note = Description of Artificial Sequence: Synthetic coding sequence
  source 1..1860: mol_type = other DNA
atggccccccccagcgaggagacccccctgatcccccagcggagctgctcactactatctacagaggccggtgccctgcacgtgcttctgcctgcgcgcgggccggggcctccccagagactgagtttctcttttggtgaccaccttgcagaagacctctgtgtacaagccgccaaagcctctggcatcttacccgtgtaccacagcctgttcgccctggcaacagaggatttgagctgttggttccctccttcccatatcttttccgtcgaggacgccagcacccaggtcctcctgtataggattaggttttatttcccgaactggttcgggttggaaaagtgtcaccgttttgggctgcggaaagatttagctagtgctattctggatttgccagtcctggaacacctcttcgcccagcatcgctcggatctggttagcgggcgactccccgtcgggctctcgctcaaagaacagggggaatgtctttccctggcagtactggatcttgccaggatggctcgggaacaggcgcaaagacccggagagcttctgaagaccgtgtcatataaggcttgcctccccccatcactgcgtgacttaatacaggggctttcttttgtgacacgtagacgcattcgccggacagtgagacgcgctcttcggagagtggcagcgtgccaggctgaccgccactccctaatggccaagtacatcatggatttggagcggttggaccctgcaggggctgcagagaccttccacgtgggcctgcccggcgccctcggcgggcatgacgggctcggtctcctgcgggtcgccggcgacgggggcatagcgtggacccagggcgagcaggaagtgctgcagcccttttgtgacttccccgaaatagtcgatatcagtataaaacaggctcccagagtgggtcctgctggcgaacacaggttagtgaccgttacacggacagataatcagattcttgaggcagagtttcccggactgccagaagcgctttcctttgtcgccctggtcgatggatactttcgactgaccaccgacagccaacacttcttttgtaaagaagtcgctcctcctagactgctcgaggaggtggccgaacaatgccacggtccaatcactttagatttcgctataaataagttaaaaactggtgggtccaggcccgggagctacgtgctacgcaggtcccctcaagatttcgattcctttctcttaactgtatgcgtgcaaaaccccttgggccctgattacaaaggctgtctgattcgcaggtctcctacaggtaccttcctgctggtcggcttgtcacgtccacattcttcactaagggaactgctggcgacctgctgggacggcgggctccatgtggacggagtggctgtgactctaactagctgttgcattccccggcctaaagaaaagagcaacctgattgtggtccagcgcggacactctccccccacttcgtctctggttcagccccaatcccagtaccagctttctcagatgacgtttcataaaatccctgccgactcgctagaatggcacgagaacttaggccacggatccttcaccaaaatctataggggatgtcgtcatgaggtggttgatggcgaggcgcgtaagaccgaagtactgctgaaagttatggatgccaagcacaaaaactgcatggaatcattcttagaagcagcatcgctcatgtcgcaggtgtcctaccgccacttagttttgcttcacggtgtgtgcatggctggagacagcgagtctcccccacccacacaccctactcctgccagcccgaaatctagattatttttccctccactcttttag

SEQ ID NO: 192065 - DNA, 3375 bp, synthetic construct
  misc_feature 1..3375: note = Description of Artificial Sequence: Synthetic coding sequence
  source 1..3375: mol_type = other DNA
atggccccccccagcgaggagacccccctgatcccccagcggagctgcagcctgctgagtaccgaggcaggcgccctgcatgtcctgctcccggctagaggccccggcccgccgcagaggctctcctttagctttggagaccacttggctgaagatctttgcgtccaggcggcgaaggcttctggaatccttcctgtgtatcacagcttgtttgcccttgccacggaagacctgtcctgttggtttccaccatcacatatcttcagtgtcgaggatgcatccactcaggtgctcctctacaggatcagattctacttcccgaactggtttggcctggagaaatgtcacagatttggactacgcaaggatctcgcttcagcgattctggacctgcctgtgctcgaacacctgttcgcccagcacaggagtgacctagtaagtggccggttgccagtgggattatctctcaaagagcaaggagagtgtctgtcactggccgttctcgacttagcaaggatggcccgcgagcaggcccagcggccaggagagttgttaaagaccgtttcatataaagcttgcctccccccatcactgcgcgacttgatccagggcttgtcctttgtcaccagaagaagaatccggcgaacagtacgccgtgcactgagacgggtcgcagcttgccaggctgatagacactctttaatggcaaagtacatcatggacctggaaagacttgatcctgctggggctgctgagacgttccatgttggcctgcccggagcacttggcggtcacgacggcttgggcttactgagggtcgcaggtgacggcgggatcgcatggactcagggagaacaggaggttctccagccattttgtgattttcccgagatcgtcgacatcagtattaagcaagcaccacgcgtcgggcctgcaggtgaacaccggctggttactgtgacacgaacagataatcagattctggaggccgagttccccggtttgcccgaggccctgagttttgtggccttggtcgatgggtatttccgactgacgacagactctcagcactttttctgtaaagaggtggctcctccacgcctgctagaggaggtggctgaacagtgccacggacccataacattggactttgcgataaataaactgaaaacaggaggctccagacccggttcctatgttctgaggcgcagcccacaagactttgattcgttccttctcacagtgtgtgtgcagaatccattgggacccgactataaaggctgcctgatccggcggtcacctactggcacattcctcctagtgggtctctctagacctcacagctcactccgagagctcctggcaacatgctgggacggcggcctgcacgttgatggagttgcggtcaccctcacaagctgttgtatacccagacccaaagaaaaatccaatctgatagtagttcagaggggccactccccaccaaccagcagcctggtacagcctcagtcccagtaccagctttctcagatgacattccacaagatccctgctgactccctggaatggcacgaaaacctgggccatgggtcctttaccaagatctacagggggtgtagacacgaagtggtggacggtgaagcccggaagactgaggtgcttctcaaggtaatggacgccaaacacaagaattgcatggagagctttctggaggctgccagtctgatgtcccaggtgtcatatcggcaccttgtactattgcatggcgtctgcatggctggagattccaccatggttcaagagttcgtccatctgggagccatcgatatgtacttgaggaaacgggggcacctggtccccgccagctggaagcttcaagttgttaaacaactcgcttacgcgctgaattacctggaggataaaggcctgccacacgggaacgtgagtgcccggaaggtcttactggcacgcgagggggccgacggctcacctccgtttattaaattaagcgatccaggagtctcccccgccgtcctgagcttggaaatgcttactgaccgcattccgtgggtggctcccgaatgtctaagggaagcacaaacattgtctttggaggcagataagtggggcttcggggctaccgtttgggaggtgttttccggcgtgacaatgccaatttcagccctggaccctgctaaaaaattgcagttttatgaggaccggcaacagcttccagctcccaaatggacagaattggcccttctgatccaacaatgcatggcttacgagcctgtacagagaccatcttttcgcgcggtaatcagagatctgaactccctaatcagctctgattacgagttgctttcggaccccacaccaggcgcactggcccccagggatggtctttggaatggagcccagctatacgcatgtcaggacccaaccattttcgaagaacgccatcttaagtacatctcccaattgggaaagggcaacttcggttccgttgaactatgtcgctacgatcctctcggagataatacaggtgcactggtggctgtcaagcagctgcagcatagcggtcctgaccaacagcgcgattttcagagagagatccagatcttgaaggctctgcacagcgatttcatcgtcaagtatcgcggtgtatcatatggccccggtaggcagtccctccgcttagtgatggagtaccttccttctggatgcctgagagatttcctgcagcgtcatagagccagacttgacgccagtagattgttgctctacagctcacagatatgtaaagggatggagtacctcggatctcgccgctgcgtccatcgcgacctggcagctagaaatatcctcgttgagtccgaagctcatgtgaagatcgccgactttggcttagccaaactgctccccttggacaaagactattacgtagtgagagagcctggccagtctcctatcttttggtatgcgcccgagagtttgagtgacaacatcttctccagacagtccgacgtctggtcttttggcgtcgtgttgtatgagctcttcacttactgcgacaaatcgtgctctcctagtgccgagttcctccgtatgatggggtgtgaaagggacgtgcctgccctctgccgtttactggagctgctggaagaaggccagcgcttgcccgcccccccggcttgcccggccgaagttcacgaactgatgaagctgtgctgggccccatccccgcaggatagaccgtctttctctgccctgggtccccagctcgacatgttgtggtctggtagcaggggatgtgaaacacatgctttcaccgcccaccctgaagggaaacaccactccctcagtttctcttag

SEQ ID NO: 192066 - DNA, 3375 bp, synthetic construct
  misc_feature 1..3375: note = Description of Artificial Sequence: Synthetic coding sequence
  source 1..3375: mol_type = other DNA
atggccccccccagcgaggagacccccctgatcccccagcggagctgcagtctactgagtacagaagctggagccctgcacgtccttctgcccgcgcgggggccaggtcccccccaaagactgagcttttctttcggcgaccatcttgccgaggacctgtgtgttcaagccgccaaggcatctggtattctgcctgtctatcactcattgtttgcactcgcgaccgaggatctatcttgttggttcccgccctcgcacattttctcggtggaagacgcctcgactcaagtgctcctctataggattcggttctacttcccgaattggttcggcttagagaagtgccacaggttcgggcttaggaaggacttggcctctgctatcttagatctcccagtactcgagcatcttttcgcccagcaccgttctgatctcgtgtcgggaaggctccctgtgggactctccttgaaggagcagggagaatgcttaagcttggctgttcttgacctggctagaatggcaagggaacaggcccagcggccaggggagttactcaaaactgtgagctacaaggcgtgtctcccccccagcctgcgcgatttgatacaggggctatctttcgtgactagaaggaggatccgccggacggtgcggcgcgccctgaggagagtggctgcctgccaggctgatcgtcattcactcatggccaagtatattatggatttggaaaggctagaccccgcaggcgccgcggaaactttccacgtggggctgcctggagctcttggcgggcacgatgggttaggcttgctaagggtagccggcgatgggggcatcgcctggacccagggagaacaggaagtcctgcagcccttttgtgactttcccgagatcgttgatatctctattaaacaggcccccagggttggacctgcgggtgagcacagactcgtgacagtgaccaggacggataatcaaattctcgaggctgaatttcctggcttgcctgaagcgctgagcttcgtcgctctggttgacggatatttccggttgacgacagactcgcagcattttttctgcaaagaggtcgctcctccccggcttctggaagaagtcgcagagcagtgccacggacctattacattagatttcgccatcaacaaactaaagacaggcggatctcgcccgggctcctacgtgttgcggagaagccctcaggattttgattcctttcttctgaccgtctgcgtgcagaatccactcggccctgactataagggttgtctgattaggcgttcccccactggcaccttcttgctggtcgggttgtcccggccccatagctctctcagagagcttctggccacctgctgggatggaggcctgcacgtcgatggggtggcagttacccttacgtcttgctgcatccctcgccccaaggagaaatctaacctgatcgtggttcaacgcggtcattcgccgcccacctcatccctggtacaacctcaaagtcagtaccagttatctcaaatgactttccataagatcccagcagattccctcgagtggcacgagaacttgggccatgggagcttcacgaagatatatagaggatgtaggcacgaagtagtggacggtgaggcccggaagaccgaggttctcctgaaggtgatggatgctaagcacaagaactgcatggaatccttcctcgaagccgctagcctcatgtctcaagtctcttaccgccacttagttcttctgcatggcgtgtgcatggctggtgatagcaccatggtgcaggaatttgttcacctcggcgccatcgacatgtatctaaggaaacgaggccacctagttcctgcttcatggaagctccaggtggtcaagcagctggcatatgccctgaattatctcgaggacaagggcttaccacacggaaacgttagcgccaggaaggtcctgctggctagggagggtgcagacggctcccctccgtttatcaagctgtccgatccgggcgtgtcacccgccgtgttgagcttggaaatgctgaccgacaggatcccgtgggtcgccccagaatgtcttagagaggcgcaaaccctgtctcttgaagccgataagtggggatttggagcgacggtctgggaagtgttttcaggtgtcacaatgcccattagcgctctggaccctgcgaaaaagctccagttttatgaagacagacagcagctcccagcgccgaaatggaccgagctggcgctgttaatccagcagtgcatggcgtatgaacctgtgcaacgcccgtcgtttagggctgtaatcagggatttgaatagtctcatctcatcagattatgaacttctgtctgatcctacaccgggcgcgctggctcctagagacggactgtggaatggtgcccagctgtatgcgtgccaagatcccaccatctttgaggagaggcacctaaagtacatctcccagctgggaaagggtaactttggaagtgtcgagctctgccgctatgaccctctgggtgataataccggagcgctggtggctgttaagcagctgcagcattcaggacccgatcagcagcgggatttccagagggagatacagatactgaaagccctgcactccgattttatcgtgaaatatcgcggagtatcctatggccccggcaggcaaagtcttcgtctggtgatggaatatcttcctagcggatgcttgcgcgatttccttcagcggcatcgcgctagactggacgcaagccggcttttgctctactcttctcagatctgcaagggtatggagtacttgggatcacggcgttgcgttcacagggacctcgctgctaggaatatcctggttgagtccgaagcccacgtgaagatcgccgactttggcttggctaagttgttaccgcttgacaaggattactacgtcgtgcgggagcccggccaatcgccaattttttggtacgctcctgagagcctgtcagacaatatattttcccgtcagtccgacgtgtggtcctttggcgtggtgctctacgagctttttacatattgtgacaaaagctgtagcccatctgccgagttcctgcgcatgatgggatgcgagagagacgtccccgccctgtgccgattgctggaactgctcgaagagggtcagagactacccgccccgcctgcctgccctgcagaagtccatgaattgatgaagctgtgttgggcacccagccctcaggaccgtccatccttctctgcgctcgggccccagcttgacatgctgtggtcgggatccaggggatgcgagacacacgcatttacggctcacccagagggaaagcatcactccctgtccttctcctag

SEQ ID NO: 192067 - DNA, 3285 bp, synthetic construct
  misc_feature 1..3285: note = Description of Artificial Sequence: Synthetic coding sequence
  source 1..3285: mol_type = other DNA
atggccccccccagcgaggagacccccctgatcccccagcggagctgttcactgttgagcaccgaagccggagcattacatgtcctactgccagctcggggaccggggcccccacagcgcttgagctttagctttggggaccacctcgcagaggacctgtgcgtgcaagcagcaaaagccagtgggattctccctgtgtatcatagcttgttcgctttagccactgaagatttaagttgttggttcccgccctcccacatctttagtgttgaggacgcttctacccaagtcttactataccgcataagattttacttccccaactggtttgggttagagaaatgtcacagattcggcctgaggaaagatctggcaagtgcaatactggatctcccggtcctggagcacctcttcgcacagcaccggtctgatctggtctctgggaggctccctgtggggttatcacttaaagagcaaggcgagtgtcttagtttggccgtattggatctggccagaatggcaagagagcaggctcaacggcctggtgagttgttgaagacagtctcctataaagcttgcctcccccctagcctccgggatctgatccagggcctgtcttttgtgaccagaaggcggatcaggaggacagtgcggcgagctcttcgcagggtggctgcatgccaggctgacaggcacagtctcatggcaaagtacataatggatctcgagcgactggaccctgctggagcagccgagacgttccatgttggactgccgggtgccttgggcggccacgatggcttgggcctgctcagagtggccggcgatggcggcattgcatggacccaaggcgaacaggaagttctccagccgttctgtgactttcccgagattgttgacatcagcattaagcaggcaccaagggtgggccccgctggcgagcaccggctggtgacagttaccagaacagacaatcaaattctggaggcagaattcccaggactgcctgaggcattatccttcgtggctttagtggacgggtacttcagactcaccactgactctcagcatttcttttgtaaggaagtagccccccctagactgctggaagaggtggctgagcaatgccacggacctattactctggattttgcaattaataagctcaagaccggaggcagccgacccgggagctacgttctgcgaaggtcaccacaggactttgattccttcttgctgacagtgtgtgttcagaacccccttggtcccgactacaaggggtgtctgattcggagaagtcctacaggaaccttcctgctggtgggtctgagcaggccacacagttcactgagagagcttttagcaacctgttgggatggtggtctccacgtggacggggtcgccgtcacactcacaagttgctgtattccgcgccccaaagaaaagtccaacttaatagttgttcagcgcggacactccccgcctacctcgtccctcgtccagcctcaatcccaatatcagctctcccagatgacctttcataagatccctgctgacagtctcgaatggcatgaaaacctgggccatggaagctttactaagatatatcgcggctgcagacacgaggttgtggatggcgaggcccggaaaacggaggtgttactcaaggttatggatgctaagcacaagaattgtatggagagttttctggaagccgcatccttaatgtcccaggtgagttacagacacctggtattgctccacggcgtgtgcatggctggcgactctacgatggtccaggaattcgtccatcttggtgctattgatatgtatttgcggaaaaggggacaccttgtgccagcgagctggaaattgcaagttgtcaagcagctggcctacgcgttgaactacctagaggacaagggcttgccacacgggaatgtgtcagcccggaaggtgcttctcgcccgggaaggggctgacggatctccgcccttcatcaaactgtcagaccccggggttagtcctgcagtcctgtcactggagatgctcactgatcggattccctgggtggcccccgaatgcctccgcgaggcacagaccctcagcttggaagccgacaagtggggatttggtgccaccgtttgggaagtcttctccggtgtaactatgcccattagcgctctggaccctgctaagaagttgcagttctacgaagacaggcagcagctccctgcaccgaagtggactgagctggctttacttatccagcagtgcatggcatatgagcccgttcagcggccttctttcagggccgtcatccgtgacttaaactcactgatctcttcagattacgagttgttatctgacccaacacctggcgcgctggctccacgcgatgggctgtggaacggggcccagctctacgcctgccaggatcccaccattttcgaggaacgccatctgaaatacatttcacaactcggtaagggaaacttcggttcagtcgaactttgccgctatgaccccttgggcgataacactggtgctttggtcgcagtgaaacagctacagcactctggccctgatcagcagcgcgactttcaacgagaaatccagatactcaaggctctgcatagcgacttcatcgtgaagtaccgaggggtgagttacggcccgggaagacagtccctgaggctggtgatggagtacttgcctagcggctgtctgagagatttccttcaacgccaccgagctaggctggatgcgtcccgtctgctcctctactcctctcagatctgtaaaggaatggagtatttgggttcaagacgctgcgtgcacagagatctggccgctcggaatatactggtggaaagcgaagcacatgtgaaaatcgccgattttgggcttgccaagctcctaccactcgataaggactactacgtggtgcgcgagcccggacaaagccccatattctggtatgcccccgaatccctaagcgataacattttttctaggcagtccgacgtctggagcttcggggtcgtcctctacgagctttttacatattgcgacaaatcttgcagcccaagcgctgaattcttaagaatgatgggttgtgaacgtgacgttcctgccctctgccgcctactggaactgctcgaagaaggccagaggctcccagcacctcctgcatgccctgcagaagtttctgcggccggactcgccagcgtcagccagtccgttgattgggcaggcgtgtccggcaagcctgcaggcgcctag

SEQ ID NO: 192068 - DNA, 1575 bp, synthetic construct
  misc_feature 1..1575: note = Description of Artificial Sequence: Synthetic coding sequence
  source 1..1575: mol_type = other DNA
atgagcggcaagcggaagcgggtggtgctgaccatcaaggacaagctggacattatcaaaaaactggaagatggtggaagcagcaaacagctggctgtcatttatggaatcggcgaaactactgtgagagatatccgcaaaaacaaggaaaagatcataacttatgccagctcatccgattccacaagcttgttagcaaagcgaaagtctatgaaaccctcaatgtatgaggagctggaccgcgccatgttggaatggtttaaccagcagagggcaaagggaaatcctattagtggccctatttgcgctaagagggcagaattcttcttttacgcactgggcatggatggcgattttaacccaagcgccggttggctcactaggtttaaacagcggcactctattagagagataaatattcgcaatgagcggctgaatggcgacgagacagccgtagaggatttctgcaataacttcagagatttcattgaacgcgagaacctgcagccggagcagatctataacgcagacgagaccggcctcttctggaaatgcctgcccagtagaattagcgtgattaagggtaaatgcaccgtgccagggcataagtcaattgaagagagggtgacgatcatgtgttgtgctaatgccacgggcctccacaaactgaagttatgtgtggttggcaaagctaagaagcccagatccttcaaatccacggatactttgaatctgccagtttcttacttcagtcagaaaggcgcctggatggacctcagtatctttaggcagtggttcgacaagatcttcgttccccaagtgcgggaatatctcagatctaaggggctgcaggagaaagcagttctcttactcgacaactcgcctacccatccaaatgagaatgtgctgaggtccgacgacggacagatcttcgccaaatatctgccacccaatgttgctagcctgattcaaccatcagatcagggagtcatcgctaccatgaaaagaaattaccgtgctggcctgcttcagaacaacctggaagaagggaatgacctgaaatccttctggaagaagctgacgttgctggacgcgttgtatgagatcgcaatggcttggaatttggtaaagccagtcaccatctccagagcctggaaaaaaatccttcccatggtggaggagaaggagtccttagattttgatgtggaagacataagcgtggccacagtagcagctattttacagcataccaagggcctggagaatgtcacaacagaaaacctggagaagtggttggaggtcgacagtactgaacctgggtatgaggtcctcaccgactccgagatcatccgccgcgcacagggccaagccgatgagtcctctgagaacgaggaggaagagattgagctgatccctgagaagcatataaatcatgccgcggccctgcaatggaccgaaaacctactagactatctggaacagcagggcgatatgatcctccccgatagactcgttatccgcaagttacgtgcgacgatccgtaataaacagaagatgacaaagtcatcacagtag

SEQ ID NO: 192069 - DNA, 1575 bp, synthetic construct
  misc_feature 1..1575: note = Description of Artificial Sequence: Synthetic coding sequence
  source 1..1575: mol_type = other DNA
atgagcggcaagcggaagcgggtggtgctgaccatcaaggacaagctggatattatcaagaagctagaagacggcgggtcatccaagcaactggcagtgatatacgggattggcgagacgaccgtgagggacattcgaaagaataaggagaagataatcacttacgccagttcttccgactccaccagtctcctcgcaaaaagaaaatctatgaagccatcaatgtacgaggagttggaccgagctatgctggagtggttcaatcagcagagagccaaaggaaaccccataagtggccctatctgcgccaagagggccgagttctttttctatgctctgggaatggacggggatttcaaccctagcgctggctggcttaccagattcaagcagcgacatagcatacgggaaatcaacatacggaatgaacggctgaacggggatgaaaccgccgtcgaggatttttgtaacaacttccgggatttcatcgagcgagaaaaccttcagcccgagcaaatttacaacgctgatgaaactgggcttttctggaagtgtctgccatcgcggatcagcgtcatcaaagggaaatgtactgtgcccggtcacaagagcatcgaggaacgcgtcaccatcatgtgttgtgcgaatgccaccggactgcacaagcttaagttatgtgtcgtggggaaagcaaaaaagcccagaagttttaagagtaccgataccttaaacctgccagtgtcttatttttcccaaaagggcgcgtggatggatttatccatctttcgccaatggtttgacaagatcttcgtaccgcaggttagagagtacctgcgctctaagggtctccaagaaaaggcagtcttgttgctggacaactcccccacccatccaaacgagaatgtcttaaggagtgacgacggccaaatttttgcgaagtacctaccccccaacgtggcctctctgattcagcccagtgatcaaggcgttatcgcaactatgaaacgcaactaccgggctggcctgctgcagaacaacctcgaggagggaaatgacctgaaaagtttctggaagaaattaacacttcttgacgccctatacgaaatcgcaatggcttggaatcttgtcaagcccgtgacaatttcacgggcctggaagaagattttgccgatggtagaagagaaggagtcactggattttgatgtggaagatatctccgtagcaacagtggcggctattctccagcacactaagggtctcgaaaacgtgaccaccgagaatctggagaagtggctcgaagttgacagcaccgagcccggatatgaggtgctgacagattccgagatcattcgccgagcccaggggcaagccgatgagagttctgagaatgaagaggaggagatagaactgattccggaaaaacatatcaaccacgccgcagctttgcagtggaccgagaatcttctggattacctggagcagcagggcgacatgattttgcccgaccggttggtgatccgcaaactgcgagcaactataaggaacaagcaaaagatgacaaaatcctcccaatag

SEQ ID NO: 192070 - DNA, 1251 bp, synthetic construct
  misc_feature 1..1251: note = Description of Artificial Sequence: Synthetic coding sequence
  source 1..1251: mol_type = other DNA
atggccggcgacacccactgccccgccgagcccctggcccgggagggtaccctctgggaggcactgcgggcattgcttccacatagtaaagaggacctgaagctggatctcggtgagaaggtggagaggtctgtggtcacactattgcagcgcgccactgagctcttttatgaaggccgccgggacgagtgtcttcagagtagtgaggtgatcctagactacagttgggaaaaactaaacacaggtacctggcaggatgtagacaaagattggcgtcgagtatacgctattgggtgcctgctgaaggccctgtgtctgtgtcaggccccagaggacgccaacactgtggccgcagcactgcgcgtgtgtgacatggggctgctcatgggagccgcaatcctgggggacattctgctcaaggttgcggcaatacttcagacacacttgccaggcaagcgtcccgctcggggtagcctgcctgaacaaccttgtacaaagaaggcaagggccgatcacggactcatcccggacgttaaactggaaaagaccgtgcctcgcctgcaccggccaagcttgcagcatttccgggaacagtttttagtaccagggcgcccagtcatactgaaaggggttgccgatcactggccctgcatgcagaagtggagcctagaatacattcaggagatcgccggatgcagaactgtgcctgtggaagttggcagccgatacacagacgaggagtggagtcagacactcatgactgttaacgagtttatctcgaagtatattgtgaacgagccgcgggatgtagggtacctcgcacagcaccagctctttgaccagataccggagctcaagcaggacatatcaatacctgactactgttctctgggcgacggggaggaggaagaaatcacgataaacgcttggttcggacctcagggcaccatatccccactccatcaggatcctcagcagaacttccttgtccaggtcatgggccggaagtatatccggctgtacagtccacaggagtcaggcgctctgtacccccatgacacacatctactccacaacacctcacaggtggatgtcgagaatcccgatctggagaaatttccgaaatttgcgaaggctccttttttatcatgcatcctgtctccaggggagattctgtttattcctgtgaagtattggcattacgtgagggctctcgatctctccttctctgtatctttctggtggtcttag

SEQ ID NO: 192071 - DNA, 663 bp, synthetic construct
  misc_feature 1..663: note = Description of Artificial Sequence: Synthetic coding sequence
  source 1..663: mol_type = other DNA
atggccggcgacacccactgccccgccgagcccctggcccgggagggcacactgtgggaggcactcagggccctgctaccccactccaaagaggacctcaaactggatcttggtgagaaggtagaaaggagtgtcgttacactgctccagagggcaacagagctcttctacgaaggtagacgggatgaatgcctgcagtccagtgaggttatactcgattatagctgggaaaaactgaacaccggcacttggcaggacgtggacaaagactggaggagggtgtatgctattggctgcctgttgaaggctctctgcctttgccaggcccctgaagacgccaatacagtggccgcggcactgagagtctgtgatatgggactactcatgggtgctgccattctgggggacatactgctcaaggtggctgctatcttgcagacgcacttgcctggtaaaaggcccgcccggggttcccttccagaacagccgtgcaccaaagtggatgttgaaaaccccgatctggagaaattcccaaagttcgccaaagcgccatttctctcttgcatcctctctcccggcgagatactgtttatcccagtgaagtactggcactacgttagggccctggacctgagcttctcagttagcttttggtggtcatag

SEQ ID NO: 192072 - DNA, 1365 bp, synthetic construct
  misc_feature 1..1365: note = Description of Artificial Sequence: Synthetic coding sequence
  source 1..1365: mol_type = other DNA
atgagccgggagaagtgcagccccggcgagggcgccgaggagggcagaggttctgaagccagcggactgaaagcgagtgctggccatggcaccgaacccgcgggtggtggccctatggcaggggacacccactgcccggccgaaccgctggcccgcgagggaactctttgggaagctctgcgcgccctgctgccgcactctaaagaagacctcaaactggaccttggcgagaaggtcgaaagatccgtggtgaccctgctccagcgcgctactgagcttttctacgaagggcggagagacgagtgcttacaatctagcgaagtgatactggactactcctgggaaaagttgaacaccggcacatggcaggacgtagacaaggattggcggcgagtctacgccattgggtgtttgctcaaagcactgtgcctttgtcaggcacccgaagacgccaatacagttgcggctgccctaagggtttgcgacatggggctgctcatgggagccgcgatcctgggcgacatcctcctcaaggttgccgcaattttgcagactcacctgccaggcaaaaggcctgccagaggctccctcccagaacagccatgtactaaaaaggcacgcgctgatcacgggttgattcccgatgtgaagctcgagaaaacagtaccccgattacaccgcccttcactgcagcacttccgagaacagttcctggttccagggagacccgtgattctcaagggtgttgctgatcactggccctgcatgcaaaaatggtccctcgaatatattcaggagattgctgggtgcaggacggttcctgtggaggtgggctctcgctatactgatgaagaatggtctcagactcttatgacggtcaacgaattcatatcgaagtacattgttaacgaacctagagacgtgggctatcttgcgcagcaccaactgttcgatcaaatacccgaacttaagcaggatatctcaattcctgactattgctccctcggagacggagaggaggaagaaataactattaatgcctggttcgggccccagggaacgattagcccccttcatcaggatccccagcaaaacttcctggtgcaagtgatgggccgcaagtacatccggctctactccccacaggagtcaggcgctctttatccgcatgatacccatttgctccataacactagtcaggtggacgttgaaaatccagacctggagaagttccccaagtttgcgaaggcccccttcctgtcttgcatactgtccccaggtgaaattctttttattcctgtgaagtattggcattacgtgcgcgccctcgatctaagcttcagtgtgtccttctggtggtcctag

SEQ ID NO: 192073 - DNA, 441 bp, synthetic construct
  misc_feature 1..441: note = Description of Artificial Sequence: Synthetic coding sequence
  source 1..441: mol_type = other DNA
atgaccgtgaacgagttcatcagcaagtacatcgtgaacgagccccgggatgtgggatatcttgcacaacatcagctctttgatcagatccctgagctcaagcaggacatctccattcctgattattgtagcttgggcgacggggaagaggaggaaattaccatcaatgcctggtttgggccccaggggactatatccccgctccaccaggaccctcaacagaactttttggtacaagttatgggtcgcaagtacattcgactgtattcaccacaagaatcaggtgccttatacccccacgacacacacctgctccacaatactagccaagtcgatgtggagaaccccgacctcgaaaagttccccaagtttgccaaggcgccattcctgtcatgtatactctccccaggggagatactatttattcctgtcaaatattag

SEQ ID NO: 192074 - DNA, 1119 bp, synthetic construct
  misc_feature 1..1119: note = Description of Artificial Sequence: Synthetic coding sequence
  source 1..1119: mol_type = other DNA
atgaaccacaagagcaagaagcggatccgggaggccaagcggagcgctcgtccagaactaaaagattcacttgactggacgcggcacaattattatgaatccttttcgctatcccccgccgccgttgctgacaatgtggagagggccgacgcactacagctgtccgtcgaagaatttgtggagcggtacgagcgaccctacaaacctgttgttctcctgaatgcccaggaaggttggtcagcccaggagaagtggacactggagcgcctaaaaagaaagtaccgcaaccaaaagttcaaatgtggagaggataatgacggctactccgtcaaaatgaagatgaaatactacatcgaatacatggaatcaacgcgggacgattcacccctgtatattttcgatagttcttacggagaacaccctaagcgccgcaagctcctggaggactataaagtgcctaaattttttaccgacgatctgttccagtatgctggagaaaaaagaagaccaccttacaggtggttcgtcatgggacccccacgctccgggactggaattcacatcgatccactcgggacaagtgcatggaacgctctcgtgcaggggcacaagcgctggtgcctgtttcctacaagcacccccagggagttaatcaaggtcacccgcgatgaagggggtaaccagcaagatgaggctatcacttggttcaacgtgatttatcctagaacccaactcccgacatggcctccagaatttaagccgctggagatcttgcaaaaaccgggtgagacagtatttgtgcccggaggctggtggcacgttgttctgaacctcgacacaacgattgctataacccaaaatttcgcaagcagcactaatttcccggtagtttggcataaaaccgtgcgagggcggcctaagctgtcccgtaagtggtatcgcattctgaagcaggaacaccctgagctggctgtcctcgccgattcagtggatctccaggaaagcacaggtatcgcgagtgactcttcctccgactcttctagcagctctagttccagctcgtcagactccgacagcgagcgaatcagagacacctgtggtgggcgggcacacccgtag

SEQ ID NO: 192075 - DNA, 1212 bp, synthetic construct
  misc_feature 1..1212: note = Description of Artificial Sequence: Synthetic coding sequence
  source 1..1212: mol_type = other DNA
atgaaccacaagagcaagaagcggatccgggaggccaagcggagcgcacgaccagaacttaaagatagcctcgattggacacgccacaattattatgagtcattctctctgtcacctgctgctgtcgccgacaatgtagagagggccgacgccctgcaactgtccgtggaggaatttgtggagcgatatgaaaggccttacaaacctgtggtcttgcttaacgcccaggaggggtggtctgcccaggaaaaatggaccctggaaagacttaaacggaaatacaggaatcagaagtttaagtgcggcgaggacaacgacggctactctgtgaaaatgaagatgaaatattatatcgaatatatggagagcactcgcgacgattctccactctacatattcgattcatcatatggcgagcatcccaagcgacgaaagctgcttgaggactacaaagtgcccaagtttttcactgatgatctgttccagtatgcaggtgagaaaaggagacctccataccgctggtttgtgatgggaccccctaggtcagggaccggaatccacattgacccattgggcacgtctgcttggaatgctctggtccagggccataagagatggtgtctcttccctactagcactccccgcgagttgatcaaggtcacaagggacgaaggcggtaatcagcaggatgaagctatcacatggtttaacgtgatctatcctagaacccagttgccaacatggccacccgagttcaaaccactggagattctccaaaagcctggcgaaactgtgttcgtgccaggcggctggtggcacgttgtgctgaacctggataccacaatcgccatcacacagaacttcgcgtcttctaccaatttccccgtggtctggcataagaccgtcagaggcagacctaagctcagtagaaaatggtatagaatacttaagcaggaacatcctgaactggctgttctggcagactccgtggaccttcaggaaagtacaggcattgcctctgatagttcctccgacagttcctccagctcctcttcatctagctcggactccgactcagagtgcgagagtggatcagaaggagacgggactgtgcaccgccgcaagaaacggcgcacatgctctatggttggaaatggcgatacgacaagtcaagacgattgcgtttccaaggagcgaagcagttccaggtag

SEQ ID NO: 192076 - DNA, 1245 bp, synthetic construct
  misc_feature 1..1245: note = Description of Artificial Sequence: Synthetic coding sequence
  source 1..1245: mol_type = other DNA
atgaaccacaagagcaagaagcggatccgggaggccaagcggagcgcgaggcccgagttaaaagattctctggattggacccgtcataattactacgagagcttctccttaagtccagcagccgtagctgacaacgtcgagcgagctgacgccctgcagcttagcgtggaagaatttgttgagaggtatgaacgcccgtataagccagtagtcctgcttaatgcgcaagaaggatggagtgctcaggagaagtggacattggagcgcctcaaacggaaatatagaaatcagaaatttaaatgtggggaggacaatgacggctattccgttaaaatgaagatgaagtattatatcgaatacatggaatctaccagagatgactcgccattatacatctttgacagcagctatggtgagcacccaaaacgccgaaaattactggaagactacaaggtacctaagtttttcacggacgacctgttccagtacgcaggggagaaacgtaggcccccctacaggtggttcgttatgggcccccctcgctctgggaccggcatacatatcgacccattggggaccagtgcttggaacgcacttgttcagggacacaaacggtggtgcttgtttcctacatccacaccaagggagctgataaaggtgactagagatgagggcggaaaccaacaggatgaggccataacatggttcaacgttatttatccccggactcaattacccacctggccaccagagttcaagccgctcgaaatactccagaagcccggtgaaaccgtgtttgtgcctggtggttggtggcacgtggtgcttaacttagacacgaccatagccatcactcagaactttgcatccagcactaattttcccgtggtgtggcacaagaccgtaaggggccgtcccaaattgtcccgcaaatggtacaggatactgaagcaggaacatccggaactggccgtgcttgctgattcagttgacctccaggagtctaccggcatagcttccgacagcagtagcgacagttctagttcctccagttctagttcgtcagactcagattccgagtgcgagagtggctctgagggcgacggaacagttcatagaagaaaaaagcggcggacctgttctatggtgggcaatggagacacaacatctcaagatgattgtgtcagtaaagaacgcagttcctcacgaattcgcgatacatgcggcggccgtgcccacccatag

SEQ ID NO: 192077 - DNA, 441 bp, synthetic construct
  misc_feature 1..441: note = Description of Artificial Sequence: Synthetic coding sequence
  source 1..441: mol_type = other DNA
atgctggccggcgccggccggcccggcctgccccagggccggcacctctgttggttgctctgcgcttttaccctaaagctgtgccaagcagaggctcccgttcaggaagagaagttgagcgcttcaaccagtaaccttccctgctggctggtcgaagaatttgtggtcgcagaagagtgtagcccctgttcaaattttcgagctaagaccacgcctgaatgtggacccactggctatgtggagaagattacttgctcctctagcaaaagaaatgagtttaaaagttgccgtagcgcgctcatggagcagcgactgttttggaaattcgagggggccgtggtgtgcgtggctcttatctttgcctgtttagtgattattcgtcagcgtcagctggataggaaggctctagagaaagtcaggaagcagattgagagtatttag

SEQ ID NO: 192078 - DNA, 354 bp, synthetic construct
  misc_feature 1..354: note = Description of Artificial Sequence: Synthetic coding sequence
  source 1..354: mol_type = other DNA
atggcctggggctggcacctgagcttcctgagcgccagcaccagcaacctaccttgctggctggtcgaggaatttgtggtggcagaggagtgctcaccttgctctaacttcagggccaagactacccccgagtgtgggcccaccggatacgtggaaaagattacctgttcaagctccaagcggaacgagtttaagtcctgccgcagtgcgcttatggagcagcggctcttttggaagttcgagggtgcggttgtgtgtgtggccctgattttcgcttgcctcgtcattattagacaacgccagctcgatcgcaaggcactggaaaaagttaggaaacagattgagagtatctag

SEQ ID NO: 192079 - DNA, 354 bp, synthetic construct
  misc_feature 1..354: note = Description of Artificial Sequence: Synthetic coding sequence
  source 1..354: mol_type = other DNA
atggcctggggctggcacctgagcttcctgagcgccagcaccagcaatctcccatgttggctggtggaagagtttgtcgttgctgaggagtgcagtccttgctcgaactttcgcgccaagacaacccccgagtgcggccctaccggttatgttgagaaaataacctgcagctccagcaaacgcaacgagttcaaatcgtgccggtcagccctgatggagcaacggctcttttggaaatttgagggggctgtcgtctgcgtggcactcatatttgcttgcctcgtcatcatcagacagaggcagcttgatcgcaaagccctcgagaaggtgcgtaaacaaatcgagtcgatctag

SEQ ID NO: 192080 - DNA, 354 bp, synthetic construct
  misc_feature 1..354: note = Description of Artificial Sequence: Synthetic coding sequence
  source 1..354: mol_type = other DNA
atggcctggggctggcacctgagcttcctgagcgccagcaccagcaatctgccctgctggctggtggaagagttcgttgtcgctgaggagtgttctccctgtagcaacttccgggccaagaccacgccagagtgtgggcccactggatatgtcgaaaaaatcacttgcagctcaagcaaaagaaatgagtttaaaagctgtcgcagcgccctgatggaacagcggctgttctggaaattcgagggggcggtggtctgcgtcgctcttatattcgcgtgcttagtcattattaggcagaggcagctcgacaggaaggcactcgagaaagtgaggaagcagattgagtccatttag

SEQ ID NO: 192081 - DNA, 1044 bp, synthetic construct
  misc_feature 1..1044: note = Description of Artificial Sequence: Synthetic coding sequence
  source 1..1044: mol_type = other DNA
atggagacccccttctacggcgacgaggccctgagcggcctgggcgggggcgcctctggctccggcggctctttcgccagcccgggaaggctgtttccaggagcacctccaactgctgctgctggaagcatgatgaagaaagacgcactcaccctgtcactgtcagagcaggtggccgctgccctgaagccggccgccgccccccctcctacccctctgcgggcagatggcgccccatctgccgcccctccggacggtctgctggctagccccgatctgggactgctgaagctcgcatcaccggagctagaaaggctgattatacagagtaacggactggtgaccacaacaccaacaagttcccagttcctgtatcccaaagtggcagcatcagaggagcaggaattcgccgagggttttgttaaggcactcgaagatttgcacaaacagaatcagcttggcgctggagcagctgccgccgcagccgccgccgccgccggaggcccgagtggaaccgctacgggatcagctcctcctggggaactggcccccgcagccgccgccccagaggctcctgtgtatgccaatttgtcatcctacgcggggggcgctggcggtgccgggggcgccgcaacggtagcctttgccgctgagcctgtacccttcccgccaccacccccaccaggtgccctcggccctccgaggctagccgcactgaaggacgagccacagactgtccccgacgtgcctagcttcggggagtcccctcctctgtcacccatcgatatggacacacaagagcggatcaaagctgagcgtaagaggttgcgaaaccgcatcgcagcctcaaaatgcagaaaaagaaagctcgagcgtatctctcggctcgaggagaaagtcaaaaccctgaaatctcaaaatacggaattggcaagcactgctagcctgttgcgcgaacaggtcgcacagctcaagcagaaagtactaagtcatgttaactctggttgccagctacttcctcagcaccaggtcccagcctactag

SEQ ID NO: 192082 - DNA, 2934 bp, synthetic construct
  misc_feature 1..2934: note = Description of Artificial Sequence: Synthetic coding sequence
  source 1..2934: mol_type = other DNA
atgagcttcgccctggaggagaccctggagagcgactgggtggccgtgcggccccacgtgtttgacgagagagaaaagcacaaattcgttttcatcgtagcctggaacgaaatagaaggcaagttcgcgattacctgccacaacagaacggcacagaggcagcgaagcgggtcaagagagcaggcaggtgccaggggcggcgcagaggctggtggcgctgcatccgatgggagccgcggccccgggagccctgcagggaggggaagaccagaggcaactgcttccgccacgttagtgcggtcccccggtcctcggaggagttccgcttgggccgagggcgggagccctagatctaccagatccctgttgggtgatccaaggttacgaagccccggcagtaaaggcgcagaaagccgtctcaggtctcccgtgcgcgctaagcccatacctggacagaagactagcgaagctgacgacgcggctggggccgcagcagccgcagcacgccctgcgcctcgggaggcccaggttagctcagtgcgaatagtgagcgcatccggcactgtgtctgaagagattgaggtcctggagatggtgaaagaagacgaggctccactagcactaagcgacgctgagcagcctcctcctgcaacagagctcgagagtcccgcggaagaatgtagctgggccggccttttttccttccaggatctgcgggctgtgcaccagcagctttgttccgtgaatagtcaactggaaccttgcctccctgtgtttcccgaagagccctccggcatgtggaccgttctctttgggggagctcccgaaatgacggagcaggagatcgataccttgtgctaccagcttcaggtctatttgggacacggcctggacacgtgtggctggaaaatactcagccaagtgctctttacagaaactgatgatccagaggaatactatgaatcactgtctgaactgcggcaaaagggatacgaagaagtactccaacgggctcgcaagcgcattcaggagctgctcgataaacataagaataccgaatctatggtcgagttgctcgatctctaccaaatggaagatgaggcatactcgtccctggctgaggctacaacggagttgtatcagtacctgttgcaaccgtttagagatatgcgggaactggcgatgttaaggcgccagcagatcaagatcagtatggaaaacgactacctgggcccgagaaggattgaatcgttgcagaaagaagacgccgactggcagaggaaagcgcatatggcggtgcttagcatccaggatctgacagtgaaatactttgagatcaccgcaaaggcccagaaggcagtgtacgatagaatgagagctgaccagaagaaatttggtaaagcttcatgggctgcagccgccgagagaatggaaaagctgcagtacgctgtgtcaaaagagactctgcaaatgatgagagccaaggagatctgcctggagcagcggaagcatgctctaaaggaagagatgcaatcactgcgggggggaaccgaagctatcgcccgcctcgatcaactggaagccgattactatgatctccagctgcagctatatgaggttcagtttgaaatcctcaaatgcgaggagcttctgctaacagcccagttagagagtatcaaacgactgatttccgaaaaaagggatgaggtggtctactatgacacatacgagtctatggaggcaatgttggagaaggaggaaatggctgcgtctgcgtacctccagagggaggaactacagaaactgcagcagaaagcacggcagctcgaggcccgacgagggagagtgagtgcaaaaaagtcttacctccggaacaagaaagaaatttgcattgctaagcacaatgaaaagattcagcaacgcaccagaattgaagacgagtacagaacacaccacacagtgcagctgaagcgcgaaaaattgcatgatgaggaggaaaggaaatccgcctgggtgagccaagagagacaacgaacccttgacaggctaaggacctttaagcagcgctacccgggccaggtgatcctgaagagtacgagacttcggttggcacatgccagaagaaagggcgctgcaagtcctgtcctacaggaagatcactgcgatagtctaccctctgtgctgcaagtggaggaaaagaccgaagaggtcggagagggaagagttaaacgcggaccctctcaaacgaccgagccacaatctctggtgcagctcgaagatacgtctttgacccagctggaggcaacgtccctgcctcttagcggcgtgacatccgaactccctccgaccatcagcctcccactgctgaacaataatctggagccctgctctgtgacgataaatcccctgccctcccctctgcctccaactcctccaccacccctgccggtcgccaaggatagcgggccggaaaccttggagaaggatctcccaaggaaggagggcaacgagaaacgtatacccaaatcagcttcggctccctccgcccacctgtttgactctagccagcttgtcagcgcccggaagaaactgcgaaagaccgccgaggggctgcagaggcggcgggtgagttcaccgatggacgaagtgctggcatcccttaagagaggcagttttcacctcaagaaggtggagcagcgtacactcccaccattcccagacgaggacgacagcaacaatattctagcccagattagaaagggggtgaagcttaaaaaggtccagaaggacgtcctccgcgagagctttactctgttgcctgacactgatccattgactaggagtattcacgaagctctgcggaggattaaagaggcttctccagagagcgaagacgaggaagaggccctgccttgcaccgattgggaaaactag

SEQ ID NO: 192083 - DNA, 2967 bp, synthetic construct
  misc_feature 1..2967: note = Description of Artificial Sequence: Synthetic coding sequence
  source 1..2967: mol_type = other DNA
atgagcttcgccctggaggagaccctggagagcgactgggtggccgtgaggccccatgtctttgatgaaagggagaagcacaaatttgttttcatcgttgcatggaacgagatcgaaggcaaatttgctataacctgccataacagaacagcacagaggcagcgcagcggctctcgggagcaagctggggcaagaggtggagctgaagccgggggagctgcaagcgacggctctcgggggcccggctcacccgccggcaggggccggcctgaagctactgcttccgctactcttgtgcggtctcccgggccccgccgatccagtgcctgggcagaagggggttctccacgcagcacacgatccttgttgggcgacccccgtttgaggtcccctggatcgaagggcgctgaaagtcggctaagaagtcccgtccgagctaagcctatcccaggccagaagacatcagaagctgacgacgcggccggggccgcagccgctgctgcgcggccagcacctcgcgaggcccaagtttcatccgtgcgtattgtctccgcctccggcacggtcagcgaggaaatagaggttcttgagatggtaaaggaggatgaagcaccactggccctctctgatgctgaacagccgcccccggcaaccgaactggagtccccagccgaggaatgttcatgggccggtctgttctccttccaggacctgagggcggtccaccagcaattatgctccgtgaactcgcagctggagccttgcctgccggtgttccctgaggagccctcgggcatgtggacggtgctatttggcggtgcccccgagatgactgagcaggagatcgataccctgtgttaccaactgcaggtgtatctgggccacgggctagatacatgcggctggaaaatcctgagtcaggtgttgttcactgaaactgacgatcccgaggagtattacgaaagtctgtctgaactgcgccagaagggatatgaagaagtcctccagagggcccggaagcgtattcaggaactgctcgataaacataagaataccgagagcatggttgagctactggacctttaccagatggaggacgaggcctactctagcttggccgaagctactacagaattataccagtacctcctgcagcccttcagggatatgcgcgagttggccatgttgagacgccagcaaataaagatctccatggaaaatgactacttggggccccgccgtatcgagtccctccaaaaagaggacgcggactggcagaggaaggctcatatggcagtactgtccatccaagatctgacagtaaaatactttgagatcaccgccaaagcacagaaggcagtgtacgaccgcatgcgcgcagaccagaagaagttcggaaaagcatcctgggctgccgctgccgaacggatggagaaactgcagtacgccgtgagcaaagagactttgcagatgatgagagccaaagagatctgcctggagcaaaggaagcacgcactcaaggaagaaatgcagtccttaagaggcggaacagaagcaattgcgaggctcgatcaactcgaggctgattactatgatcttcagctacaattatacgaggttcaattcgaaattctcaaatgcgaagagcttcttctgacagcccagttggaaagtattaagaggctgatcagcgagaagagagacgaggtggtgtattatgatacctatgaatcaatggaggcgatgctcgagaaagaggaaatggccgcttcggcctaccttcagcgcgaggaacttcagaaattacagcagaaggctagacagctggaggcccgaagggggagagtttcagccaaaaaaagctacctgcgaaacaagaaggaaatttgtatagcaaagcataacgagaaaattcaacaacgtacacgtatcgaggacgaataccgcacccaccacacagtccaacttaaacgagagaaactgcatgacgaggaagagcggaaatcggcttgggtgagtcaggaaaggcagcggacacttgatagactgcgcacttttaagcagaggtacccggggcaggtcattcttaaatcaacacgcctccggctcgcccatgctcggcggaagggggctgctagcccagttctgcaggaggatcattgtgattcccttccgtcagtcctccaagtggaggagaagactgaggaggttggagagggcagggtcaagcgcgggcctagccagaccaccgaaccacagtctctcgtccaactagaagatacaagcctcacccagcttgaagccaccagcttaccactgtccggggtgaccagtgaactgccaccaaccatctcactgccactgttaaataacaatttggagccatgttcagtgacaatcaaccctctcccaagccccctgccacccacacccccccctccgccacctcccccccctcctccacctcccccacccctgcctgtggctaaagattcgggccccgagactctggaaaaagacctgccacggaaggagggcaatgagaaaaggattcccaaatcagccagtgctcccagtgcccatctgtttgacagctctcagctggttagtgccagaaaaaagctgcgcaagacagccgagggccttcagcgtagacgagttagttcccctatggatgaggttctggcatccctgaagcgcggttcttttcacttaaagaaggtcgagcaaagaactctccctccctttccagatgaggacgactcaaacaatattttggcccagatccgcaagggagttaagcttaagaaagtacagaaggatgtgctgagggagagttttactctgctccctgacaccgaccccctgacaaggagtatccatgaagcactaagaagaattaaagaagcatccccagagagtgaagatgaggaggaggcactgccttgtacagactgggagaattag

SEQ ID NO: 192084 - DNA, 2238 bp, synthetic construct
  misc_feature 1..2238: note = Description of Artificial Sequence: Synthetic coding sequence
  source 1..2238: mol_type = other DNA
atggaggtgatgaacctgatggagcagcccatcaaggtgaccgagtggcagcagacatatacatatgactccggcatccactcaggagcaaatacctgcgtgcccagtgtgtcaagcaaaggaatcatggaggaagatgaggcttgtggtaggcagtatactctgaaaaaaacaacaacttacacacagggggttccaccttcccagggggatctagaatatcagatgtcaacgaccgcgagggcgaaacgtgtgagggaagccatgtgtcccggcgtcagcggggaggacagcagtttgctgctcgcaacgcaagtcgagggccaagctacgaacctccaaaggctggccgaaccttcgcaactgttaaaaagtgccattgtgcacctgattaactaccaagatgacgcagaactggccacgcgtgccctgccagaacttaccaagttacttaatgatgaagaccccgtcgtggttaccaaggcagccatgattgtaaatcagctgtcaaaaaaagaggcttcgcggcgggcactgatgggcagccctcagttggttgctgccgtcgtaagaacaatgcagaacacttctgacctcgatacagctcgatgtacaacttctattctccacaacctgagccaccaccgggaaggcctgcttgcaatctttaagagcggcggaattcctgcactggtacgcatgctatcctccccagtagaatcagtgttattctatgcaattactactctgcacaatctgctgctgtaccaggagggcgcgaaaatggccgtgcgcctggcggatgggctgcagaagatggtgccactgctgaataaaaacaaccctaagttcctcgctatcactaccgattgtctgcagttgttagcttatggtaatcaggagagcaagctcattatcctggcaaacggcgggccccaggccctcgtgcagattatgagaaactacagttacgagaagttgttgtggaccacgtccagagtgcttaaagttctttcggtttgtccctctaacaagccagctatcgtggaggctgggggcatgcaagcccttgggaagcacctgacctccaacagcccaagactggtacagaactgcctgtggaccctgcggaacctcagcgacgtcgccactaaacaggagggactggagtcggtactgaagatccttgtcaatcagctgtccgtcgacgacgttaatgtgctgacctgtgccactgggaccctttcaaacctgacgtgtaacaacagcaaaaataagacgttagtgacccaaaactcaggggtggaggctttaattcacgccatcctgcgggcgggggataaggatgatataacggaaccggcggtttgtgctttgcggcacctcacctcccggcaccctgaagcagagatggcccagaactccgtcagactgaactatggtatccccgcgatcgtgaaactactgaatcaaccaaaccaatggcctctggtgaaagccactattggcttgatccggaatctcgccttgtgccccgccaaccacgctccattgcaggaagccgccgtgattccacgcctagtacagctgttggtgaaagcgcatcaggacgctcaaagacatgtagccgccgggacccagcagccctacacagatggggtacgaatggaagagattgtggagggttgcacaggggcactgcatatcctagctcgagatcctatgaataggatggagatttttcggctgaataccattcccctcttcgtgcagttgctgtactcctcagttgaaaacatccagcgcgtagcagctggagtcttgtgtgagctagcccaggataaagaggctgctgatgctatagacgcagagggggcatcagccccactgatggagctgttacacagccgcaatgagggcacagccacatatgcggcggcagttctgttccggatctcagaggacaagaacccggattatcgtaagagggtgagcgtggaactgacgaactccctgttcaaacacgacccagcagcgtgggaagctgcgcaaagcatgatccctatcaacgaaccttatggagatgacatggatgcgacgtacagacccatgtatagttccgatgtcccactggaccctttggagatgcatatggatatggacggcgactatccaatagacacgtacagtgatggactgcgaccaccttaccccactgcagaccacatgctagcatag

SEQ ID NO: 192085 - DNA, 2238 bp, synthetic construct
  misc_feature 1..2238: note = Description of Artificial Sequence: Synthetic coding sequence
  source 1..2238: mol_type = other DNA
atggaggtgatgaacctgatggagcagcccatcaaggtgaccgagtggcagcaaacgtacacatacgacagcgggatacatagcggggcaaacacatgtgtgcctagcgtttcgtcgaaaggtatcatggaagaagacgaggcgtgtgggcgccaatacacacttaagaagacaacgacctacacacagggtgtgcctccttctcagggagaccttgagtatcagatgtctacaacagcgagagcaaagcgtgtaagagaggctatgtgcccaggagtctccggagaggattcaagtctgctgctggcgacccaggtggaggggcaggcaactaatctacagaggcttgctgagccttctcagctgctgaagagcgccatcgtccatctcatcaattatcaggacgacgccgagctggcgactagggccctgcctgaactcacaaaactcctgaatgatgaagatccagtcgtggtgaccaaggccgccatgatcgtgaatcagctgagcaaaaaagaagcatctcgtagagccctcatggggagtcctcagctggtggcagccgtggtccggactatgcagaatacaagtgatctggacacagctcgatgtacgacgagcatcctgcacaacctttctcaccatcgagaaggcctcctggctattttcaagagcggcggaatccccgccttagtcaggatgctgtcctccccagtagaaagtgtactgttttacgcgataactactctacataaccttctcctttatcaggagggggctaaaatggccgtcagactggctgatggccttcagaagatggttcccttgctgaacaagaataaccctaagttcctggcaattacaacggattgtctgcaattactggcttacggaaaccaagagtctaaacttatcatcctggctaatggcggcccacaggctctggttcagattatgcgcaactattcctacgagaagctcttgtggaccaccagccgtgttctcaaggttctcagtgtgtgcccttctaataagcctgccatcgttgaggccggaggaatgcaggccctcgggaaacatttgacctccaactccccacgactcgtgcagaactgtctttggacacttcggaatctgagtgatgtggctaccaaacaggaagggttggagagtgtgttaaagattctggtgaaccagctttccgtggacgacgtaaatgtgctgacctgcgcgacaggaactttgagcaacctgacgtgtaataactccaagaacaaaacacttgttacacagaattccggcgtggaggctttgattcacgcaatcctcagagcaggcgataaggacgatattaccgagccagctgtctgtgctctcagacacctcacttcccgacaccccgaggccgaaatggctcagaactctgtccgcctaaattacggcattcctgccattgtcaaactcctgaatcagccgaatcaatggccactagtcaaagccaccatagggcttatccgcaatttagccttgtgccctgccaaccacgcccccttgcaggaggcagctgtgatccctcggttggtccagctgctcgtgaaagcccaccaggatgcccaaagacatgtagccgctggcacccaacagccgtatactgatggtgtgcgaatggaggaaatagtagagggctgtaccggtgccctgcatattctcgcaagagatccaatgaacagaatggagatattccgccttaataccattcccctatttgtgcagctgttatattcttctgttgaaaatatccagagagtggcagcaggcgtcctctgcgaactggctcaagataaagaagctgccgatgcaatagacgcagagggcgcatctgcacctctcatggagctgttacattcaaggaatgaagggactgcaacatacgctgccgcggtcctgttccggatttccgaagacaagaaccccgactatagaaaacgtgtgtctgttgaattgacaaattcgctgttcaaacatgatcctgccgcttgggaagccgcacagtctatgattcccatcaacgaaccctatggagacgacatggacgcgacatatcgccccatgtactcttcagatgtgccactcgatcccctggaaatgcatatggatatggatggggattaccctatcgatacctactcagacgggttgagaccaccttatccaacagccgatcacatgctcgcgtag

SEQ ID NO: 192086 - DNA, 2238 bp, synthetic construct
  misc_feature 1..2238: note = Description of Artificial Sequence: Synthetic coding sequence
  source 1..2238: mol_type = other DNA
atggaggtgatgaacctgatggagcagcccatcaaggtgaccgagtggcagcaaacatatacttacgatagcggtattcattcgggggccaacacttgtgtgccaagtgtgagttcaaagggtataatggaggaagacgaagcctgcggccgccaatacaccctcaagaagacaaccacatacacccagggcgtccctccaagccagggcgacctcgaataccagatgtctaccactgcacgcgctaagcgtgtacgggaagctatgtgtcctggcgtctccggcgaagatagcagtctcctactcgccacgcaggttgagggacaagccaccaatctgcaaagactcgccgagccgagccagcttcttaaatctgctattgtgcatctgatcaactatcaagacgacgccgagctagcaacccgcgcccttcccgagttaacgaaactgttaaatgacgaggatcccgtggtcgtgacaaaagcagccatgattgtcaatcaactgtctaaaaaagaagcttcccgccgagctctcatgggcagtcctcagctggtggccgcggtggtgagaactatgcaaaataccagcgacctggataccgcccgctgcaccacctccatattgcataatctgagccatcacagggagggactcctcgctatattcaagtccgggggaatccctgctctggtgcgcatgctgtcgtcaccagtcgaatccgtgcttttttatgctattactaccctccacaatttgctcctgtatcaggagggagcaaagatggccgtgcgactggccgatgggttacagaagatggtgccactgctgaataagaataatcctaagttcctggctattactacagattgtctgcagcttctagcctatgggaaccaggagtccaagttgatcatcctagcaaatggtgggccccaggcactggttcagataatgcggaactatagttatgaaaagctgctttggaccacatcccgcgtcctgaaggtgctgagtgtctgtccatccaataaaccggctatagtggaagcaggcgggatgcaggccctgggtaaacacctaaccagcaattccccgagattagtgcagaactgtctttggacactgcggaacctatcggacgtcgctacaaagcaggagggcctggagagcgtgctgaagatactagttaatcaacttagtgtcgatgatgtgaatgtcctaacttgcgccactggaacactgagtaatctcacttgtaacaacagcaaaaacaaaacactcgtcacgcagaacagtggagtggaggccctgattcatgccatattgcgggcgggggataaagacgacatcaccgaaccagctgtgtgcgccctgcggcatctcacatcacggcaccccgaagctgagatggctcagaactctgttcgcctgaactacgggatcccggccatcgtgaagctgctgaaccagcctaaccagtggcctctcgtcaaagcaaccatcggtttgatacgcaatctggccttgtgtccagcaaatcacgcacccctgcaggaagccgccgtgatccctcgcctggtgcagctgctcgtgaaggctcaccaggacgcccagagacacgtagccgcaggaacccagcagccttacacggatggagtgcggatggaagagatcgtcgaaggctgtactggggcactccatatattagccagggacccaatgaaccggatggaaatctttcgcctgaatactattccgctgtttgtccaactgctctattcaagtgtcgagaatatccagcgggtcgctgctggggtgctgtgtgaactcgcccaagacaaagaagctgctgatgccatcgacgccgaaggggctagtgcgcctcttatggaattactccattcccgtaacgagggaaccgccacatacgccgccgccgtgctgttccggatttccgaagataagaatcccgattaccgtaaaagggtttctgtggaactaactaactcgctatttaaacacgaccctgccgcttgggaggcggcacagtccatgattcccataaacgagccctatggggacgatatggacgctacctacagaccgatgtacagtagcgacgtcccgctggatcctctcgagatgcatatggatatggacggggattatcccattgacacctattcagatggactcagaccaccatatccgaccgcggaccatatgctagcctag

SEQ ID NO: 192087 - DNA, 834 bp, synthetic construct
  misc_feature 1..834: note = Description of Artificial Sequence: Synthetic coding sequence
  source 1..834: mol_type = other DNA
atggaggtgatgaacctgatggagcagcccatcaaggtgaccgagtggcagcagacctacacctacgacagcggaatccattctggagccaatacttgtgtgccatctgtgtcaagcaagggcattatggaagaggacgaggcctgcgggagacagtacaccctgaagaaaaccacaacatacacacagggagtgcctccatctcagggcgacctcgaatatcagatgagcaccaccgctagagcaaaacgggtgagggaggccatgtgccctggggtaagcggggaggactcaagccttctgctcgccacccaggtggagggtcaggccactaaccttcagagactcgcggaaccctcccagctgttgaagagcgccatcgtgcacctgatcaactaccaagatgacgccgaacttgcaacaagggctctcccagaactaacaaaactgcttaacgacgaagacccggtagtagtgaccaaggctgcgatgatagtgaatcagctgtcaaagaaagaagcttcccggagggccctgatggggagtccccaacttgtggccgctgtggtgcggacaatgcagaacacttcagatttagacactgcccgatgcacaacgagtatcctccacaatctctcgcatcatagggaggggttgctggcaatctttaagtcaggaggcattcctgcacttgtgcgaatgctatctagcccggtggaatctgtcctcttctatgccatcaccacactgcacaatctgctgctgtaccaagagggggcaaaaatggcagtcaggctggctgacggacttcagaagatggtgcccctgctgtag

SEQ ID NO: 192088 - DNA, 708 bp, synthetic construct
  misc_feature 1..708: note = Description of Artificial Sequence: Synthetic coding sequence
  source 1..708: mol_type = other DNA
atggaggtgatgaacctgatggagcagcccatcaaggtgaccgagtggcagcagacttacacatatgactccggcatccatagcggagctaacacatgtgttccctctgttagctctaagggaataatggaagaggatgaggcatgtggtaggcagtacacactgaagaagactactacttatactcagggtgtacccccttcgcagggggacctggagtaccaaatgtcaacaaccgcccgcgccaagcgggtcagggaggctatgtgcccaggggtctctggcgaagatagctcccttctccttgctactcaagttgagggacaggcaacgaatcttcaaaggttggccgaaccgagtcaattgctcaagtctgctattgtccacctgattaactatcaagacgacgcagaactggccacccgtgccctccccgagctgacgaaactgctcaatgatgaggacccagttgttgtcaccaaggcagccatgattgtgaatcagctcagcaagaaggaggcctcacggcgcgcccttatggggagcccacaattagtagctgccgtcgtgcggaccatgcagaataccagtgatttggacaccgccaggtgtacaacttctatcctccacaatttaagtcaccatagagagggcctactggctatttttaagtccggcggcatcccagctctcgtcaggatgctgtag

SEQ ID NO: 192089 - DNA, 891 bp, synthetic construct
  misc_feature 1..891: note = Description of Artificial Sequence: Synthetic coding sequence
  source 1..891: mol_type = other DNA
atggaggtgatgaacctgatggagcagcccatcaaggtgaccgagtggcaacaaacgtatacatatgattctggaatccattcgggagcaaacacctgtgtgcccagcgtttcttccaaagggatcatggaagaagacgaagcttgtgggaggcagtatacactgaagaagaccactacttacactcagggggtgccgccaagtcaaggggacctagaatatcagatgtctaccaccgccagggccaagcgagtccgcgaggccatgtgcccgggcgtctcgggtgaagattccagccttcttctggccacacaagtggagggtcaagcaactaacctgcaacgcctcgcggaacccagccagctgctgaaaagtgcgatcgttcacttgataaactaccaggatgacgcggagctggcaacccgcgcacttccagagcttaccaagctactgaacgatgaggatcctgtcgtcgtgacaaaagccgctatgattgtgaaccagctgtccaagaaggaggccagccggcgggctctgatgggctcaccacagctggttgcagccgttgtccggaccatgcaaaacacatcagatctggacactgctagatgcacaacctctatcttacacaacctaagccaccatcgcgaggggctgctggccattttcaaatccggcggcataccagctctggttagaatgctgtcaagccccgtggaaagtgtcctgttttatgctatcacaaccctgcacaatctgctcctttatcaggaaggggctaagatggcagtgaggctggccgatgggttacagaaaatggtgcctttgctgaacaaaaataatcctaaatttctggcgatcaccacggactgcctgcagttattggcctag

SEQ ID NO: 192090 - DNA, 261 bp, synthetic construct
  misc_feature 1..261: note = Description of Artificial Sequence: Synthetic coding sequence
  source 1..261: mol_type = other DNA
atggaggtgatgaacctgatggagcagcccatcaaggtgaccgagtggcagcagacttatacctacgattcaggcatacactctggggctaatacatgtgtgccttcagtgagttccaagggcatcatggaggaggacgaggcctgtggacggcagtacacacttaagaagaccacgacatacacacagggggtgccgccaagccaaggagatctcgaataccagatgagcacaactgctcgagccaaacgagtgaggtag

SEQ ID NO: 192091 - DNA, 897 bp, synthetic construct
  misc_feature 1..897: note = Description of Artificial Sequence: Synthetic coding sequence
  source 1..897: mol_type = other DNA
atggaggtgatgaacctgatggagcagcccatcaaggtgaccgagtggcaacagacatacacctatgacagcgggatacactcaggggctaatacttgtgtgccctctgtttcctccaaaggcatcatggaggaagacgaggcctgcgggcggcagtatacactgaaaaagacaaccacttacacacagggagttccgccatctcagggcgaccttgaataccaaatgtcgactacagcaagggccaaaagagtaagggaggctatgtgcccaggggtctctggcgaagattcttccctgctgttagccacccaggtggaggggcaagcaaccaacttgcagcggctggccgagccttcccagcttctaaaatccgctatcgttcatctgatcaattatcaagatgacgccgaactggcaacacgtgcgctccccgaactcaccaagttgctcaacgacgaagatccagtggtcgtgactaaggcagcaatgattgtgaatcaactgtctaaaaaggaggcgtcacgccgggccctaatgggaagccctcagctggtggcggcagtcgtgagaaccatgcagaacacttctgatctagatacagcccgctgcaccacctcaatactgcacaatttatcacaccatcgcgaggggctgcttgcaattttcaaatccggaggaatcccagccctggttcggatgctgtcatcacctgtggaaagtgtgttattttatgccattaccacgttacataatctgctactgtaccaggagggcgccaaaatggcagtgagattggccgatggtctgcagaagatggtgcccctgcttaataaaaataaccctaagtttttagccattactacagactgtctccagttacttgcctacggctag

SEQ ID NO: 192092 - DNA, 1776 bp, synthetic construct
  misc_feature 1..1776: note = Description of Artificial Sequence: Synthetic coding sequence
  source 1..1776: mol_type = other DNA
atggaggtgatgaacctgatggagcagcccatcaaggtgaccgagtggcagcagacctatacttacgatagtggcattcacagcggcgctaacacatgtgtcccatctgtgagcagcaaaggaatcatggaagaagatgaggcctgcggccgccaatatactttaaagaagaccacaacgtatacgcagggcgttcctccttcccagggtgaccttgaataccagatgagcactaccgcgcgtgcaaagagagtcagagaagctatgtgtcccggggtctccggagaggattcttcccttctgctggcaacgcaagttgaaggtcaagctactaacttacagagactggctgaaccaagccagctcctgaagtctgccatcgtgcatttgatcaactaccaggatgatgcggagttggcaacccgggccttgcctgagttgaccaaattgctgaacgacgaggacccagtggtcgtaacaaaagctgctatgatcgtcaatcagctttctaaaaaagaggccagccggagggctctgatgggcagtccccaactggtggctgctgtcgtcagaactatgcaaaacactagcgacctggatacagcccgatgtactaccagtatcttacacaatctttcacaccaccgcgaaggattgcttgccatcttcaagtctggaggcatccccgcgctggtgaggatgttaagctcacctgtggagagtgtcctgttttacgctatcactaccctgcacaatctgctcttataccaagaaggcgctaagatggccgttaggctcgcagatgggctgcagaagatggttccccttttgaataagaacaacccaaagtttttagccatcacaacggactgcctacagctgctggcttatggtaaccaggagtcaaagatcctcactgcaaccgttgacaacgctaacattctcctgcagattgacaatgcccggctggctgctgacgattttaggaccaagtttgagaccgaacaggcccttcggttaagcgtggaggccgatatcaatggcctcaggcgcgtgctggacgagcttacgctagcgcgtgccgatctagagatgcagattgagaatctgaaggaggagttggcgtaccttaagaagaaccatgaggaagagatgaacgcgcttaggggccaagtggggggagagataaacgtggagatggatgcagcgccgggcgtagatctctcaaggatactcaacgagatgcgcgatcaatatgaaaagatggctgagaagaaccgcaaagatgctgaggattggttcttttcaaaaaccgaagagctcaatcgcgaggtggcgactaattccgaactagtgcagtctggaaaaagtgaaatttccgagctgcggagaaccatgcaggcactggaaattgaactgcagtcacagttgtccatgaaggcctctttagagggaaatctggctgagaccgagaatcgttattgtgttcaactgtcccagattcagggcctgataggtagcgtcgaagagcaactggcccagctgcgctgcgagatggagcagcaaaatcaggagtacaagatactgttggacgtgaagactaggttagagcaggaaatagctacctatcggaggctccttgaaggagaagacgcccacctgacacagtataagaaggaacccgtgacgacacgacaggttaggacaattgtggaagaggtgcaggacggaaaggtgatatcttctcgtgaacaggtccaccagacgactcggtag

SEQ ID NO: 192093 - DNA, 897 bp, synthetic construct
  misc_feature 1..897: note = Description of Artificial Sequence: Synthetic coding sequence
  source 1..897: mol_type = other DNA
atggcccggcggagccggcaccggctgctgctgctgctgctgcggtacttagtggttgcgctcggctatcacaaggcatatggatttagcgcccctaaggatcaacaggtggtaactgctgtcgagtatcaggaggcgattcttgcctgcaagacaccaaagaaaaccgtatcatctaggctagaatggaagaaattgggacgcagcgtttccttcgtttactaccagcagacacttcaaggagactttaaaaatagagctgaaatgattgatttcaatattaggatcaaaaatgtaacaagatcagacgccggcaagtaccggtgtgaagtttctgctccgtccgaacagggtcaaaacctggaggaagacacagtgacacttgaagtgctcgtagcccccgctgtcccaagctgcgaggttccatcttcggcactgtctggcactgtcgtcgagctgaggtgccaggataaggagggtaaccccgcccccgaatatacttggttcaaagatggaatcaggcttctggaaaatccaagacttgggtcacaaagcaccaatagctcctataccatgaataccaagaccggcactctccagtttaacacagttagtaaacttgatactggggaatattcctgcgaagcccgaaacagcgttggctacaggcggtgccctgggaagcgcatgcaagttgacgacttgaacatctccggcatcatagcggccgtggtggttgttgccctggtgatttcagtgtgcggtttgggcgtctgctacgcacaacgcaaggggtattttagttctaagtatatgtttatgaagtctaattcctcatcgaaagcaacaacgatgagtgaaaacgactttaaacacactaaatctttcattatatag

SEQ ID NO: 192094 - DNA, 789 bp, synthetic construct
  misc_feature 1..789: note = Description of Artificial Sequence: Synthetic coding sequence
  source 1..789: mol_type = other DNA
atggcccggcggagccggcaccggctgctgctgctgctgctgcggtatctggtggtcgccctaggataccacaaggcctacggcttctcagctccaaaagatcagcaggtcgttacagccgtcgaatatcagggagattttaagaaccgcgctgagatgattgattttaacattcgaataaagaatgtgactcgttcagacgctggtaaatacagatgtgaagtgagcgctccctcggagcaaggtcagaaccttgaggaggacaccgtgaccttggaggtactagtcgccccagctgtgccctcctgcgaggtcccatctagtgctttatccggcactgttgtcgaactcaggtgccaggataaggaagggaatcccgctccggaatatacatggttcaaggacgggatcagattgctagaaaatccccgcctgggatcacagtcgaccaattcctcttacactatgaataccaagaccggtactctccagtttaatacagtcagcaagttagacacgggtgagtatagttgcgaggccagaaacagcgtcggatacaggaggtgccctggaaaaagaatgcaggtcgatgatttaaacatttctggcataatcgcagctgttgtggtggtcgccttggtcattagcgtgtgcggacttggtgtgtgttatgcccaacgaaaaggatatttttcaaaggaaacctcgttccagaaaagtaatagctcttccaaagcaacaaccatgtccgaaaatgacttcaaacatacaaagagttttattatctag

SEQ ID NO: 192095 - DNA, 897 bp, synthetic construct
  misc_feature 1..897: note = Description of Artificial Sequence: Synthetic coding sequence
  source 1..897: mol_type = other DNA
atggcccggcggagccggcaccggctgctgctgctgctgctgcggtacctggtggttgcccttggctaccacaaggcatacggcttctccgcccctaaggatcagcaggtggtgactgcggtggagtaccaggaggctattctggcttgcaagactcctaaaaaaaccgtaagcagcaggttggagtggaaaaaactgggccgttcagtcagcttcgtgtattatcagcaaaccctccagggcgacttcaagaatcgcgccgagatgattgacttcaatatacggattaagaatgtgacaagatcggatgccggtaagtacaggtgcgaggtttccgcacctagcgagcagggacagaatctggaagaggatactgtcactctggaggttctagtagctcctgctgttcctagctgcgaggtgccaagttcggctctctccggaacggttgtggagctgaggtgtcaggataaggaaggaaaccccgcccccgaatacacctggttcaaagacggcatccgtctgcttgaaaatcctagattaggctctcagagcacgaactccagctacacgatgaatacgaagactgggactctccagttcaataccgttagcaagttggatactggcgaatactcctgcgaggcccgaaattccgttggttataggcgatgccctggcaaacgaatgcaggtggacgacctgaatatcagcggaattattgccgcagtcgttgttgtcgcactcgtaatctcagtgtgcggcttgggtgtctgctacgctcagcgaaaaggctattttagcaaagagacctctttccaaaagtctaacagcagcagtaaagccactacaatgagcgaaaacgacttcaaacacactaaatcctttattatctag

SEQ ID NO: 192096 - DNA, 939 bp, synthetic construct
  misc_feature 1..939: note = Description of Artificial Sequence: Synthetic coding sequence
  source 1..939: mol_type = other DNA
atggcccggcggagccggcaccggctgctgctgctgctgctgcggtacttggtggtggcactggggtatcataaagcctatggcttctctgctcccaaggaccagcaggtggtgaccgctgtggaatatcaggaagccattttggcatgcaaaactcccaaaaagactgtgtcgagtcgactggaatggaagaagctgggacgcagtgtaagcttcgtgtattatcagcagacactccaaggcgactttaagaaccgcgctgaaatgatcgattttaacatccggattaaaaacgtcaccaggtcagatgccggaaaataccgttgcgaagtcagcgcaccgtctgaacaggggcagaacctggaagaggatacggtcaccctcgaggtccttgtggcaccggccgtgcctagttgcgaagtgccctcctccgcgctgtctggaacggtggtcgagttaaggtgccaggataaagagggtaacccagcccctgagtacacttggtttaaggacggtattaggctcctggagaatccaaggcttggatcgcagtccactaatagctcatacaccatgaatacgaaaacagggactctgcagtttaataccgtcagtaagctggacactggagagtactcttgcgaagcccgtaattctgttggatatcgaagatgtcccggcaagcgcatgcaagtagatgacctcaatatctccggcatcatcgccgccgtggtggtggtggcgttggtgattagcgtgtgtggtttgggcgtgtgttacgcacagcggaaagggtatttttccaaagagacatctttccagaagtctaattcctcaagcaaagcaactactatgtccgagaatgtccagtggctgactccagtcatacccgccctttggaaagcagcagctggtggctcccgtggccaggagttctag

SEQ ID NO: 192097 - DNA, 933 bp, synthetic construct
  misc_feature 1..933: note = Description of Artificial Sequence: Synthetic coding sequence
  source 1..933: mol_type = other DNA
atggccctgcggcggcccccccggctgcggctgtgcgcccggctgccagattttttcctccttctacttttcaggggctgcttaatcggcgctgtcaatctcaaatcatcgaaccgcacgcccgtagttcaggaattcgaaagcgtggagcttagctgtataattaccgactctcaaacaagcgacccacgaattgagtggaaaaaaattcaggacgagcagaccacctacgtgttttttgataacaagattcagggcgacctggctgggagagccgaaatcctcggcaagacaagtctgaaaatatggaacgtgacgaggcgggactccgcgctttaccggtgtgaggtcgtggccagaaatgatagaaaggagatcgacgagatagtgatagagctaacggttcaggtgaaacccgtgactcctgtctgcagagtgccaaaggcagttcccgttgggaagatggccacattgcattgccaggagagcgaaggccacccaaggccacactactcgtggtaccgcaacgatgtgcccttacctacagatagtagagcaaacccaagatttcgtaactcctcttttcacctcaattctgaaactggtacactagtcttcactgccgttcacaaagacgactccgggcagtactattgtattgcctctaacgacgccggttctgctaggtgtgaagaacaagaaatggaagtctatgatcttaatattggcggaattatcggcggtgtccttgtggttctggccgtcctggccctaattacattagggatatgttgtgcctatcgcagaggttacttcatcaataacaaacaagatggtgaatcctacaagaatcccgggaagccagacggtgtgaactacatcagaaccgacgaggagggcgattttcgtcataagtcatcctttgttatctag

SEQ ID NO: 192098 - DNA, 780 bp, synthetic construct
  misc_feature 1..780: note = Description of Artificial Sequence: Synthetic coding sequence
  source 1..780: mol_type = other DNA
atggccctgcggcggcccccccggctgcggctgtgcgcccggctgccagacttttttttattgttactgttcagagggtgcctgataggcgcagtcaatctcaagtcaagtaataggacaccagtggtgcaggagtttgaatccgttgagctgtcctgcattataaccgattctcagacgagcgacccgagaattgagtggaagaagatccaggatgaacagactacgtacgtgttcttcgataacaaaattcaggtcaagccagtaacccctgtgtgtcgtgtccccaaagccgtgcccgtaggtaaaatggccactctgcactgccaagaatctgaggggcacccacgcccccactactcttggtataggaacgacgttccgttgccaactgactcccgggcgaacccccggttccggaactctagttttcacctaaacagtgagactggaactttggtgttcaccgccgtccacaaagatgacagtgggcagtactactgcattgcctctaacgacgctggtagcgctcgttgcgaggagcaggagatggaagtgtatgatctgaacatcggcggtattatcggaggagttcttgtcgtcctggccgtactagctctgattaccctggggatctgctgtgcctacagacggggttatttcattaataataagcaagacggggagtcctacaagaacccagggaagcccgacggcgtgaactatattagaaccgatgaagaaggtgatttccgccacaaatcctccttcgtgatctag

SEQ ID NO: 192099 - DNA, 1068 bp, synthetic construct
  misc_feature 1..1068: note = Description of Artificial Sequence: Synthetic coding sequence
  source 1..1068: mol_type = other DNA
atggtgcccgcccggctgggccccgccgtggccatggtgaccggcgcaggccgccgggtgctcgccggctgggcccatgccagaggcgattataagccgcgtagagccgctgctggacccagcgctactctggatatggctcttagacgacctccgcggctgcggctgtgtgcgcggctgcccgacttttttctgcttctactgttccgaggatgtctcatcggagcggtcaacttgaagtccagcaaccggacgcccgtggtccaggagttcgagagcgtggagctgagttgcatcatcaccgactctcagactagtgacccgcgcatcgagtggaaaaagattcaggacgaacagactacctatgtgttcttcgataataagatccagggggatctggcagggagagctgaaatcctaggaaaaacatctttgaagatttggaacgtgacacggcgggattcagctctctatcggtgtgaagtggtagctcgtaacgatagaaaagagattgatgagatagttatcgagctgaccgtccaggtgaagcccgtaacaccagtgtgtagagtgcccaaggccgtgccggtggggaaaatggccacattacactgccaggagagcgagggccacccgagaccacattattcttggtataggaacgacgtccccctgcctacagattcacgtgctaaccctagattcagaaacagctccttccaccttaattcggaaaccggtaccttggtctttacagctgttcacaaggatgatagtggtcagtattattgcatcgcttccaatgacgccggtagcgcaaggtgcgaagagcaagaaatggaagtctatgatcttaacatcggcgggattatcggcggtgtgttagtggtgctggcggtgttagccttgattactttgggaatctgctgcgcctaccgccgcgggtattttatcaataacaaacaggatggggaaagttataaaaacccagggaagcctgacggggtcaactatatccgcaccgatgaagaaggcgacttccgccacaagagctcatttgtcatttag

SEQ ID NO: 192100 - DNA, 1986 bp, synthetic construct
  misc_feature 1..1986: note = Description of Artificial Sequence: Synthetic coding sequence
  source 1..1986: mol_type = other DNA
atgaccggcggccggttcgacttcgacgacggcggcacctactgcgggggctgggaggagggcaaagcacacggccatggcatatgcaccggaccgaaaggtcagggggagtattcagggtcctggtcccatggttttgaggtggtgggagggtatacttggccttctgggaatacctatcagggttactgggcgcagggtaagagacacggcctgggcgtggagacaaagggcaagtggatgtatagaggggagtggagccatggctttaagggcagatatggcgttaggcagtccctgtgcactcccgcccgatatgaaggcacctggagtaacgggctgcaggacgggtatggggtcgagacatatggtgacggcggaacgtaccaggggcagtgggcaggaggtatgagacacggatatggagtcagacaaagtgtgccatacggcatggccacggtcatcagatccccactccggacgagcctggccagtctccggtcggagcagtcaaatggaagtgtccttcacgatgccgccgctgctgccgacagtcccgccggtactaggggaggttttgtgcttaatttccatgctgacgctgagctggctggcaagaaaaaaggcgggctgtttaggcgtggttctcttctcggttccatgaagctgagaaagtctgaaagcaagagtagtattagcagtaagaggtctagcgtgcggagtgatgctgccatgtctcggatttcgtcatctgatgctaacagcacaatttcctttggcgatgtcgattgtgacttctgtcccgtcgaggatcacgtcgacgcaacaactactgaaacttacatgggggaatggaagaatgataaacggaacggtttcggcgtctccgaacgctccaatggcatgaaatatgaaggtgaatgggctaacaacaaacggcacgggtacggttgtaccgtttttcccgatggaagcaaggaagaggggaagtataagaataatatcctggtgagaggtatacggaaacagttaatacccatcaggcatacaaaaactagagagaaggtggatcgggctattgaaggcgcacagcgggccgcagccatggcacgtacaaaagttgaaatagccaactcacggaccgctcacgcgcgcgccaaagcggacgcagctgaccaggccgctctggccgcgaggcaggagtgcgatattgctagggccgtcgcaagggaactgagtcccgatttctaccagcccggacccgactatgttaaacagaggtttcaggagggcgtcgatgcgaaagaaaaccccgaggagaaagtgcccgagaagccccctaccccaaaggaatcgcctcacttctacagaaaaggaacaacacccccaagaagtcctgaggcatcccctaaacactcccactctcctgcatctagtccaaagcctctcaagaagcaaaatccttctagcggcgcacgactcaaccaggacaagcgttccgtggctgacgaacaggtgacagccatcgttaataaaccccttatgtctaaagctcccacgaaggaggccggggcagtagtcccccagtcaaagtattccggccgccaccatattccgaatccgtccaacggcgagcttcattcccagtatcacggctactacgtgaagctgaacgccccgcagcacccgccggttgacgtggaagatggcgacggtagctctcaaagctcttctgcactcgtacataaaccaagcgcaaacaaatggtcgccttccaagtctgtgactaaacctgtcgcaaaagagtctaaggccgagccaaaagcaaaaaagagtgagctggctattccaaagaatcctgcctcgaatgacagttgtccggccctagaaaaggaagccaactcaggtccaaattccatcatgatcgtgttggttatgctgctgaatatcggtctggccattctctttgtgcacttcctgacatag

SEQ ID NO: 192101 - DNA, 390 bp, synthetic construct
  misc_feature 1..390: note = Description of Artificial Sequence: Synthetic coding sequence
  source 1..390: mol_type = other DNA
atgagcggcggccggttcgacttcgacgacggcggcgcctactgcggcggctgggagggcggtaaagcgcacgggcatggcctgtgtaccggaccaaaggggcaaggagaatactcgggcagctggaacttcggctttgaggtggctggagtctatacttggcctagtggcaacacgtttgagggttattggagtcaggggaagagacatggtctgggaattgagaccaagggacgatggctgtacaagggtgaatggacacacggattcaagggtagatatgggattagacagtcttcctcatctggcgccaaatatgagggaacttggaataacggcctccaagacggatatgggacggaaacgtacgccgatgggggcatgtgttag

SEQ ID NO: 192102 - DNA, 2091 bp, synthetic construct
  misc_feature 1..2091: note = Description of Artificial Sequence: Synthetic coding sequence
  source 1..2091: mol_type = other DNA
atgagcggcggccggttcgacttcgacgacggcggcgcctactgcggtggttgggaaggcggcaaagcccatggtcacggcctctgcactggaccaaaagggcagggggagtactccggcagctggaatttcggattcgaggtcgccggagtctatacttggccttcgggaaatacattcgaaggctattggtcacagggcaagaggcacggcctcggcatcgaaacgaaaggacgctggttgtataagggggagtggacccatgggtttaaaggcaggtacggaatccgccaaagcagctcctctggcgctaaatatgaagggacctggaataacgggctccaggacgggtatgggactgagacctatgcggacggcgggacttatcagggacagtttaccaacggcatgcgacacggttacggtgtgagacagtctgtcccctacggcatggccgtggttgtccggagtcccctgcggacttccctaagtagcctaagaagtgaacacagtaacggcaccgtcgctcccgactcacccgccagtcctgccagcgacgggccggctctgccttcacccgcgatccctcgcggggggttcgcgctgtcattgctggccaatgcagaagctgcggctcgcgccccaaaaggcggaggcctctttcagagaggagctctgcttggaaagcttagaagggcggaatctcggacgtcagtgggcagccaacgatccagggtctctttcctgaagagtgatcttagctcaggcgcctcggacgccgccagcaccgcgagcttaggtgaagctgcggagggggctgatgaggcagctccattcgaagccgacatcgacgccaccaccacagagacttatatgggcgaatggaagaatgacaagcgaagcggtttcggggtttcagagagatcttctggtctgagatacgagggggaatggctggacaatctccgccatggatacgggtgcaccaccctgcctgacgggcaccgggaggaaggcaagtacagacataacgtgctggtcaaagatacaaagcgacgcatgctccagctaaagtctaacaaagtgcgtcaaaaagtcgagcattccgtcgagggcgctcagagagctgccgcaattgctaggcagaaggcagaaatcgcagcatctcggacctcccatgccaaggccaaagcagaggcagctgaacaggccgccttggctgccaatcaggagagtaatattgctcggaccctagctagagaactggctcccgacttctaccagcccggaccagagtaccagaagcgaagactactgcaggaaattctagaaaatagcgaaagtctgctggagcccccagatagaggtgctggcgccgccggactcccgcaacccccgcgcgagtctccccagttgcatgagagggagacacccagaccagaaggtggcagcccttcacctgccggaactcctcctcagccaaagagacccagacccggagtttccaaggacggtcttttatcaccaggggcctggaatggcgaaccctctggtgagggcagccgtagcgttactccctcagagggcgctggcagaaggtcaccagccaggccagctacggaaaggatggctatcgaagcactccaggctccacccgctccctctagagaacccgaggttgccctctaccaggggtaccacagttatgccgtccgtactactccgccggaaccgccccctttcgaggatcagcctgagcctgaggtttccggcagcgaatcggcccccagcagtccagccacagctcccctgcaagccccaactcttcgggggccagagcctgccagggagacccctgcgaagctggagccaaaacccattatccccaaagcagaacctcgggccaaggcgcgaaaaacagaggccagaggactcaccaaagctggagcaaagaagaaggcccggaaggaggctgcgctggcagccgaagctgaggtagaggtggaagaagtgccgaacaccatcttgatttgcatggtgatcctccttaacatcggcctggcaatcttgtttgtgcatttacttacttag

SEQ ID NO: 192103 - DNA, 2247 bp, synthetic construct
  misc_feature 1..2247: note = Description of Artificial Sequence: Synthetic coding sequence
  source 1..2247: mol_type = other DNA
atgagcagcggcggccggttcaacttcgacgacggcggcagctactgcggaggctgggaggatggtaaggctcacggccatggcgtctgcaccgggcccaaaggccagggcgagtataccggttcctggtctcacgggttcgaagtattgggtgtctacacatggccctcagggaacacctaccaggggacctgggcccagggcaaacgacacgggatagggttagagagcaaggggaagtgggtgtacaagggcgaatggacgcatgggtttaaagggaggtacggtgtccgcgagtgcgcagggaacggggcgaagtatgaagggacttggtccaacgggttacaggacggctatgggacagagacgtatagcgacggcggaacataccaggggcagtgggtaggtggcatgcgccaggggtatggggttcgccagtccgtcccgtacgggatggcagcggtgattagatcccctttgcggacgtccataaacagtctgcgcagtgaacacaccaacggtacggccctgcaccctgacgcgtctcctgctgtggctgggtcaccagccgtcagccggggtggtttcgtgctagtggcccacagcgacagtgaaattctgaaatccaagaagaaagggcttttccgcaggtccctgcttagcggactgaaacttagaaagagcgaatccaaaagcagtctggcttctcagaggagtaagcagagtagtttccggtccgaggctgggatgtcaacagtcagttctaccgccagtgacatccactctaccatcagcctcggggaggcggaagctgagctcgctgtgatcgaggatgatatcgacgcaaccactacggagacttatgtcggcgagtggaaaaatgataaaaggagtgggtttggcgtatcacaacgctctgatggtctgaagtacgaaggcgaatgggcctccaaccgaaggcatgggtatggatgcatgacttttcccgatggcacaaaggaagagggaaaatacaagcagaatatcttagtcggcggaaagcggaagaatctgatcccgctgagagccagcaagatcagagagaaggtagatcgcgcggttgaggctgcagagcgtgccgccacaattgctaaacaaaaagccgaaattgccgctagccggactagtcactctcgggcaaaggccgaggccgccctaacggccgcccaaaaagctcaggaagaagcaagaatagcacgcataactgctaaggagtttagcccctccttccagcacagggaaaacgggctggagtaccagcgcccaaagcgccagacctcgtgcgatgacatagaggtgctgtctactgggacaccgctgcagcaggagtcccctgagctgtaccgtaaagggaccacgcctagtgatctcactcccgatgatagccctctccagtcctttccgaccagccccgctgccacgcctcctccagctccagctgctcggaacaaagtggcccatttctcaaggcaggtaagcgtggatgaagagagaggcggagatatccagatgctcctggagggacgggccggtgactgtgcccggtcatcttggggggaggagcaagctggaggaagcagaggagtgcgctctggagccttaaggggtggcctgctggtggatgacttcagaactaggggatctggtcgaaagcagccaggaaatcccaaacctagagagcggagaacagaaagcccccccgtcttcacatggacctctcaccacagggcatcaaaccattccccgggagggagccgtctactggagctgcaggaagagaaactgagcaattatcgcatggagatgaaaccgctactgaggatggagacccacccccagaagagacgctacagcaagggcggagcctgccgtgggctgggagacgaccacagacccgaagatcggggattcggagtgcagagactgcgctcaaaagcgcagaacaaagagaatttccgcccagccagttccgctgagcccgccgtccagaaactggcctcactgcgactgggaggagctgaacctaggcttctaaggtgggatttgaccttttctcccccccagaagtcattgccggtggccctggaaagcgatgaggaaaatggagacgaattgaagtccagtactggctccgcccccattcttgttgtgatggtgatcctcctgaatattggagtcgcaattcttttcatcaatttttttatctag

SEQ ID NO: 192104 - DNA, 561 bp, synthetic construct
  misc_feature 1..561: note = Description of Artificial Sequence: Synthetic coding sequence
  source 1..561: mol_type = other DNA
atgagcagcggcggccggttcaacttcgacgacggcggcagctactgcggcggatgggaggatggcaaagctcatgggcacggtgtgtgtactggccctaaaggccagggggagtataccggttcttggtcccacggcttcgaagtgctcggtgtgtatacttggccgtcgggcaacacatatcaaggaacatgggcgcaggggaagcgtcacggcatcggcctcgagtctaaaggcaaatgggtttataagggagagtggacgcacggcttcaaaggaagatatggcgtgagggagtgcgccggtaacggggcgaaatacgagggcacatggtctaatgggctccaggatggctatggaaccgagacctactcggatggagatgccactgccttcggcgccgaaccaggacccgaggctagagagctgcccgctgcagccgccgccgccgcagcagccgccgcagcagctgtcaggtggttcctctgtcgggagccatggccagccctccagctgccagcatgcctagactctccaatctctactcctcagtgtacctag

SEQ ID NO: 192105 - DNA, 96 bp, synthetic construct
  misc_feature 1..96: note = Description of Artificial Sequence: Synthetic coding sequence
  source 1..96: mol_type = other DNA
atgcccccccacagcggccagagccggggccggaagcccggcagctgtttgctcttgcttctgctcctcctcctactcctcctgctgctcctgtag

SEQ ID NO: 192106 - DNA, 1836 bp, synthetic construct
  misc_feature 1..1836: note = Description of Artificial Sequence: Synthetic coding sequence
  source 1..1836: mol_type = other DNA
atgcggcagggctacggcgtgcggcagagcgtgccctacggcatggcagctgtcatacggagccccctgcggacgagcattaatagccttcgttcagaacacacaaatggtactgcgctgcatccagatgcgagccctgcggtggcaggctcccccgccgtgtcaagagggggatttgttctggtggcacattcggatagtgagatccttaaaagtaagaaaaaaggtctctttcggaggtcactgctgtctggcctgaagctcaggaagtccgagagtaaaagctcacttgcctctcaacggagcaaacagtcgtcctttcgaagcgaggctggtatgtccaccgtatcaagtacggcatcagacattcatagcacaattagtctgggcgaggctgaggcagagttggccgttattgaggatgacatcgatgccacaacaaccgaaacttacgtgggagaatggaaaaatgacaagcgttccgggttcggcgtgagccaacgctctgatggactaaagtatgagggcgaatgggctagtaataggcggcacggctacggctgcatgacttttccagacgggacaaaagaagaaggaaagtacaagcagaacatcctggttggtgggaagagaaagaacctgatccccctacgggcctcaaagattcgggagaaggtagatcgcgccgtcgaagccgcagaacgtgccgccacaatagcaaaacagaaagccgagatcgccgcgtcacgcaccagccatagtagggcgaaggcggaagccgctttaactgcagctcagaaggcccaggaagaggcgaggatcgcccgcataaccgcaaaggagttttcccctagcttccagcaccgtgaaaacggcctcgagtaccagcgccctaaaagacagacttcatgtgatgatatcgaggttctgtccacgggaacacctctacaacaggaaagtccggagctataccgcaagggcaccacacctagcgatttgactcccgatgactcccccctacagtcttttcccacctctcccgccgcaacccctccgcctgcaccggctgcccgcaacaaggtggcccacttctccagacaggtcagcgtggatgaggaacgcggaggggatattcaaatgctcttggagggcagggctggggactgtgctagatctagctggggggaggagcaagctggcggttcccgaggcgttcgatctggagcattgcggggaggtctgttggtagatgatttcaggactaggggttctggacgcaagcaacccggaaatcccaaacctagggagcggagaactgagagcccccctgtgtttacctggactagccatcacagagcctctaatcactcaccagggggatcaagactgctagagttacaggaggaaaagctgtcgaattatagaatggagatgaaacctcttctaagaatggaaacacatccccagaaacggcggtactccaaggggggtgcctgtaggggccttggggacgaccaccgccctgaagatcggggtttcggagtgcagaggcttagatccaaggctcagaataaggagaattttcggccggcctcatcagccgagccagctgtacagaaactcgcatcattgaggctgggtggtgccgaaccccggcttctgcgatgggacctaacattctccccgcctcaaaagtcacttccagtggcactggagtccgatgaggagaacggcgatgagctgaagtcctctacaggctctgctccaattctggttgtaatggtcattttgttgaacatcggggttgccattctgtttatcaacttcttcatctag

SEQ ID NO: 192107 - DNA, 1347 bp, synthetic construct
  misc_feature 1..1347: note = Description of Artificial Sequence: Synthetic coding sequence
  source 1..1347: mol_type = other DNA
atgaccagcagctgctgcgtgaccaacaacctgcaggccagcctgaagtcttgcccccgacccgcctccgtgtgttcttccggggttaattgtcgccccgagctgtgtctgggctacgtgtgccagcctatggcctgcctgccttccgtgtgcctgcccacaactttccgcccggcctcctgcctgtccaaaacctatctttctagtagctgccaggccgcttccggcatctcaggctcaatgggccctggtagttggtattcagagggagcctttaatggcaacgagaaggagactatgcaattcctgaacgaccgcctggcgagctacctaacaagggtgcgacagcttgagcaagagaacgcagaattagagagtagaattcaagaagcttcacactcccaggtactgacgatgactccggattatcagagccatttcaggacaatcgaagaactgcagcagaaaatcctgtgcacgaaggcagagaatgctcggatggtggtgaatatcgacaacgccaaactcgctgccgacgatttccgggccaagtacgaagcggaattggcgatgcggcaattagtggaggccgacatcaatggcctccggcggatactggacgacctgactctgtgtaaagctgatctggaggctcaggtggagagcctcaaagaagagctgatgtgtctgaagaagaaccatgaggaggaggtgggcagcctgcgctgtcagctcggcgaccgtttaaacattgaagtcgatgccgccccacctgtggacctcactcgcgtcctggaggaaatgcgttgccagtatgaagctatggtggaggccaatagaagagacgtggaggaatggtttaacatgcagatggaggagctcaatcaacaggttgcgacttcctccgaacagctgcaaaactatcagagtgacatcatcgatctcaggcggaccgtcaacacactggagattgagttacaagcccaacacagcctccgcgatagcctagagaacacgctgacggaaagcgaggcaaggtatagctcacagcttgctcagatgcagtgcatgatcacaaatgttgaggcccagcttgccgagattcgcgccgatcttgaacggcagaatcaggaatatcaggttctgctggacgttcgagctcgattggagggagagatcaacacctacaggtccctgctcgagaacgaggattgtaagttgccgtgcaacccgtgttccaccccctcttgcactacatgtgttccttcaccttgcgtcccaagaactgtgtgcgttcctcgtaccgtgggtatgccatgctctccatgcccgcaaggaagatactag

SEQ ID NO: 192108 - DNA, 1641 bp, synthetic construct
  misc_feature 1..1641: note = Description of Artificial Sequence: Synthetic coding sequence
  source 1..1641: mol_type = other DNA
atggccgaggtggtgagccccgtgcccggcgccggccggcgggagcccggcgaggtgggccgcgcacgcggaccgccggtcgccgatcccggcgtggcgctctctcctcaaggagaaatcattgagggttgccgtctaccggtgctgcgcaggaaccaggacaacgaagacgaatggcctctggcagaaatcctgagcgtcaaggatatcagtggccggaaactgttttacgtacattatatagactttaacaagcgtttggacgaatgggtgacacacgagcgactagacctcaaaaagatccagttccccaaaaaggaagccaagacccccaccaaaaatggactgccgggctctcgtcctggttcacctgagcgggaagtcccagcctctgcgcaggccagcgggaagacactgcctattcctgtgcagatcaccctaagatttaatcttcctaaggaaagggaggccatacctggaggagaacccgaccaacccctgtcaagcagctcttgcttacagcccaaccaccgcagcacgaaaagaaaggtggaagtcgtgagcccagccactcccgttccgagcgagacggccccggcaagtgtgttcccccagaacggagcagcaaggcgagccgtggccgctcaaccaggccgtaaaagaaagagtaactgtctcggcacagacgaggactcccaagattcctcggatggaattccctccgccccgagaatgactgggtctctggtctccgatcgatcgcatgacgacatcgttacaagaatgaaaaacattgagtgcatagagctgggccggcaccgcctcaagccatggtatttcagcccttaccctcaggagctgacaaccctcccagtgctgtacctgtgcgagttttgcctcaagtacggacggagcctgaagtgcttacagcgacatcttacaaaatgtgacctgaggcatccacctggaaatgagatttatcggaagggaactatctcctttttcgagatcgacggacgaaaaaataagtcttacagccagaatttgtgtctgctggcgaaatgctttctggatcacaaaaccctatattacgacactgaccctttcctgttttatgtcatgactgagtatgattgcaaggggtttcacattgtaggttatttctccaaagaaaaggagtcgaccgaggactacaacgtggcatgtatcctgaccttgcccccataccagcgcaggggctacggcaaattgttgatcgagttcagctacgagctgtcgaaggtcgagggaaaaactggaacgccagagaaaccgctgagtgacttaggccttctctcttaccgctcctattggagccagacaattctggagattctgatgggcttaaaatctgaatccggggaaagaccacagattacaataaatgagattagcgagatcacaagcattaagaaggaagacgtcattagcaccctacaatacctcaacctgatcaactattacaaggggcagtacattttaacactctctgaggatattgtcgatgggcacgaacgcgcaatgctgaagcggttgctaagaattgattcaaaatgtctccactttacacctaaggattggtccaagagaggaaaatggtag

SEQ ID NO: 192109 - DNA, 1386 bp, synthetic construct
  misc_feature 1..1386: note = Description of Artificial Sequence: Synthetic coding sequence
  source 1..1386: mol_type = other DNA
atggccgaggtgggcgagatcatcgagggctgccggctgcccgtgctaaggcgcaaccaggataacgaagatgaatggcccctggcagagattctctctgtgaaagatatctcaggtcggaaactcttttatgttcactatatcgacttcaacaagcgcctggatgaatgggtcactcacgagcgactcgacctaaaaaagatacagtttcctaaaaaagaagccaagaccccgaccaaaaatggtctgccaggctcacggcccggcagccctgagcgcgaagtcaaacgaaaagtcgaagtcgtctctcccgctactccggtcccctcagaaacagccccggcctctgtattccctcaaaacggagcggcccggcgagcagtggctgctcaacctggccgcaagaggaaatccaattgcctgggaaccgatgaagactctcaagattcaagtgatggtatcccttcggcccctcggatgaccggcagccttgtatcagaccgctcgcacgatgacatcgtgactcggatgaagaacattgagtgcatcgaactgggaaggcatcgtctgaaaccctggtatttttctccctacccccaggagcttaccactctgccagtgctgtacctgtgtgagttctgcctaaaatatggccgttctcttaaatgtctgcagagacatctgactaagtgtgatctacggcaccctcctggtaacgagatatatcgaaaggggactatcagttttttcgaaatagatggaagaaaaaacaagtcttatagtcagaatctgtgcctgttggctaagtgtttccttgatcacaagactctgtattatgacaccgaccctttcctgttttacgtgatgaccgagtacgactgtaagggttttcacatcgtcggctacttctccaaggagaaagagtcaactgaagactataacgttgcttgcatactcacactccctccctaccagcggcggggttatggaaagctgttgatcgagttttcttacgagcttagcaaggtcgagggcaagactggtactcctgagaagcccttatcagatttaggcctgttgagctatagatcctattggtcgcaaactatcctggagatcctaatggggttgaagagcgaaagtggcgagaggccacagataacgattaatgaaattagcgagatcacatctatcaaaaaagaagatgtgatcagtacgctgcagtacctcaacctcattaattattacaagggtcagtacatactgacattgagcgaagacattgtggacgggcacgaaagagccatgctgaaaagactgctgcgcatcgactcaaaatgcctgcacttcacgccaaaagattggagcaagcgcggcaaatggtag

SEQ ID NO: 192110 - DNA, 1542 bp, synthetic construct
  misc_feature 1..1542: note = Description of Artificial Sequence: Synthetic coding sequence
  source 1..1542: mol_type = other DNA
atggccgaggtgggcgagatcatcgagggctgccggctgcccgtgctccggcggaaccaggataacgaagatgagtggccccttgccgaaattctatctgtgaaagacattagtgggaggaaactgttctatgttcactacatcgatttcaataagcgcctcgacgaatgggtcacacatgaaagactggacttaaagaagattcagttccccaaaaaggaagctaaaactcccaccaaaaatggcctgcctggctccaggccaggaagtcctgaaagagaggtccctgcatctgctcaggcttccggaaagacactgcccattcctgtgcaaatcacgctgcggttcaacctgcccaaagagcgtgaggccataccagggggggaacctgaccagcccttgagtagtagttcatgcctccaaccaaaccatcgttctacaaagcggaaagtagaagtggttagcccagcaacaccagttcctagcgagacggcacccgcatccgtgtttccacagaacggtgccgcccgacgagccgtcgccgctcagcctggtaggaagaggaagtcaaattgtctgggcaccgacgaggacagtcaggactcttccgatggaatcccttcagcgccccgaatgaccgggagtctggtaagtgatcgctcccacgacgatatagttacacgaatgaaaaatatcgaatgcattgagcttggcagacacagattgaaaccgtggtacttcagcccgtacccacaagagctcactaccctgcccgtattgtacctgtgcgaattttgtcttaagtatggcagatcattgaagtgtctgcagagacacctgaccaagtgtgatctccgacacccacccggcaatgaaatctaccgcaaaggaaccatttccttctttgaaattgatggtcggaaaaacaagtcgtacagccagaacttgtgcctgctggcaaagtgctttttggaccataagaccctgtattacgacaccgatccatttctgttttacgtaatgacggagtatgattgcaagggatttcatatcgtggggtatttttcaaaagagaaagaaagcactgaggactataatgtggcatgtatcctgacactccctccataccagcggagaggctatggaaaattgctcatcgagttctcttatgagctatctaaggtggagggcaagaccggaacgcctgaaaagcccctatctgatctgggcttactgtcatatcgctcctactggagccagacaatacttgaaatccttatgggcttgaaaagtgagagcggggagagaccgcagataacaattaacgagatttccgaaattactagcataaaaaaagaggacgtcataagcacgctgcaatacctgaacctcattaactattacaagggccagtacatcctgaccctgtcagaagacatagttgacggacacgaacgcgccatgttgaaacgcttgctgagaatcgattctaagtgtctacacttcacacctaaagactggagcaaacgcgggaagtggtag

SEQ ID NO: 192111 - DNA, 1485 bp, synthetic construct
  misc_feature 1..1485: note = Description of Artificial Sequence: Synthetic coding sequence
  source 1..1485: mol_type = other DNA
atggccgaggtggtgagccccgtgcccggcgccggccggcgggagccaggggaagtgggtcgagcacgtgggccaccggttgcagatcctggggtcgcacttagtccgcaaggggaaattattgaagggtgtcggctgcccgtgctacggcgcaaccaggacaatgaggacgagtggcctctcgccgagattctgtcagtgaaagacatttccggaagaaaactcttctacgtccactacatagactttaacaaacgattagacgagtgggttactcacgagcgcctggatttgaagaagatccagtttcccaagaaagaggcgaagactccaactaaaaacgggctgcccggtagccgacccggctcgcctgagcgtgaagttaaaagaaaggtggaagtcgtgagccctgcgacccccgttcctagcgagaccgcccccgcttccgtctttcctcagaacggcgcagcccgacgtgccgttgccgcgcagcccggcagaaagagaaagtccaactgtctgggaactgacgaggactctcaggatagctccgatggcatcccatctgcacctcgcatgacagggtcactagtgagcgacagaagccatgatgatatcgtgacgcggatgaagaatatcgagtgcatcgaactgggcaggcaccgtctcaagccatggtacttcagtccctacccccaagagctcacgacgcttcccgtattgtacctttgcgagttctgtctgaagtatgggcgcagtctcaagtgcctgcagcgacatctgacgaaatgtgatctgaggcatccccccgggaacgagatttaccggaagggcaccatcagtttctttgagatcgacggacgcaaaaacaaatcttacagccagaatctttgtctgttggcgaaatgctttcttgatcataagaccctctactacgatactgacccgtttctgttttacgtgatgacggagtatgattgcaaaggttttcacatcgtggggtattttagcaaagaaaaggaatcaacggaggactacaacgtggcgtgtattttgaccctgccaccctaccagcgtcgaggatacgggaagctcctcatcgaattcagctacgaactctctaaagtggaaggaaaaactggcactccagaaaagccactgtcagatcttgggttactctcataccgctcgtattggtcccagaccattctggagattctgatgggcctgaagagcgaaagcggggaacggcctcaaatcaccatcaatgagatctccgagattactagtatcaagaaggaggacgttatatcaacactgcagtatctgaacttaataaattactataaaggccagtatattcttaccttatctgaggacattgtggacggccatgagcgagcaatgctgaagcggctgctccgaatcgactcaaagtgcctccattttacgcctaaagactggtccaagcggggtaagtggtag

SEQ ID NO: 192112 - DNA, 6222 bp, synthetic construct
  misc_feature 1..6222: note = Description of Artificial Sequence: Synthetic coding sequence
  source 1..6222: mol_type = other DNA
atggtgaagctggccaaccccctgtacaccgagtggatcctggaggccatccagaagattaaaaagcagaagcagcggccatctgaggaacggatatgccacgcggtatccacaagccacggcctggataagaaaactgtatccgagcaactcgaacttagtgtgcaagacggttccgtcctgaaggtgacgaataagggcctggcgtcatacaaggacccagacaatcccggacgcttcagctcagtgaagcctggaacattccccaagtctgcaaaggggtcaaggggctcctgcaacgatctgcggaatgtggattggaacaagctcctccggcgagccatcgagggccttgaggaacctaacggtagcagtttgaagaatatcgagaagtacctgagaagccaaagcgatctgacctcaacgacaaacaatccagcctttcagcagcgcctgcggctgggcgccaagcgtgcagttaacaacgggagattgttaaaagacgggccccagtaccgggttaattatggctccctcgatggtaagggcgctcctcagtacccatctgcgtttccttccagcttacctcccgtttccctgcttccccacgagaaagaccagccccgcgcagaccctatacccatttgttccttttgtctgggcacgaaggagtccaatcgagagaagaagcctgaggaactcctcagttgtgccgattgcggctctagtggccacccgagctgcctgaaattttgtcccgagctgaccaccaatgtaaaggccctacgctggcagtgcattgagtgcaaaacatgctcagcttgccgagtgcagggccgaaatgctgacaacatgcttttctgcgactcgtgtgatagggggttccatatggagtgctgtgacccccccctgagcaggatgccgaagggcatgtggatctgccaagtgtgtcggcctaagaagaagggaagaaaacttttacatgaaaaggcagcccagattaagcgccgatacgccaaaccaatcggccgcccgaagaacaagctgaaacaaaggctgctctctgtgacaagcgacgagggtagtatgaatgcattcactggacgaggctcccccgggcgcggacaaaagaccaaggtgtgcacaacaccaagttccggacacgccgcttccggaaaagattcatcctccagacttgcagtgaccgacccaaccaggccaggcgcgacaacgaagatcaccacaactagtacctacatttctgcaagcactctgaaggttaataaaaagaccaagggcctaattgacgggctgactaagttctttaccccctcacctgatggccgccgaagccgcggagagataatcgacttcagcaaacattacagaccccggaagaaggtttctcagaaacagagttgcacctctcacgttctggccacaggaaccacccagaaattgaagcctccacctagtagcctgccccctcccactcctatttctggtcaaagcccgagcagtcagaagtcgtctactgctacatccagcccctcaccacagtcctctagctcccagtgtagtgttccttccttgagcagcctgacgactaactcccagctcaaggccttgtttgatggtctgtcccatatctacacaacgcaaggtcaaagccgcaaaaaaggccatccttcctatgctcccccaaagcgcatgcggaggaagacagaactttccagcactgctaaaagtaaagctcacttcttcggaaagcgtgatatcagatctcggttcatcagccattcctcgtcttcgtcttggggcatggcacggggaagtatttttaaagcgatagctcacttcaaacggacaacatttcttaagaagcacaggatgctgggcaggctgaagtacaaagtgactccacagatgggcactccttcccctggcaagggttctctgacagacggcaggattaagcctgatcaggatgacgacacagagatcaagataaatattaagcaagaatccgccgatgtcaatgtgatcgggaataaagacgtagtgaccgaggaggatctggatgtgttcaaacaggctcaggaactttcctgggagaaaatcgaatgcgaatctggagtagaggattgtggacgttaccctagcgtcatcgagttcggaaaatacgagatccaaacttggtatagtagtccgtatccacaggagtatgccagattgcctaaactgtacttgtgtgagttttgtcttaaatatatgaagagtaagaacattctgttgagacactcgaagaaatgtgggtggttccacccgccagccaacgaaatctacaggagaaaggatctttctgttttcgaggtcgatggaaacatgtcgaagatttattgccagaatctctgcttgttagccaaactctttttggaccacaaaacactttactatgacgtggaacccttcctgttttatgtgctaacgaagaatgacgagaaggggtgccacctggtcggttacttttcaaaggagaagctctgtcagcaaaaatacaacgtgtcctgcataatgattatgcctcagcaccagagacagggatttggacgtttcctgatcgacttctcttacttgttgtcaagacgcgaggggcaggccggctccccagaaaaaccactctctgatttggggcgactctcttatctcgcctattggaaaagcgtgatattggaatacctgtaccaccaccacgaacggcacattagcataaaggccatctcccgagcaaccggaatgtgtccacacgacattgcaaccaccctccagcatctgcacatgattgataaaagggacggacgcttcgtgattatcaggagagagaagttaatactcagccacatggagaagctgaagacttgcagccgtgcgaatgaactcgatcccgattcactcaggtggactcccatcctaatcagtaacgcagccgtctcagaggaagaacgagaggcggagaaggaggcggagcgtctgatggagcaggcctcctgttgggagaaagaagagcaggagatcctcagcaccagggccaacagcaggcaatctcccgcgaaggtccaatccaagaataagtatttacattcacctgagtctagacctgtcacaggtgaaaggggccagcttctggaactttccaaggaatctagcgaagaggaggaggaggaagaggacgaggaggaggaagaggaggaagaagaggaagaggaagacgaagaggaggaagaagaagaagaggaggaggaggaggaggagaatatccagagctcgcccccccggctgaccaagcctcagtcggtggctataaaaagaaagagaccgttcgtgttaaagaagaagaggggcagaaagcgcaggaggataaactcaagcgtgactactgaaacaattagtgaaactactgaggtgttaaacgagccttttgataatagtgatgaagagcgacctatgcctcagctcgagccaacttgcgagatagaagtggaagaagatggccgcaaaccagttctgcgaaaggcttttcagcatcagcccggcaaaaaacgccagaccgaggaggaggaaggcaaagataatcactgtttcaagaatgctgatccttgccggaacaacatgaatgatgacagctccaacctgaaagaaggcagtaaggacaatcccgagcccttaaagtgcaagcaagtatggcctaaaggcacgaagagaggcctgagtaagtggcgccagaacaaggagcgcaaaactggatttaagctcaacttgtacactccccctgaaactcctatggagcctgacgagcaggtcactgtggaagagcagaaggaaacctccgaaggaaaaacatcaccttctccaatccgcatcgaggaggaagtgaaggaaacgggtgaggcactgcttcctcaggaggagaatcgcagggaagaaacctgtgccccggtcagtccaaataccagccccggagagaaacccgaagacgatctgataaagccagaggaggaggaggaggaggaagaggaggaggaagaggaggaggaggaggaagaaggagaagaagaggaaggcggaggcaacgttgagaaagaccctgatggcgccaagtctcaggagaaggaggaaccggagatctccaccgaaaaggaggatagcgcacgccttgacgaccatgaagaagaagaagaggaggacgaggaaccttcacacaacgaggatcatgatgcagacgacgaggatgacagccacatggagtcagcagaggtggaaaaggaggagctcccaagggaatcgtttaaagaagttcttgagaatcaagagacatttctggatctaaacgtccagcccggccactctaatcccgaagtgttgatggattgcggagttgatctgaccgcatcatgtaacagcgagcccaaagaactcgctggcgatcctgaggctgtgcctgaatccgacgaagagccacctcccggggagcaagcacagaaacaggatcagaagaatagtaaggaagtggacactgaatttaaggagggaaatccggctaccatggaaatcgacagcgaaaccgtccaggccgtgcagagtctgacccaggagtcctccgagcaagacgacacttttcaggattgcgccgagacccaagaggcctgtagatctttacaaaattataccagggctgatcaaagtcctcagatcgcaacaacactggatgactgtcaacagtccgaccactcctcccccgtgtcctctgtccactcccacccaggccagagcgttcggtctgtgaacagcccctcagtccccgctttggaaaacagttatgcacagatctccccagatcagagcgccatcagcgtgccatcactgcagaacatggaaacctctcccatgatggatgtgccatccgtgtcggatcacagccagcaggtcgttgattctggattcagtgatttaggcagcattgagagtaccacagaaaactatgagaatcccagtagttacgattccacaatgggcggctcgatttgcgggaacggtagcagccaaaacagctgcagctattctaacctcacttcctcctctttgactcagtcgagctgcgctgttacacaacagatgtctaatatatcaggttcctgctctatgctgcagcagaccagcatcagcagcccgccgacttgctctgtgaaatctcctcagggctgtgtcgtcgaacgccctccctctagctctcaacagctggcccaatgttcaatggccgccaatttcaccccgccgatgcagctggctgagataccagagacaagtaatgcgaacattggactgtacgaacggatggggcagtcagatttcggtgccggtcactacccccagccttccgccactttttcgcttgccaaactgcaacaacttaccaacaccctcatcgaccattccctcccatactctcattcagccgccgtaactagttacgcgaactcagcctctctctccactccgctgagtaacacaggcctggtgcagctttcccaaagcccgcattcagtgccaggtggccctcaggcccaggcgacaatgactccacctccgaacctgacaccccctcccatgaatttaccccctcctctgctccagcgaaacatggccgcatcaaatatcggcatatctcattcccagcgattacaaacccagattgcaagcaaaggtcatatttccatgcggactaagagtgcaagcctgtccccagcagccgctactcatcagagccagatctacggccggtcccagaccgtggctatgcaaggccccgcccggactctcactatgcagagagggatgaatatgagcgtcaatctcatgcccgctccggcctataatgtgaacagcgtcaatatgaatatgaacactctaaatgccatgaacgggtattccatgtcacagcctatgatgaactccggctaccacagcaatcatggatacatgaatcagactcctcaataccctatgcagatgcagatggggatgatgggaacccaaccctacgcccagcaacctatgcagaccccccctcatgggaacatgatgtacaccgcccctggtcaccatgggtatatgaataccggcatgagtaaacagtccctgaacgggtcctatatgaggcgctag

SEQ ID NO: 192113 - DNA, 5673 bp, synthetic construct
  misc_feature 1..5673: note = Description of Artificial Sequence: Synthetic coding sequence
  source 1..5673: mol_type = other DNA
atggtgaagctggccaaccccctgtacaccgagtggatcctggaggcaattcagaagattaaaaagcagaagcaaaggccgagcgaggagcgtatctgccacgcggtgtctactagccacggactggataagaaaacagtatcagagcaactggagctgagtgtgcaggatggaagcgtgttaaaggtgactaataaaggattagcttcctacaaagatcccgacaaccccggaaggttttcctctgtgaagcccggcacattcccaaagtctgccaaaggctcccgcggctcttgtaatgacctaagaaacgtggactggaacaagctgctccggcgtgcgatagagggcttagaagaacctaatggaagtagcctgaaaaacattgagaaatatctccgctcccagtccgatttgacctccaccacgaataaccccgcctttcagcagagactcaggcttggagcaaagcgagccgtgaacaatggtcgattgcttaaggacggcccacagtatcgggtaaattatgggtcattagacggcaaaggggcgccccagtatccatccgcgttcccgtcctcattgcccccagtctccttgctgcctcacgagaaggatcaaccccgggccgatccgatacccatctgttctttctgcctaggtaccaaggagagcaaccgtgaaaaaaaacctgaggagctcctctcttgcgccgactgcggatcatcaggacatccatcttgtctgaagttctgccctgagctaaccacaaatgtaaaggctctcagatggcagtgtatagagtgtaaaacctgctctgcctgccgggttcagggtcgaaatgctgacaatatgctcttctgtgatagctgtgaccgtgggttccacatggagtgttgtgaccccccactgtctaggatgcctaaagggatgtggatatgtcaggtgtgtcggcctaagaagaagggacgaaaacttttgcacgagaaagccgcacagattaagaggaggtacgctaagcccatcggtagacccaagaacaagctgaaacagcgccttctgtccgtgacatcagatgaaggctctatgaatgctttcacaggcagaggatcgccaggcagaggacaaaaaacaaaggtctgcactacccccagctccggacacgctgcctccggaaaggactcctcatcacggcttgctgttacagatccaacacggcccggggccaccaccaaaatcactaccacatcgacatatatcagcgcctctacactcaaagtgaacaaaaagacaaaaggcctaatagatggtcttaccaaatttttcactccatctcccgacggacgccgcagtaggggcgagatcattgactttagcaaacattatcggccgaggaaaaaagtatcccagaagcaatcttgcacctcccacgtcctggccaccgataccgagattaaaatcaatatcaagcaggagagtgctgatgttaatgttattggcaacaaagacgtcgtgacagaggaagacctggatgtgtttaagcaggcccaggaattatcctgggaaaagatagagtgtgaaagcggagtagaagattgcggccgatacccatcggtgatcgagttcgggaaatatgagatccagacatggtacagttcgccatatcctcaagagtatgccagactgcctaaactgtacctctgtgaattctgcttgaaatatatgaagagcaagaatatcctcttaaggcatagcaagaagtgcggctggttccatccccccgccaacgagatttataggcgcaaggatctgagtgtgtttgaggtggatggcaacatgtctaagatttactgtcagaatttgtgcttgctggctaaactctttctcgatcataaaacattgtactatgatgtcgaacccttcctgttctatgtcctcacaaagaacgatgagaaaggttgtcacctggtgggttatttctcgaaggagaaactgtgtcaacagaagtacaatgtgtcatgcataatgataatgcctcagcaccaacgtcaagggttcggccgatttttaatcgatttttcctacctcctgtcccgccgagagggtcaggccggcagccctgaaaagcccctatcggacctcggtagactgtcatatctcgcatattggaaatctgtgatcttagagtacctgtatcatcaccacgagcgccacatctcaatcaaggctattagccgcgccacaggtatgtgtcctcacgacattgccacaactctccagcatttgcatatgattgataagcgcgatggtcggtttgtgattattcgtagggagaagttgatcctgtcccatatggaaaaactgaagacatgttctcgtgccaacgagctcgaccccgattcgcttagatggacacctatactgatttcgaatgcagctgtgtccgaggaggaacgagaagcagaaaaagaggcagagaggctgatggagcaggcctcgtgttgggagaaggaggaacaggaaatcctgagcaccagagccaatagcagacaaagtcctgctaaggttcaaagtaaaaacaaatacctgcactccccagagagccggcccgttacaggcgaacgtggccagctcctggaactgagtaaggagtcctccgaagaggaagaagaagaagaggatgaggaagaagaggaggaagaagaggaggaggaggaggatgaagaggaagaagaagaggaggaggaggaagaagaggaggaaaacattcagtcctccccgccccggctcacaaaaccccagagcgttgctatcaagcggaaaagacccttcgtgctaaagaaaaaacgggggagaaaacggagacgaatcaactcatctgtcaccactgaaacaattagtgagaccactgaggtcctcaacgagccatttgacaatagcgacgaagaaaggcctatgccgcagttggagccgacttgcgagatcgaggtcgaggaggacggccgaaagcccgtcctgagaaaagcgttccagcaccagcccggcaagaaacgccaaacagaagaggaagaggggaaggacaaccactgttttaaaaatgctgacccatgcagaaacaacatgaacgacgacagtagtaatctgaaagagggatcaaaggataaccccgaacccctgaagtgcaaacaggtttggccaaaagggacgaaaaggggcctgtctaaatggcggcagaataaagagagaaagactggcttcaagctgaacctgtacacgccaccagaaactccaatggaacccgacgagcaggtcaccgtggaggagcagaaggaaacaagcgagggtaaaactagtccatcacccatcagaattgaggaagaggtcaaggagacaggtgaggccttattaccccaggaggaaaatagacgagaggaaacctgtgcgccagttagccctaacaccagtccaggcgagaaacctgaagatgatctgattaagccggaggaggaagaggaggaggaggaagaggaggaggaggaggaagaggaggaagaaggtgaggaggaagagggcgggggcaatgtggaaaaggatccagatggtgccaaatcacaggagaaggaagagcccgagatctcaacagagaaagaggattcagcgcgtctcgacgaccacgaggaagaagaggaagaagacgaggaacctagccacaatgaagatcatgatgctgatgatgaagacgattcacacatggagagtgccgaagtggaaaaggaagaactgccaagggagtcttttaaggaagtgttggagaaccaggaaacgtttcttgaccttaacgtgcaaccaggacacagcaatcctgaggtgctcatggattgcggcgtcgatttaacagctagctgcaactccgaacctaaagagcttgctggtgaccccgaggcggtcccagagtccgacgaagagcccccacctggggagcaagcccagaaacaagaccaaaaaaactcaaaggaggttgatacagaatttaaggaagggaaccccgctacaatggaaattgattccgagactgtgcaagccgtccagtccctcacccaggaaagtagcgagcaggatgatacatttcaggattgcgccgagacacaggaagcctgtcggtctctgcagaattacacgcgggcagaccaaagtccgcagatcgctacgacactggatgattgtcagcaatcggaccactctagtccagtatcttcagtacacagccacccgggacagtccgtgaggtcagtaaatagtcccagcgtgcccgcactggaaaattcctacgcccagatctcacctgaccagtcagcaatctcggtgccctctctgcagaatatggagacttcacctatgatggatgttccaagcgtaagcgatcactcacagcaggtcgtggatagcggcttttccgacctaggttctatcgagagtaccactgagaactatgaaaatccctccagttacgatagcacaatgggtggctcgatttgcgggaacgggtcaagtcagaactcatgttcctactcgaacctcaccagcagctccctcactcagagctcttgcgcggttactcagcagatgtctaatattagcggaagctgctcaatgctccagcagacaagtatatcatcaccacccacatgttcagtgaagtcccctcagggatgcgttgttgaacggcccccgtcctcaagccaacagctggctcagtgttctatggctgccaatttcaccccccctatgcagctcgctgagatcccagaaaccagtaatgctaacatcgggctgtatgagcgcatgggacagagtgattttggcgccggacactatcctcaacctagtgcaacattctcccttgctaagctgcagcagctcaccaataccctgatagaccactctcttccatactcccactcggcagccgtcacatcatatgcgaactccgcatctctatccacaccacttagcaataccggcctggttcagttgtcacagtccccccattctgtccccggtggaccgcaggcccaggccaccatgactccaccccccaatcttacacccccgccgatgaatcttcctccacccctgctccagagaaatatggcagcttccaacattggaatttcccacagtcagcggttacaaacccagatcgccagtaagggccacattagcatgcgcaccaaatctgcctcactcagccccgcagctgctacccaccagtcacagatttacgggcggtcacagactgtggctatgcaggggccagctagaacattgacaatgcagcggggcatgaatatgtcagtcaacctgatgcctgcgcccgcgtacaacgtaaacagcgttaacatgaacatgaatacactgaatgcaatgaatggttattccatgtctcaaccaatgatgaacagcggatatcacagcaaccacgggtatatgaaccagaccccccagtatccaatgcagatgcaaatgggtatgatgggtactcagccttatgcacagcagcccatgcagacacctccacacggcaatatgatgtacacagcacctggacaccacggatacatgaataccggcatgtccaagcagtccttgaatggcagctacatgcggcgatag

SEQ ID NO: 192114 - DNA, 5346 bp, synthetic construct
  misc_feature 1..5346: note = Description of Artificial Sequence: Synthetic coding sequence
  source 1..5346: mol_type = other DNA
atggtgaagctggccaaccccctgtacaccgagtggatcctggaggctattcagaaaataaaaaagcagaagcagagaccctctgaggagcggatctgccacgctgtctctacttcacacggactcgacaagaaaactgtgagcgagcagttggagctgagtgttcaagacggaagcgtacttaaggtgaccaacaagggtctggcgagctataaggatcctgacaatcctggtagattctcaagcgtcaaaccagggacattcccaaaaagtgccaaaggcagccggggctcatgcaacgacctgcgtaatgtagactggaataagcttttgcggcgggcaatcgagggcttggaagaacctaatggctcctccctgaagaacattgaaaaatatctcaggtcacagtcggacctaactagtactactaataaccctgctttccagcaaaggctgaggctgggggctaaacgggcagtgaataatggccggctgctgaaagacggcccccaataccgcgttaattacggctccttggatgggaagggtgcaccccaatatccttccgcctttcctagctcactgcccccagtatccctgctgccccatgagaaggatcagccacgagctgacccaatccctatctgctctttttgcctggggacaaaggagtccaatagagaaaaaaagcctgaggaattgctaagttgcgccgattgtggatcctccggtcatccttcgtgtctgaagttctgcccagaacttacaacaaatgtcaaagccctccggtggcagtgtatcgagtgtaaaacatgctcagcatgtcgggtgcagggcagaaatgcggataatatgctcttttgcgattcttgcgataggggtttccacatggagtgctgcgacccacccctctctcgcatgcccaaggggatgtggatctgccaggtgtgcagacctaaaaagaaaggccgcaagctgctgcacgaaaaagcagcccagatcaagagacgatacgctaagccaatagggaggccaaaaaacaagttaaagcagaggctgttatctgtcacatcggacgaggggtcaatgaacgctttcaccggacgaggtagccccgatactgaaattaagattaatattaagcaggaatcagccgacgtgaacgtgattggcaacaaagatgtcgttaccgaagaagacctagatgttttcaaacaggcgcaggagctgtcctgggagaagattgagtgcgaatctggggtcgaggattgtggccgatacccgagcgtcatcgagtttggcaagtatgagattcagacttggtatagctcaccgtatccacaagagtatgctcgactcccaaagctgtatctgtgtgaattctgcctcaagtacatgaagagcaagaatattctgttaaggcactcaaagaagtgtggatggttccatccgcctgccaatgagatttaccggcgcaaggacctctcagtcttcgaagtggatggaaacatgtcgaaaatttactgccagaacttgtgtctcttggccaagctgtttctggatcataagaccctatactacgacgtggagccttttcttttctatgttcttacaaaaaacgacgagaaaggatgtcacctcgtgggatacttttctaaggaaaagttgtgtcagcagaagtacaatgtaagctgtatcatgatcatgccacagcaccagagacaggggtttgggcgctttcttattgatttttcttatctgctgtctcgtcgggagggccaggcaggctcaccagagaagcccctgtccgacctgggccgcttatcatatctggcctattggaaatcagtgatcctagagtatctttaccatcaccacgagcgccatattagcatcaaggctatttctagagctaccgggatgtgccctcatgacattgctaccaccctgcagcatttacacatgattgacaagagggatgggcggttcgtgataattcggcgggagaagttgatcctcagtcacatggaaaagctaaaaacgtgcagtagggcaaatgagctggatcctgacagtctgagatggaccccaattctcatctccaatgcagccgtttcagaggaagaacgggaagccgagaaagaagcggaaagactgatggagcaggccagctgttgggagaaggaggaacaggagatcctgtcgacaagggcaaattctcgccaatcgcctgctaaggttcagtctaaaaataagtatctccattcccccgaatccagaccagtaactggcgaaagggggcaactgcttgaattgtctaaagaatcctcggaggaggaagaagaggaagaggacgaagaggaagaggaggaagaggaagaggaggaggaagatgaggaggaggaggaagaagaggaggaggaggaagaggaggagaacatccagtctagcccccctagacttaccaagccgcagtctgtggccattaagaggaagcgcccattcgttctgaagaaaaaaagaggacggaaacgccgccgtataaatagctccgtaacaacagaaacgataagcgagacaaccgaagtcttgaatgagccgtttgataactcagacgaggaaaggcccatgccccagctggagcccacatgtgaaatcgaggttgaagaagatggccgaaagccagttctgaggaaagcttttcagcaccagccaggtaagaaaaggcagacagaggaagaagagggaaaagataaccactgttttaagaatgccgacccctgccgcaataacatgaatgacgattccagcaatctcaaagaggggagtaaggataatccagagcccctgaaatgtaaacaggtatggcctaagggaacaaaacggggcttgtcaaaatggaggcagaacaaagaacgcaagactggtttcaagctgaacctctacacgccacccgagacacctatggagccggatgagcaagtgactgttgaagagcagaaggaaaccagcgaaggtaagacctcaccatctccaatccgaattgaggaggaagtgaaggaaaccggcgaagcccttctgccgcaggaggaaaataggcgggaggaaacctgcgcgccagtaagtcctaatacctcccctggggagaagcccgaggacgacctgatcaaacccgaggaggaagaagaggaggaagaggaggaagaagaagaggaagaagaagaggagggagaagaagaggaaggcggcgggaacgtggagaaagatccagacggcgccaaaagccaggagaaagaagagcccgagataagtacagaaaaagaggattcagcgagactggatgatcacgaagaagaagaagaggaggacgaggagccatctcacaacgaggatcacgatgccgacgacgaggatgatagccacatggagagcgccgaggtggaaaaggaagagttaccaagggagtccttcaaagaggtgctggagaatcaagaaacgttcttggacttgaatgttcaacctggacactcgaatcctgaggtactcatggattgcggagtggaccttaccgcaagttgtaattctgaacccaaagaattggctggagaccccgaagccgtaccagaatctgacgaggagccgcctccaggagagcaggcacagaagcaagatcagaaaaattcaaaggaggtggacaccgagttcaaggagggaaatcctgccaccatggagattgattccgaaacagtgcaggccgttcagtctcttacacaggagagctctgaacaagacgacacatttcaggattgtgccgagacgcaagaagcctgcaggagcctccaaaattatacaagggcggatcagtctcctcaaattgccactacgcttgatgactgccagcagagcgaccatagctcacccgtcagcagtgtccattctcatcccggacagtctgtgcgatccgtgaacagccctagcgttcccgcacttgagaacagctacgctcagatttcacccgaccagagtgcaatctctgtgccatccctacagaacatggagacaagccccatgatggacgtcccctcagtatcggaccactcccaacaggtggtcgattcgggcttcagtgacctaggcagtatcgagtctaccaccgagaattatgagaacccgagctcgtacgacagcacgatgggaggaagcatttgcggaaacggcagtagccaaaattcgtgctcatacagcaatctgacatcctcttctttgacacaatcaagctgtgctgttacacagcagatgtcaaacatctccggatcatgtagtatgctgcagcagacatctatcagtagccctcctacatgttccgtcaaatcaccacagggttgcgtggtggagaggccaccaagctcttctcagcagctcgctcaatgcagcatggcagccaatttcacgccaccaatgcagctggcagagatccccgaaacatctaatgcaaacatcggcctttatgagcgaatgggtcagtctgacttcggggcaggacactaccctcagccctcggccaccttctcattggctaagttgcagcagcttactaataccctgatcgaccattccttaccctattcacactctgccgcagtgactagttacgccaatagtgctagcctgtccacccccctaagcaatacaggactggtgcagctaagtcaatctccccactctgttcctgggggtccacaagcccaggccacaatgactcccccccccaacctgaccccgcccccgatgaacttgcctcctccgctcctgcagcggaatatggcagcctctaatataggaatctctcacagtcaacgcctgcagacacagatcgcgtcaaagggtcacatttcaatgcgaactaaaagtgcgtcattgtctcccgctgccgccacccatcagtctcaaatttacggaaggtcacagacagtggcgatgcaggggcccgcccgcacgcttactatgcaacgcggaatgaatatgagtgtgaacctcatgcctgcccctgcatacaatgtcaactctgtaaacatgaatatgaacacactcaatgccatgaacgggtattcgatgagtcaacccatgatgaatagtgggtatcactcaaaccatggatacatgaaccagacaccccagtacccgatgcagatgcagatggggatgatgggcacccagccttatgcccagcaacccatgcaaactcccccacatggtaacatgatgtatactgctccaggccatcatggctatatgaatactggaatgagcaagcaatccttaaacggcagttacatgaggaggtag

SEQ ID NO: 192115 - DNA, 5346 bp, synthetic construct
  misc_feature 1..5346: note = Description of Artificial Sequence: Synthetic coding sequence
  source 1..5346: mol_type = other DNA
atggtgaagctggccaaccccctgtacaccgagtggatcctggaggctatacaaaaaatcaagaaacagaaacagagaccctcggaagaaagaatttgtcatgccgtgagtaccagccacggcttagacaaaaagactgtgtccgaacaactggaacttagtgtgcaggatgggagtgtcctgaaggtgaccaataaagggctagcatcgtataaggatccagacaatcctgggcgctttagctcagtaaagcccggcacattccccaagtcagccaagggctctcgaggatcatgcaacgacctgcggaacgtggattggaacaagctcctccgacgtgccatcgaaggcctggaggagccgaatgggtcgagcctcaagaatatcgaaaagtaccttaggagtcaaagcgatttgacttccacgactaataaccctgctttccagcagaggctgcggctcggcgccaagcgcgctgtcaataacggtcgactgctgaaggatggccctcagtacagggtgaactatggatctttggacggaaaaggggcccctcagtacccctccgcattcccgtcttcgttacctcccgtgtctcttctcccccacgaaaaagatcagcctcgggccgaccctatacctatctgcagcttttgcctgggaaccaaagagtcaaatagggagaagaagcccgaggagcttctgagttgcgccgactgcggatcctctggccatccatcttgtctaaagttctgtcccgagctaacaacgaatgtgaaggctctgaggtggcaatgcatagagtgtaaaacttgctcagcttgcagagtccaagggcgcaacgccgacaacatgctgttctgcgacagttgtgatcggggatttcacatggaatgttgcgacccaccactgtccaggatgcctaaaggcatgtggatctgccaggtgtgtcggcctaagaaaaagggccggaaacttttgcatgagaaggctgcgcagattaaacgtaggtacgctaagccaatcggcaggccaaagaacaagttgaaacagcgtctcctgtccgtgacttcagacgaaggtagcatgaatgcctttacaggacggggcagccccgacactgaaattaaaatcaatatcaaacaggagtccgcagatgtgaatgtaatcggcaacaaagacgttgtgactgaggaggatctggatgtgtttaagcaagctcaggaactcagttgggagaagatagagtgtgagtccggtgtggaagattgtggacgctaccctagcgtgatcgaatttgggaaatatgaaattcagacatggtattcctctccctatccccaggaatacgcaagattgcccaagctgtatctatgcgagttttgtttgaaatatatgaaatctaaaaacatcctactgcggcacagcaagaaatgtggctggttccatccacccgctaacgagatttatagacgaaaggacctgtccgttttcgaggtcgacgggaatatgagcaaaatctattgccagaacctgtgtttgctggctaagttgtttctggatcataagaccctttactatgatgtagaaccgtttttgttctacgtgctgaccaaaaacgatgagaagggatgtcatctggtgggctacttctccaaggagaagctatgccagcagaaatacaacgtgtcttgcatcatgatcatgccacaacatcagcggcaggggttcgggaggttcctgatcgattttagctacctgctgtctcgccgtgagggccaggccggtagccccgaaaagcctttgtcagatcttgggcgacttagttacctggcctattggaaaagcgtgattctggagtatctgtaccatcaccatgagagacacatttccatcaaggctataagtcgcgcgaccggcatgtgcccccacgatatcgctactacactccagcatctgcatatgatcgataagagagatggtcgattcgtaattatccgcagggaaaaattgatcctctctcacatggagaagctaaaaacttgcagcagggcgaatgagctggatcctgactcgttacgctggacgccgattttaatttcaaatgccgcagtatccgaggaagagcgcgaagccgaaaaagaggccgagcgactgatggaacaggcttcctgttgggaaaaggaggagcaggagattctgagcacacgggctaactcccgccagagccctgccaaagttcagagcaagaacaaatatctgcactccccggaaagtagaccagtcacaggcgagaggggtcaattgttggagctgtcaaaggagtcttccgaagaggaagaagaggaagaggatgaagaagaggaggaggaagaggaagaagaagaggaagacgaagaggaggaagaagaagaggaggaggaagaggaagaggagaacatccagagctcacctccccgccttacaaagccgcagtccgttgccataaagaggaagaggccgttcgtattgaaaaagaagaggggcagaaaaagacgccggataaacagtagcgtgaccacggagacaatcagcgaaacaacagaggtgttgaatgagccctttgataactccgacgaggagcggcctatgcctcagctggagccaacgtgtgagatcgaggtggaagaagacggaaggaaaccggtcctgagaaaggcttttcagcaccagcccgggaaaaagcgacaaaccgaggaggaagagggaaaggataaccactgctttaagaacgccgacccttgccggaacaacatgaatgatgacagctcaaacttgaaggaaggatcaaaagacaaccccgaaccccttaagtgcaagcaggtgtggcccaaaggcactaagagaggacttagcaagtggagacagaacaaggagagaaagacagggttcaaactgaacctgtatacccctcccgagacccctatggaaccggatgaacaagttacagtcgaagagcagaaggaaacaagtgaaggcaaaacatctccctctccaatccgcattgaggaggaggtcaaggagacaggcgaggcattactcccacaggaggaaaaccgccgagaggagacatgcgcccccgtgtcgcctaacactagccccggagagaaaccagaggacgacctcattaaaccagaggaagaggaagaggaggaggaagaggaggaagaagaggaagaagaagaggaaggcgaggaagaggagggcgggggaaacgtcgaaaaggacccggatggcgccaaatcgcaggagaaggaggagcccgagatttctacagagaaggaagatagtgccaggctggatgatcacgaggaggaagaagaggaggatgaggagccgagccacaacgaggaccatgacgccgacgatgaggacgacagccacatggaatcagcggaggtcgagaaggaggagctcccacgggagtcatttaaggaggttctagagaatcaggaaacttttctggacctgaatgtccaacccggtcattccaaccccgaagtcctgatggactgtggcgtggatctcactgccagttgcaatagcgaacctaaggagctagccggggatcccgaagccgtgccagaatccgatgaggagcctccacctggcgaacaggctcagaagcaggaccagaagaacagcaaagaggtggacaccgagtttaaagagggtaaccccgccactatggaaattgactcagaaacggtgcaggcagtacagagcctgactcaagaaagcagtgagcaagatgacacatttcaagattgtgccgaaacgcaggaagcatgccgcagtctgcaaaattatactcgcgccgaccagagtcctcagatcgctacaaccttggatgactgccaacaaagtgaccactcatcccccgtatcctctgttcattcccaccccggtcagagcgttagatcagtaaattccccaagtgttcctgcactggagaattcctatgcccagatttcgccagatcagagcgccatatccgtgccctcattgcagaatatggagacatcacccatgatggacgttcctagcgttagtgaccattcccagcaggtagtcgattcggggttttctgatctgggaagcatcgagtctaccacagaaaactatgaaaacccaagttcctacgacagtacaatgggcggtagcatctgtggaaatgggagtagccagaattcttgcagttacagcaacctcaccagctcctctctaacccaaagctcttgcgctgtcacccagcaaatgtcgaacatctctgggtcatgctcaatgttacagcagacctcaattagctcacctcccacttgcagtgtaaagtccccccagggttgcgtggtggaaagaccaccgagctcaagtcagcagctagctcagtgtagcatggccgcaaatttcactccccctatgcaactggcggaaataccagagaccagcaacgccaatataggactgtatgagagaatgggccagtccgatttcggggccggccactaccctcagccttccgcaacgttttctctcgcgaagcttcaacagttgaccaacactctgatcgatcactccctgccatacagccactccgccgccgtaaccagttacgcaaactcagcgtcgttgagtacaccactcagcaacaccggcctagtgcagctgtctcagagcccacactcggtgcctggcgggccacaggcccaagcaactatgacccccccgcctaacttgacccctcccccgatgaatcttcctccgccccttttgcaaaggaatatggccgcctcaaatatcgggatcagccattcgcagcggctccagacccagattgcttcgaagggccacatttctatgcggaccaaatccgccagcttaagtcccgctgcagccactcaccagtcacagatctatgggcggtctcagaccgtagcaatgcaaggccccgcccgaacccttaccatgcagaggggtatgaacatgtcggtgaacttgatgccagcaccagcgtacaatgtcaatagcgttaacatgaatatgaataccctgaacgccatgaacggctacagtatgagtcagcctatgatgaactctgggtatcacagcaaccatggctacatgaaccagaccccacaatacccgatgcagatgcagatgggaatgatgggcacccagccttatgcgcaacagcccatgcagacgccaccacacgggaacatgatgtataccgctcctggacaccatggctacatgaataccgggatgtctaagcagtccctgaacgggtcttatatgagacgatag

SEQ ID NO: 192116 - DNA, 5346 bp, synthetic construct
  misc_feature 1..5346: note = Description of Artificial Sequence: Synthetic coding sequence
  source 1..5346: mol_type = other DNA
atggtgaagctggccaaccccctgtacaccgagtggatcctggaggccattcagaagatcaaaaagcagaaacagaggccctcggaagaacggatctgtcatgctgtgtcgacctcccacgggttggacaaaaaaaccgtctctgagcagctcgagctgagcgtgcaggatggaagtgtcctgaaggtgaccaataaggggcttgcttcatacaaggatccagataaccccgggcgcttttccagtgtcaagcccgggacttttccgaagtcggcaaagggctctcggggctcatgcaatgaccttcgtaacgtggactggaataaacttctccggcgcgccattgagggtctcgaagaacccaacggctcaagtctcaagaacatagagaaataccttcgatctcagtccgacttaaccagcacaacgaacaaccccgcctttcagcagaggttgaggctcggagccaaaagggccgttaacaacgggagattgcttaaagacgggcctcagtaccgcgtgaactatggcagcttagatgggaaaggcgccccccaataccccagtgcctttcctagctccttaccacccgttagccttctgccccatgaaaaagaccagccgcgcgccgatcctattccaatctgcagcttctgcttgggcacaaaggagtcaaaccgcgagaagaagcccgaagagctactgtcatgcgccgactgtggctcgtcaggtcaccccagttgccttaagttctgtcctgagcttaccactaacgtgaaagctctccggtggcagtgcatcgagtgtaaaacctgttccgcctgcagagtgcagggcagaaatgcggataacatgctattttgcgactcttgcgatcgcgggtttcatatggaatgttgtgaccctccactatctagaatgccaaaaggaatgtggatctgtcaggtttgtcgccctaagaaaaagggccgaaagctgctgcacgagaaggctgcacaaatcaaacgccggtatgccaagcctatcgggaggccgaaaaacaagctgaaacagagacttttgtctgtaactagcgacgagggctctatgaacgcctttaccggacgaggcagccctgataccgagattaagatcaacatcaaacaggaatcagccgacgtcaatgtgataggtaataaagacgtggtgactgaagaggatctagacgtgtttaagcaggcccaggagctaagctgggagaaaatcgagtgcgaatcaggggtcgaggactgtggcaggtaccccagcgtgatcgaatttggaaaatacgagatccaaacttggtactcatccccctatccccaagaatatgctagactgcccaagctgtacttatgtgagttttgcctaaagtatatgaagtcaaaaaatatcctcctaagacactccaagaaatgcggatggtttcacccccccgccaatgagatttatagaaggaaagacttgtctgtctttgaagtcgacggtaacatgtcaaaaatctactgtcagaacctgtgtctcctagccaagctgttcctcgatcacaaaacgctctactatgatgtcgaacctttcctgttttacgttcttacaaaaaacgacgaaaaggggtgtcacctcgtcggctatttttcaaaagagaagctctgtcaacagaagtataacgtttcatgcataatgataatgccccaacaccaaaggcagggcttcggacgtttcttgattgattttagttacctgttgtcccggcgggagggccaagccggtagtccagagaaacccctaagcgacctcggcaggctctcttacttggcttattggaaaagtgttatcttagaatacctgtatcaccaccacgaaagacacatctccataaaagctatatccagagccacaggaatgtgccctcatgatatcgctaccactttacagcatttgcatatgatagataagagagacgggcgattcgtaatcatccggagagagaagctcattctaagccatatggaaaagctgaagacatgtagcagggccaacgagctcgaccccgattctttacgttggacacctattctaatatctaatgctgccgtgtccgaagaggaacgggaagcagaaaaggaggcagagagacttatggagcaagcgagttgctgggagaaggaggaacaggagattctctcaactcgtgcaaatagtaggcagagccccgccaaagtacaaagtaaaaataagtacctgcatagtcccgaaagccgtcctgtgactggtgagagggggcagcttctagaactatccaaagagtccagtgaggaggaggaggaagaggaagacgaggaggaagaggaagaggaagaggaggaggaagaggatgaggaagaagaggaggaggaagaggaagaagaagaagaagagaatatccagtcatctcccccgcgattaacgaagccccagagcgttgcaatcaagaggaagcggccctttgtcctaaaaaagaagcgcggaaggaagcgaagacgcataaatagcagcgttaccactgaaactatttccgaaaccacggaggtcctgaacgagccatttgataacagcgatgaggagcgccctatgccacaacttgagcccacatgcgaaattgaagtcgaagaagatggtaggaaaccagtcctcaggaaagcctttcaacaccaacctggaaagaagagacagacagaggaggaagagggaaaggataatcactgttttaaaaacgccgatccctgccggaataacatgaatgacgatagctccaacctgaaagaaggtagcaaagacaatcccgaacctctcaagtgtaaacaagtctggccaaaggggaccaaaagaggattgagcaagtggagacagaacaaagaaaggaaaaccggattcaagcttaacctatacacacccccagaaacgcccatggaacccgatgaacaggtgacagtcgaggagcagaaggagacatccgaaggcaagacctctccatcacccattaggatcgaggaggaagtgaaagaaacgggtgaagccctgcttccccaggaagagaatcgtagggaagagacttgcgcgcctgtttcccccaatacgtctccaggcgaaaaacccgaggacgatttgattaagccagaggaagaggaagaggaggaggaggaggaggaggaagaggaggaggaggaggaaggcgaagaggaggaggggggcggtaatgtggaaaaagatcccgacggtgcaaaaagtcaggagaaagaggagcctgagatctctacagaaaaggaagatagtgctcggctcgacgatcacgaagaagaagaggaggaagacgaggaaccttcacataatgaggatcacgatgccgacgacgaagatgactcccacatggaaagcgctgaagtcgagaaagaggaattgccccgggaaagtttcaaggaagtccttgaaaaccaggagaccttcctggacttaaatgtgcagccaggccactcaaaccctgaagtgctgatggactgcggtgtagatctgactgcgtcttgtaatagcgagccgaaagagctggccggagaccctgaggctgtgccggaatcagacgaagagcctcccccaggtgaacaggcgcagaagcaggatcagaagaattccaaagaagtcgacacggagttcaaagaaggcaacccggctaccatggagattgactccgagactgtgcaggcggtgcagtcccttacccaggaaagctctgaacaggacgatacttttcaggattgcgcagagactcaggaggcgtgtcggtcccttcagaactacacacgggccgaccagagccctcagatcgctaccacgctggatgattgccagcagtccgatcactctagcccagtcagttctgttcacagtcaccctggtcaaagcgtcagatccgtaaacagccctagtgttcctgcgcttgaaaactcctatgctcagatctctccagaccaaagcgcgatttccgttccatctctgcagaacatggaaaccagtcccatgatggatgtacccagcgtatctgaccacagtcagcaagttgtggatagcgggtttagcgacctgggctccatcgagtctactacagaaaactatgagaacccctcttcttatgactccacaatgggaggctccatctgcggtaacggaagctcacagaacagctgttcttactcgaacctgacgtcatcctcgttaacccagtccagttgcgctgtgacacagcagatgagcaacatctccggatcctgctctatgcttcagcagacgagtatttcatcgccaccaacctgtagcgtcaagagtcctcaggggtgtgtcgtggagagaccaccgtcttccagtcagcagctggctcagtgctccatggcagcgaacttcacgccccccatgcaactcgctgaaatacctgagacctccaacgcaaatattggcctgtacgagaggatgggacagagcgatttcggcgcaggtcattatccgcagcccagcgcaaccttcagcctggctaagctgcagcagcttacaaacacacttatcgaccattcgctcccctattcccactctgcagcggttacctcatatgctaactccgcctctcttagcactcctttgagtaatacaggtctggtccagctttcccaatcgccccatagtgtcccgggaggcccacaagcgcaggccacaatgacaccaccccctaacttgacacctcctcccatgaatctcccacccccacttctgcagaggaatatggcagccagcaacataggcatttcccactctcaacggctgcagacccagatcgcttcaaaaggccatatcagcatgcgcaccaaaagcgcgagcctgtcccctgctgccgccacacatcagagccaaatttacggtcggtcccagacagtcgcaatgcaaggtccagcgaggacactaactatgcagagaggaatgaatatgtctgtgaatctgatgccagcacccgcttacaacgtaaatagcgtaaatatgaacatgaatactctcaacgcaatgaacgggtactctatgagtcagcccatgatgaatagcgggtatcactctaaccatgggtacatgaaccagacccctcagtatcctatgcagatgcagatggggatgatgggcacacagccctacgctcagcagcccatgcaaacacccccccatggcaacatgatgtatactgcacctggccaccacgggtacatgaatacgggcatgtcaaagcagagcctaaatggatcctacatgaggcggtag

SEQ ID NO: 192117 - DNA, 4992 bp, synthetic construct
  misc_feature 1..4992: note = Description of Artificial Sequence: Synthetic coding sequence
  source 1..4992: mol_type = other DNA
atgaccgaccggttctgggaccagtggtacctgtggtacctgcggcttctgagactgcttgatcggggaagctttagaaacgatggcctgaaagccagcgacgtgctgccaatccttaaagagaaggtggcctttgtgtctggcggacgcgacaagcgaggcggacccatcttgacattcccagcaagaagcaaccacgacagaattcggcaggaagaccttagaaagctggttacctacctggctagcgttccaagcgaggatgtgtgcaagcggggatttacagtcatcatcgatatgcggggctctaaatgggatcttataaagcctctgctaaaaaccctgcaggaggctttccctgcggagatccatgtggctcttattattaaacccgataatttttggcaaaagcaaaaaaccaacttcggctcaagtaagttcatcttcgagacttctatggtatccgtggaagggctgactaagctcgtcgacccctcccagctgaccgaggagttcgacggttccctggattacaaccatgaggagtggatcgagctgagactgtccctcgaggaatttttcaacagtgccgtgcatctcttgtctcgccttgaagatctccaggagatgctggcccgaaaagagtttccagtggacgtcgagggctctaggaggctgattgacgagcatactcagttgaagaagaaggtactgaaggctccagttgaagagctggacagagaagggcagcggctgttacagtgcatcagatgctctgatgggttctctggccgcaattgcatcccaggctctgcagatttccagagtctggtgccaaagatcacgtctctgttggacaaattgcacagcacccggcagcacttacatcagatgtggcatgttcgaaagttgaagctggaccagtgttttcagctcagattgtttgagcaggatgcagagaaaatgtttgactggatctcacacaacaaagagttgttcctacagagtcacacagaaattggtgtcagttaccaatacgctcttgacctgcagacccaacataatcactttgcgatgaactctatgaacgcttatgttaatattaaccgcatcatgagcgtggcaagccggctgtctgaggcgggacactacgctagtcagcagatcaagcagattagcacccagctggaccaggagtggaagagctttgcggctgcgctggacgaacgctccacaatattagcaatgtctgccgtgtttcatcagaaagccgagcagttcctgtctggcgtggatgcatggtgcaagatgtgctctgaaggggggctgccgtcagagatgcaggacctagaactggcaatccatcatcatcagaccctgtacgagcaggttactcaggcgtatacggaagttagccaggacgggaaggccttgttggacgtgttgcagaggcctttgtctccgggcaattcagaatcactaactgccactgccaactatagtaaagctgtccatcaggtccttgacgttgtacacgaggtgctgcatcatcaaaggcgcctggaaagtatctggcagcatcgaaaggttcgactgcatcagcggctacaactttgcgtttttcaacaggatgtccaacaggtgctggactggatcgagaatcacggagaagcttttctgagcaagcacacaggtgtgggaaagtctttgcatagggcccgggctctgcagaaacgccacgatgattttgaagaggtagcccagaatacctacaccaacgccgataagctgttagaagccgcagaacagctggctcagacaggagagtgcgacccagaggagatatacaaagctgccagacaccttgaggtacgcatacaagacttcgtaagacgagttgaacagcgtaaactacttttggacatgtctgtgagttttcatacccatacaaaagagctgtggacctggatggaagatctgcagaaggagatgctcgaggatgtctgtgccgatagcgtggacgccgttcaggagctgattaagcagttccaacagcagcagactgccacactggacgctactctgaacgtgatcaaagaaggagaagatctaatccaacagctgcgttcagctccacctagcctcggtgaacctagcgaggctagggactccgccgtgagcaacaataaaacaccacactcgtccagtatcagccatattgaatccgttctgcaacagctggacgacgcccaggttcagatggaggaactctttcacgagaggaaaattaagctggacattttcctacaactgcgtatattcgagcagtataccatcgaggtgaccgcagaactggacgcatggaatgaagaccttctccgtcagatgaacgactttaataccgaggaccttacactggccgaacaacggcttcaaagacacacggagcgcaagttagctatgaacaacatgacgtttgaggtcattcagcagggccaagatttacaccagtatatcacagaagtgcaggcaagcggaatagagttaatctgtgagaaggacattgaccttgccgcacaggttcaggagttgctggagttcctgcacgaaaagcagcacgagcttgagcttaacgctgagcagactcacaagcggttagagcagtgtctccagctccgccacctgcaggcagaagtgaaacaagtcctcggctggataaggaacggcgagagcatgttgaatgctagtcttgtcaacgcatcctctctgtccgaagcagagcagctgcagagagaacatgagcagtttcagctggcaattgaatctcttttccacgcaacctcccttcaaaaaacccaccagagcgcgctccaagtacagcagaaggcggaagtgctactgcaggctggtcactatgacgcagacgccattagagaatgcgctgagaaggtggccctgcattggcagcaactcatgttaaaaatggaagaccgcctgaagcttgtgaatgcctcagttgcgttctacaagacctctgaacaggtctgtagcgtacttgaaagtctggaacaggaatacaggagagatgaggactggtgtggcgggagagataaactgggtcccgcagctgaaatcgaccatgttatacctctgatttccaagcacttggagcagaaagaggcattcctcaaggcatgtacattagcaaggcgcaacgcagaggtttttctaaagtacatccaccgcaataatgtgagcatgccttcagtcgcttcccacactcggggacctgagcagcaagttaaggccatcctgtccgagctgctgcagcgagagaatcgagtcctccacttctggacactgaaaaagcgtaggttggatcagtgtcaacagtacgtggtcttcgagcgatccgccaaacaagccctggactggattcaggagactggcgagttctatctcagtacacatacttcgaccggagagaccacagaggaaacccaggaactcctgaaggagtacggagagtttcgagtccccgctaaacaaacaaaagagaaggtgaaacttctgattcagctggctgactccttcgttgagaagggccatatccacgccactgaaatccggaagtgggtcacaacagtggataagcattatcgggatttttctctcaggatgggcaagtaccgctactccctcgagaaggcactgggcgtcaatacagaagataataaggatctggagctcgacatcattccagcctccttgtcggaccgtgaagtgaagctgagagacgcaaaccatgaagtgaacgaggagaaacgtaagagcgctcgaaagaaggagtttattatggcagagctcctccagactgagaaggcatatgtgcgcgatcttcatgaatgccttgaaacctatctctgggagatgacgtccggagtggaagagatcccccctggcatcctgaataaggaacatataatcttcggaaacatccaggagatctatgattttcacaacaatattttcctgaaggagttggaaaagtacgaacagcttccagaagatgtgggccactgcttcgtcacctgggccgacaaattccagatgtatgtcacttactgcaagaataagccagacagcaaccagctgattctggaacacgccggcacctttttcgacgagatccagcagagacatggccttgcgaactcaatttcctcttacctgatcaagcccgtgcagcgcattactaaataccagttactcctcaaagaactgttgacttgttgtgaggagggaaagggagaactaaaagacggacttgaggtcatgctgagtgtccccaaaaaggccaacgatgcgatgcacgtgtctatgcttgaggggtttgacgagaacctagacgtgcaaggtgagctcatcttgcaggacgccttccaagtttgggaccccaagagcctgattcggaaaggacgcgagcggcacctgtttctctttgagataagtctagtgttttccaaagaaatcaaggatagctctggccacacaaagtacgtgtataaaaataagttactaacaagcgagctgggcgttaccgagcatgttgaaggtgacccgtgtaaattcgccctctggtccggtagaacccccagtagtgacaacaagaccgttctgaaggcgtccaatatcgagaccaaacaggagtggatcaagaacatccgcgaggtgatccaggagagaatcatccacctaaaaggcgccctgaaagagcctcttcagctccctaaaacacctgcaaaacaaagaaataacagcaagagggatggagtggaggacatcgacagccagggagacggatcttcacagcccgatacaatcagcattgctagccgcaccagccagaataccgtggactcagacaaggacggaaacttggtgcctagatggcacctgggccccggcgatcctttcagcacgtatgtgtag

SEQ ID NO: 192118 - DNA, 3870 bp, synthetic construct
  misc_feature 1..3870: note = Description of Artificial Sequence: Synthetic coding sequence
  source 1..3870: mol_type = other DNA
atgaagggcggcgaccgggcctacacccggggccccagcctgggctggctgttcgcaaaatgttgctgttgttttccgtgcagggatgcctactcacactcttcatcagaaaatggagggaagtccgagagtgtggctaatctgcaggcccaaccatcactcaatagcatccactctagcccaggccccaagcggtcaacaaataccttgaagaagtggctgactagccctgtgagacgcctcaatagtggaaaggctgatggaaatatcaaaaagcagaagaaagttagggacggccgtaaaagcttcgatctgggctccccaaaacctggagatgagacgacacctcagggcgactcagcagatgagaaatctaaaaagggctggggggaggacgagccagacgaggagagccacacaccacttccccccccaatgaaaattttcgacaacgatccgacacaagacgagatgtctagttcactgctggctgctcgccaggcgtctactgaggtacctacagccgccgacctagtcaacgcaatagaaaagctggtcaagaacaagctaagtctagaaggctctagttatagaggctctctgaaggatccagctgggtgcttaaatgagggcatggcaccgcccacgcctccgaaaaatcccgaggaagagcagaaagccaaggccttaagaggacggatgttcgtgctcaacgagctagtgcagaccgagaaggattatgttaaggatctagggatcgtggtggagggatttatgaaacgcatcgaagagaaaggagttcctgaggacatgcgcggcaaggacaagatcgtcttcggcaatattcaccagatctatgattggcacaaggatttctttctagcagagctagagaaatgtatccaggagcaggacagactggcacagctgtttataaagcacgaacgtaagctacatatctacgtctggtattgtcagaacaagccaagaagtgagtacatcgtcgctgagtatgacgcctacttcgaggaggtgaaacaggagatcaatcagaggctgaccttatcagacttcttgataaagcccattcaaaggatcacaaaatatcaactgctgctgaaagactttctccgttactccgagaaagccggattggaatgttccgatattgagaaagccgtggagcttatgtgcctggtgccaaaacgctgcaatgatatgatgaacctcggaagattgcagggatttgagggaactctgacagcccaaggcaaactgctgcaacaggacactttctacgtgattgagctggacgcagggatgcagtcccggacaaaagaacgccgcgttttcctgttcgagcagatcgtcatcttttccgaactgctgcggaagggctcgttgactcccgggtatatgttcaaacgctctatcaaaatgaattacctcgtcctggaggaaaacgtggacaatgatccttgcaagttcgcattgatgaacagagagacctcagaacgggtcgtgttgcaagcagccaatgcagacattcagcaagcctgggttcaggacattaaccaggtgttagagacacagagagactttctcaacgccctgcaatcccccatcgagtatcagcgtaaggagcgcagtaccgccgtaatgcgatcccagccagcgaggctgcctcaggccagtcccaggccctactccagcgtacccgcgggctccgagaaaccgccgaaagggtcatcttataacccacccctgccccccctgaaaatctcaacctctaatgggagtcccggctttgaataccaccagcctggtgacaaattcgaagcctcaaaacagaacgacctcggaggatgcaatggtacgagtagtatggctgtgataaaagattattatgctcttaaggagaacgaaatttgtgtgagtcagggagaagtcgttcaagttctagccgtgaaccagcaaaacatgtgtttagtgtaccagccggctagtgatcacagccccgccgcggagggttgggtgccaggcagtatcctggctccacttaccaaagcaaccgcagctgaaagctctgatggctcaatcaagaagtcctgttcctggcataccttgagaatgcgcaaaagggctgaagtagagaatacaggtaaaaacgaggcaacggggcccaggaagccgaaggatatcctggggaataaggtcagtgtcaaagaaacaaactcttcagaggaatctgagtgcgatgacctggatccaaataccagtatggagattttaaatcccaactttatacaggaagttgcaccggaattcctggttccacttgtagatgtcacttgcctgctcggcgatacagtcatccttcagtgtaaagtctgcgggagacctaagcccactattacatggaaaggccctgaccaaaatattttagacaccgataattcctccgccacctacactgtgtcatcctgtgactcaggcgaaataaccctgaagatctgcaatcttatgccacaggattcgggaatctacacttgcatcgccacgaacgaccatggaactacatccaccagcgccacagtcaaagttcagggagtgcctgcagctccaaaccgtcccatcgcgcaagagcgttcttgcacatccgtgattcttaggtggctcccaccctcgagtaccgggaactgcacaatcagtgggtataccgtggaatatagggaggagggcagccagatctggcaacagagcgtggcttctacgctggacacttacctggtgattgaggacctgagccccggctgtccatatcagttcagagtaagcgccagcaacccttgggggatcagcctgccaagcgagccttctgagtttgtaaggctgcctgaatacgatgctgctgctgatggcgcgacaataagctggaaggagaactttgacagcgcatacactgagttgaacgaaatcggtcgcgggagattcagcatagtgaagaaatgcattcataaagcgaccaggaaggatgttgccgtgaagtttgtgtctaagaaaatgaaaaaaaaggaacaggcggcacatgaggcagccctgcttcagcacctacagcacccacaatacataactctgcacgatacctacgaaagccctacaagctacattctgattctggagctgatggacgatggccgactgttagactacctgatgaatcatgacgagctcatggaagagaaggtcgcattttacattagagacatcatggaagctttacagtatcttcacaattgccgcgtggcccatctggatatcaagcccgagaacttactaatagacctgcggataccagtaccaagggtgaaactgattgacctggaggatgcagtgcagattagtggccacttccacatccatcacttattgggtaatcctgagttcgccgctcctgaagtgatccaaggtatccctgtctctctgggcacagatatctggagcattggcgtactgacctatgtcatgttgtcaggagtcagccccttcttagacgagtcgaaagaggaaacctgtatcaacgtttgtcgcgtcgacttcagctttcctcacgaatacttctgtggcgtatctaacgctgcccgtgatttcatcaatgtgatccttcaggaggattttagacgtaggcccaccgcagcaacttgcttgcagcacccctggttacagcctcacaacggctcttatagcaagatccctctcgacacttcaagactagcgtgtttcatagagcggaggaagcaccagaacgacgtgcgacctatacctaacgtaaaatcatatattgtcaacagggtaaaccaaggaacatag

SEQ ID NO: 192119 - DNA, 8961 bp, synthetic construct
  misc_feature 1..8961: note = Description of Artificial Sequence: Synthetic coding sequence
  source 1..8961: mol_type = other DNA
atgaccgaccggttctgggaccagtggtacctgtggtacctgcggctccttcgcttattagataggggttcgtttcgcaacgacggactcaaagcttcagatgtgttacctattctgaaagagaaggtggctttcgtgagcggcgggagggataagagaggtgggccaatcctcacttttccagctcgtagcaatcatgatagaattcgacaggaggacctccgaaaactcgtgacctatctagcttctgtgccatcagaagacgtttgcaagcgaggctttaccgttatcattgatatgcggggaagcaagtgggacttgatcaagccgttattgaaaaccttgcaagaggccttcccggcagagatccacgtggcgctcatcatcaagcccgataatttctggcaaaaacaaaagacaaacttcgggtcatccaagttcatcttcgaaacgtctatggtgagcgtggagggactcaccaagctggtagacccctctcagctgactgaggaattcgacgggagtctggactacaatcacgaggaatggatcgagttgaggcttagccttgaagagttcttcaactctgctgtccacctcctttctaggctagaggatctgcaggagatgctggcccgcaaagagtttcccgtagatgttgaagggtcccgtagacttattgacgagcacactcagctgaaaaagaaagtgttaaaagccccagtggaagagctggacagagaggggcagcggctgctccagtgtatccggtgctcagacgggtttagcgggcgcaactgcattccaggctcggccgatttccagagcctggtgcctaagattacgtccctgctggacaaactgcatagtacgcggcaacatctccaccagatgtggcacgtgcgtaaacttaagctcgaccagtgctttcagctcaggctctttgaacaggatgccgaaaaaatgttcgattggatctctcataataaagaactctttctccagagccataccgaaatcggagtaagctaccaatatgcattggacctccagacacagcacaaccacttcgccatgaattccatgaatgcctacgtgaacattaaccggatcatgtcagtggcatcaaggctctcggaagccggccattatgccagccagcaaattaagcagatatcaactcagctagatcaagagtggaagtctttcgctgccgccctggatgaacgcagtaccatcttggccatgagtgctgtgttccaccaaaaggcagagcagtttctgagtggtgtagatgcttggtgtaagatgtgtagtgagggcgggctgccgtcggagatgcaggacttggagcttgccatacaccatcaccaaaccctgtatgagcaggttacacaggcttacaccgaggtaagtcaagatggcaaagccctgttagacgttctgcagcggccattgtccccaggaaatagcgaatcactgaccgccacagccaattattctaaagccgtccatcaagtactggatgtggtccacgaagttttgcatcaccagcggagacttgagagcatctggcaacacagaaaagttagattgcaccagaggctccaactgtgcgtgtttcagcaggacgtgcagcaagtgttggactggattgagaatcatggcgaagcgttcctgagcaaacacactggcgtggggaaatctttgcacagggcaagggccctccagaaacggcatgatgactttgaagaggtagcgcagaatacctacaccaatgcagataaactgctcgaggccgccgagcagctggctcagacgggtgagtgcgacccagaggagatttacaaggcagctcgtcacctggaggtgcgcatccaggatttcgtgaggcgggtggagcagagaaaattgttactagatatgtccgtgtcctttcacacacatacaaaagaactatggacttggatggaggaccttcagaaggagatgctagaggacgtgtgcgcagatagcgtggacgccgtacaagagcttataaagcaattccaacaacagcagacagctactcttgacgccaccttgaacgtgattaaggagggcgaagacctgatccaacagctgcgctcagccccaccctctttgggggaaccctccgaggcaagggatagtgccgtcagcaataacaaaacacctcattcttccagtattagccacattgagagcgttcttcagcagttggatgacgcacaggtccagatggaggagctgttccatgagcgaaaaattaaactggacatttttctgcaactgaggatcttcgaacagtataccatcgaggttaccgctgagctggacgcctggaatgaagacctgctacgtcagatgaacgatttcaacactgaggacttgactctggccgagcaaaggctgcagcgccatacagagcgcaagctagcgatgaacaacatgacatttgaggtaattcaacagggacaggacctgcatcagtacattactgaggtgcaggctagcggtattgagcttatttgcgagaaagacattgacctggcggctcaggtccaggaactactggaatttctgcatgagaaacaacacgagctggaactgaatgctgagcagacccacaagcggctcgagcagtgcctgcaattaagacacttgcaggccgaggtaaaacaggtccttggatggattcgcaacggcgaatccatgcttaatgcatctctcgtgaatgcatcctctctctcagaagcagagcagctgcagcgcgagcacgagcagttccagctggccattgagagtctgtttcacgctacctccctccagaagactcaccagagcgccctgcaggtccagcagaaagccgaggttctgcttcaggcaggccactatgacgcagatgcgatacgcgagtgcgcagagaaggtagctttacactggcaacaacttatgctgaagatggaggatagactgaagctcgtcaatgcgagcgtggccttctataaaacatcagagcaagtctgtagcgttttggagagtttggagcaggaatatagacgggatgaagactggtgcggagggcgcgataagcttggcccagcggccgaaatagatcacgttataccattaatatctaagcacttggagcagaaggaggcttttctgaaggcctgcactcttgcacgtcgaaatgcagaggtttttctcaaatacatccatcgaaataacgtgtctatgccttcggtcgcgagccacaccagggggcctgaacagcaggtgaaggctatcttaagcgagttgttgcaacgagagaatcgcgtactccatttctggacattaaaaaaaagaagattggaccagtgccagcagtacgtggtcttcgaaagaagtgccaaacaagcgttggattggatccaggagacaggggagttttatctgagcacccacacaagcaccggcgagacaacagaggagacccaggaacttttaaaggagtacggcgagtttcgagtgcccgctaagcagacaaaagagaaggttaagctcctaatccagctcgctgattcctttgtggagaagggccacattcacgctacagagatccgcaaatgggtcacaacagtggacaaacattatcgggatttctctctgcgcatgggcaaataccgttattcactcgaaaaagctctgggcgtgaatactgaagataacaaggacttagagctagatatcatcccagcatcactcagtgatcgagaggtgaagctgagagacgccaaccacgaagtgaacgaggagaagcgcaaaagtgcccggaagaaggaatttatcatggcagaactcctgcaaactgagaaggcctacgtgcgggatctacacgagtgcctggaaacttacctgtgggaaatgaccagcggagtggaagagatccctccgggtatccttaataaggagcacatcatcttcgggaacatacaagagatctacgatttccacaacaatattttcctgaaagagctggagaaatatgagcagttgccagaagacgtggggcattgcttcgttacctgggcagataaatttcagatgtatgtcacatattgcaagaacaagccagattctaaccagttaatactcgagcatgcaggcacctttttcgatgaaatacagcagagacatggactggccaattctatctccagttacttgatcaaacctgttcagcggatcaccaagtatcagcttctccttaaggaactgcttacctgctgcgaggagggcaagggggaactgaaggatggactagaggtgatgctcagtgtgcccaaaaaggccaatgacgctatgcatgtgagcatgctggaaggattcgatgagaacctagatgtccaaggtgaacttatactacaggacgcctttcaagtgtgggaccctaagagcctgatccgcaagggtcgggaacgtcatttgttcctgttcgagatcagccttgtgttctcaaaggagatcaaggatagctcaggacacaccaagtatgtgtacaagaacaaattacttaccagcgagctgggggtcacagagcacgttgagggcgatccttgtaaatttgcgctgtggtcaggccggaccccctccagtgacaacaagactgtcctcaaggcgagtaacatagaaacgaaacaggaatggatcaaaaatataagagaagttatccaggaacgcattattcatcttaagggcgcgctaaaagagcctctgcagcttccaaagacaccagctaaacagaggaacaactctaagcgtgatggcgtcgaagatatagacagccagggagacggaagctcccagccagataccatctccattgcatcccggacttctcagaacacagtggacagcgacaagctgtctggaggatgtgaacttaccgtagtccttcaggacttttccgcgggtcacagcagtgagttaactattcaggttggacaaacagtggagttattagagcgtccatctgagcgaccaggctggtgcctggtgagaactactgaaaggagtccccctctggaaggcctcgttcccagctcagccctgtgtattagccactcccgttcaagtgtggagatggattgtttcttcccactcgtgaaggacgcatacagtcatagtagttccgaaaacggcggcaagagtgagtccgtagccaacctgcaggcccaaccatcacttaactctatccacagctcaccaggcccaaagcgctcgacaaacactctcaaaaaatggttgacatctcccgtgcggcggctgaactcagggaaagccgatggcaatataaaaaagcagaagaaagtaagagatggtcggaagagttttgacttaggatcacccaaacccggcgacgagacgactccgcagggagacagcgctgatgaaaaaagtaaaaagggatggggggaggatgagcccgacgaggagtcacacactccgctgccaccaccgatgaagattttcgacaacgatcccacacaggacgagatgtcttcctcactgctggccgcaaggcaggcttccacggaggtgccgacagccgccgacctcgtcaatgcaatagagaagctcgttaagaataagttaagcctggaaggatcgtcctatagaggcagcttgaaggatcccgctggatgtctgaacgagggaatggccccgcccacaccacctaagaaccccgaggaggagcaaaaggccaaagctctgcgaggtcgcatgttcgtcctcaacgaactggtgcagaccgagaaagactacgttaaagacctcggtatcgtagtggaaggcttcatgaaaagaatcgaggaaaagggagtacctgaggacatgcggggcaaagacaaaatcgtgttcggtaatatccaccagatatacgactggcacaaggacttcttcctggcggagctggaaaaatgcatacaggagcaagaccgtctcgcccagctgtttatcaaacacgagagaaagctccatatttacgtgtggtactgccagaacaagccccgatccgagtatatcgtggcggaatacgacgcttactttgaggaggtgaaacaggagatcaatcagagactcactctgtccgactttctgatcaaacctatacaacggatcactaagtatcaattactactcaaggatttcctccggtacagcgaaaaagccgggttggaatgcagcgatatagaaaaagccgtggagctcatgtgtctagttcccaaaagatgtaacgacatgatgaacctcggaaggttacaaggcttcgagggtacactgactgcacagggaaaactactccagcaagatacattttacgtcatagagctggacgctgggatgcagagtaggacaaaggagaggagggttttcctgttcgagcagatcgtcattttttctgaattgttgagaaaaggctcgctcacaccaggatacatgtttaaacgaagcataaagatgaactatctggtcttggaagaaaatgtggacaacgacccatgcaaattcgcgttgatgaaccgcgagacttccgagcgggtcgtcctacaggccgcaaatgctgatattcagcaggcatgggtacaggacattaaccaagtgctggagacgcaaagggacttcctgaatgccttgcagagccccattgaataccaaaggaaagagagatctaccgccgtgatgaggtcccagcctgctagattgcctcaggcatctccgcgtccgtatagctccgtgccggctgggagcgagaaaccccccaagggctcctcctacaatccccccttgccccctcttaaaattagcacctctaacggaagtcctgggttcgagtaccaccaaccaggcgataaatttgaagcttcaaaacagaacgatcttggcggttgcaatggaacatcctccatggctgtgatcaaggattactatgccttgaaggagaacgaaatttgcgtatcccaaggtgaggtggtgcaggtcctggcagtaaaccaacagaatatgtgtctggtgtaccagccagcctctgaccactccccagcagcagagggttgggttcccggatctattctggcccccttgaccaaggccacagctgcagagtctagcgacgggagcatcaagaagagctgcagttggcacactctccgtatgaggaaaagggccgaggtggagaacacagggaagaatgaagcaaccggacctaggaaacccaaggacattttgggcaataaagtatccgtgaaagagaccaattcatctgaagaatcggagtgcgacgacttggaccctaatacatcaatggagatcctcaacccaaacttcattcaagaagtcgcgcccgagtttctggtgcctctcgtagatgttacgtgcctccttggtgataccgtcattttgcagtgcaaagtctgtggtcgccccaagccaaccatcacttggaagggacctgatcagaacatcctggataccgataacagtagtgcaacgtacacagtgtctagctgcgactctggtgaaataaccctgaaaatttgcaatctgatgccccaggacagtgggatttatacatgcatcgccacaaatgaccatggtacaactagcacttccgccactgtgaaagtgcagggcgtgccagccgcgcccaacaggcctatcgcacaggagcggagctgcacttcagtgatactgcggtggctgccaccaagctcaacagggaactgtactatcagcggatacaccgtggagtaccgggaagaaggctcccagatctggcagcaatccgtcgcaagcacactggatacttatcttgttatcgaggacctgagccctgggtgcccctaccagttccgtgtgtcggccagtaacccctgggggatctctctgccgtccgagccatcagaatttgtacggctgccagaatacgacgccgcagccgatggagcaaccatcagctggaaggagaattttgacagcgcttacacagagctgaacgaaattggcagaggccgcttctctatagttaaaaagtgcatccataaagcaacccgaaaggatgttgcggtgaagtttgtgagtaagaagatgaagaaaaaagaacaggccgctcacgaggccgccctcttacagcatctccagcatccccagtatattactctgcacgatacttatgagtcacccacttcttacatcttgattctggagctaatggatgacggaaggctcctggattatctaatgaatcatgatgagctgatggaagaaaaagtggccttctacatccgggatattatggaagccctccaatacctgcacaattgccgggtggcgcaccttgacatcaagcccgaaaatcttttgatcgaccttcggatccccgtaccccgtgtgaaactcatcgaccttgaagatgctgtacagatctccgggcacttccacattcatcatttgctcggtaatcccgagttcgccgccccggaggttatccagggtattccggtgtctttgggcacagacatttggtctatcggagtgctcacctacgtgatgctgtccggcgtgtcccccttcctggatgaatctaaagaagagacttgtataaacgtgtgccgggtggattttagtttccctcatgaatatttttgcggagtttctaacgcagcacgagactttataaacgtaatcctgcaggaagatttccgcaggaggccaacggccgcaacatgtctccagcacccctggctgcagccccacaacgggagttacagcaagatccctctggataccagccgcctggcctgtttcatcgaacgccggaaacatcaaaacgatgtgcgaccaatcccaaacgtgaagtcttacatcgtgaatagagtaaaccagggcacatag

SEQ ID NO: 192120 - DNA, 3774 bp, synthetic construct
  misc_feature 1..3774: note = Description of Artificial Sequence: Synthetic coding sequence
  source 1..3774: mol_type = other DNA
atgaagggcggcgaccgggcctacacccggggccccagcctgggctggctcttcgcaaaatgctgttgctgtttcccttgtagggatgcctattcccattctagtagcgaaaacggcgggaagtctgagtcggtcgctaacctgcaggcgcagccaagcctgaactccatacatagtagccccggccccaagagatctacaaacactcttaagaagtggctgacatcacctgtgcgccgtttgaactcagggaaggccgacggaaacattaagaagcagaagaaagtcagggacgggagaaagtcttttgacttaggatcacccaaaccaggggatgagaccactcctcagggcgacagcgccgatgagaaaagcaagaagggatggggcgaggacgagcccgatgaggagtcccacacacccctgccacctcctatgaagattttcgacaatgatcccacccaggacgagatgtctttagagggcagctcgtaccgggggtccctcaaagaccccgcaggatgtctgaatgagggaatggctccaccaacgcctccaaagaacccggaggaggaacagaaagccaaagctttgagaggacggatgtttgtcctgaatgaactagtacagaccgaaaaagactatgttaaagacctcgggatcgttgtggaggggttcatgaagcgaatcgaggaaaaaggcgtgccagaagatatgcgaggtaaagacaagatagtattcggcaatatccaccagatttatgactggcataaggatttctttcttgcagagcttgaaaaatgcattcaggaacaggataggctagcacaacttttcataaagcatgaaaggaaattgcatatatatgtgtggtactgtcagaacaagccccgttccgagtacattgtcgcagagtacgacgcgtatttcgaggaagtgaagcaggagatcaatcagaggttaaccctgtccgatttcttgataaagcccatacaacgaattacaaaataccagctgctcttgaaggattttctaaggtacagcgagaaggctggactggaatgttctgatatcgagaaggctgtagagctgatgtgtttagtgccaaagcggtgtaatgacatgatgaacctgggccgactgcaggggttcgaaggaacattaacggcccaggggaagctgctgcagcaagataccttctacgtcatcgagctggatgccggcatgcaatctagaaccaaggagcgccgtgtgttcttattcgaacaaattgtgatcttctccgaactgttaagaaagggatcactgacgcccggttacatgttcaagcgaagtattaagatgaattacctagtgttggaagagaatgtagacaacgatccttgtaagtttgcactgatgaacagagagaccagtgaacgcgtggtgctccaggctgccaatgccgatatccagcaggcttgggtccaggatatcaatcaagtcctcgagactcagcgagacttcttgaatgccctgcagagcccaatcgaataccagagaaaagagcgcagcaccgctgtgatgcgcagccagcccgcccgtttgcctcaggccagcccaagaccctactccagcgtgccggctggttccgaaaaaccccctaaggggtcttcatataacccgccattgcctccactaaagatttctaccagcaatggctcgcctggttttgagtaccaccaacctggggacaaattcgaagcctccaaacagaatgaccttgggggctgtaatggaaccagctctatggctgtgatcaaggattactatgccctcaaggagaatgaaatctgtgttagtcaaggggaggtagtccaggtgctggctgtgaaccaacagaacatgtgcttagtttatcagccggcatccgatcacagccccgctgctgagggctgggtccctggttcaatcctggcaccacttaccaaggccacagccgctgaatcgtcagatggaagcattaagaagtcttgtagctggcacaccctgagaatgaggaagagagcagaggtggaaaacacaggtaagaatgaggccaccggacctagaaagccaaaggatatccttggaaataaagtgagtgttaaagaaactaactccagcgaggaatcagaatgtgacgaccttgatcctaatacgtccatggagatcctaaaccctaatttcatccaggaagtggctcccgaatttttggttcccttggtggacgtcacatgcttgctcggtgacacagtaatactccagtgcaaagtgtgcggccggcctaaacctacgatcacgtggaaaggccccgatcagaatatcctggataccgacaattcaagtgccacatatactgtctccagctgtgattctggagagatcaccctgaaaatatgtaaccttatgccacaggactcgggaatttacacctgcatagctacaaatgaccacggtacgaccagtacgagcgctaccgtaaaggtccagggggtacccgccgcccctaatcggccaatagcccaggaacgtagttgtacatcagtaattcttcggtggttgcccccgagtagcactggcaattgcactatttcggggtacaccgtggaatatagagaggaaggatctcagatctggcaacagtccgtggcctccactctggatacgtatttggtcatcgaggacctcagccccggctgcccttaccaattcagagtcagcgctagcaacccttggggcatctcgcttccctctgagccatccgaatttgtcagactgcccgagtacgacgccgctgctgatggggctactatctcctggaaagaaaactttgacagcgcatacactgagctcaatgagattggcagaggaagattctctatcgttaagaaatgcattcataaagccaccagaaaggacgttgccgtgaaattcgtatcaaagaaaatgaaaaagaaggaacaggccgctcacgaagccgccttgctacaacatctccaacaccctcagtacatcactctgcacgacacatacgagtcacctaccagctatattttaattctggaacttatggatgacggaagactgctggactacctcatgaaccatgacgaactgatggaagagaaggttgccttctatatccgcgatatcatggaagccctacagtatttacataactgcagggtggcacatctcgatatcaaacctgagaatctactaatcgatctcaggatccccgtgcccagggtgaaactgatcgacctggaagatgctgtgcagatctcgggacacttccatattcatcatttgctcggtaatccggagttcgcagctcccgaagtcattcaaggaatccccgttagcctcggcactgacatctggtcaataggcgtgctgacttatgtgatgctctcgggggtcagcccttttttggatgagagtaaggaggagacttgcattaatgtgtgcagggtggatttcagtttcccgcacgagtacttttgcggggtgtccaacgccgctcgcgacttcatcaacgtcatcctccaggaagacttccgaaggcgtcctaccgccgccacatgtctgcagcatccctggctgcagccacataatggctcatactcaaagattccgctggataccagcagattggcttgctttatcgaacggcgcaagcaccagaacgacgtgcgcccgattcccaacgtgaagtcttacatcgttaatcgagtgaatcagggaacttag

SEQ ID NO: 192121 - DNA, 4965 bp, synthetic construct
  misc_feature 1..4965: note = Description of Artificial Sequence: Synthetic coding sequence
  source 1..4965: mol_type = other DNA
atgaccgaccggttctgggaccagtggtacctgtggtacctgcggttactgaggctgctcgaccgcggcagttttagaaatgatggactgaaggcaagcgatgtgctccccattttaaaggagaaggtggccttcgtctcgggcgggcgcgacaaaaggggcggtcctatactgaccttccctgctcgctctaaccatgacaggattcggcaggaggatcttaggaagctcgtgacatacctcgcaagtgtgccatctgaagacgtctgtaagagagggttcacagtcattattgacatgcgcgggagcaaatgggatctgatcaagcccctgttgaagaccctgcaagaggcttttcccgctgagattcatgtagcgttgattatcaaaccagacaacttttggcagaaacagaagactaattttggaagctcaaagtttatttttgaaactagtatggtttccgtggagggactcaccaagctcgtcgacccatcccagctgacggaggagttcgacggatcactggactataaccatgaagagtggatagagctgcggttatccctggaagagttctttaattccgccgtccatctcctgagccggctggaagatctacaagagatgctcgcgcgtaaggagttcccagtggatgtggagggatcccggcgtctgattgatgaacacacccagctgaaaaagaaggtgttaaaggcccctgtggaggagctagaccgggaaggacaaagacttctccaatgtatccggtgctctgatggcttttctggccgcaactgtatccctggatcagctgactttcagtctctcgtccctaagattactagtctcctggataagttacattcaactagacaacacttgcaccagatgtggcacgtgcgtaagctaaagctggatcagtgttttcagttacggctgtttgagcaggatgcagagaagatgttcgactggatctcccacaacaaggagctgtttttgcagtctcacactgagatcggagtgtcataccagtatgccctagacctccagacccagcataaccacttcgccatgaacagcatgaatgcctatgtcaatataaatcggatcatgtcagtggcttctagattaagcgaagctggtcattacgctagccagcagatcaagcaaatttctacccagctcgaccaggaatggaaatctttcgccgccgcattagacgagagatcaaccatcctcgccatgtccgcggtctttcaccaaaaggcagaacaatttctaagcggcgtcgacgcctggtgtaaaatgtgctctgagggagggttgccatcagaaatgcaggaccttgagcttgctatccaccaccaccaaacactgtacgaacaggtaacccaggcctataccgaggtcagccaggacgggaaagctctgctcgacgtgttacaaaggcccttgagtccaggcaattctgagtctcttaccgccacggccaactattcgaaggcagtacaccaggtgttagacgtggttcacgaagtgctgcaccaccagcgtcgcctggagagtatatggcaacaccgaaaggttcgcttacatcagcgattgcagttgtgcgtgtttcagcaggacgtgcagcaggtactggattggatcgaaaatcatggagaggcgtttctcagtaaacatacaggagtgggcaagagtctccatcgggcgcgcgccctacagaagcgccatgatgatttcgaagaagtcgcccaaaacacctacactaatgccgataaactcttggaagctgccgagcaattagctcagacaggagagtgtgacccggaggaaatttacaaagcagcccgacaccttgaagttcgtatccaggactttgtcagaagagtggagcagagaaagttactcttggatatgtcggttagctttcacacacatacaaaagaactgtggacgtggatggaggatctacagaaggaaatgttagaagatgtttgcgccgactctgtggacgcagtccaagagctgattaagcagttccagcagcaacagactgcaacactggatgccaccctcaacgtgattaaggaaggtgaggatctgatccagcaactcaggtccgcaccacccagcctcggtgagccttccgaggctcgggactccgccgtgagcaataacaaaaccccccactcttcaagcatttctcatattgaatcagtgctgcagcagctcgacgacgctcaagtccagatggaagaactctttcatgagagaaagatcaagctggacattttcctacagctcaggattttcgagcagtatacaatcgaagttactgctgaacttgatgcttggaatgaagatcttttaaggcaaatgaacgattttaatactgaggatctcaccttggcggaacagcgtctgcaaaggcacaccgaaagaaaattagccatgaacaacatgactttcgaggtcatccagcagggtcaggatctgcatcagtacataacagaagtgcaggccagtggaattgaactcatctgcgagaaggatatcgaccttgccgcccaagtacaggagctgctagagttcttgcacgagaaacaacacgagcttgagcttaacgcggagcaaacccacaagaggctcgaacagtgcctccaactgcggcacctgcaagccgaagtgaagcaggttctgggctggatacgcaatggcgaaagtatgctgaatgcttcattggtgaacgccagtagcctaagcgaagcggagcaattgcaacgtgagcacgaacaatttcaattggctattgagaagacccaccaaagcgcgctgcaggtccaacaaaaggctgaagtgctgctgcaggccggtcattacgacgccgacgccatccgggagtgtgcagagaaagtggcactgcactggcaacagctgatgttgaagatggaagaccgcctaaagctggttaatgctagcgtggcattctacaaaacaagcgagcaggtttgttccgtcctggagtcgcttgagcaggagtacaggcgcgacgaggactggtgtggtggtcgcgataaactgggccccgctgccgagattgatcacgtgatccctctgatctccaagcatcttgaacagaaggaggcctttctgaaggcgtgtactctggccagaagaaatgctgaagtattcttaaaatatattcatcgtaacaacgtttccatgccatctgttgccagccacacacgaggccctgaacagcaggttaaggcaatactgtccgagctgctacagcgagaaaaccgagtactccatttttggacattgaagaaacgccggctggatcagtgtcagcagtacgtcgtgttcgaacgcagcgccaagcaggccttggactggatccaggagacgggggaattctacctgagtacccacactagcactggagaaaccactgaggaaacacaggaactgctgaaagaatacggggagtttcgcgtgcctgcgaaacagacaaaggagaaagtgaaacttttgatccagctggccgattccttcgtcgaaaaggggcatatccacgcaaccgagatcaggaagtgggtcaccaccgtagataagcattatagagacttctccctgaggatgggcaagtacaggtactctctcgaaaaagcactgggcgttaacacagaagacaacaaggacttagagctggacataattccagccagcctcagcgaccgcgaggtcaagctccgggacgcgaatcacgaagtcaacgaggaaaagaggaagtcagcccgtaaaaaggagtttatcatggcggagctgctccagaccgagaaagcttatgtgagggacctacatgagtgtctcgagacttacctctgggagatgaccagcggagtcgaagaaattcccccggggatcctgaacaaggagcacataatattcggaaacattcaggagatctacgactttcacaataacatttttctaaaggagttggaaaagtacgagcaactacctgaggacgtaggccactgctttgtgacttgggccgataaattccaaatgtatgtgacctattgtaaaaacaagccagattctaatcagctgatcctcgagcatgctgggacttttttcgacgagatccaacagagacacggcctggctaacagtatttctagttaccttatcaagccagttcaacgcattaccaagtaccagctcctcttgaaagagcttctcacctgctgcgaggaggggaagggagagctgaaagatgggctcgaagtcatgctaagtgtgcctaagaaggcaaatgatgcaatgcatgtgagcatgttggagggatttgatgagaacttagacgtgcagggagagcttatcctacaggacgcttttcaagtctgggacccaaaaagtttgatccggaaaggtcgagagcggcatctatttctgttcgagatttcactggtgttttctaaagagatcaaggattcctccggacataccaagtatgtttataagaacaagctgttaacatcagagctcggagtgacggagcacgtggagggggacccctgtaaattcgcgctgtggtccgggagaaccccgtcctccgacaacaaaaccgtactgaaggcctccaatattgagaccaagcaggagtggattaagaatatccgagaggtcatacaagaaagaattattcatctgaaaggggccctgaaagagcccttgcaactccccaaaacccctgccaagcagcgcaacaacagcaagcgggatggcgtggaggacatcgactctcaaggggacggatccagccagcccgataccatcagtatcgcaagcaggacctcccagaacaccgtcgacagtgataaggatggcaatctagtgccaagatggcacctggggcccggcgaccccttttccacttatgtgtag

SEQ ID NO: 192122 - DNA, 789 bp, synthetic construct
  misc_feature 1..789: note = Description of Artificial Sequence: Synthetic coding sequence
  source 1..789: mol_type = other DNA
atgtggttcctggtgctgtgcctggccctgagcctgggcggcaccggtgccgctcccccgatccaatccagaatagtcggaggatgggaatgtgagcaacattctcaaccgtggcaagctgctctttatcactttagcacattccaatgtggtgggatcttggttcatagacaatgggtgctgaccgcagcccactgcatctcggacaactatcagctgtggctagggagacacaacctcttcgatgacgagaacaccgcccagttcgtccacgtgagtgaatcatttccccatcctggctttaacatgtctctcctcgagaaccacacccgacaggcggatgaggattactctcacgatttaatgctgttacgactgactgaacctgccgacactattacagatgccgtgaaggttgtggagctgccaactgaggaaccagaagtggggtcgacttgtttggcttctggctggggatctatcgaacctgagaactttagctttccagatgatctgcagtgtgtggaccttaaaattctcccaaatgatgaatgcaaaaaggcgcacgtgcagaaagtcacagacttcatgttatgtgttgggcacttggaggggggcaaagatacttgtgtgggcgatagcggtggccctctgatgtgcgatggcgtgttgcagggcgttacctcatggggttacgtcccatgtgggacccccaataagcctagcgtggctgtgcgtgtcctcagctatgtgaagtggatcgaagatactattgctgagaactcatag

SEQ ID NO: 192123 - DNA, 483 bp, synthetic construct
  misc_feature 1..483: note = Description of Artificial Sequence: Synthetic coding sequence
  source 1..483: mol_type = other DNA
atgagcctgctggagaaccacacccggcaggccgacgaggactactcacacgaccttatgttgctcaggctgacggaacccgccgatactatcactgatgccgtaaaagtggtggagctgccaaccgaggagcccgaagttggtagtacctgcttggcctccggttggggaagtattgagcccgagaatttctctttcccagatgatcttcagtgtgtggaccttaagatcctaccgaacgacgaatgtaaaaaggcccacgtgcagaaggtgactgactttatgctgtgcgttgggcatctcgagggaggaaaagatacttgtgtcggggacagcggtggacctctgatgtgcgatggggtcctccagggtgttacgtcctggggctacgtcccatgcgggacacctaacaagccgagcgtagccgtgcgggtgctcagctacgtgaagtggatagaggataccatcgccgagaacagttag

SEQ ID NO: 192124 - DNA, 1917 bp, synthetic construct
  misc_feature 1..1917: note = Description of Artificial Sequence: Synthetic coding sequence
  source 1..1917: mol_type = other DNA
atgatcctgttcaagcaggccacctacttcatcagcctgttcgccactgtttcttgcggctgtctgacacagctctatgagaacgctttcttcagagggggagatgttgcaagcatgtatacccctaacgctcaatactgtcagatgcggtgcacattccacccaaggtgcctgctattcagctttctacctgccagcagcatcaatgatatggagaaaagattcggttgttttttaaaggacagtgtgacaggcacgctacctaaagtgcacaggaccggcgccgtctcgggccactccctcaagcagtgtggtcaccagatctccgcctgccatcgcgacatatacaagggagttgacatgcgtggggtgaattttaatgtgagcaaggtatccagcgtcgaggagtgtcagaaacgttgtactagcaatatcaggtgccagtttttttcctacgctacacagacattccacaaggctgagtaccgcaataactgcctactcaaatattccccggggggaaccccaacagccatcaaggtgctgagtaatgttgagagcggctttagcctgaagccatgtgctctttccgagataggctgccatatgaatattttccaacatctcgcattctccgatgtcgatgtcgccagggtgctgacccccgacgcgtttgtgtgccgaaccatctgtacctaccatccaaactgcctcttcttcacattctacactaatgtgtggaagattgagtcacagagaaacgtgtgtttactgaagacatctgagtctgggaccccctcttcaagtaccccgcaggagaacacaatctccggttatagcctcctcacatgtaagaggaccttgccggagccttgtcactctaagatttatcccggtgtggatttcggaggcgaggagctgaatgtgacattcgtaaaaggcgtgaatgtctgccaggagacttgtaccaaaatgattaggtgtcagttttttacttatagtctgctgcccgaagactgcaaggaagagaagtgcaagtgcttcctgcggctgtctatggacggctctcccacccgaatcgcctacggaacacagggatcctccgggtactccttaagactctgtaatactggagataatagcgtgtgtacaacaaaaacatctacacgtatcgtcggaggtacaaactcctcttggggcgaatggccttggcaggtaagtctccaggtaaaactcactgcacagaggcacctgtgtggaggaagcctcatagggcaccaatgggttctgactgctgctcattgtttcgacgggttgccgcttcaggatgtgtggagaatttactctggcatcttgaacctatctgacatcacaaaagacacacccttttctcagatcaaagaaatcataatacatcagaattacaaagtatctgagggaaatcacgacattgctttgattaaactccaggccccactcaactacaccgaatttcagaaacccatatgtctgccttccaaaggggatacatccaccatatacactaactgctgggtgactgggtggggattttcgaaggaaaagggagagatccagaatattctgcaaaaggtcaacattcctttagtgacgaatgaggagtgccaaaaaagataccaggattacaaaatcacacagcggatggtatgtgctggttacaaagaggggggcaaagatgcatgtaaaggcgattctggtgggcccttggtttgtaaacataatggcatgtggcgactcgtgggaatcacgagctggggggagggctgtgcgcgtcgcgagcaaccaggagtttacacaaaagtggcagagtatatggactggattctggaaaaaacccaatcttccgacgggaaggcccaaatgcagtcgcccgcttag

SEQ ID NO: 192125 - DNA, 1545 bp, synthetic construct
  misc_feature 1..1545: note = Description of Artificial Sequence: Synthetic coding sequence
  source 1..1545: mol_type = other DNA
atgtacacccccaacgcccagtactgccagatgcggtgcaccttccatccacgctgcctcctgttttcatttttgcccgcaagcagcatcaatgacatggagaaaagattcggctgtttcctgaaagactctgtgacaggaaccctacctaaggtccacagaaccggcgccgtctccggccattccctgaaacaatgtggccaccagattagtgcctgtcacagagacatttacaagggcgtggacatgagaggtgttaacttcaacgtttctaaggtttccagtgtagaggagtgccagaaaagatgcacctctaatatcaggtgccagttttttagctacgccacacaaacctttcataaggcggaataccggaataactgcttgctcaaatacagcccaggtggtacacccaccgctattaaggtactttccaacgtagagtccggattttcactgaaaccttgtgcactatccgagatagggtgccacatgaacatcttccagcacctggcctttagtgatgtcgacgtcgccagagtcctcacaccggacgctttcgtctgccgcaccatatgcacttatcatccgaactgtctcttcttcaccttttacaccaacgtttggaagatcgagtcccagcggaacgtgtgtctgctcaaaacttccgaaagcggcacccctagctcaagcactccccaagagaacaccatctctggttacagtcttctgacctgtaagagaaccctccccgagccctgtcattcaaagatttatccaggtgtcgattttgggggagaggagctgaatgtgaccttcgtgaaaggggtgaatgtttgccaggagacctgcaccaagatgattcgctgtcagttcttcacatactcactactgcctgaagattgtaaagaggagaaatgcaagtgcttcctacgactatctatggatggttcccccacccgtatagcgtatggcacgcagggcagctcagggtattcgctcagattgtgcaacacaggggacaactccgtatgcaccactaaaactagtactcgtatcgtaggaggcaccaactcttcttggggagagtggccatggcaggtgtcactccaggtgaagttgaccgcccagcgacacctgtgcggcggctctctcatcggccatcaatgggtgcttacagcagctcactgctttgacggactcccgctgcaggacgtctggcgcatctactccgggattctgaatctcagcgatatcacaaaggacacacctttttcacagattaaggagattattattcaccagaactacaaagtgtccgaaggcaaccatgatatcgcccttataaagctgcaagccccccttaactataccgaatttcaaaaacctatctgcttgcccagcaaaggcgatactagcacaatttacacaaactgctgggtgacagggtggggcttctcaaaggagaaagggcggttccgctggtcgttgtctctccaaacccagtggaatgtcgcattcggtggccaccatcagctggggtag

SEQ ID NO: 192126 - DNA, 447 bp, synthetic construct
  misc_feature 1..447: note = Description of Artificial Sequence: Synthetic coding sequence
  source 1..447: mol_type = other DNA
atgatcctgttcaagcaggccacctacttcatcagcctgttcgccactgtatcatgcgggtgcttaactcagctgtatgaaaacgccttttttagaggaggagacgtggcaagcatgtacacccctaacgcccagtactgtcagatgagatgcactttccacccccgatgcctgcttttctcttttctcccagccagttccatcaatgacatggagaagaggtttgggtgtttccttaaagattcggtcactggtacattaccgaaagttcaccgtaccggtgccgtttccgggcatagcctgaagcagtgcgggcaccagataagtgcgtgccatagagatatttacaagggagtcgacatgcggggagttaacttcaatgtgtcaaaggtgtcctctgtcgaagaatgtcagaagcggtgtacatcaaacatcaggtgccaatag

SEQ ID NO: 192127 - DNA, 753 bp, synthetic construct
  misc_feature 1..753: note = Description of Artificial Sequence: Synthetic coding sequence
  source 1..753: mol_type = other DNA
atgcggatcctgcagctgatcctgctggccctggccaccggcctggtaggcggcgaaacaaggatcatcaagggcttcgaatgcaaaccacatagtcagccttggcaggcggcactctttgagaagaccaggctcctgtgtggggctacacttatagcacccaggtggctcctgacggcagctcactgcctcaagccccgttacattgtacatcttggacagcataacctgcaaaaagaagagggctgcgaacagacaaggaccgcaactgaaagcttccctcaccccggtttcaacaactctcttccgaataaagatcatcgtaacgacattatgctagtgaagatggcatccccagtgtctatcacatgggctgttagacccctcaccctgtccagcagatgcgtcacagccggcacgagttgtcttatcagtggctgggggtcaacttcttctccacagctcaggctgccacataccctgaggtgtgccaatatcactatcatagagcatcagaaatgtgagaacgcatacccgggaaacatcactgataccatggtttgtgcttccgtgcaagaaggaggaaaggactcctgtcagggagattctgggggtcccctggtttgtaatcagtcactgcagggcattatcagttgggggcaggacccttgcgctattacgcggaagcctggcgtctatacgaaagtatgcaagtatgtggactggattcaggaaacaatgaagaataactag

SEQ ID NO: 192128 - DNA, 849 bp, synthetic construct
  misc_feature 1..849: note = Description of Artificial Sequence: Synthetic coding sequence
  source 1..849: mol_type = other DNA
atgcagcggctgcggtggctgcgggactggaagagcagcggccgggggttgactgctgcaaaggagcctggcgcacgctccagtcccttgcaagctatgagaatcttacagctgatcctgcttgcgctcgccacgggtctggtaggtggagagactaggattattaaggggttcgagtgtaagccgcactcccagccatggcaggctgctctttttgagaaaacacgtctcctatgcggcgccacacttatagccccccggtggctcctcacagccgctcattgtttgaaaccacggtacatcgtgcacttgggccagcataacctccagaaggaggagggctgcgagcaaacccgcaccgcaactgaaagcttcccgcaccccgggttcaacaactccctgcccaataaagatcatagaaatgatattatgctggtcaagatggcatcccccgtttccatcacatgggctgtccggcctctcaccctgtcttccaggtgcgttaccgctggaactagctgtctaatttccgggtggggctccaccagttctccacagcttcggctgccccacacacttcggtgcgcaaatatcactatcatcgagcaccaaaagtgtgaaaatgcctatcctggaaatattacagatacaatggtgtgtgccagcgttcaggaaggaggaaaagattcttgtcagggcgactccggaggacccctcgtgtgcaatcaatctttgcagggtatcatttcatggggccaggacccatgtgccattaccagaaaacctggcgtatatacaaaggtatgtaaatacgtcgactggattcaggaaacgatgaaaaataactag

SEQ ID NO: 192129 - DNA, 828 bp, synthetic construct
  misc_feature 1..828: note = Description of Artificial Sequence: Synthetic coding sequence
  source 1..828: mol_type = other DNA
atgcggatcctgcagctgatcctgctggccctggccaccggcctggtgggaggcgaaacccggatcataaagggtttcgaatgtaagccgcacagccaaccgtggcaagctgccctgtttgagaagactcggctcctctgcggcgccacgctcatcgccccacggtggcttctgacagcggctcattgccttaaaccctgggtgtcgctgacatcaccaacacatgtcagtccagacctcagcagctctaattactgtttatcgcacttatcaagatatatcgtccatctcggacagcacaacctacaaaaagaggaagggtgcgagcaaactagaactgcaaccgaaagtttcccacaccctggctttaataattccctccccaataaggaccatagaaatgacatcatgctggttaaaatggcttccccggtgtctatcacatgggcagtccgaccgctcacactgagtagtcgttgcgtgaccgccgggacttcttgtttgatatctggctgggggtctactagctcaccgcagcttaggctcccacataccctgcggtgcgccaatatcaccatcatcgagcatcaaaagtgcgagaatgcctaccccggtaatatcaccgacacgatggtgtgcgcctccgtccaagagggcggcaaggatagctgtcagggggattccggcgggccgctggtgtgtaaccagagtctccaggggattatcagttggggacaggacccatgtgctattacgcgcaaacctggggtctataccaaggtctgtaaatacgttgattggatccaagaaaccatgaagaacaattag

SEQ ID NO: 192130 - DNA, 753 bp, synthetic construct
  misc_feature 1..753: note = Description of Artificial Sequence: Synthetic coding sequence
  source 1..753: mol_type = other DNA
atgcggatcctgcagctgatcctgctggccctggccaccggcctggtaggcggagagacaaggatcataaaagggtttgaatgcaaacctcacagccaaccatggcaggctgcgctttttgagaaaacaaggctgttatgtggcgctacactcatcgcccctaggtggttactgaccgcagcacactgcctcaagcctaggtatattgtccatttaggccagcataacctgcaaaaggaagagggatgtgagcagaccaggaccgctactgagagtttcccacatccaggttttaataatagtctgcctaacaaagatcatcggaacgatatcatgctcgtcaagatggcttcacccgtcagcatcacttgggcagtgcgcccgctcaccctgtcctctcggtgtgtcacagcaggcacctcctgccttatcagcggttggggctctacaagctcacctcagctgagattgcctcacactttgcgatgcgccaacattaccataatagagcaccagaagtgcgaaaacgcatacccaggaaatataacagacaccatggtctgcgcatccgtgcaggaaggtggtaaggactcctgtcaaggcgatagcggcgggccactggtctgtaatcagagcctccaaggtatcatttcatgggggcaggacccctgcgcaataacccgtaagccaggggtttatactaaggtttgtaagtacgtagactggatccaggaaaccatgaaaaacaattag

SEQ ID NO: 192131 - DNA, 849 bp, synthetic construct
  misc_feature 1..849: note = Description of Artificial Sequence: Synthetic coding sequence
  source 1..849: mol_type = other DNA
atgcagcggctgcggtggctgcgggactggaagagcagcggccggggactaaccgccgccaaagagcctggcgcccgaagttctcctttgcaggcaatgagaatcctgcagctgatcctcctcgccctcgcaactggactcgttggtggcgagacacggataattaagggatttgaatgtaagcctcacagccaaccatggcaggcagcactgtttgaaaagactcgtctcctgtgtggtgcgaccctcatagcacctcgttggctcttaactgctgcacattgcctcaagcccaggtacattgtgcacctcgggcagcacaatctccagaaagaggagggttgcgaacaaacccgtaccgccaccgagtctttccctcacccaggtttcaacaactccctgccaaacaaagatcatcggaacgacatcatgttggtcaaaatggcgagcccagtgtcgatcacttgggctgtaaggcccctcaccctgtcttccaggtgtgtgacagcggggacttcctgcctaatttctggatggggctctactagcagcccacaactaagactgccgcacactttacggtgtgctaacataacgatcatagaacaccagaaatgcgagaatgcttacccaggtaacataactgacacaatggtgtgtgcatctgttcaggagggcggcaaagattcatgtcaaggagatagcgggggccccttagtgtgcaatcagtcactgcaggggattatttcctggggtcaagacccatgtgctattacgcgtaagcccggcgtgtatacaaaagtgtgtaaatatgtggattggatccaggaaaccatgaaaaataattag

SEQ ID NO: 192132 - DNA, 765 bp, synthetic construct
  misc_feature 1..765: note = Description of Artificial Sequence: Synthetic coding sequence
  source 1..765: mol_type = other DNA
atgggcctgagcatcttcctgctgctgtgcgtgctgggcctgagccaagccgccacccccaagatcttcaacggaacagagtgtggacggaactctcaaccttggcaagtggggctctttgagggcacttcgctccggtgcggaggcgttctgatagaccataggtgggtcttgaccgccgcccattgtagcggctcccgttattgggtccgtctgggtgagcacagcctgtcccagctagactggaccgaacagatccggcattccggattttcagtgacacatcccggctacctgggcgcatcgacatcgcatgagcatgacctgagattattaaggctgcgactgcccgtgagggtcacctcttccgtgcagccactgcctctcccaaacgactgcgctacagcaggaacagagtgccacgtctcagggtgggggattaccaaccaccctcgcaacccatttcctgacctcctgcagtgcctgaatttgagtatagtatcccacgctacatgccatggggtgtacccaggacgcatcacaagtaatatggtttgtgccggtggcgtcccgggtcaagatgcctgccagggtgattccggaggccccctggtgtgcggtggcgttttgcagggtctcgtctcttgggggtctgttgggccgtgtggccaggatggcatacctggggtgtatacatacatctgcaactctacgctggtggggttgggcacctcttggaatttcaactcctgccagccattttag

SEQ ID NO: 192133 - DNA, 435 bp, synthetic construct
  misc_feature 1..435: note = Description of Artificial Sequence: Synthetic coding sequence
  source 1..435: mol_type = other DNA
atggccctgagcgtgggcgtgacccacagccggggccggtggggctgcttaagagcacctgcctgtgcagccggcgtgagccttctgactaccggcggtagttcccagcgacttacggctgcagctgatccgttccctgacctgcttcagtgtctcaatctgagtattgtgtcacatgcaacctgccacggagtttatcccggccgaattacatcaaacatggtctgtgcgggaggcgttcccgggcaagatgcatgtcagggcgattccggtggccccttagtttgtggcggtgttctgcaaggcctggttagctgggggtcggtcggaccatgcggccaggatgggatccccggcgtgtatacatatatctgtaatagtaccttagttgggctcgggacctcctggaactttaactcttgccaacccttctag

SEQ ID NO: 192134 - DNA, 747 bp, synthetic construct
  misc_feature 1..747: note = Description of Artificial Sequence: Synthetic coding sequence
  source 1..747: mol_type = other DNA
atgggcctgagcatcttcctgctgctgtgcgtgctgggcctgagccaggccgcaacgccgaaaatctttaacggaaccgaatgcggtaggaactctcagccgtggcaggtgggcttgttcgaagggactagtctgcggtgtggcggagtgctgatcgaccataggtgggtcctgaccgcagcccactgcagcggctcacgctactgggtacgcctgggagagcattccctcagccaactggactggaccgagcaaatacgacactcaggcttcagtgtgacgcaccctggctacctcggcgcatctacgtcacacgaacatgatctgcggctactgcgcctgagactgcccgtccgcgtgacgagttctgtgcagccactgccgctgccaaacgattgtgcaaccgcaggaactgaatgccacgttagtgggtggggaattactaatcacccacgaaacccattccctgacttactgcaatgtcttaatctgtctatagtttcccacgcgacctgccatggggtgtatcccggccgtattacttcgaatatggtatgtgccgggggggtccccggtcaagacgcatgccagggtgacagcggcgggccattggtgtgtggaggagtcctccaggggttggtttcctggggctcagtgggcccctgcgggcaagacggaatacctggagtctatacttatatctgtaaatacgtggactggatacggatgatcatgagaaataactag

SEQ ID NO: 192135 - DNA, 747 bp, synthetic construct
  misc_feature 1..747: note = Description of Artificial Sequence: Synthetic coding sequence
  source 1..747: mol_type = other DNA
atgggcctgagcatcttcctgctgctgtgcgtgctgggcctgagccaggctgccacccccaagatcttcaatgggaccgaatgtggacgaaacagccagccatggcaagtggggctgttcgaggggacatctttacgatgtggtggtgttctgattgatcataggtgggttcttactgccgctcactgcagtggtagccgctactgggtgcgactaggcgagcattctttgtctcagcttgactggaccgagcagatccgacattcaggattctcagtcacacatccagggtacctcggagcctcaaccagccacgagcacgatctcagattattaaggctgaggctgcccgtgcgggttacttctagcgtccagcccctgcccctgcccaatgactgtgccacagcgggaactgagtgtcatgtgagtgggtggggcattacgaatcatccccggaaccccttccccgacctgttacagtgtctgaacttatctatcgtgtcccatgccacatgccatggcgtctatccagggagaatcacatcaaacatggtgtgcgcagggggtgtgcccggtcaggacgcctgccagggagacagcggaggtccactggtctgcggcggcgttctccagggcctggtgtcctggggttcggtcggcccctgtggccaagacggcatccccggggtgtacacttatatttgtaagtatgttgattggatccgcatgattatgaggaataactag

SEQ ID NO: 192136 - DNA, 336 bp, synthetic construct
  misc_feature 1..336: note = Description of Artificial Sequence: Synthetic coding sequence
  source 1..336: mol_type = other DNA
atgggcctgagcatcttcctgctgctgtgcgtgctgggcctgagccaagcagcgaccccaaagatctttaacgggaccgaatgtgggcggaactcccagccttggcaggtgggactcttcgaaggtacatcattgcgctgtggtggcgtgctcatcgatcaccgctgggttctgactgccgcccattgctccggcaggccaatccctggaagcgctcctgttcctcaacctctccacagactgccatgtcacctgccctggtgtgtgtcccgcgaaaatcatgagcagcatggcgtctgccgccgtcggccaggagccgggtgtctaccggggtag

SEQ ID NO: 192137 - DNA, 834 bp, synthetic construct
  misc_feature 1..834: note = Description of Artificial Sequence: Synthetic coding sequence
  source 1..834: mol_type = other DNA
atgtggcccctggccctggtgatcgccagcctgaccctggccctgtccggaggtgtgtctcaagagtccagcaaggtcctcaacaccaacggtaccagcggatttctgccaggcggctacacttgtttccctcattcacaaccatggcaggccgcccttctcgttcagggcagactgctctgtgggggagttctggtacacccaaaatgggtcctgaccgccgcacactgcctgaaggaggggctcaaggtataccttggtaaacacgcgctcggacgggtggaagcaggggaacaagttagggaggtggtgcattctatcccccatccagagtacagacggtctccaacgcatctcaatcatgaccacgatattatgctactcgagctgcaatctcccgtgcagctgacgggctacatacagacactgccactgtcacacaacaacaggctaacacctgggacaacatgcagggtatctgggtggggcaccacaacctcaccgcaggtaaattatcccaagacgcttcagtgcgccaacattcaactgcgaagcgacgaggaatgtcgacaggtttaccccgggaagattaccgacaatatgctctgtgccgggacgaaggagggcggcaaggatagttgtgaaggcgactccggcgggccgctggtttgcaatcgcaccctgtatggcatcgtctcttggggcgattttccctgcggtcaacctgaccggcccggggtttacactcgggtatctcgttacgttctttggattagagagaccatccgcaaatatgagactcagcagcaaaaatggctgaagggtcctcagtag

SEQ ID NO: 192138 - DNA, 378 bp, synthetic construct
  misc_feature 1..378: note = Description of Artificial Sequence: Synthetic coding sequence
  source 1..378: mol_type = other DNA
atgtggcccctggccctggtgatcgccagcctgaccctggccctgtcgggcgtgaattatcccaaaacactgcaatgcgcgaatatccagctccgaagcgatgaggagtgccgacaggtgtatcctggcaagatcaccgacaatatgctgtgcgccgggaccaaggaggggggcaaggacagctgtgaaggggactccggtggacccctcgtctgcaaccgcacattgtacggaatagtatcctggggagacttcccttgcggacagccagaccgaccaggcgtttatacaagagtgagtcggtacgtgctttggatcagagaaacaatacgaaaatatgaaacgcaacagcagaaatggctcaaggggcctcagtag

SEQ ID NO: 192139 - DNA, 297 bp, synthetic construct
  misc_feature 1..297: note = Description of Artificial Sequence: Synthetic coding sequence
  source 1..297: mol_type = other DNA
atgggcctgatctacaagtgcctgcccgagaaggtgaccgtgaacattgagactagatgccttcccggggtgttccaggggtcccagcaccagtgggaccagtgggtctctcctagatggctgcatctgctaccgcccctgtccgctctggcaggctgccccactagcgccagggctgccaccctgtggggcagccctggacccccacagatgggcccacactgtcgcactcttagcaagggtggggcccagagccttccaaggcaagcgagaccccgggcttgcggtagttggtag

SEQ ID NO: 192140 - DNA, 282 bp, synthetic construct
  misc_feature 1..282: note = Description of Artificial Sequence: Synthetic coding sequence
  source 1..282: mol_type = other DNA
atgtggcccctggccctggtgatcgccagcctgaccctggccctgtcggggggggaggacttcaaagaaccttcacaaggccccagagacgtcatggctgcttcacggcctgaagcttttccgaaaggcctgaccctggagccaaggcccgagaagggaggcatttgtggatgccttgctcctggcacgatccttggcctgaaggtaggatggttgttctcttctggcgacaccccctggattcatgcgcgtgccacacccgagtgccataccctgggctag

SEQ ID NO: 192141 - DNA, 834 bp, synthetic construct
  misc_feature 1..834: note = Description of Artificial Sequence: Synthetic coding sequence
  source 1..834: mol_type = other DNA
atgtggcccctggccctggtgatcgccagcctgaccctggccctgagtggaggcgtaagtcaggagagctccaaagtgttgaacactaacggcacatctgggtttctgcccggcgggtacacttgtttcccccactcccaaccatggcaggccgccctgctggtgcaggggcgtctactgtgtgggggagtcttagttcacccaaagtgggtgttgacagccgcccattgtttgaaagaaggattgaaggtttacctgggcaagcatgctctcgggcgcgttgaggccggcgaacaggtgagggaggtcgttcatagcatccctcacccggagtatcggcgtagccctacacatctgaaccacgatcatgacattatgctgctggaactccagagccccgtgcagcttacgggctatatacagaccctcccattatctcacaacaatcggctcactccaggcaccacttgtagggtgagcggatggggtacaaccacaagcccacaagtcaactacccaaagacgctccagtgcgcaaatatccagttaagatccgacgaggagtgcagacaggtatatcctggtaagatcaccgacaacatgctttgtgcgggtaccaaggaaggcggaaaagactcatgcgagggggactccggtggacctctggtatgtaaccgaaccctatatggcatagtgtcatggggcgacttcccttgcggccagccagatcgacccggcgtgtacacaagggtgagcagatatgtactgtggattcgcgagacgatccgtaagtatgagacccagcaacaaaaatggttaaaggggcctcagtag

SEQ ID NO: 192142 - DNA, 804 bp, synthetic construct
  misc_feature 1..804: note = Description of Artificial Sequence: Synthetic coding sequence
  source 1..804: mol_type = other DNA
atgagcctgcgggtgctgggcagcggcacctggcccagcgcccccaaaatgtttcttttgttaactgccctgcaagtcctggcgatagccatgacccagtctcaggaagacgagaacaagattatcggaggacacacttgcacccggagctctcagccgtggcaggcagctttactggccgggcctagacgtcggtttctatgcggcggcgcactcctgtctgggcaatgggtcatcaccgccgcgcattgcggcagacccattctccaagtcgcactgggcaagcacaatctgcggcgttgggaggccactcagcaggtgttgagggttgtcaggcaggtgactcatcctaattacaactcccggacacacgataatgatttaatgctgttgcaactgcagcaaccagcgaggatcggccgggccgtgcggccaattgaagtgacgcaggcttgcgcgtctcccggcacaagctgcagagtttcagggtggggtacaatcagttcaccaatcgccagataccccgcatcactgcaatgcgtgaatattaacattagcccagatgaagtgtgtcagaaagcatacccccggacaatcactcctggcatggtgtgcgctggtgtaccccaggggggaaaggactcctgtcagggcgatagtggcggccctttggtgtgccgaggtcagttgcaaggattagttagctggggaatggaacgatgtgcactcccagggtaccctggtgtgtatactaacttatgcaagtataggtcctggatcgaagagacaatgagggataaatag

SEQ ID NO: 192143 - DNA, 804 bp, synthetic construct
  misc_feature 1..804: note = Description of Artificial Sequence: Synthetic coding sequence
  source 1..804: mol_type = other DNA
atgagcctgcgggtgctgggcagcggcacctggcccagcgcccccaaaatgttcctgctacttactgcgctgcaggtcctggcaattgcaatgacgcagtctcaggaagacgagaataaaattatcgggggccatacatgtacccggtccagtcagccatggcaggctgcactgctagcaggcccgcgtagacggtttctgtgcggcggcgctttactgtcagggcagtgggtgatcacagcagcccactgtggccggcctattttgcaggtagcgctgggcaagcacaacctcagacgatgggaagcgactcaacaagtgctacgcgtagtgcgtcaggtgactcaccccaactacaactcccggacgcacgacaacgacctgatgctgctgcagctgcaacagcccgctaggattggcagagccgtacggcctattgaggtgacacaggcatgcgccagcccgggcacctcctgtcgagtttctggatggggaaccatttcatcacccattgcaagatatcctgcgtctctgcagtgtgtgaatatcaacatcagcccagatgaggtgtgtcagaaagcctatccgagaaccattacgccaggcatggtgtgcgccggcgttccacagggaggaaaagatagctgtcagggcgactctggaggaccattggtctgtcgggggcagctgcaaggactcgtctcttggggcatggagaggtgtgccctgccaggttatccaggggtctataccaacctctgcaaatatcggtcctggatcgaggaaactatgcgagataagtag

SEQ ID NO: 192144 - DNA, 804 bp, synthetic construct
  misc_feature 1..804: note = Description of Artificial Sequence: Synthetic coding sequence
  source 1..804: mol_type = other DNA
atgagcctgcgggtgctgggcagcggcacctggcccagcgcccccaagatgtttcttctcctgaccgctctgcaggttcttgcaatagccatgacccagtctcaggaggacgaaaacaaaattattggcggtcacacgtgcactcggtcatctcagccatggcaggccgccttgctcgccggcccaaggcgacgatttctgtgcggcggtgccctgctatccgggcaatgggtcattaccgcggctcactgcggccggcctattctgcaagttgctcttggtaagcataatctgaggaggtgggaagctactcagcaggtgctacgtgtcgtgcgccaggtgacacaccccaactacaacagtcggacccacgataatgacctgatgctgctgcaacttcaacagcctgcccgtataggccgtgcagttcgccctatcgaggtaacacaggcgtgcgccagtcctggaactagctgccgcgtgtctggctggggaacaattagtagtccaatcgcgaggtaccccgccagcctccaatgcgtgaacatcaacatctcccccgacgaggtgtgtcagaaggcttaccccaggacgattacacctggtatggtgtgcgctggggtccctcagggcggcaaagacagctgtcagggagatagcggtggcccgctggtttgccgggggcaactgcaaggcttagtgtcctggggaatggagcgatgcgccctccccggatacccaggcgtgtacacgaacctgtgcaaataccgctcctggattgaggaaactatgcgagacaagtag

SEQ ID NO: 192145 - DNA, 486 bp, synthetic construct
  misc_feature 1..486: note = Description of Artificial Sequence: Synthetic coding sequence
  source 1..486: mol_type = other DNA
atgtggctgctgctgaccctgagcttcctgctggccagcaccgccgcacaagatggcgacaagctgctggaaggagatgagtgcgcgccccactcccagccatggcaagtggcactttatgaaagaggcaggttcaactgtggcgcctccctgattagccctcactgggtgctttccgccgctcactgccagtctagatttatgcgcgttcggctgggagagcacaatctgcgtaaaagggatggcccggagcagctgcgcacgactagtagggttattccgcaccccaggtatgaagcccgcagtcacagaaacgacattatgctgctccgcctggtgcagccagccaggttgaacccgcaggtgagaccagctgttcttccaactaggtgtcctcacccaggggaagcttgtgtagtttcaggctggggtctcgtgtcacataatgagcccggaactgctggctcccctagaagtcagggatag

SEQ ID NO: 192146 - DNA, 771 bp, synthetic construct
  misc_feature 1..771: note = Description of Artificial Sequence: Synthetic coding sequence
  source 1..771: mol_type = other DNA
atgtggctgctgctgaccctgagcttcctgctggccagcaccgccgcgcaggatggtgacaagttactggaaggcgacgaatgcgccccccacagccagccttggcaagtagctctttacgagcgcggccgcttcaactgtggcgcatccctgatctcccctcactgggtgctgtccgcggcgcattgccagtctcgctttatgcgggtgcgtctgggcgagcacaacctacgcaagcgggatggccccgaacagctcaggaccacttcacgcgttataccacatccacgttatgaagcgagaagccaccgtaatgacattatgcttctgaggctggtgcaaccggcaaggctcaatccacaggtacgccccgctgtgctcccaactcgttgcccccaccccggggaggcatgtgtggtttccgggtgggggctggttagccataacgaaccaggcaccgctggctctccgagatctcaggtcagcttacctgacactttacactgcgcaaatattagtatcatctctgacacgtcctgcgacaaaagttaccctggcagactaactaacacgatggtgtgcgctggtgctgaaggaagaggagcagaatcctgcgaaggggatagcgggggcccattggtatgtgggggtatcttgcagggcatagtcagttggggggacgtcccctgtgacaacactaccaaacccggagtatatacgaaggtgtgccattatttggaatggattagggagacgatgaagaggaactag

SEQ ID NO: 192147 - DNA, 516 bp, synthetic construct
  misc_feature 1..516: note = Description of Artificial Sequence: Synthetic coding sequence
  source 1..516: mol_type = other DNA
atgtggctgctgctgaccctgagcttcctgctggccagcaccgccgcccaagatggcgacaagctgctggagggagacgaatgtgccccacatagccaaccatggcaggtagccctctacgagcgcggacggtttaactgtggggccagtcttattagtccacactgggttttgtccgccgcgcactgtcagtccaggttcatgcgcgttcggctcggcgaacacaacctgcgaaagcgcgatggacccgaacaattgcgaactacaagccgagtcatccctcacccacgctacgaggctaggtctcatcgcaatgacattatgctactaaggttagtgcagccagcccgactaaatccgcagggggactccggcggacctctggtgtgcggtgggattttacagggcatagtatcctggggagacgtgccctgcgataatactacgaagccaggtgtttataccaaggtctgtcattatctggaatggatacgggaaaccatgaagaggaattag

SEQ ID NO: 192148 - DNA, 489 bp, synthetic construct
  misc_feature 1..489: note = Description of Artificial Sequence: Synthetic coding sequence
  source 1..489: mol_type = other DNA
atgtggctgctgctgaccctgagcttcctgctggccagcaccgccgcccaggacggtgacaagctcctcgagggcgacgagtgcgcccctcatagtcagccttggcaggtggctctgtatgagcgaggtcgattcaactgtggggccagccttatcagtccgcactgggtcctgagtgccgcccattgtcagtcccgattcatgagggttcggctgggcgagcacaacctgcgaaaacgcgacggccccgagcagctgcgtacaactagcagggtaattccacaccctagatatgaagctagatctcaccgcaacgatataatgttgctgcggctggtacagcctgctcgcctgaaccctcaggtacgacccgctgttctccccaccaggtgcccccaccccggcgaggcttgcgttgtaagtggatggggcctggtcagccacaatgaacctggcactgccgggtcaccccgatcccaaggcgcctag

SEQ ID NO: 192149 - DNA, 771 bp, synthetic construct
  misc_feature 1..771: note = Description of Artificial Sequence: Synthetic coding sequence
  source 1..771: mol_type = other DNA
atgtggctgctgctgaccctgagcttcctgctggccagcaccgccgcccaggatggggataaattgctcgagggcgatgagtgtgcaccccattcccagccttggcaggtcgcactgtatgagcgtggacgctttaactgtggagcttccttaatctcgccccattgggtgctgtctgccgcacactgccagagcaggttcatgcgagtgcgcttaggagagcataatctgaggaagcgggatggccccgaacagctgagaaccacgtctcgggttatcccccatccacggtacgaggcacgatcccaccgtaacgacatcatgctgctgcggctcgtacagccggctaggctgaacccccaggtacgccccgcggtattaccaactaggtgtcctcaccccggtgaggcctgcgtagtgtctggatggggtctggtgtcccacaacgagccagggaccgctggctccccaaggtctcaggtgagtctgccggacactctgcactgtgccaatatctccatcatctcagacactagttgtgataagagttatcccggacgactgaccaacaccatggtttgtgcaggcgcagaaggcagaggcgcagagagctgcgagggcgatagcggtgggccgctggtatgtggaggcatcctgcaaggaatcgtgagttggggagacgtgccatgcgacaatacaactaaacctggcgtttatactaaagtgtgccactacctggagtggatcagagaaactatgaagagaaattag

SEQ ID NO: 192150 - DNA, 786 bp, synthetic construct
  misc_feature 1..786: note = Description of Artificial Sequence: Synthetic coding sequence
  source 1..786: mol_type = other DNA
atgtgggacctggtgctgagcatcgccctgagcgtgggctgcaccggcgccgtacctcttatccagagccgcatcgtaggcggctgggagtgcgaaaagcactctcagccttggcaggttgccgtttatagccacggctgggcacactgtgggggtgtgttggtacacccccaatgggtcctgacggccgctcattgcctaaagaaaaacagtcaggtctggctcgggcgccacaatttgttcgaacccgaggataccggacaacgggtgccagtgtcccactcattccctcatcccctctacaacatgagtctgttaaagcaccaatccctcagacccgacgaagacagctcccacgatctaatgctcctgcgcctgtccgaaccagctaagataactgacgtcgttaaagtactgggcctccccacgcaggagccagcactgggaaccacctgctacgctagtggttggggtagtatcgagcccgaggaatttttgcgaccaagatcgctgcagtgcgtctcactgcatttactaagtaatgacatgtgcgctcgagcttacagcgaaaaagtgacggagttcatgttgtgtgccgggctgtggaccggcggcaaggacacttgcgggggggattcaggtgggcccctggtgtgtaacggcgtactacagggaattacctcttggggcccggagccttgcgccttaccagagaaacctgccgtgtataccaaggtggtccactataggaagtggatcaaagatacaattgcagccaacccttag

SEQ ID NO: 192151 - DNA, 672 bp, synthetic construct
  misc_feature 1..672: note = Description of Artificial Sequence: Synthetic coding sequence
  source 1..672: mol_type = other DNA
atgtgggacctggtgctgagcatcgccctgagcgtgggctgcaccggggccgtcccacttatacaaagccgcattgtcggcggatgggagtgtgaaaagcatagccaaccttggcaggtcgctgtgtattcccacggctgggcgcattgcggtggggttctggtgcacccccagtgggtgttgacggccgctcattgcctgaaaaagaactctcaagtgtggctgggcagacacaacctctttgaacctgaggatacggggcagcgtgtgccagtctcacacagcttcccgcatcccctctacaatatgagtttgctgaagcaccaaagccttcgaccagacgaagatagctctcacgacctcatgctgctccgtctgagtgagcctgctaaaattaccgatgttgtaaaggtactgggactcccgacccaggagcccgccctgggaaccacctgctacgcctcggggtggggaagcattgaacccgaagaattcctgcgcccccgttccctccagtgcgtgtctctgcatctgctgtccaacgacatgtgcgcaagggcttatagcgaaaaggtgactgaatttatgctgtgtgccggtctgtggactgggggtaaagacacctgtggcgtttcacatccatactcccagcatctggagggcaagggatag

SEQ ID NO: 192152 - DNA, 480 bp, synthetic construct
  misc_feature 1..480: note = Description of Artificial Sequence: Synthetic coding sequence
  source 1..480: mol_type = other DNA
atgagcctgctgaagcaccagagcctgcggcccgacgaggacagctctcatgacttgatgttgctgcgcctgtctgaacccgctaagatcactgatgtcgtgaaggtgttgggcctgcctacacaggagcctgcccttggaaccacttgctatgcgtctgggtggggatctattgagccagaggaatttctaagaccaagaagcctccagtgcgtttcgctgcatctgctgtctaacgatatgtgcgcgagggcctattccgagaaggttaccgagtttatgctctgtgcagggttgtggaccggaggaaaggacacttgtggcggcgactccggaggccctctggtgtgcaatggtgttttgcaaggaataacttcatgggggcctgaaccttgcgctttgcccgagaaaccagctgtgtacaccaaagtagtgcactaccggaagtggataaaggatactattgccgctaacccatag

SEQ ID NO: 192153 - DNA, 786 bp, synthetic construct
  misc_feature 1..786: note = Description of Artificial Sequence: Synthetic coding sequence
  source 1..786: mol_type = other DNA
atgtgggtgcccgtggtgttcctgaccctgagcgtgacctggatcggagccgctcccctgattctttccagaatcgtcgggggttgggagtgtgagaagcattcccagccctggcaggtcctcgttgctagcagggggcgcgccgtctgtgggggagtgctggtgcatccgcagtgggtactgacagccgcacactgcatccggaacaaaagtgtaatcttgttgggccgacacagtttgttccacccagaagacaccggacaagtcttccaggttagccatagttttccacacccactttacgatatgagtttgctaaagaatagattcctgcgtccaggcgatgatagctctcatgatcttatgctcctcaggctgtccgagcctgctgagcttactgacgccgtcaaagttatggacctgcctacacaggagccggctctgggaacgacatgctacgcctcgggatggggctcgattgagccagaggaatttctaacccccaaaaaattacagtgcgttgacctgcacgtaatttccaatgacgtgtgcgcacaggtccatccacagaaagttactaagttcatgttgtgcgcaggtcgatggaccggtggcaaatctacttgtagcggggattccggggggcccctggtctgtaacggcgtcctgcagggaatcacgagctggggttccgagccctgtgcccttccagaacgcccttctctgtacactaaagtagtgcattacaggaagtggatcaaggataccattgtcgcaaatccatag

SEQ ID NO: 192154 - DNA, 663 bp, synthetic construct
  misc_feature 1..663: note = Description of Artificial Sequence: Synthetic coding sequence
  source 1..663: mol_type = other DNA
atgtgggtgcccgtggtgttcctgaccctgagcgtgacctggatcggagcagctccactgatcctgagccgtatcgtgggtggctgggagtgtgaaaaacattctcagccatggcaggtactcgtagcttctagaggccgggctgtatgcgggggagtgctcgtgcacccacagtgggtgctgacagccgctcactgcataaggaacaagagcgtgattttattggggcgccattccctttttcatccagaggacaccggacaagtgtttcaggtaagccactccttccctcatcctctttacgacatgtcactccttaagaaccggttccttagaccaggcgacgattccagtatagagcctgaggagtttctgactcctaagaaactccagtgtgtagatttacatgtgatctccaacgatgtgtgtgcccaggtgcatccccaaaaagttacaaaatttatgctatgcgcgggaagatggacaggcgggaaaagcacctgtagtggagactccggtggccccctggtgtgcaacggagttctgcagggcattacctcctggggttcagaaccatgcgcgctgcccgaacgcccctccctctacactaaagttgtgcattacaggaagtggataaaggatacaatcgtggcaaacccttag

SEQ ID NO: 192155 - DNA, 717 bp, synthetic construct
  misc_feature 1..717: note = Description of Artificial Sequence: Synthetic coding sequence
  source 1..717: mol_type = other DNA
atgtgggtgcccgtggtgttcctgaccctgagcgtgacctggatcggcgcagccccgcttattctctccagaatagtgggtgggtgggaatgcgagaagcactctcagccctggcaggtgctggtggcaagcagaggcagggccgtgtgtggaggagttttggtgcatccacaatgggttctgacggctgcccattgcatcagaaacaaaagcgttatcctgctgggcaggcatagcttgtttcacccagaggacactggccaggtttttcaggtgagtcatagttttccgcacccactgtacgacatgagcctcctgaaaaaccgtttcctgcgacctggcgatgactcatcccacgaccttatgttactccggctgtcggagcccgctgagctcaccgatgctgtaaaggtcatggatctgcctactcaggaacccgcactcgggacaacctgttacgccagcgggtggggttccatcgagccggaagagttcttgacccctaaaaaactgcagtgtgtagacctgcacgtgattagcaacgacgtgtgcgctcaggtgcacccacagaaagtgacaaagttcatgctgtgcgcgggtcgctggaccggcgggaagtcaacatgtagctgggtgatcctgattacggaactcactatgcctgcactccccatggtccttcacgggagcttagtgccttggagagggggtgtttag

SEQ ID NO: 192156 - DNA, 657 bp, synthetic construct
  misc_feature 1..657: note = Description of Artificial Sequence: Synthetic coding sequence
  source 1..657: mol_type = other DNA
atgtgggtgcccgtggtgttcctgaccctgagcgtgacctggatcggggcggctccgctcattctgagtcgtattgtgggcgggtgggagtgcgagaaacattctcagccttggcaagtgctggtggcttccagaggcagggctgtgtgtgggggagtcctcgtccaccctcaatgggttctgacagctgcgcattgtattaggaaaccgggagatgacagctcccacgatttgatgctgctgaggctcagcgagcctgccgaattaaccgacgcggtgaaggttatggacctgcccacacaggaacccgctttaggaacaacctgctacgccagtgggtggggctccatcgagcctgaagagtttctgacacccaagaaactccaatgcgttgacctccatgtgatcagtaatgacgtgtgcgcacaggtgcacccccagaaagtgaccaagtttatgctgtgcgccggacgctggacaggcggcaaaagcacctgtagtggcgactctggtgggccattggtctgtaacggggtgctgcaagggatcacgtcttggggctccgaaccatgtgcacttccagaaaggcctagtttatacacaaaagtagtccactatagaaagtggatcaaagatacaatcgtggccaatccgtag

SEQ ID NO: 192157 - DNA, 210 bp, synthetic construct
  misc_feature 1..210: note = Description of Artificial Sequence: Synthetic coding sequence
  source 1..210: mol_type = other DNA
atgtgggtgcccgtggtgttcctgaccctgagcgtgacctggatcggggctgcacccttgatcctctccagaatagtcgggggctgggaatgcgagaaacactctcagccctggcaggtcttggtggcgtccagggggagggccgtgtgtggtggcgtactagtgcatccacagtgggtgttaaccgctgcccattgtattcggaaatag

SEQ ID NO: 192158 - DNA, 765 bp, synthetic construct
  misc_feature 1..765: note = Description of Artificial Sequence: Synthetic coding sequence
  source 1..765: mol_type = other DNA
atggccaccgccggcaacccctggggctggttcctgggctacctgattctgggcgtagccgggagtcttgtctcgggctcatgcagtcagataattaacggggaggattgtagcccccatagccaaccttggcaagcggccctagttatggaaaacgagcttttttgcagtggagtgctggttcacccccagtgggtgctgtctgcagcccattgtttccagaacagttacactatcgggctagggttgcactcactagaggcagaccaggaaccagggtcacagatggttgaggcaagtctgtcagtgagacatcctgagtataacagacccctcttggccaatgacctgatgctgatcaaactcgacgaatctgtgtccgagtccgacaccattagatctatcagcattgcttcacagtgtcccaccgcgggcaatagttgcctggtctcaggttggggactcctggcaaatggacgcatgccaacagtgcttcagtgcgttaacgtgagtgtggtgagtgaagaagtctgctctaaactgtatgatcccctttaccatccttcaatgttttgcgctggtggaggccacgaccagaaggactcgtgcaacggagatagcggaggacccctgatttgcaatggttaccttcagggcctggtctcttttggcaaggcaccatgtggccaggtcggggtgcccggtgtgtataccaatctttgcaagttcactgagtggatagagaaaaccgtgcaggcctcttag

SEQ ID NO: 192159 - DNA, 333 bp, synthetic construct
  misc_feature 1..333: note = Description of Artificial Sequence: Synthetic coding sequence
  source 1..333: mol_type = other DNA
atggagaacgagctgttctgcagcggcgtgctggtgcacccccagtgggtcttaagcgccgcccattgtttccagaactcctatacaattgggctgggcctgcatagccttgaggccgatcaagaaccaggtagccaaatggtggaggcttcactgtctgtaagacaccccgagtacaatcgaccccttttggccaacgacctgatgctgatcaaactcgatgagtctgttagcgaatccgacaccatcagatctatcagcattgcttcgcagtgccccacagcggggaatagttgtctggtgtcgggctggggactcctggctaacggctag

SEQ ID NO: 192160 - DNA, 735 bp, synthetic construct
  misc_feature 1..735: note = Description of Artificial Sequence: Synthetic coding sequence
  source 1..735: mol_type = other DNA
atgaagaagctgatggtggtgctgagcctgatcgccgccgcctgggcagaggaacagaacaagcttgtccacggcggcccgtgtgataaaacaagtcatccgtaccaggcggcgctatacacttctggtcaccttctttgtggaggggtgctcatccacccactatgggtgctgactgccgcccattgcaagaaaccgaaccttcaggtgtttctgggtaaacataatttacggcagcgagagtcttcacaagaacagagctcagtcgtacgggcagttattcatcctgattacgatgcggcgtctcatgaccaagatatcatgttgttgcgtctcgccagaccagccaaactttctgaattgatacagcctctgcctttggagcgggactgttcagccaatactacttcttgccatattctgggctggggaaagaccgctgatggagattttcccgacaccattcaatgcgcctacatccacctggtgagcagggaggaatgcgaacacgcatatccaggccagattactcaaaacatgctgtgcgcgggtgatgagaagtacgggaaagatagttgtcagggagattctgggggtcctttggtctgtggcgaccacctgcggggtcttgtgagttggggaaacatcccttgtggaagtaaggagaaaccaggcgtctacaccaatgtctgtagatacacaaactggattcaaaagactattcaggccaaatag

SEQ ID NO: 192161 - DNA, 735 bp, synthetic construct
  misc_feature 1..735: note = Description of Artificial Sequence: Synthetic coding sequence
  source 1..735: mol_type = other DNA
atgaagaagctgatggtggtgctgagcctgatcgccgccgcctgggctgaggaacagaacaagctggttcacggcggcccgtgtgataaaacatcccacccttatcaggccgctctgtacacctctgggcacttgctctgcggcggggtgctgatccaccccctctgggtattgacagccgctcactgtaagaagcctaacctgcaggtgtttctcggtaagcacaatctcaggcaaagagaatcctctcaggagcaatcgtccgtagtgagagccgtgatccaccctgattatgatgccgcatcacatgatcaggatattatgctgctccggttagctaggcctgccaaactctcagaattgatccagcccctgccactggaaagagactgttccgctaacaccacctcctgccatattctcggttggggcaaaacggccgacggcgattttcccgatacaatacaatgcgcttacattcacttagtgagcagggaggaatgcgaacatgcatacccaggccaaataacccagaatatgctgtgtgcaggtgacgagaagtatggcaaggactcttgtcagggcgatagcggagggcctttggtgtgcggggatcatttgcgcggactggtgagctggggcaacatcccatgcgggtccaaggaaaaacctggggtgtacacgaatgtttgccggtatacaaactggatacagaagacaattcaagctaagtag

SEQ ID NO: 192162 - DNA, 363 bp, synthetic construct
  misc_feature 1..363: note = Description of Artificial Sequence: Synthetic coding sequence
  source 1..363: mol_type = other DNA
atgaagaagctgatggtggtgctgagcctgatcgccgccgcctgggccgaggagcaaaataaattagtgcatgggggcccgtgtgacaaaacctctcacccatatcaagctgccctatacaccagcgggcatctattatgtggcggtgtactgatacaccctctgtgggtcctgactgcggcacactgcaaaaaacctgtcatcttgggggtgaggtggtacgtggagacaacctccgaggccttatgtcacggcgtgacctctcccgtggaccaaaggagatcccaagagtccacaccaacttccgctgacacacggaccggcagcaaaaaaccctttagaccgagcgaccctgatatgtag

SEQ ID NO: 192163 - DNA, 414 bp, synthetic construct
  misc_feature 1..414: note = Description of Artificial Sequence: Synthetic coding sequence
  source 1..414: mol_type = other DNA
atgctgctgcggctggcccggcccgccaagctgagcgagctgatccaacctctgcctctagagagagattgttcagccaataccacatcgtgtcacatcttaggatgggggaaaactgcagatggtgattttccagacactattcagtgcgcctatatccacctggtttccagagaagagtgtgagcacgcttatccaggccaaattacacaaaatatgctctgcgcaggggatgagaaatatggtaaggactcctgtcagggggacagcggaggacctctcgtgtgtggggatcatctccgcggtctggtctcatggggcaatatcccttgcggctcgaaagagaagcccggtgtctacaccaacgtctgccgttatacaaactggattcagaagacaatccaggcgaaatag

SEQ ID NO: 192164 - DNA, 123 bp, synthetic construct
  misc_feature 1..123: note = Description of Artificial Sequence: Synthetic coding sequence
  source 1..123: mol_type = other DNA
atgaagaagctgatggtggtgctgagcctgatcgccgccggcatcttcaggagctcctggggaagcattacttttgggaagggccgggtgccaaggagtcgcgtccttttgtccggcctgtag

SEQ ID NO: 192165 - DNA, 414 bp, synthetic construct
  misc_feature 1..414: note = Description of Artificial Sequence: Synthetic coding sequence
  source 1..414: mol_type = other DNA
atgctgctgcggctggcccggcccgccaagctgagcgagctgatccagccactgcctttagagcgggattgttctgcaaatacaaccagctgccacattctggggtggggtaagaccgccgatggcgattttccggatacgatccagtgcgcatatatccacttagtgtcccgagaagagtgcgagcacgcctaccctggacagattacccagaatatgttgtgtgccggcgacgaaaagtatggtaaggattcatgccagggtgattctggtggcccactggtctgtggagatcaccttagaggtcttgtgtcctgggggaatattccgtgcggctcaaaggaaaaacccggagtctacaccaacgtgtgtagatataccaactggattcagaagacaattcaggccaaatag

SEQ ID NO: 192166 - DNA, 783 bp, synthetic construct
  misc_feature 1..783: note = Description of Artificial Sequence: Synthetic coding sequence
  source 1..783: mol_type = other DNA
atgggccggccccggccccgggccgccaagacctggatgttcctgttgttgttggggggcgcatgggctggacactctcgagcccaggaggacaaggtgctggggggacacgaatgccaaccccactcccagccttggcaggcagctctgttccaggggcagcaactcctctgtgggggtgtgttggtcggcggcaactgggtgctgaccgctgcccattgcaagaagcccaagtatacagttcgtctcggtgatcacagcctgcagaacaaagatggacctgaacaggagattccggtcgtccagtcaattccgcatccttgttacaatagttctgatgtcgaggaccacaaccatgatttgatgttgcttcagctgagggatcaggcatccctgggatctaaggtcaaaccgatttctctggcagaccactgtacccagcctggccagaagtgcacggtgtccggttggggcaccgtgaccagcccacgcgagaacttcccagacaccctgaattgcgctgaagtgaagatctttccgcagaagaaatgtgaagacgcgtaccccggccaaatcaccgacggaatggtttgcgccggaagtagtaagggcgctgacacgtgccagggagacagcggtggccccttagtgtgcgatggcgccttgcagggaatcacttcgtggggctccgacccctgcggtcgaagtgacaaaccgggtgtgtatacaaatatatgtaggtatctggattggattaaaaaaataattggaagtaaggggtag

SEQ ID NO: 192167 - DNA, 99 bp, synthetic construct
  misc_feature 1..99: note = Description of Artificial Sequence: Synthetic coding sequence
  source 1..99: mol_type = other DNA
atgggccggccccggccccgggccgccaagacctggatgttcctgctgctgcttggcggggcatgggctggccgcttctggcgcccccccggagtttag

SEQ ID NO: 192168 - DNA, 360 bp, synthetic construct
  misc_feature 1..360: note = Description of Artificial Sequence: Synthetic coding sequence
  source 1..360: mol_type = other DNA
atgggccggccccggccccgggccgccaagacctggatgttcctgttgttgctcggcggggcctgggccgagaatttccccgacactctcaattgtgcggaggttaaaatcttcccgcaaaaaaaatgcgaggatgcctatcctggccagattactgatggtatggtgtgcgccggaagctctaagggagcggacacctgccagggcgactctggggggccactggtgtgcgacggtgcccttcaaggaatcaccagttggggctctgacccatgcgggcgctccgataagcccggcgtgtataccaatatttgtcgttacctcgattggattaaaaaaatcatcggctctaagggttag

SEQ ID NO: 192169 - DNA, 918 bp, synthetic construct
  misc_feature 1..918: note = Description of Artificial Sequence: Synthetic coding sequence
  source 1..918: mol_type = other DNA
atgggccggccccggccccgggccgccaagacctggatgttcctgctgctccttggaggagcgtgggcagcctgcggttcgctggacctacttaccaaactctacgccgagaatctcccctgcgtccacttaaacccacagtggccgagccagccctctcactgccccagaggctggcgatctaacccactgccccccgcagcagggcacagtcgggcacaggaagataaggtgctgggggggcacgaatgtcagccacacagccagccatggcaagccgcactattccaaggccagcaactattatgcgggggggttctggtaggtgggaattgggttctgaccgccgctcattgtaaaaaaccaaaatacactgtgcggttaggagatcactccctccagaataaagatggcccagagcaagagatacccgtggttcaaagcattcctcacccatgttacaatagctctgatgtggaagaccacaaccatgacctcatgctcctccagctcagagatcaggcatcgcttggatctaaggtcaaaccaatctctctggccgatcactgtactcagccaggtcagaaatgtactgtgtcagggtggggaactgtaacaagcccacgtgagaatttccccgacactctcaactgcgcagaagtgaagatcttccctcagaagaagtgtgaggatgcttaccccgggcaaatcacagatggtatggtctgcgctggcagttctaaaggagccgacacctgccaaggtgactcagggggacccttagtgtgtgacggagctctccagggaatcacgagttggggcagcgacccatgtggcaggagcgacaaaccaggtgtgtatacaaacatttgtagatacctagactggatcaaaaagattatcggaagcaagggctag

SEQ ID NO: 192170 - DNA, 783 bp, synthetic construct
  misc_feature 1..783: note = Description of Artificial Sequence: Synthetic coding sequence
  source 1..783: mol_type = other DNA
atgggccggccccggccccgggccgccaagacctggatgttcctgttattgcttggcggggcgtgggccggccatagtagagcacaagaagacaaggttttgggcgggcacgaatgtcaaccacatagccagccctggcaagcggccctcttccagggccagcagttattatgtggcggcgtgctagttggaggcaattgggttctcactgccgcccattgtaagaagccgaagtacactgttaggctgggggaccatagcttgcagaacaaagacggccccgagcaggagattcctgtcgtgcagtctatccctcacccttgctataactcctctgacgtagaggaccataaccatgatctcatgctgttacagctgagggatcaggcaagtttgggttccaaggtgaagccaattagcctcgccgaccactgcacccagcctggacagaaatgcaccgtgtctggatggggcacagtgactagtcctagagaaaatttccccgacacgctgaactgcgcagaggtgaagatttttccacagaaaaagtgtgaagatgcataccccggtcagattaccgacggcatggtgtgcgctggcagttctaaaggtgccgacacctgtcaaggagacagtggggggccattagtttgcgatggagcactgcaggggattactagttggggaagcgacccctgcggtcgatctgataaacccggggtgtataccaatatatgccgatacttggactggatcaagaagattatcggatctaagggctag

SEQ ID NO: 192171 - DNA, 753 bp, synthetic construct
  misc_feature 1..753: note = Description of Artificial Sequence: Synthetic coding sequence
  source 1..753: mol_type = other DNA
atgaagctgggcctgctgtgcgccctgctgagcctgctggccggccacggctgggctgacacgagagccatcggcgccgaggaatgccgcccgaactctcaaccatggcaggctggcctctttcacctgacccgcttattctgcggagccaccttgatatctgaccgctggttattgaccgccgctcactgccggaagccgtatttgtgggtcagacttggcgagcaccacttgtggaaatgggaaggcccggagcaactgttccgtgtgacagacttctttccccacccaggtttcaacaaagaccttagcgctaatgaccacaacgatgatattatgttaatacgtctccctcggcaggcaaggctgtcacccgccgttcagccactaaacctaagtcaaacctgtgttagcccaggaatgcagtgcctgatctccgggtggggggccgttagctcccctaaggccttgttcccagttacgctgcaatgtgctaatatctccatcttagagaacaaattgtgtcattgggcctacccgggccatatatccgattctatgctctgtgcagggctctgggagggtggcaggggatcctgccagggtgattcgggcggcccattggtgtgcaatggaacgctagccggcgtggtgagcggcggagctgaaccctgttctcggcctcggcgccccgcggtttacacttccgtttgtcactacctggactggatacaagaaattatggaaaattag

SEQ ID NO: 192172 - DNA, 753 bp, synthetic construct
  misc_feature 1..753: note = Description of Artificial Sequence: Synthetic coding sequence
  source 1..753: mol_type = other DNA
atgaagctgggcctgctgtgcgccctgctgagcctgctggccggccacggttgggctgacaccagggcaatcggcgcggaggagtgccgccccaacagccagccctggcaggctggtctgtttcatcttactcgattgttttgcggcgccaccctgatctctgaccggtggctgcttaccgctgctcattgccggaagccgtatctttgggtacggttgggggagcatcacctatggaaatgggaaggtcccgagcagcttttccgggtgaccgacttctttcctcacccggggtttaacaaagaccttagcgctaacgaccacaacgatgacatcatgttgattcgccttccccgccaggccagattgtccccagctgtgcaacccttgaacctgtcccagacctgtgttagccctggtatgcagtgtctcattagcggctggggcgcagtatcatctccaaaagctctgttccccgttactctgcagtgcgcgaacatctcaatcctcgagaacaagctgtgtcactgggcatatcccgggcacatctcagactcaatgttgtgcgcagggctgtgggagggcggcagaggttcgtgccagggcgattctggcggtcccctagtgtgcaacggtactcttgccggtgtggtgagcggtggggctgagccttgtagccgcccccgccgcccagcagtttatacaagtgtctgtcattacctggactggatccaggagataatggaaaattag

SEQ ID NO: 192173 - DNA, 186 bp, synthetic construct
  misc_feature 1..186: note = Description of Artificial Sequence: Synthetic coding sequence
  source 1..186: mol_type = other DNA
atgaagctgggcctgctgtgcgccctgctgagcctgctggccggcatttgcggatccgcacttgaaagtaccaccagtggtaacgggagagtgcggtcaagctgttctggcttgcgcacttccagccccactttggcaagtactagaacatcagctccaatgacaaccatgatgacgagctgttag

SEQ ID NO: 192174 - DNA, 2043 bp, synthetic construct
  misc_feature 1..2043: note = Description of Artificial Sequence: Synthetic coding sequence
  source 1..2043: mol_type = other DNA
atggtgcccggcgtgcccggcgccgtgctgaccctgtgcctgtggcttgccgcaagcagtggctgcctggcggcaggacctggcgccgccgctgcgcgcagactggacgagagcctgtctgctggttcagttcaaagagctcggtgtgccagccgttgtttatctttacagattacacgtatatctgcattcttccagcacttccaaaataatggtagcctggtgtggtgtcaaaatcacaaacagtgctccaagtgcctggagccatgcaaggagtccggcgatcttcgtaaacatcaatgccagtccttttgtgaacctctgtttcccaagaaaagttacgagtgtcttacctcatgcgaattccttaagtatattttactggtgaaacaaggcgactgtcccgcacccgagaaagcatctggctttgccgctgcttgtgtcgaatcatgtgaggtcgataatgaatgttcgggcgtgaagaagtgttgtagtaacggctgtggacacacgtgtcaggtgcccaagactctatacaagggcgtgcccttgaaaccccggaaggaactccggtttaccgaactacagtccggtcaattggaggtcaagtggagctcgaagtttaacatttctatcgaacctgtgatttacgtagtccagagacgctggaactacggaattcaccccagcgaggatgatgcaactcactggcagacggttgcgcaaacgactgatgagcgcgttcagctgactgacatccgcccctctcggtggtaccagtttagggtggccgctgtgaatgtccacgggacccggggcttcactgccccatctaagcattttcgttcaagcaaagatcccagcgccccacctgcacccgcaaatctgcggctggcaaattccacggtgaattcagatggttctgtaactgtcaccatagtctgggatctcccggaggagccagacatccctgtgcaccattataaggtgttttggagctggatggtctcttcaaaatcactagtgcctacgaaaaaaaagcggcggaagactactgatggatttcagaactccgtgattctcgaaaaacttcagcccgactgcgactatgtcgtcgaacttcaggctattacgtattggggccagaccagactcaagtccgctaaggtctcactgcactttacgtcgacccacgccaccaataataaagagcagcttgttaagacgagaaagggagggatccagactcaactgccttttcagagaagaaggcctaccagacccctcgaggtaggagctcccttttaccaggatggccaacttcaagtgaaggtctactggaaaaagactgaagatccaaccgtgaatcgatatcatgttagatggtttcccgaagcctgcgcccacaaccgaactacaggtagtgaggcttcctccgggatgacccacgaaaattacattattttacaggacttatccttttcatgtaaatataaagttaccgtgcagcctatccggcctaagagccattccaaggcggaagctgtgttctttacaacccctccatgcagtgcccttaagggcaagtcccacaagcccgtggggtgtctgggagaagctggtcatgtcctttctaaagtgctagctaagcccgaaaacctctccgcaagtttcatcgtgcaagatgtgaacatcacaggtcacttctcctggaagatggcgaaggccaacttgtaccagccaatgacagggtttcaagtcacatgggctgaagtaaccacagaatctcgtcagaatagcctgccaaactccattataagccagagccaaatcctgccgagtgatcattacgtcctaaccgtgccaaatctgagaccgtcgaccctatatcggctggaggtgcaggtcttgacaccaggcggggaggggcctgccaccatcaagacattcaggaccccagagctgccacctagttccgcccaccggagccacctgaaacacaggcatccccatcactataagcccagtcctgagcgctattag

SEQ ID NO: 192175 - DNA, 2631 bp, synthetic construct
  misc_feature 1..2631: note = Description of Artificial Sequence: Synthetic coding sequence
  source 1..2631: mol_type = other DNA
atggagctgatcaccatcctggagaagaccgtgagccccgaccggcttgaactcgaggcagcccagaaattcctggaacgcgccgctgtggagaacttacctacctttctggtcgagctcagtagagtacttgccaatcctggcaattcacaagtggctcgtgtagctgcaggcctgcagatcaagaactctctgacgtccaaagatcccgatatcaaggcccagtaccagcagagatggctcgccattgacgccaacgcccgaagggaagtcaagaattatgtgctgcagacactcggcactgagacttacagaccatccagcgcttcccagtgcgtagcagggatcgcatgtgctgagattccagtgaaccaatggccagagctaattcctcagctggtggccaacgtcactaatcctaatagcacagaacacatgaaggagtcaactctggaagctattgggtatatttgccaggatatcgatcctgaacagctccaggacaagtctaacgaaatcctgacagccatcatccaggggatgcgtaaagaagaacccagcaataatgtcaaactggcagcaacgaacgccctgcttaactccctggaattcacgaaggccaatttcgacaaagagtcagagcggcacttcattatgcaggtggtgtgcgaggccacacagtgccctgacacccgcgtaagggtggccgctctccagaacctggtcaagataatgtccctgtattaccagtatatggagacatatatgggccctgccttgtttgccataacaatcgaggccatgaagagcgacatcgacgaagtcgccctgcagggaattgagttctggtcaaatgtatgtgatgaggaaatggacttggccatcgaggcttctgaagcagccgaacaaggccgtccaccagagcacacatccaagttttatgctaagggggccctgcagtatctggtgcctatcctgactcaaactctgacgaaacaagatgaaaacgatgatgatgacgattggaacccttgtaaagccgccggggtgtgcttgatgcttttggccacatgttgtgaggatgatattgtaccgcacgttctgccttttattaaggagcatattaaaaaccctgattggcgttatcgtgacgccgccgtgatggccttcggctgtatactggaaggtccagagcctagtcaactcaaacctctcgttatacaggcgatgccaacccttatcgaactgatgaaagatccgtccgtggtggtccgagacacagcagcatggaccgtgggccgcatctgcgagcttctgcctgaggccgctatcaacgatgtctatctcgccccactgctgcagtgcctgatcgagggactaagtgccgaaccccgagtcgcaagtaatgtgtgttgggctttttcatctctggctgaagctgcctatgaggccgccgatgtagccgacgaccaagaggagcccgctacatactgtttaagctcctcctttgaactgattgtgcaaaagctcctggagaccaccgaccgccctgacggacaccaaaacaatttaaggtcctctgcctatgagtccctcatggaaattgtgaaaaattccgcaaaggactgctatccggctgtgcagaaaactaccctggtcatcatggagaggcttcaacaagttctgcagatggagagtcacatccagtctacttccgacaggattcagttcaatgacctacagtcgctactgtgtgcaaccctgcaaaatgtgcttcgaaaagtacagcaccaggacgcattacaaatcagcgatgtagttatggccagcttgctgagaatgttccagtcaactgcaggctctgggggagtccaagaagacgccctaatggcagtgagtaccctagtggaggtgctaggtggggaattccttaaatacatggaagccttcaaaccgtttcttggcatcggcctgaaaaattatgctgaataccaggtgtgccttgctgcagtcggtctggtcggagacttgtgtagggccttgcagtccaatataatccccttctgcgatgaagtcatgcagctgctgctagaaaatctgggcaatgaaaacgtgcatcgctccgtcaaaccacaaattctttccgtattcggtgatattgccctcgcaattgggggggaattcaagaagtatctggaggtagttctcaacacactgcagcaagcctcacaggcccaggttgacaagtctgattatgacatggtggactatctgaacgagctccgtgaatcatgtcttgaggcatatactgggatcgtgcagggcctgaaaggcgatcaggagaacgttcacccagacgtgatgctggtgcaacctagagtagaattcatcctaagtttcatcgaccacatcgcaggagacgaggaccacaccgacggggtcgtggcatgtgccgccggattgatcggcgacctgtgcactgcctttggtaaagacgtgttgaagttggtcgaggctcggccaatgatccacgagctcttgacagaaggtaggagaagtaaaaccaacaaggccaaaaccctagctacctgggccaccaaggagctgcgcaaactgaagaatcaggcatag

SEQ ID NO: 192176 - DNA, 2196 bp, synthetic construct
  misc_feature 1..2196: note = Description of Artificial Sequence: Synthetic coding sequence
  source 1..2196: mol_type = other DNA
atgaaggagagcaccctggaggccatcggctacatctgccaggacatagaccctgagcagcttcaagacaagtctaatgagattcttaccgcaatcattcagggcatgaggaaggaggaacctagtaataacgtcaaactggcagccactaacgctctgctgaatagcctggagttcaccaaggcgaatttcgataaggagtctgagaggcacttcataatgcaggtggtgtgcgaggcgacccaatgcccagatacccgcgtgagagttgccgcactgcagaacctggtgaaaattatgtctttgtactatcaatacatggaaacttatatgggtcctgccctgtttgcgatcaccatcgaggcaatgaaatcagatattgatgaggtggctcttcagggaatcgagttttggtctaacgtctgcgacgaggaaatggatctggccattgaagcgagcgaggcagcggagcaggggagacctcctgaacatacgagcaagttctacgccaaaggggcgctgcagtacctcgtgcccatcctcactcaaactctcaccaaacaagacgaaaatgatgatgacgacgactggaatccttgcaaggctgctggggtgtgtctgatgctgctggccacatgttgcgaggacgacatcgtgccacatgtgctccccttcataaaggagcatattaaaaacccagactggcggtacagggacgccgcagtgatggcttttggttgtatcctggaaggtcccgagccaagccagctgaagccactcgtcattcaagcgatgccgaccctgatcgagttgatgaaagatccctcggtagtagtgagggacacagcagcttggacagtgggtcgcatctgcgaacttctgcccgaagctgcaattaatgacgtatatctggctccactgttgcagtgcttaattgagggcctgagcgccgaaccaagggtggcttcaaatgtctgttgggccttcagttccctggcagaagctgcgtacgaggccgccgacgttgctgatgatcaggaggagcccgccacatactgtctctcaagtagctttgaattgattgtgcagaaactgctggagaccacagaccgcccagatggccatcagaataatctcagatccagcgcttacgaaagcctgatggagatcgtgaaaaatagcgccaaagactgctatccagccgtgcagaagacaacgctggtgatcatggaacgcctccagcaggtcctacagatggagtctcacattcagagcacttccgatagaatccagttcaacgacctccagtccctgctatgcgctactttgcagaacgtgctgagaaaggtccagcaccaggatgcccttcaaatctctgacgttgtgatggcctcccttctgagaatgttccagagcaccgctggcagtggaggggtgcaggaggacgctcttatggcggtaagcaccctggttgaggtattgggaggggagttcctcaaatacatggaggccttcaagccctttctggggattggactcaaaaattatgcagagtaccaggtttgtcttgcagcagttgggctcgttggggacctatgtcgagccctgcagtccaatatcatcccgttttgcgacgaagtgatgcaattgctgctagagaatctcggaaacgagaatgtgcatcggagtgtgaaaccccagatcctgtcagtatttggagacatcgcgttggccataggaggcgagtttaaaaagtatctggaggttgtcctgaacacgttgcagcaagcttcacaggcccaggtggataagtccgattacgacatggttgactatctgaacgaactcagggagtcctgcctggaagcctacacgggtatcgtgcaggggctgaagggcgatcaggagaacgtgcacccagacgtgatgctggtgcagccgcgagtggaattcatcctgagttttattgaccacattgctggtgatgaggatcacacagatggagtcgtggcttgtgccgctggccttatcggcgacttgtgtaccgccttcggcaaggacgttttaaaacttgtggaggcccgcccgatgatccatgaacttctcaccgaaggccgcaggagtaaaacaaacaaggccaaaaccctcgccacctgggccaccaaagagctacggaagctgaagaaccaggcatag

SEQ ID NO: 192177 - DNA, 1983 bp, synthetic construct
  misc_feature 1..1983: note = Description of Artificial Sequence: Synthetic coding sequence
  source 1..1983: mol_type = other DNA
atgaaggagagcaccctggaggccatcggctacatctgccaggacatcgacccagaacagttacaggataaatcaaacgagattttgaccgcgatcattcaagggatgcggaaagaagagccttctaacaatgtgaagctggctgctaccaatgccctcctgaattccctcgagttcaccaaggctaattttgataaggaatccgaaaggcatttcattatgcaagtggtgtgcgaggcaacccaatgccctgacacaagagtgcgggtggccgccttacagaacctagtgaaaatcatgagcctatactaccagtacatggagacatacatggggcccgcactgttcgccgatgagaacgatgatgatgatgactggaatccttgcaaggccgctggtgtgtgcctgatgttgctggcaacgtgttgcgaggatgatatcgtgccccatgtgttaccttttatcaaagaacacatcaaaaatcccgactggcgataccgggatgctgcagtaatggcattcggctgcatcctagaaggaccggaaccctcccaactgaagcctttagttattcaagccatgccaactttgattgagctcatgaaggaccctagcgtggtggtgagggatacagcggcatggacggtgggtaggatttgcgaattgcttcccgaggccgcaatcaacgacgtgtatctggccccactcttgcagtgcctcatcgagggtctgtcagctgaaccaagagtagcgtccaacgtgtgctgggcattcagcagtttagccgaggctgcatatgaagccgctgacgtggccgatgaccaagaggagccagctacctattgtctctcaagttcatttgagctgattgtgcagaagttgctggagaccaccgaccgccctgatggccatcagaacaatctgaggtctagtgcctacgagagcctcatggagatcgtcaagaatagcgccaaagactgctatcccgctgtgcaaaagacaactctggtgatcatggagcggctgcagcaagtcctacagatggaatcacatattcagagcaccagcgacaggatacagtttaatgacttgcaaagcttgctgtgtgcaacactgcagaacgtactgcgaaaggtgcagcaccaagacgctttgcagatcagcgatgttgtgatggctagtctgcttaggatgttccagagcacagctgggtcagggggtgtccaagaagacgcgttgatggcagtgagcactctcgttgaagtacttgggggggagtttctcaaatatatggaagcctttaaacccttcctgggcattggcctgaagaattacgcagaataccaggtctgcctggccgcggtgggtctagtcggggacctgtgccgagcactgcaatcaaacataatccctttctgtgatgaggtgatgcagttgctgctggaaaatctcggcaacgaaaacgtgcaccgctctgtgaagccacagattttatctgtgtttggcgacattgcgcttgcaatcggcggcgagtttaagaaatacttagaagtggtcctgaacactctgcagcaggcgtctcaggctcaggtggacaaaagcgactacgatatggtcgactatctgaacgagctccgggagtcctgccttgaagcttacactgggatcgtccagggtttaaagggtgatcaggagaacgttcaccccgatgtcatgcttgtgcagccccgggtggaattcatcctttcctttattgatcacatcgcaggggacgaggaccatactgacggggtcgtggcctgcgcagctggactcatcggcgacctttgcacggcctttggaaaggatgtgttgaaattggtggaagctcgcccaatgatacacgagcttttgacagaaggacggagaagtaagaccaataaagccaagacactcgccacttgggctaccaaagagctacgaaagctgaaaaaccaagcctag

SEQ ID NO: 192178 - DNA, 2196 bp, synthetic construct
  misc_feature 1..2196: note = Description of Artificial Sequence: Synthetic coding sequence
  source 1..2196: mol_type = other DNA
atgaaggagagcaccctggaggccatcggctacatctgccaggacatcgacccagaacaattgcaggataaatcaaacgagatcctcacagccataattcagggtatgaggaaagaggagccctcaaataatgttaagctcgctgcaactaatgccctgctgaattcccttgaattcacaaaagcaaattttgacaaggagagcgagcgtcattttatcatgcaagtggtttgcgaagccacccaatgtccagatactcgggtgcgcgtggcagccctgcagaatctggtgaagataatgagcctgtattaccaatacatggagacctacatgggtccggccctatttgcaataactattgaagccatgaagagcgacatcgatgaggtggctctgcagggcatcgagttctggtctaacgtatgcgatgaggaaatggatctcgccatagaagcttcagaggctgccgagcaaggccgacctcccgagcacacaagtaagttttatgccaaaggcgcactccaatacctggtacccatactcacgcagacgctgacaaagcaggacgagaatgatgacgacgacgattggaacccttgcaaggcagcgggcgtttgtttgatgctgctcgcgacttgttgcgaggatgatatcgtgccccacgtgttgccttttataaaggaacacattaagaaccctgattggcggtaccgtgacgctgccgtaatggctttcgggtgtatcttagagggaccagagcccagccagctcaagccactcgttatccaggcaatgccaactctaatcgaactgatgaaggacccatccgttgtggttagggatactgccgcctggacggtaggccgtatctgcgagctgcttcctgaggcagccataaacgatgtctatttggctccactactgcagtgccttatcgaaggcctgtccgcagaaccacgtgtagccagcaatgtgtgctgggccttctcttctcttgctgaggcagcttacgaagcggccgacgtcgccgacgaccaggaagaacccgctacatattgcctgtcaagctctttcgagttgattgttcagaaactgctcgagactacagatcgcccggacggtcatcaaaataatctgaggtcgagtgcatatgaaagcctaatggaaatcgtgaagaactcagccaaagattgctaccctgctgttcagaagacgaccctggtgattatggaaaggctgcagcaagttctgcagatggaatcacatatccagtccacatctgaccggatccagtttaacgatttgcaatcactcctctgtgccacgctgcagaatgtgctacggaaagtccaacatcaagatgcactgcagatctcagatgtggtgatggcgtcgctactgagaatgttccaaagtaccgccgggtccgggggcgtgcaggaggacgccttgatggccgtaagcacactggtggaagtgctagggggtgagttcctaaaatatatggaggcttttaagccattcttggggattggattgaagaattatgcggaataccaagtatgtctggccgcagtgggcctggtgggcgatctttgtagggctcttcagagcaatatcatcccattctgcgatgaagtaatgcaattgctcctcgagaacctgggcaatgaaaacgttcatagaagcgtcaaaccacagattctcagcgtttttggggacatcgccctggccatcgggggagaatttaaaaagtacctggaagtggtgctgaatacactccagcaagcttcacaggcacaggttgacaagtctgattatgatatggtcgattatctgaacgagctgcgagaaagttgtttggaggcctacaccggaatcgtgcaagggctcaaaggagatcaggaaaacgttcatcccgacgtgatgctggtgcaaccacgcgttgaatttattctgagttttatcgatcatattgctggcgacgaggatcacacggacggtgtcgtcgcctgtgctgctggtctcatcggagacttatgtaccgccttcgggaaggatgtgctcaagctggttgaagctcgaccgatgatccatgagttactgacagaggggagaagatctaagacgaataaagccaaaaccctggccacctgggccactaaggagttaaggaagctaaagaaccaagcatag

SEQ ID NO: 192179 - DNA, 1617 bp, synthetic construct
  misc_feature 1..1617: note = Description of Artificial Sequence: Synthetic coding sequence
  source 1..1617: mol_type = other DNA
atgaccacccccggcaaggagaacttccggctgaagagctacaagaacaaatcacttaacccagacgaaatgagaaggcggcgggaggaagaaggactccagctgcggaagcagaagcgagaagagcagttatttaagaggagaaatgtggctactgccgaggaagagaccgaggaggaggtaatgtctgatggaggatttcatgaggctcagatctctaatatggaaatggcacccggaggggtaatcacctctgacatgattgagatgatcttctcaaagagcccagagcagcagctgagcgctactcagaaattcaggaaactgctgtccaaagagcctaacccacctattgacgaggtcatatccacacctggtgtggtggcacggttcgtagagtttctgaaacgcaaggaaaactgcacactgcaattcgagtccgcctgggtgctgactaacattgccagtggcaattcactccaaactcgcatcgtaattcaggcaggcgcagtacccatctttattgaactcctgtcctctgaattcgaagacgtgcaggaacaggctgtgtgggctctgggtaatatcgctggagacagcaccatgtgtagggattatgtgctggattgtaatatcctgccacccctcctccagctgtttagcaagcagaacaggctaacgatgacgcgtaacgccgtctgggctttatcaaacctgtgtaggggtaagagcccgcccccggagtttgccaaggtttccccttgtctcaacgttctaagctggctcctgttcgtgtctgacacggacgtcctggccgatgcatgctgggccctgtcctacctgtccgacgggcccaacgataagattcaagctgtgattgacgccggtgtgtgccgcagactcgtggaattgctcatgcacaacgactataaggtggtgtctcctgctttgagggccgtgggaaacatcgtgacaggcgacgacatccagactcaggtgattctcaactgtagcgctctccagagccttcttcacctgctgtcctctccaaaagagtccataaaaaaagaagcttgttggactattagtaacataacagcagggaaccgtgcccagatacagaccgtgatagatgccaacatctttccagctttgatctccatacttcagacggccgaatttcgaaccaggaaagaagccgcctgggcgatcacgaacgctacttccggcggtagcgccgaacagataaaatacctcgtggagctggggtgcattaagcctctttgcgatctccttaccgtgatggacagcaagatcgtgcaagtggctctgaatggactcgagaacatcctgcggctaggcgaacaggaagccaagcgcaacggtacaggcatcaatccttattgcgcactgatagaggaagcttacggcctggataaaattgagtttctgcagtcacatgaaaaccaggaaatctatcagaaggcttttgatctcattgaacactactttggcaccgaggatgaagacagttctatagccccacaggtagatctcaatcaacaacagtacatattccagcaatgcgaggcccccatggagggcttccagttgtag

SEQ ID NO: 192180 - DNA, 987 bp, synthetic construct
  misc_feature 1..987: note = Description of Artificial Sequence: Synthetic coding sequence
  source 1..987: mol_type = other DNA
atgaccacccccggcaaggagaacttccggctgaagagctacaagaataagtctctgaaccccgacgagatgagaaggcgccgagaagaagaggggctgcagttaaggaaacagaaacgagaggagcagctgtttaagagaagaaacgtggcaaccgcggaagaggagactgaggaagaggtgatgagcgacggaggcttccacgaagcgcagattagcaatatggaaatggcgccagggggcgtgattacttctgacatgatagaaatgattttttctaaatcccccgagcagcagctgagtgcaactcagaagtttaggaaattgttgagcaaggagcctaacccccccatagacgaagtgatcagtacccctggggtcgtcgcccgatttgtggagttccttaaaagaaaagaaaattgcacactacagttcgagtctgcctgggtgctgacaaacatcgcttcgggcaactcattgcaaactaggatagttattcaggccggcgcggttccgattttcatcgagttgctctcatccgagttcgaggacgttcaagaacaagcagtttgggccctgggtaacatcgccggggactctactatgtgccgtgattatgtcctggactgcaacatacttccccccctcttacaacttttttctaaacaaaacagacttactatgactcgtaacgcggtgtgggccctctctaacctgtgtcggggaaaatctccaccaccagagtttgcaaaggtatccccatgccttaacgttctaagctggttgttgtttgtatcagacacagacgtgctggccgatgcctgttgggctttgagctaccttagtgacggtccgaacgacaaaattcaggcagtgatagacgcgggggtttgccgaagactggtggaactcctgatgcataatgactacaaggtcgtgtcccccgctctacgtgccgtcggtaatattgtgactggggacgattag

SEQ ID NO: 192181 - DNA, 648 bp, synthetic construct
  misc_feature 1..648: note = Description of Artificial Sequence: Synthetic coding sequence
  source 1..648: mol_type = other DNA
atgaccacccccggcaaggagaacttccggctgaagagctacaagaacaaatctctcaatcctgacgaaatgagaagaaggagagaagaggagggtctacagttgcgaaaacaaaagcgggaggaacaattgttcaagcgacggaacgtagctactgctgaggaggaaaccgaagaggaggtgatgtcagatgggggcttccacgaagctcagatatccaacatggagatggcccctggaggcgtaatcacttctgacatgatcgagatgatattttccaagtcccctgagcagcaattgagcgcgacacagaagtttaggaaattactctccaaggagcctaacccccctattgacgaagtcatctcaactccaggagttgtggctcggttcgtggagtttcttaaacgcaaggagaattgtaccctgcaatttgaatcggcctgggttctcaccaatatcgcttcagggaatagtctgcagacgaggatcgtcatccaggcaggggcagttcccatctttatagagcttctgtcttcagaattcgaggacgtgcaagaacaggccgtctgggctttgggcaatatagccggcgattccacgatgtgcagggattatgtgctggattgtaatatcttgcccccttag

SEQ ID NO: 192182 - DNA, 525 bp, synthetic construct
  misc_feature 1..525: note = Description of Artificial Sequence: Synthetic coding sequence
  source 1..525: mol_type = other DNA
atgaccacccccggcaaggagaacttccggctgaagagctacaagaataagtcacttaatccggacgaaatgcgacggcggagagaagaggaaggtctccagctacgcaagcagaagagggaagagcaacttttcaagcgacgaaatgtggccacagcagaggaggagaccgaagaggaagtaatgtcggacggaggctttcatgaggctcagatttccaacatggagatggccccgggaggcgtgataacttcagacatgattgagatgattttcagcaagtccccagaacagcagctgagcgcgacccagaaatttaggaaattgctctctaaagagcctaacccacctattgatgaggttatttccactcccggggtggtagccagatttgtggaatttctgaagaggaaggagaattgtactctgcagtttgaatccgcttgggtcttgaccaacatagccagcggcaactctctccagacacgcatcgtgatacaggccggggcagtccccattttttag

SEQ ID NO: 192183 - DNA, 1566 bp, synthetic construct
  misc_feature 1..1566: note = Description of Artificial Sequence: Synthetic coding sequence
  source 1..1566: mol_type = other DNA
atggccgagaaccccagcctggagaaccaccggatcaagagcttcaagaataagggcagggacgtggagaccatgaggcgtcacagaaatgaggttaccgtggaactcagaaaaaacaagcgtgacgaacacctgcttaaaaaacgtaatgtgccccaagaggaatccttggaggacagcgatgtggacgcagactttaaagcccagaacgtgactctggaagcaatattacaaaatgcaacttccgataatccagtagttcagctttccgccgtgcaggccgcaagaaagctgctgtcaagcgataggaatccacccattgacgatctgatcaaatccggaatcctgccaatcctggttaagtgcctggaacgtgatgataaccccagcctacagttcgaagccgcctgggcgttaaccaacatcgcctctggcaccagcgctcaaacgcaagccgtggtccaaagcaacgccgtaccgctgtttttgcgcctactccggtcccctcatcagaatgtttgtgaacaggcggtctgggcactaggaaatattataggtgatggcccccagtgtcgggattatgtcataagcctgggcgtggtgaaacccttgttgagttttatcagcccttcaatccccatcacatttcttaggaacgtaacttgggtcatcgtcaatctatgtaggaataaagaccccccgcccccaatggaaaccgtccaggaaatccttcctgcactgtgcgtgctcatctatcacacagacatcaatattttagtcgacacggtatgggccttgagctatctgacagatggtggaaacgagcaaatccagatggtgatcgacagtggggtggtgccttttttggtgcccctcctgtcacatcaggaggtaaaggttcaaaccgccgcactccgcgcggtcggtaacatcgtaacggggaccgatgagcagacacaggtggtgctgaattgcgatgtgctgtctcacttccccaatctcctgagtcacccaaaagagaagatcaacaaggaagcggtatggttcctgtcaaatatcacagccggcaatcagcagcaggtgcaggccgtgatcgatgcaggcctgatcccgatgatcatacatcaactcgcgaagggcgacttcggcacgcagaaggaggctgcctgggcaatcagcaaccttacaatctcaggacgcaaagaccaggttgagtatttggtccagcaaaacgtcatccctcctttttgtaacctactctccgtgaaggatagccaggtggtacaggtagttctggatggtttaaagaatatcctgatcatggccggcgacgaagcatccacaattgcggaaataatcgaggagtgcggcggactggaaaagatcgaggtgctgcagcaacatgaaaacgaggacatctacaagctggcctttgaaatcatcgaccaatattttagtggcgatgatattgatgaagatccgtgcctcatccccgaggccactcaaggtggcacatacaactttgacccaactgccaaccttcagaccaaggagttcaacttctag

SEQ ID NO: 192184 - DNA, 1566 bp, synthetic construct
  misc_feature 1..1566: note = Description of Artificial Sequence: Synthetic coding sequence
  source 1..1566: mol_type = other DNA
atggccgacaacgagaagctggacaaccagcggctgaagaacttcaagaataagggacgggacctcgagacgatgaggagacagcgcaacgaggttgttgtggagctgcgtaaaaacaagagggatgagcatctgctgaagagaaggaatgtaccacatgaggatatatgcgaggactccgacattgacggcgactaccgggttcaaaataccagtctggaggcaatagttcaaaatgccagcagtgacaaccagggcatccagctctccgccgtgcaggcagccagaaagttgctgtcctccgataggaaccctcctatagatgacctgattaaaagcggtattcttcctatactcgtgcattgcctggaaagagatgacaatccaagcttacaatttgaagccgcttgggccctcaccaacatcgccagcggtactagcgagcagactcaagccgtcgtacagagcaacgcggtaccccttttcctcagactgctgcactccccacaccagaacgtgtgtgaacaggctgtatgggcattgggcaatatcatcggcgatgggccacagtgtagggattacgtgatcagcctgggagtggtgaaacctctcctgtctttcatttccccctctattcctataaccttcctgagaaatgtgacctgggtgatggttaatctgtgccggcacaaagacccgccaccaccaatggagacgattcaggagatcctcccagcactctgcgtcttgatacaccataccgatgttaacatcctggttgatactgtttgggccttgtcctatctgaccgacgctggcaacgagcagatccagatggtaatcgattccggcattgtaccccacctggtgcctctgctttctcaccaggaagtgaaagttcagactgccgctttacgggccgtgggaaacattgttactggcaccgatgaacagactcaggtggtcctaaattgcgatgccctatcccactttccggccctgctcacccatccgaaagaaaagatcaataaggaagctgtctggttcctgagtaatatcacagcaggtaatcaacagcaagtgcaggccgtgattgatgccaatctggttcccatgatcatccacctgctggacaagggggacttcggaacgcagaaagaagccgcctgggccatttccaatctgacaatctctggccgcaaggaccaagtggcttatctgattcagcagaacgtgatacctccattctgcaatttgttaaccgtcaaagatgcgcaagtcgttcaggtggttctggatggcctctcaaatatcttgaagatggctgaggatgaagctgagaccattggtaatctcattgaggagtgcgggggcctcgaaaagattgagcagctgcaaaaccacgagaacgaagatatctataaactagcatacgagatcatcgaccaattcttctcaagcgatgacattgacgaggacccatctctggtccccgaggctatacaggggggcacattcggattcaatagttctgctaatgtccctactgagggattccaattttag

SEQ ID NO: 192185 - DNA, 1551 bp, synthetic construct
  misc_feature 1..1551: note = Description of Artificial Sequence: Synthetic coding sequence
  source 1..1551: mol_type = other DNA
atgcccaccctggacgcccccgaggagcggcggcggaagttcaagtatagagggaaagatgtctcactgaggagacaacagcggatggccgtctcactggagctcaggaaggccaagaaagacgagcagactctcaagaggcgtaatattacaagcttttgcccagatacaccatctgagaaaactgccaagggggttgctgtttctctcacacttggcgagataattaaaggggttaacagcagcgatcccgtgttatgtttccaggcgacccaaaccgcccgcaagatgctgtcacaggagaaaaatccccccctgaaactcgtgattgaggctggacttattccaaggatggtagagtttctgaagtcttctctatatccttgcttgcagttcgaagccgcctgggccctcaccaatatcgcctccggcaccagcgagcagacacgcgccgtggtggaagggggtgccatccagccacttattgagttgctgtccagctcaaacgtggccgtgtgcgagcaggctgtatgggccctcggcaatatagcaggcgacggaccggaattccgggacaacgttatcacgtcaaacgctatacctcatttgttggctctaatctccccgaccctaccaatcacctttctcaggaacattacgtggaccttgtcaaatttgtgtagaaataaaaatccatatccgtgtgacaccgccgtgaagcagatcctgcctgcactgctgcatctacttcagcaccaagatagtgaggttctaagtgacgcttgctgggctctgtcatatctgaccgacggcagcaacaaacggatcggacaggtggttaacacaggcgtccttccccggctggttgttcttatgacctcaagcgaactcaacgttctcacgccttccctgcggacagttggtaacatcgtcactgggacagacgaacagacccagatggcaatagacgccggaatgttaaacgtgctgccccaactccttcagcacaataaacccagcatccagaaagaagccgcgtgggctctctctaacgtagcggcaggaccttgccaccacatacagcaattgctggcctacgacgtcttacctcctcttgtcgcattgctgaaaaatggcgaattcaaggtccagaaagaggccgtgtggatggtggcaaactttgccactggcgcaacaatggaccagctgatccagcttgtccactccggggtgcttgaaccgttggtgaacctcctaaccgcacctgacgtaaaaatcgtgctgataattctggatgtcatctcttgtatcctgcaggcagctgagaagcgcagtgaaaaagagaatttgtgtctgctgattgaagaactgggtggcattgataggatcgaggcactgcagctgcatgagaatcggcagatcggacagagcgcactgaatatcatcgagaaacatttcggggaggaggaggacgagtcccaaacactgctaagccaggtcatcgaccaagactatgagtttatcgattatgagtgcttggcaaagaaatag

SEQ ID NO: 192186 - DNA, 3318 bp, synthetic construct
  misc_feature 1..3318: note = Description of Artificial Sequence: Synthetic coding sequence
  source 1..3318: mol_type = other DNA
atggccgccatggcccccgccctgaccgacgccgccgccgaggcccaccatatcaggttcaagttggctcctccttcctccaccctgtcacccggatccgccgaaaacaatggtaacgcgaatatccttattgccgctaacggcacaaagaggaaggccattgctgcagaggaccctagtttggatttccgtaacaaccctaccaaggaggatctgggaaagcttcagcccctcgtggcgtcctacttgtgttccgatgtgacaagtgtgccttctaaagagagtctgaagttacagggtgtgttttccaagcagacagtgctcaagtcccatcccttgctctcacaaagctacgagcttcgagctgagctgctgggtcggcagcctgtgctggagtttagcctggagaacctgcggacaatgaacacctctggccagaccgccctgccccaagcccccgtgaacgggctggccaagaagttaaccaagagctcaacacacagcgatcacgacaattctactagtcttaatggcggaaagcgtgccctgacatcatcagctctgcacggaggcgagatgggcggcagcgagtcaggggatctgaaaggtggaatgacaaactgcacactcccgcacaggtctcttgatgtcgagcacaccacactgtattcaaacaattccaccgccaacaaaagctcagtgaatagtatggaacaacccgccctgcaaggtagttccaggttgtcccccggtaccgactcttcctcaaatctcggaggagtgaagttggagggcaaaaagagtcctctctcctccatcttgttttctgcactggacagcgataccagaattactgcgttgttaaggaggcaagctgatattgagagtagggctcggcggctgcaaaagaggttgcaggtcgtacaagctaagcaagttgagcgtcatatacagcaccagcttggggggttcctggagaagacgctgtcaaagttgcccaatttagaatcgcttcgacctcgctctcagctcatgcttacgagaaaagccgaggccgccctccggaaagctgcttcagagaccacaactagcgaagggctctctaactttttgaaatcaaacagcatctccgaagagctagagcgcttcaccgcttcgggcattgcaaacctccggtgttccgagcaggccttcgactccgacgtgacagactcatcctctggcggggagagtgatatagaggaggaagaacttactagggcggatcccgaacagaggcacgtcccactgcgccgccggtccgagtggaagtgggccgccgaccgcgctgccatcgtctcacgctggaattggcttcaggcacatgtcagcgacttggaataccgcattcgtcagcagactgacatttataagcagatacgtgctaacaagggccttatcgtgctgggcgaggtgcctccccctgagcatactacggacctgttcttgcccttgtcaagtgaagtgaagaccgatcacggtaccgacaaattaattgaatcagtgtcgcagccgctcgagaatcacggcgcacggattattggccatataagcgaaagtctgtcaaccaagagttgtggagctttacggccagtcaatggggttataaacacattgcaacctgtgttagcggatcacattcccggcgattcatcagacgccgaggagcagctgcacaaaaagcagcgcctaaacctggtgtcaagctcttccgacggaacctgtgtggcagccagaacgcggccagttttgtcatgcaagaaaaggcgcctagtacggccaaactcaattgtccccctgtctaagaaggtccacagaaattctaccatacggcccggatgcgacgtgaatccaagctgtgcactgtgcggcagtggcagcattaatacaatgccacccgaaatccattatgaggctccactactggaacgcttaagccagctggattcttgcgtgcaccctgtgctagctttcccagacgatgtgccaacctctttacacttccagtccatgctgaaaagccagtggcagaacaagccttttgataagataaaacccccgaaaaagttgtctcttaagcatcgggctcccatgccgggatctttacctgacagtgcaagaaaggaccgtcacaagcttgtttcttccttccttactacggccaaactgtctcaccaccagactcggcccgaccggacccacagacagcaccttgacgacgtcggcgctgtgccaatggtagagcgggttactgcaccaaaagccgagagacttcttaatcctccgccacctgtccacgatccaaaccatagcaagatgagactgagggaccacagcagtgagaggtcagaggtcctcaagcaccacactgatatgagcagctccagctatcttgcagcaacgcaccatcccccacactcacccttagtccggcaactgagcaccagctccgattcacccgccccagcctccagcagtagtcaggtcacggcatctaccagccagcaaccagtgcgcagacggcggggtgagtcttctttcgacattaacaacatcgtcataccaatgagcgtggcagccacaactagggtggaaaagcttcagtacaaggagatactgaccccctcgtggagggaggtagatctccagtcactcaaaggctccccagacgaggagaacgaggagattgaggatctgagcgatgccgcgttcgctgcgttgcacgccaaatgtgaagagatggagagggccaggtggttgtggacgacgtcagtgcctccacagcgacgcggttcccggtcctatcgaagcagcgatgggcggacaaccccacagttgggctccgccaacccctctacgccccaaccggcctcaccagacgtcagtagctcacattcattgtccgaatattcccacgggcagagcccccgaagccctatctcacctgagctgcactccgcccccctgacccccgtggcacgcgatacaccccggcatctggcctcagaggatacccggtgcagcacgcctgagctggggctggatgagcagtctgttcaaccctgggagcgccgcacatttccattggcccacagtccccaggccgagtgcgaggatcagctggatgctcaggagcgggccgccagatgcactaggcgaacgtctggtagcaagactggacgggagaccgaagcagcgcctacctcgccaccaattgtacctctaaagagcaggcatttggttgctgctgccaccgcgcagcggcccacccaccggtag

SEQ ID NO: 192187 - DNA, 1200 bp, synthetic construct
  misc_feature 1..1200: note = Description of Artificial Sequence: Synthetic coding sequence
  source 1..1200: mol_type = other DNA
atgccccccgagatccactacgaggcccccctgctggagcggctgagtcagctggacagctgcgtccaccctgtcctggccttccccgacgatgtccccacgtccttgcatttccagtcgatgctgaagtcccagtggcagaacaagccattcgataaaatcaaaccacccaagaagttaagtttaaagcaccgagcaccaatgcccggatccttaccagacagcgccagaaaggacagacacaaacttgtgtcctccttcctcacaacagctatgttgaaacaccatactgacatgagttcgagctcatatctggccgctacccatcatcccccacattccccactggtaagacagctgtcaacgagctccgacagtcccgctcccgcaagctctagctcacaagtgaccgcttcaacttcacagcaaccagttaggcggcgtagaggtgaatcttccttcgatattaacaatatcgtgatccctatgtccgtggcggccacgactagagttgagaagttgcagtataaagagattctgactccatcatggcgcgaggtggacctccagtcccttaagggcagtccagatgaggagaacgaggaaattgaggaccttagtgacgccgccttcgccgctttacacgcaaagtgcgaagaaatggaaagggcgcggtggttgtggactacatccgtacccccacaacgccgcgggagtaggagctacagatctagcgacgggagaaccacgccccaactcgggtctgcaaacccttctacacctcagccagcttcccccgacgtgtcctctagccattccctttcagagtattcccatggacagagcccccgctcccccattagcccagagcttcactctgcccccctgacacccgttgcccgggacacaccccgccatctagcaagcgaggatactaggtgcagcactcctgagctggggctggatgagcaaagtgtgcagccttgggaaagacggacgtttcccttagcacacagccctcaggcagagtgtgaagaccagcttgacgcccaggaaagagcggcgaggtgcactaggagaacttctggctctaagaccggccgcgagaccgaagccgcccccacgagccccccaatcgtcccgctgaagtctcgtcaccttgtggccgcggctaccgcgcagcgtccaacccacaggtag

SEQ ID NO: 192188 - DNA, 3318 bp, synthetic construct
  misc_feature 1..3318: note = Description of Artificial Sequence: Synthetic coding sequence
  source 1..3318: mol_type = other DNA
atggccgccatggcccccgccctgaccgacgccgccgccgaggcccatcacattcgctttaagcttgcccccccaagctctactctttccccggggagtgcagaaaataatggtaacgccaacattctcatcgctgctaatggtacaaagaggaaggcaatcgctgccgaagacccctcactcgactttcggaacaatcctaccaaggaggatctgggcaaactgcagccactggtagcctcatacctgtgtagtgatgtcaccagcgtgcctagcaaggaaagccttaagctgcagggagtgttcagtaagcagactgtgcttaagtcccacccactcttaagtcaaagctacgagctcagagctgagctgttggggcgtcaacccgtccttgaattcagtttggaaaatctcaggaccatgaatacctccggacaaacagccttgcctcaggctcctgtgaacggccttgccaagaagcttaccaagagcagcacccactccgaccatgacaatagcacaagcctgaatggagggaaacgcgcccttaccagcagcgccctgcacgggggtgaaatgggcggaagtgaatcaggcgacctgaaaggcggtatgaccaactgtactcttcctcaccggtcactggatgtagaacacaccacactgtattccaataattcaacagcgaacaagtcaagcgtcaacagtatggaacagcccgccctgcaggggtcgtcaagactctcgccagggacggactccagttctaatctcggaggcgtgaagcttgaaggtaaaaaaagccccctgtcttcaatcctgttcagcgccctggatagcgacacccgaatcaccgcactgcttagacgacaggcagatattgaaagcagagcccggagattacagaaacggttgcaggtcgttcaggccaagcaagtagagcgccatattcaacaccaactcgggggctttctggaaaaaaccctaagcaagcttcccaacctagagtctcttcgccctaggagtcagctgatgctcactcgcaaagcagaagcagctctgagaaaagccgcctcagagaccacaacctctgagggcctgagcaactttttaaaaagcaatagtatctctgaagaactggaaagatttacagccagcgggatagccaacttgcggtgcagtgaacaggcattcgattctgacgttaccgattcctcttccggtggtgagtccgatatcgaggaagaggagctcaccagggccgaccctgagcagcgccacgtccccttacgaagacggtcggaatggaaatgggccgccgatagggccgccatcgtgtccaggtggaactggctccaggctcatgttagcgacctggagtacagaatcaggcagcaaacagacatctataaacagatcagggccaataaggggctcatagtattaggtgaggtgcccccccccgagcacacgacagatctgttcctgcctctctctagcgaagttaagacggaccacggtacagacaagctgattgagtcagtcagtcagcctctcgaaaaccatggagctagaatcatcggacatatttcggagtccttgtccaccaagtcctgtggggccctgcggccagtgaatggggtgattaacactcttcaaccggtactcgccgatcacatccccggcgattcaagtgacgcagaggaacagctgcacaagaaacagaggctgaacctcgttagcagtagctccgacggaacatgcgtggctgctcgcacgagaccggttctgtcctgcaagaagcgaagactggtgcggcccaatagcattgtgccgttatccaagaaggtgcatcgcaacagcacaatcagacccgggtgcgacgtgaacccttcatgcgctctatgcgggtcaggatctattaatactatgccacccgaaattcattatgaagcacccctgttggaacgcctcagtcagctcgacagttgtgtccatccagtgcttgcgttcccagacgacgtgcccacgtctctgcactttcaatcaatgctcaagagccagtggcagaacaagcccttcgataaaataaagcctccgaaaaagcttagcctcaaacatcgtgcccctatgccagggtctctgccagacagtgcgcgcaaggatagacacaagctcgtcagctcctttctgaccaccgccaagctcagccatcaccagactagacccgacaggacgcatcgtcagcatctggatgatgttggggctgtaccaatggtcgagcgagtgacagctcccaaagcagagaggctcctaaatcctcctccacctgtgcatgatccgaatcattctaaaatgcggttacgcgatcactctagtgaaaggagcgaggtcctgaagcatcacaccgacatgagctcatccagctatttggcagcgacccaccaccccccccatagccctctggttagacagctaagtacatcttccgacagtcccgcacccgcttcatcttcttcccaagtgaccgcaagtacctcccagcagccagttcggcgccgccgcggcgaatcatcctttgatatcaataatattgttatccctatgtcagttgccgccacaaccagggtcgaaaagctgcagtacaaggagatcctgacccctagctggcgggaggttgatctccaatccttgaaagggagtcctgacgaggagaatgaggagattgaggacctcagtgacgcggcctttgctgccctgcatgccaagtgtgaagaaatggagcgcgcacgatggctgtggacaacttccgtgccaccacagaggcgcggttcccgctcgtaccgcagcagtgacggaagaaccaccccccagttaggctccgccaacccgagtacgccacagcctgcctctcccgacgtcagcagtagccactccctgagtgagtacagccacgggcagagtccccgaagccccatctcccctgaacttcatagcgctcctctgacaccagtcgcaagggacacaccccggcacctcgctagcgaggatactcgttgtagcacacctgagcttggcttggatgagcagtctgtccagccatgggagcggagaacgtttccactggcccacagtcctcaggccgagtgcgaagaccaactggacgcacaggagcgggcagctcgctgcacccgcaggacttcggggtccaagaccgggagagagaccgaggcagctcccaccagccccccgattgttccccttaaatcgagacaccttgtcgccgccgctacagcccaaaggcccacgcaccgctag

SEQ ID NO: 192189 - DNA, 3318 bp, synthetic construct
  misc_feature 1..3318: note = Description of Artificial Sequence: Synthetic coding sequence
  source 1..3318: mol_type = other DNA
atggccgccatggcccccgccctgaccgacgccgccgccgaggcccaccacatccggttcaaactggctcctccatcctccactctgtcaccaggctcggctgagaacaacgggaatgccaacattctcatagctgctaatggaaccaaaaggaaagcaatcgcagcagaggacccgtccttggactttcgcaataatccaaccaaggaggacttgggcaaactgcaaccacttgtggcttcatatctgtgttccgacgtcacatcagtgccgagtaaggagtctctgaagcttcagggagtgttcagcaaacaaacagtccttaagtctcacccactgcttagccaatcatacgagctgcgggccgagctcctcggtcgccagcctgttctggagttcagccttgagaatctcagaacaatgaacacctctggccagacagctctgccccaggcgcctgtaaatggattggctaagaaattaaccaaaagttcgacacattctgatcacgataactccacaagtctcaacggcggaaagcgagccttgactagctctgcactgcatggcggagagatgggcggcagcgagagcggggatcttaagggcggtatgactaactgcaccctgccccatcggtccctcgatgtggagcacacaacactgtactcaaacaattctacagctaacaagagttctgttaacagcatggagcagcccgcactccaggggagttctaggctatcaccaggcacggactcctcttcgaatctgggaggggtcaagctcgagggaaagaagtctcctttatcctccattcttttctccgcactggactccgacaccagaattaccgccctgctgaggagacaggcggatattgagagccgtgcccggcggctccagaaacgccttcaggttgtgcaggccaaacaagtagaacggcacattcaacatcaactcggtgggtttttggaaaagacgctgagcaaactgcccaacctggaatccctgagaccacggtcccagctcatgcttacccgaaaagctgaagccgcactgcgaaaggcagctagcgagaccacaacctccgaaggactttccaactttctgaaatctaactctatctcagaggagttggaacgattcacagcttctgggattgccaacctgcgttgttccgagcaagcttttgactcagatgtcacagattctagttcgggtggggaatccgatatcgaagaggaggaactgaccagagcagatcctgaacagaggcacgtccccctcaggagacgaagcgaatggaaatgggcagcagaccgagccgctatcgtgtcccggtggaactggctccaagcacatgtatcggacctagaataccgaattcggcaacaaaccgatatatacaaacaaatcagggctaataagggcttgattgttttaggagaggtgccacctccagagcatacaaccgatttatttttacccctgagctccgaggtgaaaaccgatcacggcactgacaaactaattgagtccgtgagccaacccctggaaaatcacggcgccagaatcatcggtcatatctctgagtcgctgagtaccaaaagttgtggggcactgcgccccgtgaatggtgttattaatactctccaaccagtcctagctgatcatatccctggcgacagctccgacgccgaggaacagctgcacaagaagcagagattaaacctggtgagttcctcctcggatggaacttgtgtggcggcacgaacgagaccggttctgtcatgtaaaaagcgccgactcgttcgtccaaactccattgtgcccctgtctaagaaggtgcatcgaaactccacgatacgcccaggatgcgatgtgaaccccagttgtgcattgtgcggttcagggagtattaataccatgccacctgaaattcactacgaagctcctctgctggagagactgagtcagctcgattcttgcgtacacccagtcctcgcgttcccagacgacgtaccgacgtctctacacttccaaagcatgctcaaatcccagtggcaaaataagccattcgacaagatcaaacccccaaagaagctttccctgaaacaccgggccccaatgccgggctccctaccggattccgctcgaaaggacaggcacaaacttgtctctagctttctgacgactgccaagttgagccatcaccagacacgacctgatcggactcaccgccaacacctggatgatgtgggtgccgttcccatggtagagcgcgtgaccgcgccaaaagccgaacggctgctcaatcctccaccccccgtccacgacccgaaccactcaaagatgaggctgagagaccattcttccgagaggtccgaggttcttaagcaccacactgatatgtcctcgtcatcatacctcgccgctacccatcacccccctcactcccctctggtcaggcagctgtccaccagctcggattctcctgctcctgcctcttcttccagtcaagtcaccgcatctacctctcagcagccagtgcggaggcggagaggcgagtctagcttcgacatcaataacattgtgatcccaatgtccgtcgctgccactaccagagtggagaagctacagtacaaggagattctgactccctcttggcgtgaggtggacctgcaaagcctgaaaggctctcccgatgaggaaaacgaagaaattgaagatctgtctgatgcagcattcgcagcactgcatgccaagtgtgaggagatggagcgggctcgctggctctggactacgtcagttccgccacagcgccggggtagtcggagctatcgctcttccgacggtcgaaccacgcctcagctagggagcgccaacccgagcactcctcaacccgccagtcctgacgtgtcttcaagccactctcttagtgagtactctcatgggcaatccccacgttccccaatctctcccgagctgcactccgctccgttgacccctgtggctcgggatacaccacggcatctcgcatctgaggatactcggtgcagcactccagaacttggattggacgagcagtccgtccaaccctgggagcgacggacctttcccctggcacatagcccccaggccgagtgcgaagatcagctggatgcacaagaaagggctgccaggtgcacccgaaggacaagcggatctaaaactggaagagagactgaagcagcccccaccagcccccctattgtaccactgaagtcgcgccacctggtagcagcagccacagcccagcgccccacccacaggtag

SEQ ID NO: 192190 - DNA, 3318 bp, synthetic construct
  misc_feature 1..3318: note = Description of Artificial Sequence: Synthetic coding sequence
  source 1..3318: mol_type = other DNA
atggccgccatggcccccgccctgaccgacgccgccgccgaggcccatcacatccgctttaaactggcccctcctagcagcaccctttcccctggctctgctgagaacaacggcaatgcaaatattttaatcgccgcgaacgggacaaaaagaaaagcaattgcggcagaggaccctagtctagatttcaggaataaccctactaaggaggacctcggcaagctgcagcctctcgttgcctcatacttgtgtagcgacgtgacctcagtcccaagtaaagaatcgctcaagctgcaaggtgtgttcagtaagcagaccgtgctgaagagccacccccttctgtctcagtcatacgaactgcgtgccgagttgctcggtagacaacctgtcctggagttctcactggaaaacctacggaccatgaataccagcggtcagacagccctcccgcaggcccctgtgaatgggctggcaaagaaattaacaaagtccagcacccattcagatcatgataactcaacttctttgaacggcggtaagcgcgccctgacatcctctgccctgcatggcggtgagatgggtggatcagagtccggcgacttgaaaggaggaatgactaattgtactcttcctcaccgatctttggatgtggagcacaccaccctttacagtaataattctaccgccaataaatcatctgtcaacagtatggagcaaccggccctacaggggagctctcgccttagtcccggtactgattcgagctccaacctagggggggtaaaactcgaaggcaagaagtcccctcttagcagtatactgttctctgccttagattcagataccaggatcaccgccctgctgagacgacaggcagatattgagagcagggcccgaaggttgcagaaaagattgcaagtcgtacaggccaaacaggtagagagacatattcagcaccagcttggggggtttcttgagaagactttgagcaagctgcctaatctggagtctctgcgaccaagatcccagctgatgttgacccgcaaggccgaggctgccctgcgcaaagcagcctctgagactaccacttccgagggactgagtaactttctgaagtccaacagtatcagcgaggagttagagcgatttaccgcatcaggtattgctaacctgaggtgttccgaacaagcattcgacagtgacgtgacggacagttcaagcggaggcgaaagcgatattgaggaggaggaactaaccagggctgatcccgaacagagacacgtgcctctacgtagacgaagtgaatggaaatgggctgctgatagggccgccatcgtgtcaagatggaactggctgcaagcccatgtcagtgacctggaatacagaattcggcagcagactgatatttacaagcagattcgggccaataaaggactcattgttctgggggaggtgccacctccggagcacactaccgatttgttcttgcctctaagtagtgaggtgaagacagaccatggaacagacaaattgatcgagtcggtttcacagcctttagaaaaccatggggccaggataatcgggcacatttcagaaagtctatcaacgaagagctgtggcgctctgagaccggtgaatggagtaataaatacattgcagcctgttttggctgaccacattccaggcgatagcagcgatgcagaggagcagctccataaaaaacaacgtttaaacctggtgagctccagctccgacgggacatgcgtagcagcccgcacccgtcctgtcttatcatgtaaaaagcgtcgtctggtccgtcctaactctatagttcccctctccaagaaggtgcaccgcaatagcacaatcagaccgggctgtgatgtaaacccctcatgtgcactatgcggtagtgggagtataaacacaatgccccccgagatacactatgaggcacctctgcttgagcgcctgagtcaactggactcttgcgtgcaccctgtcctcgccttcccagatgacgtccccacctccctccactttcagtctatgctgaagtctcagtggcagaacaaacctttcgacaaaataaaaccacccaagaaactcagtctgaagcacagggcgccaatgcccggaagtctcccagattcagccagaaaggatagacataagctcgtttcctcctttctgaccacagctaaattgtctcaccatcagaccaggccggataggacacaccgtcaacatctagacgacgtgggagctgtgccaatggtcgagagagtaacggcgccgaaagccgaaagattgttaaacccccccccacctgtccacgatccaaaccacagcaagatgaggctaagggatcattccagcgagcggtccgaggtgctgaaacaccacacagacatgtcctcaagctcctatctggcggcaacccaccatccaccccattcccccttagtgcggcagctgtctaccagtagtgattccccagctcccgcatcatctagctctcaggttactgcatctacttcacagcagcccgtgcggcgccggcggggcgaaagctcattcgatattaataacattgtcatccccatgagtgtggcagccactactcgggtcgaaaagctacagtataaagaaatacttacgcctagctggagggaggtggatctgcagagcctgaaggggtctccagatgaggagaatgaagaaatagaggatctgagcgacgctgcctttgccgctctgcacgccaagtgcgaagagatggagagggccaggtggttgtggacaacatcagtgccccctcagcggcggggctcacgctcctataggagtagcgatgggagaacaactccacaattgggaagtgctaatccatcgacgccgcagcccgcatcccctgatgtcagtagctcccattctttgtccgagtattcacatgggcagtccccgcgttctcccatatcacctgagctgcactcagccccactgactccagtggcgcgcgatacacctcgccatctggcctccgaggacacccgctgtagtacacccgaactaggtctggatgagcaaagcgtccagccctgggaaaggcggactttccctttggcacatagcccccaggcggagtgcgaggaccagctggatgctcaggagcgggccgcacgatgtacacggcgcacatctggctcaaagacgggccgtgagacagaggccgccccgacctccccgccaattgtgccactcaaatcacgccacctggtcgcagctgccaccgcacagagaccgactcaccgttag

SEQ ID NO: 192191 - DNA, 936 bp, synthetic construct
  misc_feature 1..936: note = Description of Artificial Sequence: Synthetic coding sequence
  source 1..936: mol_type = other DNA
atgagcctgctgatgatcagcgagaacgtgaagctggcccgggagtatgctctgctgggcaattacgattccgcaatggtatactatcagggagttctggatcaaatgaataagtacttatacagcgtgaaggacacctatctccagcagaaatggcagcaagtgtggcaggaaattaatgttgaggcaaagcacgtgaaggacatcatgaaaaccctagaaagctttaagcttgattctacccctttgaaggctgcacagcacgacctgccagcctccgagggagaggtctggagtatgcccgtacctgtggagcgccgcccaagccctggaccaaggaaaaggcaaagttcgcaatactccgatcccaaatcccacggaaatcggccctctaccaccgtccgagtccacaggtccagcgcgcaaaacgtacataatgacaggggaaaagccgttagatgccgcgaaaaaaaggaacagaacaagggacgcgaagagaaaggtgtcctcatggtgggcccacccgggacgggcaagacattactggccaaagctgtggcaaccgaatgcaagacgaccttttttaacgtgtcttcctcgactctaacgagcaagtatagaggtgagtccgagaaactagttcgccttctgtttgagatggcccgcttctattcgcccgccaccatttttatcgacgagatcgacagtatttgttctaggcgggggacaagtgaggagcatgaggctagtagacgcgtaaaggctgagttgctcgttcaaatggacggggtaggggggaccagtgagaacgacgatccctctaaaatggtgatggtgcttgcagctacgaatttcccttgggacatcgacgaagcgcttcgccgtcgtctggaaaaacgcatttatattcccctgcctagcggtatgaggccttag

SEQ ID NO: 192192 - DNA, 1476 bp, synthetic construct
  misc_feature 1..1476: note = Description of Artificial Sequence: Synthetic coding sequence
  source 1..1476: mol_type = other DNA
atgagcctgctgatgatcagcgagaacgtgaagctggcccgggagtatgccctgcttggaaattatgactccgctatggtgtattatcagggtgtcttggaccagatgaataagtacctgtatagtgtcaaggacacatacctgcagcagaagtggcaacaggtgtggcaagagataaacgttgaagctaagcatgtcaaggacatcatgaagacactagaatctttcaaattagactctactcctctcaaggctgcacagcatgatttgcccgcttccgagggggaggtgtggtccatgccagtccccgtagagagaagaccatctccgggccctcgcaagcggcagagttcacaatacagcgatcctaaatctcacggcaacagaccttctactacagtgcgggtgcacagatcatcagcccaaaacgttcataatgacagaggcaaagctgtgcggtgtagagaaaagaaagagcaaaataagggtagggaggagaagaataagtctcctgcagcagtgaccgaacctgagaccaataagttcgacagtactgggtacgataaggacctggttgaagcactggaacgcgacatcatatcccaaaatcccaatgtgaggtgggatgatatagccgatttggtagaggcaaagaaattgttgaaggaagccgttgttcttccaatgtggatgcctgagttcttcaagggtatccgcagaccatggaagggcgtgctgatggtggggcccccaggaactgggaagacactgctggctaaggccgtggcaaccgaatgcaagacgacattcttcaatgtctcaagcagtacactgacctcgaagtaccggggcgaatccgagaagctggtgcgccttctattcgagatggcccggttttacagcccggctactatcttcatcgacgagatagattcaatctgcagcaggcgaggaacctctgaggaacacgaagcctcgcgtcgggtgaaggccgagttgctggtgcaaatggatggggtgggcggaaccagtgaaaacgatgacccgtccaagatggtgatggttctggcagcgactaactttccatgggacatagacgaggctcttcgcagacgactggaaaaacgtatttacattcccttgccgagcgctaaaggccgtgaggaactgttgcgcataagcctgcgggaactggagcttgccgacgatgtcgacctggctagcatcgcagagaatatggagggttatagcggggccgatatcactaacgtgtgccgcgatgcttccttgatggccatgagaagacggatcgagggattaacccccgaagaaatccgcaacctcagcaaggaggagatgcatatgcccacaacaatggaagattttgagatggctctgaagaaggtgagcaagagcgtgagtgctgccgatattgagaggtacgagaagtggatctttgagttcggtagctgctag

SEQ ID NO: 192193 - DNA, 1476 bp, synthetic construct
  misc_feature 1..1476: note = Description of Artificial Sequence: Synthetic coding sequence
  source 1..1476: mol_type = other DNA
atgagcctgctgatgatcagcgagaacgtgaagctggcccgggagtacgcactcctaggaaactatgacagtgcaatggtgtactaccagggcgtccttgatcagatgaacaagtacctgtatagcgtgaaagatacttacttgcagcagaaatggcaacaagtgtggcaggagatcaatgtggaagccaagcacgttaaagatattatgaagactctggaaagcttcaaactggattccactcctctgaaggccgcccaacatgatctgcctgcgtccgaaggcgaagtttggtcaatgcccgtgccagtggaaaggcggccttccccggggccacgtaaaaggcagtcttcacagtactcagatccaaagtctcacggtaaccgtccatccacaactgtgcgggtgcaccgttcaagcgcccagaacgtccataatgatcggggaaaggccgttcgctgtcgcgaaaagaaggagcagaacaagggaagggaggagaaaaacaaatccccggctgccgtgactgagcctgaaacgaacaagtttgatagcactggctacgataaggacctggtcgaagctctcgaacgagacataatttctcaaaaccccaacgttcggtgggacgatattgctgatctcgtcgaagccaaaaagctcctgaaagaagccgtcgtgctccccatgtggatgccagaattttttaaggggatccgccgcccctggaagggagtgctgatggtgggaccccctgggacgggcaaaacgctcttggctaaagcagtggcaactgagtgcaaaaccacatttttcaatgtatcctccagtactctaacctccaagtacaggggcgagtctgagaagctggttcggctcttgttcgaaatggccagattttacagccccgccactattttcattgacgaaatagatagcatctgtagccgcaggggaaccagcgaagaacatgaggcgagccggagagtgaaggccgaactgctggtgcaaatggacggcgttggcggcacatccgagaacgatgaccccagcaagatggtaatggtccttgcggcaaccaatttcccctgggacatagacgaggccctccgccggcgactagagaagaggatctacatccctctcccatcagccaaggggcgcgaggagcttttgaggatcagtcttcgtgagctggagttagccgatgacgtggatcttgcttccattgccgagaacatggaaggatactctggtgccgacatcacgaacgtgtgccgcgacgcctctctcatggctatgcgccgtaggatcgagggcctgacaccagaggagattcgcaacctgagcaaggaggaaatgcacatgcctacgaccatggaggatttcgaaatggcactaaagaaagtgagtaaatcagtcagcgctgcagacatcgaacgatacgagaagtggatattcgagttcggttcctgttag

SEQ ID NO: 192194 - DNA, 636 bp, synthetic construct
  misc_feature 1..636: note = Description of Artificial Sequence: Synthetic coding sequence
  source 1..636: mol_type = other DNA
atgagcctgctgatgatcagcgagaacgtgaagctggcccgggagtatgctcttcttggcaactacgatagtgcaatggtttactaccagggcgtattggatcaaatgaacaagtacttatattctgtaaaagatacctatctgcagcagaaatggcagcaggtttggcaggagatcaacgtagaggcgaagcacgtgaaggatattatgaagactcttgaatctttcaaattggattctacacctctgaaagccgctcaacatgatttacctgctagcgagggcgaggtttggtccatgccagtgcccgttgagcggagaccgagcccagggccccgcaagcgacaatcctctcagtattctgacccaaagagtcatggaaacaggcccagcaccactgtgcgggtacaccggtcatctgcgcagaatgtccataacgatcgcggcaaggccgtgcggtgtagagagaagaaagagcaaaacaaaggtcgggaggaaaagaataaaagtccagcagccgtgactgagcctgaaacaaacaagttcgactctacaggttatgataaggatctcgtggaagccctcgagcgcgacatcatcagtcagaaccctaatgtcagatgggatgatatttag

SEQ ID NO: 192195 - DNA, 843 bp, synthetic construct
  misc_feature 1..843: note = Description of Artificial Sequence: Synthetic coding sequence
  source 1..843: mol_type = other DNA
atgagcctgctgatgatcagcgagaacgtgaagctggcccgggagtatgctcttctaggaaattacgattctgctatggtctactatcagggtgtgttggaccaaatgaataagtatttgtatagtgttaaggatacctatctccagcagaaatggcagcaggtgtggcaggaaattaacgtggaagccaagcacgttaaggacatcatgaagaccctcgagtcctttaaactcgactctacgccactgaaggcggcacagcacgacctcccagctagcgaaggcgaggtttggtctatgcccgtgcccgtagaacgaagaccctctcctgggccaaggaaaaggcagagcagccagtacagtgacccaaaaagccacggaaacaggccttctaccacagtgcgcgttcatcgcagcagtgctcaaaacgttcacaatgatcgcggcaaggccgtccggtgcagggagaaaaaggaacagaacaaaggccgcgaagagaagaataagagccctgcggcagtcaccgagccagaaacaaataagtttgactcgaccggatatgacaaagatcttgtggaagccctagagcgggatatcattagtcagaatcctaatgttaggtgggacgacatagctgacctggttgaagctaagaagttattaaaagaggcagtggtcctgccaatgtggatgcccgagttcttcaaaggtatccgccgaccctggaaaggtgtactgatggtagggcctccgggaaccgggaagacactgctggcgaaggccgttgctaccgagtgtaagacaacatttttcaatgtgtcatctagcaccctaacttcttag

SEQ ID NO: 192196 - DNA, 429 bp, synthetic construct
  misc_feature 1..429: note = Description of Artificial Sequence: Synthetic coding sequence
  source 1..429: mol_type = other DNA
atgaactgcagcgagagccagcggctgcggaccctgctgagccggttactcctcgagttacatcatagaggtaatgcatcaggcctgggcgccggtcccagaccttcgatgggcatgggagtcgtgccagatccatttgtgggccgggaggtgacctccgccaagggtgatgacgcctacctgtatattctcttgatcatgatcttctacgcatgcctagcgggaggactgatactggcttatactcgttccaggaagctggtggaggccaaagatgagccatcgcaggcttgtgctgaacacgagtgggcgcccggaggggccttgacagccgatgcagaggcagccgctggttctcaggcagaagggagacggcagctggcctcggaaggactgcccgccttggcccagggcgctgagagagtctag

SEQ ID NO: 192197 - DNA, 1509 bp, synthetic construct
  misc_feature 1..1509: note = Description of Artificial Sequence: Synthetic coding sequence
  source 1..1509: mol_type = other DNA
atgttcggcaccctgctgctgtactgcttcttcctggccaccgtgccggccctggccgagaccggcggtgagagacagctgagcccagagaaatccgaaatctggggccccggtttgaaggccgatgtggtacttcccgcccggtatttttatatccaagcagtcgacacatctggaaacaaattcactagctcacccggagaaaaggttttccaggtcaaagtctccgcccccgaggaacaatttactcgggtgggagtgcaggtcctcgacagaaaggatggcagcttcatagtccgctatcgcatgtatgcttcctacaaaaacctgaaggttgagatcaagttccagggtcaacacgttgcaaaatccccgtacattctgaagggcccagtatatcacgaaaactgcgattgcccgctgcaagactccgccgcatggcttagagagatgaactgtcccgaaacaattgcgcagattcagcgcgatctggctcactttcctgctgttgacccagagaagatcgcagtcgagattccgaagcggttcggacagcgtcaaagcctgtgtcattacaccctgaaggacaataaagtctatatcaagacccacggtgaacacgtagggttcaggatcttcatggacgcaatcctcctgtctttaacgagaaaggttaagatgcccgacgtggagctgttcgtgaacctgggagattggcctctcgagaaaaagaagtcaaactccaatatacatcccatcttcagctggtgcgggtcaacagacagtaaagacatcgtaatgcctacctacgatctgacagactccgtacttgaaacgatggggcgcgtgtcactagacatgatgtctgttcaggccaacaccggaccgccttgggagtcaaaaaacagcactgccgtttggcgcgggagggatagccgcaaggagcgattggagctcgtaaaattatctagaaagcatcccgagttgattgacgctgcttttactaactttttcttcttcaaacacgatgagaacttgtacggtcctattgtcaagcacatcagcttctttgatttcttcaagcataaataccagatcaacatagatggtactgtggccgcctaccgattgccctatcttttggttggggacagcgttgtgctcaaacaggactctatttattatgaacatttctataatgagttacaaccctggaagcactatattccagttaaaagcaatctttcagatctgttagaaaagctcaagtgggccaaagatcacgacgaggaggcaaaaaagatcgccaaggcagggcaggagttcgccagaaataatctgatgggagatgacatcttttgctactattttaaactgtttcaggagtacgcgaacctgcaggtatctgaacctcagataagagaagggatgaagagggtggagcctcagactgaagacgatcttttcccctgtacctgtcatcgcaaaaaaacgaaagacgagttgtag

SEQ ID NO: 192198 - DNA, 1065 bp, synthetic construct
  misc_feature 1..1065: note = Description of Artificial Sequence: Synthetic coding sequence
  source 1..1065: mol_type = other DNA
atgagcgccggcggcggccgggccttcgcctggcaggtgttcccccccatgcctacctgcagggtgtatggtacggtggcgcatcaggatggacacctgcttgtactgggaggctgtggccgcgccggcctgcccctcgacaccgcagagaccctcgacatggcgagtcacacatggctagctcttgctccacttccaaccgctcgcgcaggagccgcggccgtcgttttagggaagcaggtccttgtcgttggaggtgtggatgaagtgcagagtccggttgctgcagtggaagcctttctgatggacgaggggagatgggagcggagagccaccttgccccaggctgcaatgggggttgccaccgttgagcgcgatgggatggtctacgccctcggcgggatgggtccagatactgcacctcaagcccaggtccgagtgtatgaaccacgtagagactgttggctgagcctgccatcgatgcccaccccttgttatggcgctagcacattcctccacggcaacaaaatatacgtgttgggaggtcggcagggaaagttgcctgtgaccgccttcgaagctttcgacttagaggctcgcacctggacccgccatccatccctcccctcccggcgggcttttgccggttgcgctatggctgaaggttctgtctttagtctgggaggtctccagcaaccagggcctcacaatttctatagccggccacatttcgtgaatacagtggaaatgtttgacctcgagcatggcagctggactaaacttcccagatcactaagaatgcgggacaaaagagcagattttgtcgttgggtctctgggcggtcacatagtggctattggagggcttggcaaccagccctgccctcttggcagtgtggaatcatttagtcttgcgagacgaagatgggaagccttacccgccatgccaaccgccagatgcagctgtagctctttgcaagcaggtccccgtctcttcgtaataggaggagtcgcacaagggcctagccaggccgtagaggcattgtgcttgagagatggtgtctag

SEQ ID NO: 192199 - DNA, 417 bp, synthetic construct
  misc_feature 1..417: note = Description of Artificial Sequence: Synthetic coding sequence
  source 1..417: mol_type = other DNA
atgttcgacctggagcacggcagctggaccaagctgccccggagcttgcgcatgagagataagcgggcagactttgtggtaggcagcctgggaggtcacatcgtggctataggtggcctgggaaaccagccatgccctctcgggagtgtggaatctttttctctggcgaggagacgatgggaagctctccccgcgatgcctacggctcggtgttcgtgttctagtctgcaagctggccctcgattgtttgtgataggtggcgtagcccaaggtccctcccaagcggttgaagcattgtgcctccgagacggcgaggggcttgtcggcgctgtacattggtcatccagtttgccagaggcagcaatcagcatggcaccgttcgcagccgaggatacacattgcggctccgtgggttag

SEQ ID NO: 192200 - DNA, 1821 bp, synthetic construct
  misc_feature 1..1821: note = Description of Artificial Sequence: Synthetic coding sequence
  source 1..1821: mol_type = other DNA
atggacagccagcgggagctggccgaggagctgcggctgtaccagtccactttgctgcaggacggcctcaaggatctcctagatgaaaagaaatttatcgattgcaccctcaaagccggtgataaaagtctcccttgtcacagactgatcctgagcgcatgctccccttacttccgcgaatacttcctgagtgaaatagatgaggctaagaaaaaagaggtggtgttggacaatgtcgacccggccatccttgatctgattattaaatatctatacagcgcctctatcgacttgaatgacggcaacgtgcaggacatcttcgcattggcttcccggtttcagatcccctcagtattcactgtatgcgtctcctacctccaaaagcggctggcccccggtaactgtctcgcaatcctgcgactgggtcttctgctggactgtccaaggctcgcaatatcggcccgggaattcgtgtcagatcggttcgtgcaaatctgcaaggaggaggacttcatgcagttatctccgcaagagctcatttctgtgatcagcaatgatagcctgaacgttgaaaaagaggaagccgtgttcgaggcagtgatgaagtgggtgcgcaccgataaggagaatcgcgtcaaaaacctttcagaagtgttcgactgcattagattccggttaatgactgaaaagtatttcaaagaccacgtggaaaaggacgacattataaagagcaatcccgacctgcagaaaaagattaaagtactgaaagacgcctttgcgggaaaacttcctgagcctagtaagaacgctgcaaaaaccggggcaggggaggtcaatggcgatgtgggagacgaagatttactgcccgggtacctgaacgacatccctcgccatgggatgttcgtgaaagacctgatattgctggtgaatgacacagctgccgtggcttacgatccgacggagaacgaatgctatctcacagccctcgcagagcagatcccacgtaaccactctagtatcgtgacacagcagaaccagatttacgtcgtgggcgggctgtatgttgacgaggaaaataaagaccagccactgcaatcctacttcttccagttggatagcatagcctcggagtgggtgggtctgccaccgcttccatctgcacggtgcctgttcgggctcggcgaggtggatgacaagatctatgtggtggccggcaaagatctgcaaaccgaagcttcactggattccgtgctgtgttacgacccagtcgccgccaaatggaacgaggtgaagaaacttcctatcaaagtgtacggacacaacgtgatctcgcacaagggcatgatttattgcctcggagggaagacagatgacaaaaagtgcacaaaccgcgtgttcattttcaatccaaagaaaggcgactggaaggacctggcaccaatgaagataccccgcagcatgtttggggtcgccgtccataaaggtaagatcgttatcgccgggggtgttaccgaggacggattaagcgccagtgtcgaagccttcgatctgaccactaacaagtgggacgtgatgaccgagttcccccaggaacgatcttctatctcgttagttagtcttgcaggctccctgtatgccattgggggctttgccatgattcagctagagtcaaaagagtttgctccaaccgaagtgaacgatatttggaagtacgaggatgataagaaggagtgggcaggaatgctgaaagaaattaggtatgcctccggggcctcctgtctggctacccgcctgaatttgttcaaactgtctaagctgtag

SEQ ID NO: 192201 - DNA, 1377 bp, synthetic construct
  misc_feature 1..1377: note = Description of Artificial Sequence: Synthetic coding sequence
  source 1..1377: mol_type = other DNA
atggcccggggcccccagaccctggtgcaggtgtgggtgggcggccagttgtttcaggcagaccgggcactgctggtcgaacactgcgggttcttccgcggtcttttcagatctggcatgagagaaacccgggcagctgaggtgcgcctgggagtgttgagcgcaggcggattcagagccacactgcaggtcctgcgaggagaccgccccgcgctagctgccgaagatgagcttcttcaggccgtggaatgcgcagcgtttctacaggcgccggccctggccaggtttctcgagcacaatctcacatccgataactgcgcccttctctgtgacgctgcagcagcgttcgggctcagggacgtgtttcatagcgccgccttgtttatatgcgatggcgaacgcgagctggccgcagagctggccttaccagaggcacgtgcctatgttgccgccctcaggccgagtagttatgcagccgtctccacccataccccagctcccggattcctggaagatgctagtcggactctgtgttatctggatgaggaagaggatgcttggcggactctggccgccttacctctggaagctagtacactgttagccggtgtagctacactgggcaataagctgtatattgtgggtggcgtgcgtggggctagtaaggaagtcgtagaactggggttttgctacgaccctgatggcggcacctggcacgagttcccatcgccccaccagccgaggtacgatacggccctcgctggcttcgatggtcgactttacgcaattggcggcgagttccagaggactcccatcagttctgtcgaacgctacgaccctgccgcagggtgttggagctttgttgcagatctgccacaacccgcagccggagtgccctgtgcacaagcctgcggccgcctttttgtatgcttgtggcgacctgcagacaccacagctgtggtggaatacgccgtaagaaccgatgcttggctgcccgtggcggagctccgaaggccacagtcgtatggacactgcatggtggcacaccgggattcattgtacgtggtaagaaacggtccaagcgatgattttctgcattgcgccattgattgtctcaacctcgccactggtcagtggaccgctctgcctggccaattcgtgaacagtaaaggcgcacttttcaccgctgtggtacgaggcgacacggtgtacaccgtaaacaggatgtttacccttctatacgctattgagggcgggacttggcggttactgcgagagaaagcgggctttcccagacccggctctcttcagacctttctgctccgattaccccccggtgcgcctggccccgtcacctccaccactgctgaattgtag

SEQ ID NO: 192202 - DNA, 2247 bp, synthetic construct
  misc_feature 1..2247: note = Description of Artificial Sequence: Synthetic coding sequence
  source 1..2247: mol_type = other DNA
atgagcggcagcggccggaaggacttcgacgtgaagcacatcctgcggctgagatggaaattgttctcccatccatctcccagcaccggtggaccagccgggggcggatgccttcagcaggatggctctggctcctttgagcattggggccctagccagtctaggcttctcaaatctcaggaacgcagcggcgtgtccacattttggaagaagcctagttcttcttcgagctctagctccagtccctctagctcatcctcctcgttcaaccctctgaacggtaccctgctccccgtggccactcggttgcagcagggagcccctggccagggtacccagcagcccgcacgaacattattttacgtagagtcattggaggaggaggtggtcccaggaatggattttcctggtccacacgagaaaggtctcgtgctgcaggaactaaaggttgaaccagacaatagcagtcaggccaccggagagggatgcgggcacagactgtctagcaccggacacagtatgactccacagtcagacctggatagctcatcctcggaggagttttatcaggctgtgcaccacgcggaacagaccttccgaaagatggagagttacctgaagcaacaacagttatgtgatgtaatcctgatagtagggaacaggaagatccctgcccaccggctggttctcagtagtgtgtccgattattttgcagctatgttcacgtcagatgtttgcgaagccaagcaagaagagataaaaatggaaggcatcgaccccaacgctctatgggatttggtgcagtttgcgtataccggctgcttagagcttaaggaagatacgatcgagaatcttctcgcggcggcttgtcttctccagctcccgcaggttgtggaggtctgttgtcacttcctgatgaagttactccacccaagcaactgcctgggcattcgcgcattcgcagatgctcaaggatgcatcgagctgatgaaagttgcccacagctacaccatggaaaatattatggaggtaatcaggaatcaggagtttctgttgctacccgccgaggaactgcacaagctgctggcctccgacgacgtgaacgtccctgatgaagagactatttttcacgcccttatgatgtgggtgaaatacgatatgcagtcccgttgtaacgacctgagcatgctgctagctttcattcgcctgcctttgctgccgcctcaaattctcgccgaccttgaaaatcacgccctattcaaaaatgacctcgagtgtcagaaactgattcttgaagcaatgaaatatcatctccttcccgaaaggagaacgctaatgcagtccccacggacaaaaccccggaaatcgaccgtaggcacactctacgccgttggcggaatggataataacaaaggcgccactactattgaaaagtatgacttacgaacaaacctttggatccaggccggcatgatgaacggaaggaggctacagttcggcgttgctgtgattgatgacaagcttttcgtcatcggcggtcgggatgggctgaaaacactgaatacagtcgaatgctataatcctaagactaagacatggaccgtgctcccacccatgtccacccataggcacggactgggtgtcaccgtcttagaagggccaatctacgccgtgggcgggcatgacggatggtcatatttaaatactgttgaaaggtgggacccccagtcccaacaatggactttcgtggcatcaatgtctatcgcccgatcaactgtgggagtagctgccctcaatggaaagctgtatagtgtgggtgggcgtgacgggagctcctgtctgtcatctatggagtattacgacccacacacgaacaagtggaatatgtgtgcgccgatgtgtaagcgaagaggtggcgtcggcgtggcgacttgcgatgggtttctgtacgcagtagggggccatgacgcacccgccagtaaccattgttcccggctcctcgattatgtagaaagatatgacccgaagacggatacctggacaatggtggcccctctctccatgcctagggacgcagtcggcgtttgcttgctgggggacaggttgtacgctgtgggcggctatgatggccagacctatctaaacaccatggagagctacgacccacagaccaatgagtggacccagatggcgtcccttaacatcggccgagcaggagcctgtgtggtggtcatcaagcagccttag

SEQ ID NO: 192203 - DNA, 1668 bp, synthetic construct
  misc_feature 1..1668: note = Description of Artificial Sequence: Synthetic coding sequence
  source 1..1668: mol_type = other DNA
atggacttccccggcccccacgagaagggcctggtgctgcaggagctaaaagtggaaccagataactctagccaagcgactggtgagggctgcggtcataggttagtcctttctagcgtatctgactactttgccgcaatgttcaccagcgatgtctgcgaagctaaacaggaggagattaaaatggagggaatcgacccaaatgccctatgggatctggtacaattcgcctacactggctgtttagagcttaaggaggatacaatcgaaaatctgcttgcagctgcatgtctcctgcagctgccacaagtggtagaagtctgctgccattttctgatgaagttgctgcacccttcaaactgcctgggcattagagcatttgccgacgcccaggggtgcattgagctgatgaaggttgctcattcatatactatggaaaatatcatggaggtaataaggaaccaagagtttcttctcctccccgcggaggaattacacaagctgctggcctcagatgatgttaacgtgcccgacgaggagaccattttccacgccttgatgatgtgggtgaaatatgacatgcagtcaagatgcaatgatttgtctatgttactggcattcatacgcttgccactcctcccccctcagattttggccgacttagagaatcacgctctctttaaaaatgacctcgaatgccagaagctaatcctggaggctatgaagtatcatttgctgccggaaagaagaacgctcatgcagtctccccggacaaaaccccgcaagtccaccgtgggaaccctctatgctgtagggggaatggataacaataagggcgccaccacaatagagaaatacgatctcagaaccaacctgtggatccaggccgggatgatgaacggacggcgtctgcagttcggtgtcgccgtcattgatgacaagctcttcgtcatcggaggaagagatgggctgaagacactgaataccgttgagtgctacaatcctaaaacaaagacgtggaccgttctcccgcctatgagtacccatagacacggcctgggtgtcactgtactcgagggacctatctatgccgtcggcggacatgacgggtggtcttatttaaacacggtggaaaggtgggatccacagagccaacaatggacgtttgttgctagcatgagtattgctagatccacggtgggtgtcgccgccctgaatggcaaactgtactcagtaggcggtagggatgggagctcttgtttatcctccatggagtattacgatccgcacactaacaaatggaacatgtgcgcccctatgtgcaaacgaaggggcggcgtgggtgtcgctacttgtgatggattcctctatgccgtgggcggccatgatgctcccgcttccaaccactgcagtagactcctggattatgtcgaaagatatgatccgaagacagatacatggacgatggtagctcccctgtcgatgcccagggacgctgttggcgtgtgcctgctgggcgatcggctctacgccgtggggggatacgacggtcaaacctatttgaatacaatggagagctacgaccctcagactaacgaatggactcagatggcatccctcaatattgggcgggctggcgcttgcgttgtagtgataaagcagccgtag

SEQ ID NO: 192204 - DNA, 1167 bp, synthetic construct
  misc_feature 1..1167: note = Description of Artificial Sequence: Synthetic coding sequence
  source 1..1167: mol_type = other DNA
atgagccggagcggcgaccggaccagcaccttcgaccccagccacagcgacaatctgctgcacggcctgaatctcctatggcgcaaacaactcttctgcgacgtaacactgacggcccaggggcagcagttccattgtcataaggcggtgttagcctcctgtagccagtatttcaggagtctattctcatcacatccacctctgggggggggggtgggaggacaggacggtctcggtgctccaaaggaccagcagcagcctccccagcagcagccctcacaacaacagcagccaccacctcaagaggagcccggtaccccatccagctctccagatgacaagctgctcacctcccctcgggcgatcaataatctggtcctccagggatgtagttccatcgggcttcgcttggttctggaatacctgtatactgccaacgttaccctctccctggatactgttgaagaagtcctgtctgtgtcaaagatacttcatattccgcaggttactaagctttgtgtacagtttcttaatgaccaaatcagtgtccagaattacaagcaggtttgcaagattgcagctctgcatgggttagaggagacaaagaagttagctaataaatatctcgtggaggacgtgcttctgcttaacttcgaggaaatgcgcgcgctgcttgactcactgcccccaccggtggaatcggaactggcgttatttcaaatgagcgtactgtggctggaacatgatagggagactcggatgcagtacgcacccgacctcatgaaaagactgcgcttcgcactgatcccagcaccggagcttgtggagcgtgtacagagcgtggatttcatgcgcaccgacccagtttgtcagaaactacttctggacgctatgaattatcacctgatgccttttcgccagcactgccgccagagtctcgcatcacgcatccgatccaacaaaaagatgctccttcttgtcggtggcttaccccccggcccggatcgcctccccagcaatctggtccagtattacgacgatgagaaaaagacctggaagattcttaccattacaggcccacatccaatttctggcaagcaagaaagcgcatcttcccctgaattccgtcgccgcaagacacgggagttttctaacaataccatgtag

SEQ ID NO: 192205 - DNA, 1887 bp, synthetic construct
  misc_feature 1..1887: note = Description of Artificial Sequence: Synthetic coding sequence
  source 1..1887: mol_type = other DNA
atgagccggagcggcgaccggaccagcaccttcgaccccagccactcagataacctccttcacggactcaatcttctatggaggaaacagctcttttgtgatgtaactctcacagctcaggggcaacagtttcattgccataaggcagtactcgctagctgctcccagtactttaggtccctcttcagcagtcaccctcccttaggtggtggagtagggggacaggatggcctcggagccccgaaagaccagcagcaacctccccaacaacagccaagccagcagcagcagcctcctccccaggaagaaccggggacacccagctccagccccgacgataaactgttgacctctccccgagccatcaacaacctagttctacaggggtgtagcagtattggtctacgcttagtgttggagtacctctatacggccaatgtgaccttgtctctggacactgtggaagaggttttgagcgtgtctaagatcctgcacatcccccaggtcaccaagctttgcgtccagtttctgaacgaccagatttctgtacagaactacaaacaggtgtgtaagattgcggccctgcacgggctggaggaaacgaagaaactagctaataagtacctggtggaggacgttctgcttctgaatttcgaggagatgcgggccttacttgacagtctaccacccccggtggaatcggaactggcactgtttcagatgtcagtcctctggttagagcacgatagagaaacccggatgcaatatgccccagacctgatgaaaaggctcagatttgcccttatccccgcacccgagctcgttgagagagttcagtccgtagatttcatgaggacagatccagtgtgccaaaagcttctgctagatgctatgaactatcatcttatgccatttcgacagcattgcagacagagcctcgctagccggatcagatctaacaaaaaaatgcttctcctggtaggggggctgccacccgggcctgaccgattgccctctaacctggtgcagtactatgatgacgaaaaaaaaacatggaagatcctcaccatcatgccatacaactccgcccaccattgcgtcgtggaagtggagaattttctgttcgtgctcggcggcgaggaccagtggaaccctaacggcaagcactccaccaatttcgtgtcccggtacgatcctagatttaactcatggatccagctgcccccgatgcaggagagacgggccagcttctacgcgtgcagattagacaaacacctttatgtcatcgggggccgaaacgagaccgggtacttgtctagtgtggagtgctacaacctcgagacaaatgagtggcgatatgtgtcctcgttgccccagcctctagcggcacacgccggcgctgtgcacaatgggaagatctacatcagtgggggcgtgcacaatggggagtatgtgccctggctttattgttatgaccctgtgatggacgtatgggcgagaaagcaggatatgaataccaaacgcgctatccacaccttagccgttatgaatgatcgcttatatgctattggaggtaaccatctcaaggggttctcacacctcgacgtgatgttggtagagtgttatgatccaaaaggggatcagtggaacattctccagacccccattctggagggccggtctggtccagggtgtgccgtgctggatgattccatctatcttgtgggtggctactcctggagtatgggagcctacaaatcctctactatttgctactgtccagaaaaagggacctggactgagctcgaaggagacgtggccgagcctctcgcgggtccagcctgcgttactgtgattctgccttcatgtgtcccatacaacaagtag

SEQ ID NO: 192206 - DNA, 1794 bp, synthetic construct
  misc_feature 1..1794: note = Description of Artificial Sequence: Synthetic coding sequence
  source 1..1794: mol_type = other DNA
atggtgtggctggaggcccggccccagatcctgttcgtgtgcaccaagcagggacaccagaaacccctcgatagcaaagatgacaataccgagaagcactgccctgtcaccgtgaatccctggcatatgaagaaagcctttaaggtgatgaacgaattgaggtctcagaacctgttgtgcgacgtaacaatcgtggccgaggacatggagatctccgctcatcgcgtcgtgttagccgcctgttccccctactttcacgcgatgttcactggcgagatgagtgagtctagagccaagcgagtacgcatcaaggaagtggacgggtggactcttaggatgctgatcgactatgtctacacagcagaaattcaggtgaccgaggaaaacgttcaagtcttgttacctgcagcaggcctcctgcagcttcaagacgtcaagaagacctgttgcgaattcctggaatcgcaattgcatccagtcaattgcctgggcattcgggcattcgcagatatgcacgcttgtacggatctcttgaacaaggccaacacgtacgctgagcagcactttgcagatgtggtactgtctgaggaattcctcaatctaggcatcgagcaggtgtgctctctcattagttcagacaaactcactatcagctcagaggaaaaggtttttgaggctgttattgcttgggtgaaccatgataaggatgtgcggcaggaattcatggcaaggctgatggaacacgttcgtctaccgttactgcctcgggaatacttggttcaaagagtcgaggaagaggctttggtcaaaaattcaagcgcctgcaaggattatctgattgaggctatgaagtaccaccttctgcctactgagcaaaggatcctcatgaagtccgtgcgcactagactgcgtacacccatgaacctacccaaactaatggtggtggtgggcggacaggccccgaaggcaatcagatcagtagagtgctacgacttcaaggaggagcggtggcaccaggtggccgaactcccgagccgacgctgcagggcgggcatggtctatatggcggggctcgttttcgccgtgggcggctttaacggtagtctgagagttaggacagtcgactcatatgatcctgttaaggaccagtggacaagcgtcgccaacatgcgggatagacgctctacgttgggggctgctgtgctgaatggacttctgtacgctgtgggcggtttcgatgggagcacagggctgtcctctgtggaggcctataacataaaaagtaatgaatggtttcacgtagcaccaatgaacacacggcgttcctcggtgggagttggagttgtcgggggtctgctatacgcagtgggcggctacgacggggcgagtaggcagtgcctgtccaccgtggaatgttacaatgcgaccaccaacgagtggacatacatagcggaaatgtccacacgcaggtccggtgcgggtgtaggcgtcctcaacaatctcctctatgcggtgggaggccacgacgggcctctggttcgaaagtccgtggaggtctacgaccccaccacgaatgcttggcgacaggtagccgatatgaatatgtgcagaagaaacgccggagtgtgcgccgtgaatggtttgctgtacgtagtgggcggggatgacggcagttgcaacctggcttcggtcgaatattacaacccaacaactgacaaatggaccgtggtgtctagttgtatgtctaccgggcgctcttacgctggggtcacagtgatagacaagcctttatag

SEQ ID NO: 192207 - DNA, 2640 bp, synthetic construct
  misc_feature 1..2640: note = Description of Artificial Sequence: Synthetic coding sequence
  source 1..2640: mol_type = other DNA
atgcggctgcacctgctgctgctgctggccctgtgcggcgccggcactacagccgccgagctctcttactcgttgcgcggcaactggtctatctgtaatggaaatggcagcctcgagttgcctggcgcagttccaggctgtgtgcacagtgccctcttccagcaagggttgatacaggatagctactaccgattcaatgacttaaactaccgctgggtctctctggacaactggacttacagtaaggaattcaagataccctttgaaatctcaaaatggcagaaagtgaatctgattttggaaggagtagacaccgtgtccaagatccttttcaacgaggttacaatcggtgagacggacaatatgtttaatagatacagcttcgacattaccaacgtggtgagagacgtgaatagcatagaactgcgctttcaatctgccgtcctgtacgccgcccagcagagtaaagctcacactcggtaccaggtgcctcccgactgcccacccctggtgcagaagggggaatgccacgtcaacttcgtacggaaagagcagtgttcatttagctgggattggggaccttctttccccacacaaggtatatggaaggacgtgcggatcgaagcctataacatctgccatctgaattactttaccttctcaccaatctatgacaagagtgctcaggagtggaaccttgaaattgagagtaccttcgacgtagtgtcctcgaagccagtcggaggccaagtcatcgtggcaattcccaaactccagacacagcagacctattctattgagttacagcctgggaagagaatagttgaactgttcgtgaacatttcgaaaaacataacagttgaaacctggtggccccatggacacggaaatcagactggatataatatgactgtgctatttgagcttgatggcggcttgaatatcgagaagtcagctaaggtctattttcgaaccgtcgaactgatcgaagaacccattaagggtagccccggtttatccttctacttcaaaataaacggcttccctattttcctaaaagggtctaactggattcctgccgactcattccaagatcgggtgacgtcagaactgctccgcctgctattacagagcgtggtggacgccaacatgaataccttaagagtatggggtgggggaatttatgagcaggacgagttttatgagctctgtgacgaattgggtatcatggtttggcaggattttatgttcgcttgtgccctctatccgactgaccagggctttctcgactctgtgaccgccgaagttgcatatcagattaaaagactgaaatctcacccctcgattattatctggtcaggaaacaatgagaatgaggaagctctcatgatgaactggtaccacatcagctttaccgatcggcctatctacatcaaggactacgtcactctctatgtaaagaatattcgtgagctggttcttgcgggcgacaagagtcggcccttcatcactagctcccccacaaacggcgcggaaacggtggctgaagcatgggtttcacagaacccaaactccaactacttcggcgacgtgcatttctatgactacatctccgattgttggaactggaaggtcttccctaaagcccggttcgcatctgaatatggctatcaaagttggccttccttctctacgctggaaaaagtgagttctactgaggattggtctttcaacagcaagttcagcctgcatagacaacatcatgaggggggcaataaacagatgctgtatcaggcaggactgcacttcaaactaccccagtcaactgacccattgcgcactttcaaggataccatttacttgacacaggtaatgcaggctcagtgcgttaaaacagaaacagagttttatcggcgtagccgcagcgagattgtcgaccagcagggccataccatgggcgccttgtactggcagctgaatgacatttggcaggcgccttcttgggcctcgctggaatatggaggcaagtggaagatgctgcactactttgctcaaaactttttcgcaccacttctgccggtggggttcgagaatgaaaacacattctatatctacggcgtctctgaccttcacagtgactatagtatgaccctttcagtgcgtgtccacacatggtcctctctggaaccagtttgttcaagagtcacagagaggttcgtgatgaaaggaggagaagcagtgtgcctatatgaggagccagtgtccgaactcttacggcggtgcggcaattgtacacgagaaagttgcgtggtcagcttttacttaagcgccgaccacgaactgctctcacctactaattatcatttcctgtcctcaccaaaggaagcagttggactgtgtaaagcgcagattaccgcaattattagtcagcagggagacatcttcgtgtttgaccttgagacttccgcagtggcacccttcgtgtggctcgacgtcgggtccattccggggcggttcagcgataatggatttctgatgacagagaagacacgaactattctgttctatccgtgggaacccactagcaaaaatgaactcgagcagtcctttcatgtgacctccctcacagacatttactag

SEQ ID NO: 192208 - DNA, 1518 bp, synthetic construct
  misc_feature 1..1518: note = Description of Artificial Sequence: Synthetic coding sequence
  source 1..1518: mol_type = other DNA
atgagcgagagccgggccaagcgggtgcggatcaaggaggtggacggctggactctccgcatgttaatcgactatgtatacacagccgaaatacaggtgactgaggaaaacgttcaggtactgcttcccgcagctggactgctccagctgcaggacgtgaaaaaaacctgttgcgagtttctggaatctcagctccaccctgtcaactgtctggggattcgggccttcgcagatatgcatgcgtgtactgacctgctgaacaaagctaatacctacgccgagcagcacttcgctgacgtggtgctctcggaagaattcctgaatttggggatcgaacaggtttgttcattgattagttccgacaaactgactatcagctctgaggaaaaagtgtttgaagccgttatcgcatgggtaaaccatgataaggacgtcagacaagagttcatggcccgcctgatggaacatgtccgtctccccttgttacctcgtgagtaccttgtgcagagggtggaggaggaggcactcgttaaaaattcttccgcgtgcaaggactatctgattgaagccatgaaataccatttgttgcccaccgagcagcggatccttatgaaaagcgtgaggacccgcctaagaacacccatgaacctgcctaaactaatggtagttgtaggcggccaagccccaaaggcgattcggagtgtcgagtgctatgacttcaaggaggaacggtggcatcaggtagccgagttaccgtctagaaggtgtcgggccggaatggtgtatatggctggattagtcttcgccgtcgggggctttaacggctcacttagagtgaggaccgtggatagttacgatccagttaaggatcagtggaccagcgtcgctaatatgagagacaggcggagtaccctaggggccgccgtgctgaatgggctgctgtacgcagtcggcgggttcgatggctctacggggctgagttctgtggaggcttataatattaaatcgaacgagtggtttcacgttgcaccgatgaacacgcggcggagtagcgttggtgtcggggtggtgggcggcctgctgtacgccgtggggggatacgacggcgcctcccgtcagtgtttatcaacggttgaatgttataatgccacaaccaatgagtggacatacattgctgaaatgagtactagaagatctggggccggcgtgggggtgctgaacaacctgttgtatgccgtcggcggccacgatggcccccttgtgcgaaagtctgttgaggtctacgaccctactactaacgcctggcgccaagtcgcggatatgaatatgtgcaggagaaacgcgggagtttgcgcagtcaatggcctgctctacgtggttggtggggacgatggtagttgcaatctggctagcgtcgagtactacaatcccaccaccgacaaatggaccgttgttagctcatgcatgagcaccggtcggagttatgctggggtgaccgtcatagataaacctctatag

SEQ ID NO: 192209 - DNA, 1764 bp, synthetic construct
  misc_feature 1..1764: note = Description of Artificial Sequence: Synthetic coding sequence
  source 1..1764: mol_type = other DNA
atggagggcgagagcgtgaagctgagcagccagaccctgatccaggccggggatgacgaaaagaaccaaagaacgattactgtaaatccggcacacatggggaaagcgttcaaagtgatgaacgaactgcgcagcaagcagctgctttgtgacgtaatgatagtggcggaagacgtggaaatcgaggcacacagggtggtcctcgccgcatgctcgccatacttctgcgccatgttcactggtgatatgtccgagtccaaggccaaaaagatcgaaattaaggatgtcgacgggcagaccctctcaaagttaattgactatatctacacagcagagatcgaagtgaccgaggagaacgtccaggtgttgctccctgcagcttccctgttacagctgatggacgttcgccagaactgctgcgacttcctccaatctcagctgcaccctacaaactgtctaggaataagagcgtttgccgacgtgcatacgtgtactgacctgcttcagcaagctaatgcctacgccgagcagcattttcctgaagtgatgctcggcgaagagttcctaagtttgtcgctcgaccaggtgtgtagcttaatttccagcgacaaacttactgtgtcttctgaggaaaaggtatttgaggctgttatctcatggattaattatgaaaaggaaacaagactcgagcacatggcgaaactgatggagcatgtcagattgccccttttgccgcgagattaccttgtgcagactgtagaggaggaagcccttatcaagaataacaatacctgcaaagacttcctgatcgaggcaatgaagtaccacttgcttccgctggaccagcgcctactgatcaagaatccccggaccaagccaagaacaccggtgagcttgcctaaggtaatgatcgtcgttggagggcaggcacccaaggcaatcagaagcgtagaatgctacgactttgaagaggataggtgggatcagatcgcagaactgccatcaagaaggtgtcgcgctggggtggtgttcatggcgggacatgtctatgcggttggcgggttcaacggctccctgcgcgttcggactgtggatgtgtacgatggagttaaggatcagtggaccagcatcgcttcgatgcaggagcgtaggagcactctcggcgcggctgtgctaaatgacctgctgtatgcagtgggcggctttgatggcagcaccggtctggcctccgtggaagcatacagctataagaccaatgagtggttctttgtcgcccctatgaacacaaggcggtcctctgtcggcgtgggcgtggtggagggtaagctgtacgccgtcggggggtacgacggggcaagtagacagtgtttgagcaccgtagagcagtacaacccggccacaaatgagtggatttacgtggccgatatgtctactcgacggagcggcgccggtgtcggtgtgctgtctggccaactgtacgccacgggcggacacgacgggccgctggtgaggaaatctgtcgaggtttacgatcccgggacaaatacttggaaacaggtagccgatatgaacatgtgcaggcgtaacgctggcgtctgcgccgtgaacgggctgctgtatgttgttggaggagacgatggcagctgcaacctggcctccgtggagtattataaccccgtgactgacaagtggaccttactgcccactaacatgtctactggcaggtcttacgcaggggttgccgtgatccacaaatcactctag

SEQ ID NO: 192210 - DNA, 906 bp, synthetic construct
  misc_feature 1..906: note = Description of Artificial Sequence: Synthetic coding sequence
  source 1..906: mol_type = other DNA
atggagggcgagagcgtgaagctgagcagccagaccctgatccaggcgggagacgatgagaagaaccagaggactatcactgtgaacccagcccacatgggcaaggcctttaaagtgatgaatgagctgcgatccaaacaattgctgtgcgacgtaatgattgtggccgaagacgtggagatcgaggcacaccgagtcgtgctggctgcttgcagcccctatttttgcgcaatgtttacaggtgatatgagcgaatccaaggctaaaaagattgaaataaaggacgtggacggacagacgctctctaaattaatcgattacatttacacagctgagattgaagtaacagaggagaatgtacaagtgctcctgccagccgcctcactgttacagttaatggacgtgaggcaaaactgttgtgattttctgcagtctcagttacaccccaccaattgccttggaatcagagccttcgccgacgtccatacttgcactgacctgctgcagcaggcgaatgcctacgcagaacaacacttccccgaagtgatgctgggtgaggaattcctcagtctgtcgttagatcaggtgtgctctctgatcagttcggataagttaacagtcagcagcgaagaaaaagtttttgaagccgtcatttcatggattaactatgaaaaggagacccggctggaacacatggctaagcttatggagcatgtgcgtctccccctgcttcctcgcgactacctggtgcagaccgtcgaggaggaggcccttatcaagaacaacaacacctgtaaagattttctgatcgaggcaatgaagtaccacctacttccattggaccagagactgttgatcaagaaccctcgaaccaaaccaagaacccctgtgagtctgcccaaatag

SEQ ID NO: 192211 - DNA, 1518 bp, synthetic construct
  misc_feature 1..1518: note = Description of Artificial Sequence: Synthetic coding sequence
  source 1..1518: mol_type = other DNA
atgagcgagagcaaggccaagaagatcgagatcaaggacgtggacgggcagacactcagcaagttgattgactacatctacaccgccgagattgaagtgaccgaggaaaatgtgcaggtgttgctgcctgcagccagtcttctacagctgatggatgtcagacagaattgctgcgatttcctgcagtcccaactgcaccctacaaactgtctcggaattcgagccttcgctgatgtgcacacatgcacagatctgctacagcaggccaatgcttacgctgaacaacacttccctgaagtaatgctgggcgaggaatttcttagcctgagtttggaccaggtgtgcagtttgatttcaagtgacaagctgaccgtttcctccgaggaaaaggttttcgaagcggtgatctcctggataaattacgaaaaggaaactcgcctggaacacatggccaaattgatggaacatgtgcggttgccactgctcccccgtgattacctggttcagacggtcgaggaggaagccctgattaaaaataacaacacttgcaaagatttcctcatagaggccatgaagtatcacctgctgcccctggaccaaaggctactgatcaagaatcctcgcaccaagccaagaacaccggtatcacttcccaaggtgatgatcgtggttggcggacaggctccgaaggcgattcgaagtgttgagtgctacgattttgaagaagatcggtgggatcaaattgccgaacttcccagtagaaggtgtagggcaggcgttgtgttcatggctggccatgtgtacgccgtgggtggttttaatggaagtttacgcgtgcggacagtcgacgtctacgacggcgtgaaggatcagtggacttccatcgccagtatgcaggaacggagaagtaccctcggagcagccgtgctgaatgatctcctgtatgccgtaggcggcttcgacgggtctaccggtctcgcgagtgtcgaagcctatagctataagaccaacgaatggttttttgtggctccaatgaatacccgccgtagctccgtgggggtaggagttgtcgaaggaaaactatacgcggtgggcggctatgatggtgccagccgtcaatgtctgtccactgtggaacagtacaacccagccaccaatgagtggatttacgtagctgatatgtctacacggcggtcaggggctggagtcggagtgctatctggtcagctttacgccacaggcggccacgacggccccctggttcgcaagagcgtcgaagtctacgatcctggaacaaacacttggaagcaggtggccgatatgaatatgtgcaggcgcaatgctggcgtttgtgcagtaaacggattgctgtacgtggttggtggggatgacgggtcatgcaacctggcctccgtagagtactataatccagttacagataagtggacgttgctgccaactaatatgtctaccgggcgctcctacgccggtgtggcagtgatccacaaatccctgtag

SEQ ID NO: 192212 - DNA, 603 bp, synthetic construct
  misc_feature 1..603: note = Description of Artificial Sequence: Synthetic coding sequence
  source 1..603: mol_type = other DNA
atgagccggtgctgcagccggcagcccgcctgctgcagcagctggatgttcggcaggaccgctgtgacttcctgttccctcagctgcatcccacccattgcgtgggcgagcgtccatttacagatgtataccccagccctaacattttgcagccgcccaatgcccacacagcactttcccgaggtcatgttgggcgaagaatttctgtctttgtctctggaccaggtatgtagccttattagcagtgacaaactgactgtgtccagcgaggaaaaggtgtttgaagcagtgatctcctggattaactatgaaaaggagacgcgactggagcacatggccaagctgatggaacatgtgaggctacccttgctgcccagagattacttggtgcagacagttgaagaagaggccttgatcaaaaacaataatacatgcaaagattttctgattgaagcaatgaagtaccatctactcccactggatcaacgactgttgattaagaatccccggactaagcccaggacaccagtgtcactgcccaaaggactcgagtgtctggcggattcttgtaccccacaagtggggatgatgggcctctggtag

SEQ ID NO: 192213 - DNA, 1668 bp, synthetic construct
  misc_feature 1..1668: note = Description of Artificial Sequence: Synthetic coding sequence
  source 1..1668: mol_type = other DNA
atgggcaaggccttcaaggtgatgaacgagctgcggagcaagcagctgctgtgtgatgtaatgatcgtggcagaagatgtagagatagaggcccacagagtcgtgctggcagcttgctctccctatttctgcgctatgtttactggggacatgagcgagtccaaagctaagaagatagagattaaagacgtagatggtcaaacgttgagtaagctgatcgactacatttacaccgccgaaatcgaagtgacggaggagaatgtacaggtgctattgcctgctgcctcacttctgcagcttatggacgtccggcagaactgctgtgacttcctacaatcccagcttcatcctacaaattgcctcggcattagagcttttgccgacgtgcacacctgtactgacctactgcagcaggcaaatgcgtatgccgaacagcatttccccgaggtcatgttgggggaagagtttttgagtctgtctttggaccaggtgtgttccctgattagctctgataaactgactgtcagcagtgaggagaaagtcttcgaggcagtgattagttggatcaactacgagaaagagactcggctcgaacatatggccaagctgatggaacacgtgcggttaccactcctgccacgcgattaccttgtgcagaccgtcgaggaagaggctttgattaagaataacaacacctgtaaagacttcctcatcgaagccatgaaataccacctcctgcctcttgatcaacgccttcttatcaagaatccccgtaccaagcctcgaacccccgtctccctcccaaaagtgatgatagtggtcggagggcaagcaccaaaggccattcgcagcgtagaatgctacgactttgaagaggaccgttgggaccagatcgccgaattaccgagtcggcgctgtagagctggtgtcgtcttcatggcgggacacgtatacgccgtgggaggcttcaatggatccctcagagtgagaacagtggatgtgtacgacggggtgaaagatcagtggacttctatcgcctctatgcaagagcgccgctctacccttggggcagctgtcctgaacgacctgctgtatgccgtcggtggctttgatggcagtacaggactggcgtctgtcgaggcatactcctataagaccaacgagtggttttttgtagcgcccatgaacacaagacgcagttctgtgggggtgggtgttgtggagggaaagctatacgcagttggcggctacgatggcgccagtagacaatgtctgtccaccgtagaacagtataacccggccacaaacgaatggatttacgtggcagatatgagtacaagaagaagtggcgcgggagtaggagtcctcagcggtcaactctatgctaccggagggcacgacggcccccttgtccgtaagtcagtcgaggtctacgaccctggcaccaatacctggaagcaggtcgcagacatgaacatgtgcagaagaaatgcaggtgtgtgcgcggtgaacgggctcctttacgtggtggggggcgatgatggaagctgcaatcttgcatccgttgaatactataaccctgtcacggataagtggacattactgcccactaacatgtctactggacggtcatacgctggggttgcagtcatccacaagagcctgtag

SEQ ID NO: 192214 - DNA, 1905 bp, synthetic construct
  misc_feature 1..1905: note = Description of Artificial Sequence: Synthetic coding sequence
  source 1..1905: mol_type = other DNA
atggcccccaagaagaagatcgtgaagaagaacaagggcgacatcaacgagatgaccataatagttgaggactcccccctcaataagctgaacgcactgaacggacttctagaggggggtaacggcctgtcttgcatctctagtgagctgacggacgcatcctacggcccaaatctgctcgaaggccttagcaagatgcggcaggagaattttctgtgcgacttagtcatcggaacgaagaccaagtccttcgatgtgcataaatccgtcatggcctcgtgcagtgaatatttttataatattcttaaaaaagacccctctatccaaagggtggacctgaatgacatcagtccactcggactggcaaccgtaatagcatacgcctatacggggaaattaaccctctctctgtacaccatcggatctattatatccgctgccgtttacctccagattcatacgctcgtcaagatgtgttcggattttctgattagggaaatgtcagtcgagaactgcatgtatgttgtgaacattgctgaaacttactcattgaaaaacgctaaagctgctgctcagaaattcattcgtgataactttttagagttcgcggaatccgaccagtttatgaagttgacatttgagcaaattaatgagctgctcatcgacgatgatctccagctcccatcggaaattgtggctttccaaatcgctatgaagtggctggagttcgatcagaagagggtgaaatatgcggcggacctgttgtctaatattagatttggcacgatctcggcacaggacctcgtcaattacgtccagagtgtcccccgaatgatgcaggatgctgattgccataggttgctggtcgacgccatgaactatcacttactcccttaccaccagaataccctgcagtctcgaagaacccgtattcgagggggatgcagggtgcttgtcaccgtgggcgggaggcctggactcaccgaaaagtcgttgtctcgagatatcctttacagagaccctgagaacggctggtcaaaactgacagaaatgcccgcaaagtctttcaaccagtgtgttgccgtgatggacggttttttgtacgtggccggcggggaggatcagaatgacgctcgaaatcaggccaagcatgccgtatccaacttttgcagatacgacccacggtttaacacctggattcacctagcgtcgatgaaccagaagaggacccacttcagcttgtccgtgttcaacgggctggtttacgcagccggtggtcgaaatgcagaagggagccttgcttccctggagtgttacgtgccctccaccaatcaatggcagcccaaaactcccctggaagttgctaggtgctgccacgcttcggccgtagcagacggcagggtcttagtcactggcgggtacatagccaatgcctacagccgatcagtgtgtgcatatgatccggcaagcgattcctggcaggagctgcccaatttgagtacgccccgagggtggcattgtgccgtgaccctctcagatcgggtatacgtcatgggcggttctcagcttgggcccagaggcgagagagtggacgtacttacggttgagtgctattcgccggccacaggccagtggagctacgctgcacctctccaggtaggagtatccaccgccggagtttccgctctgcacggcagggcttacctggtggggggctggaatgagggagagaagaagtataagaagtgtatccaatgcttctcccccgaacttaacgagtggaccgaggacgacgaactgcccgaggctacagttggagtgagctgctgtaccctgagtatgccaaacaatgtcacgagggaaagcagagcatcctccgtgtcttctgtcccagttagcatatag

SEQ ID NO: 192215 - DNA, 1905 bp, synthetic construct
  misc_feature 1..1905: note = Description of Artificial Sequence: Synthetic coding sequence
  source 1..1905: mol_type = other DNA
atggcccccaagaagaagatcgtgaagaagaacaagggcgacatcaatgagatgaccatcattgtcgaggactcccccctgaacaagctaaatgcgctgaacggattgctggagggcgggaatggattgtcttgcatatcttccgaactgaccgatgctagctatggcccaaatttactcgaaggactctctaaaatgcggcaggagaacttcctatgcgacctggtgatcggcaccaagactaagtcctttgatgtgcataaatccgtgatggctagctgctctgaatatttttataacatcttgaaaaaggatccatccattcaaagagtggaccttaacgatataagccccctgggactcgcaacagtgatcgcatatgcctatacaggaaagctgacattatctctgtacaccattggcagtataatcagcgcggcggtgtacctgcaaatacacacactggtgaaaatgtgttcagacttcctgattcgggagatgagcgtagaaaattgcatgtacgtcgtgaatattgctgaaacttattctctcaaaaatgccaaagcagccgcacagaagttcatacgggacaacttcctggaatttgccgaatcagatcagtttatgaagctgacattcgaacaaatcaatgaactcctaattgatgatgacctgcaactgccctctgaaattgtggcattccagatcgctatgaagtggttagagtttgatcagaagcgcgttaaatatgccgccgatcttttgagcaatatccgcttcggaaccatctctgcacaggacctggtgaattatgtgcagagcgtgcccagaatgatgcaagacgctgactgccaccgtctgttagttgatgccatgaattaccacctgttgccgtatcaccagaataccctccaatctaggaggaccagaatcagaggcgggtgtagagtcctcgttacagtgggaggcaggcccgggctcactgaaaaaagtctgtccagagatattctgtaccgggaccccgaaaatggatggagtaagttgactgaaatgccagccaaatcatttaatcagtgtgtggccgttatggatggctttctgtacgtggctgggggggaagatcaaaacgatgctaggaaccaggccaaacacgctgtgagtaatttttgcaggtatgatcccaggtttaacacctggatccatctcgccagcatgaatcagaagcggacccatttctccctgtcagtatttaatggcctggtttatgccgcagggggacgaaatgctgaagggtccctcgctagcctggagtgttacgtcccttcaactaaccagtggcagcccaaaacacctttagaggtggctcggtgttgccacgcctctgcggtcgctgacggaagagtcttagtgacaggggggtatatcgccaatgcttatagcagatccgtctgcgcatatgatcctgctagcgatagctggcaggaactgcccaacttaagcacccccagaggatggcattgcgcagtgacactctccgatcgggtctatgtgatgggcgggtcccagcttggtccacgcggggaacgggtggatgtgctgacagtcgaatgctactctcctgcaactggccagtggagctatgctgcccctctgcaggtgggtgtgtccactgcaggtgtttccgcgctgcatggccgtgcgtatctcgtgggaggctggaacgaaggcgaaaagaagtataagaaatgtattcagtgtttcagccctgaattgaacgagtggacagaggacgatgaattgccagaagctaccgttggcgtatcgtgctgtacgctttcgatgcctaacaatgtgactagagagtcccgtgcgtccagcgtgagctctgtgcctgtgtcaatttag

SEQ ID NO: 192216 - DNA, 2313 bp, synthetic construct
  misc_feature 1..2313: note = Description of Artificial Sequence: Synthetic coding sequence
  source 1..2313: mol_type = other DNA
atgaacgtgatctacttccccctgcacatcttcgtggtgtacagccgggcctacacgtcacttgttctggtggggtgcacaaatttatgcgcagtgctgttcgcaagatgtctcgacgatcacctggtcagcttgagaatgtccggatccaggaaagaattcgatgtgaagcagattttgaaaattcgctggcgctggttcggacatcaggcctcatctccaaatagcactgtggattctcagcaaggggagttctggaaccggggtcagacaggcgccaatggcggcagaaagtttctggatccttgtagtctgcagctgcctctggcctccatcggatacagacggtcttcccagcttgatttccagaatagcccctcttggcccatggcatcgacttcagaagttccagccttcgagtttacggctgaagattgtggaggcgctcattggctggaccgcccagaggtcgacgatggaacttcagaggaagaaaacgagtctgacagcagttcctgtcgaacaagcaactcatctcagaccctcagcagttgccacactatggaaccctgtacttctgatgaattctttcaggccctcaaccatgccgaacagacgtttaaaaaaatggaaaattacctacgtcacaagcagctttgcgacgttatcctggttgcgggcgatcgccggatccctgctcatcggttggtgttgtcaagtgtgtctgattactttgctgctatgttcacaaacgacgttagggaggctcggcaggaggagattaagatggagggggtggagccaaactccctatggtccctaatccagtacgcctacaccggaagactcgagctgaaggaagacaatatcgagtgcctgttgtctaccgcttgtctgctccagctcagccaggtcgtggaggcatgctgcaaattcttgatgaaacagttgcaccccagcaattgtttgggcatcaggtccttcgcagatgcccagggctgtacggatcttcacaaggtggctcacaattatacaatggaacattttatggaggtcataaggaatcaggagtttgtgctgctgccagcatcggagattgctaagttactggcgtccgacgacatgaatataccaaatgaggaaactatcttaaatgcattgctgacatgggtgcggcacgatttggaacagcggaggaaggatctctccaagctcctggcatatattaggctgcccctgctggcgcctcagtttctcgctgatatggaaaataacgttttgttccgtgatgacattgaatgccagaaacttatcatggaagccatgaaataccacctcctccctgagaggaggcctatgttgcagtcccctcgtacaaaaccacgcaaatcaaccgtcggaaccctctttgctgtggggggcatggattcaactaagggagcaaccagcatcgagaagtacgacctcagaaccaatatgtggacgccggtggctaacatgaatggccgaaggcttcagttcggagtcgccgtcctggatgacaagctgtacgtggttggcggccgggatggactgaaaactttaaatacagttgagtgctataatccaaaaaccaaaacttggagcgtgatgccccccatgtcaactcatagacacggattgggagtcgccgtgctggaggggccaatgtatgcggtcggcggtcacgacggttggtcttacctcaatacggtggagaggtgggacccacaggctaggcaatggaactttgtggccacaatgagtacaccacggtccaccgttggagtcgccgttctttcggggaaactctacgctgtgggaggtcgcgacggtagctcttgtctaaaaagtgtagaatgtttcgatccccacacaaacaagtggaccctgtgtgcccagatgtccaaacgcagaggcggagtcggggtgacaacgtggaatggtctgctgtacgccattggaggtcacgatgctccagcatcaaatcttacttctcggcttagtgactgtgtggagcgctacgaccctaagacagatatgtggaccgctgtagcatcaatgtctatttctcgcgatgcagtgggcgtgtgcctgttaggcgataaattgtacgccgtgggtggatatgacggccaggcctacttaaataccgtggaggcctacgacccccaaaccaacgagtggacacaggtattctcccatacctttgaagacagcaaagaccacctcgtcgccatcaagcagacaatttggcgccaaaactctctcagcgaggaattccgttctcactag

SEQ ID NO: 192217 - DNA, 2274 bp, synthetic construct
  misc_feature 1..2274: note = Description of Artificial Sequence: Synthetic coding sequence
  source 1..2274: mol_type = other DNA
atgaacgtgatctacttccccctgcacatcttcgtggtgtacagcagggcgtacacatctttggtgttagtgggctgcaccaatttgtgcgccgttctcttcgccagatgtctggacgaccacttggtatcccttagaatgtcaggttcgcggaaagagttcgacgtgaaacagatcctgaagatacgttggcgatggtttggacaccaagcttcaagtcctaattccacagtggacagccaacagggcgaattttggaaccgcggacagacaggcgctaatggtggcaggaaatttcttgacccttgtagcctgcagctgccgctggcctccatagggtaccggagatcttctcagttagattttcagaactccccctcctggccaatggcgtccacaagcgaagttcccgcttttgaatttactgctgaagactgtggaggcgcccattggctggatagacccgaagtcgatgacggtacttcagaggaagaaaacgagtctgactcctcttcatgccgcacctccaacagcagccagaccctgtcaagctgccacactatggagccgtgtacctccgatgaatttttccaggctctcaaccacgcagagcagaccttcaaaaagatggagaactatctgagacacaaacagttatgcgatgtgatattggtcgccggcgatcggagaatccccgcacacagattagtcctgagttccgtcagtgactactttgcagccatgtttacaaacgatgtgcgggaagcccgacaggaggagattaagatggagggcgttgagccaaatagcctgtggagcttaatacagtatgcctataccgggcgcctggagctgaaggaggacaatatcgaatgcctactgtcaaccgcatgtttgctgcaactgagccaggtcgtggaggcttgttgcaagtttctcatgaaacagcttcatccctccaattgccttggcattagatctttcgccgatgcacagggttgcactgacctgcataaggtggcccataactataccatggagcactttatggaagttatccggaaccaggagttcgtgttgctgccagcctccgagatcgccaagctcctggcttctgacgacatgaacatcccaaatgaggaaacaatcctgaacgccctcctgacttgggtgagacatgacctggaacagcgccgtaaagatctctcaaaattattggcctacatccggctccctctcttggcaccacagttcttagcggacatggaaaataatgtgttattccgcgatgacatcgagtgtcagaagttgatcatggaggccatgaagtaccatcttctcccagagcgcaggccgatgctgcaaagcccaagaaccaagccccgcaaaagtactgtgggaaccttgtttgctgtcggcggcatggactcaacaaagggggccacgtccatcgagaagtatgacttgcggactaacatgtggacacctgtggctaatatgaacggaaggcgtttacagtttggcgtggccgtactcgacgataaactgtacgtggtcggaggccgagacggcctcaagaccctaaataccgtggaatgctataatcctaagaccaagacatggagcgtcatgccaccaatgtctacgcaccgccatgggctgggggtggccgttctggaaggacccatgtacgccgttggaggacatgacgggtggtcgtatctgaacacagtcgagcggtgggatccacaggcccgacagtggaattttgtggcaactatgagcactccacgctctacggtgggagtggccgtgctatccgggaagctgtacgccgtaggagggcgcgacgggagtagctgtctcaagagcgttgaatgctttgatccccacactaataaatggacactatgtgcgcaaatgtcaaaacgcagagggggggtgggggtcaccacatggaacggtctcctctacgccataggcgggcacgacgcgcctgcatctaatctaacatccagattgagtgactgcgtggaaagatacgatccaaaaaccgacatgtggactgctgtggcatcaatgtccatctcacgcgatgcagtgggggtgtgcttgctgggagacaagctctacgccgtaggcggctatgacggccaggcctatctgaatacagtcgaggcgtacgatccacagacaaatgaatggacacaggtttggcactcttgttttatcatcacgctgaccctttttctccttaaacagttcctctggtag

SEQ ID NO: 192218 - DNA, 2268 bp, synthetic construct
  misc_feature 1..2268: note = Description of Artificial Sequence: Synthetic coding sequence
  source 1..2268: mol_type = other DNA
atgaacgtgatctacttccccctgcacatcttcgtggtgtacagccgcgcctacacaagcctggttttagtaggatgtactaatctgtgcgcagtcttgttcgccagatgcctggatgatcacttagtttctctgcgaatgagcggaagccgcaaggagtttgacgtgaaacagatcctgaaaataaggtggagatggtttgggcaccaggccagcagtcccaacagtacagttgacagtcagcaaggcgagttctggaacagaggtcagactggggccaatgggggccgcaagtttctcgatccctgcagcctgcagctgcctttggcatccattggctataggcgctcctctcagctcgatttccagaatagtccctcatggcctatggcttcgacatctgaagtacccgctttcgagtttactgcagaggattgcggcggagcacattggctagatcggcccgaggtcgacgacggaacatcagaagaggaaaatgagtccgacagcagttcctgcaggacatctaactccagccagaccttgagttcatgccacacaatggagccttgtactagcgacgagttctttcaggccctcaatcacgctgaacagacgtttaaaaagatggagaattacctgagacacaaacagctgtgtgacgtgattcttgtcgccggcgatcgacggataccagcccaccgcctcgtgttaagctctgtgtctgactactttgctgcaatgtttacgaacgacgtgagggaagcccgccaggaggagataaagatggagggagtagaacccaatagtctgtggagcctgattcagtacgcctatacaggaaggctcgagctaaaggaagataacattgagtgcctgttgtccacagcctgtctgttgcagctgagccaggtggttgaggcctgctgcaaattcctaatgaagcaactgcacccctccaactgcctgggcatcaggtcctttgctgacgcacaaggctgcactgacctgcacaaggtggcccataattacacaatggagcattttatggaggtcatccgaaatcaggagttcgtattgcttccggcatccgagatagctaaactactcgcttccgatgatatgaatatccctaatgaggagacaatcctgaatgcacttttaacttgggtgagacacgacctcgaacagaggagaaaggacctgtccaaacttctggcatatattcgcttgcctttgttagctccacagttcttggccgacatggaaaataatgttctcttccgtgacgatattgagtgtcaaaaactcatcatggaagcaatgaagtaccacctgcttcctgaacggcggccgatgctccagagcccaaggaccaagcctcgcaagagtactgtgggcactttgtttgccgttggtggaatggatagcactaagggagccaccagtatcgagaagtatgatctccggacaaatatgtggaccccagtcgccaatatgaacggaagacggctccaatttggagtggccgtgctcgacgataagctgtacgtggtgggtggccgtgacggcctcaaaactctcaatacagtggagtgctataatcctaaaacaaagacatggagtgtgatgccccccatgtcaacacacaggcacggtttgggagtcgctgtcttggaaggacccatgtatgctgtgggggggcatgacggctggtcgtacctcaacacagtggagcgctgggaccctcaggcacgccaatggaacttcgtggccaccatgagcacacctcggtccaccgtgggagtggccgtactgagcggaaaactatacgcagtcggcggccgcgacggctcaagttgcctcaaaagtgtcgagtgttttgatccccacaccaacaaatggaccctgtgtgcacagatgtccaaacggcgcggtggggtgggagtcaccacctggaatgggttgctatacgcgatcggaggccatgacgcccctgcatctaatctgacctcccgcctaagtgactgtgttgagcgatatgatcccaagaccgatatgtggaccgccgtagcatctatgtccatttctcgcgacgcagtcggtgtatgtcttttgggcgataaattatatgccgttggtgggtacgatgggcaggcgtacctcaataccgtggaggcctacgatcctcagaccaatgagtggacccaagtcgcgccactgtgcctgggcagagctggagcctgtgtggtcaccgtgaaattgtag

SEQ ID NO: 192219 - DNA, 849 bp, synthetic construct
  misc_feature 1..849: note = Description of Artificial Sequence: Synthetic coding sequence
  source 1..849: mol_type = other DNA
tgacggaccaacatgtggacccccgtggccaacatgaacggccggagacttcagtttggggtggctgtattggacgacaagctgtatgtcgtcggcggccgggatggtctgaagacactgaacaccgtggaatgctataacccaaagaccaagacgtggagcgtaatgcctcctatgtcaacccaccggcacgggctgggagtggccgtcttggagggacccatgtacgccgtcgggggacatgatgggtggagctatttgaacacggtggaacgttgggacccccaagctcgccagtggaacttcgtggctacgatgtctaccccccggtccaccgtgggcgttgcagtgctttcaggtaaattatacgccgttggtggtagggatgggtcatcctgcttgaagtctgtggagtgttttgacccgcataccaacaagtggacactgtgcgcacagatgagtaaaagacgcggaggggtgggagtcaccacttggaacggcctgctgtacgctatcggtggacatgatgcccccgcatctaacttaacaagtaggttatccgactgtgttgagagatatgaccccaaaacagatatgtggaccgcagtggccagtatgtctatttcacgagacgccgtcggtgtatgccttctgggcgacaagttgtatgctgtgggtgggtatgatggccaggcctacctgaacaccgttgaagcatatgatccgcagaccaacgagtggacacaggttttttcccatactttcgaggacagcaaggaccacttagtagcaataaaacagactatctggagacaaaattccctgtctgaggagttccggtcccattag

SEQ ID NO: 192220 - DNA, 2370 bp, synthetic construct
  misc_feature 1..2370: note = Description of Artificial Sequence: Synthetic coding sequence
  source 1..2370: mol_type = other DNA
atgcggctgcccggccagggcctgggcgcccgggagggccccagcatccctcttagctcccctgctccggcaccagcaagccccgcaccaccggcctggccacccagacctgccgtcacccacgggagattgcggtccccaacccgtagggcgtatacatcgctcgtcctagtgggatgcaccaatctttgcgccgtgcttttcgcacgttgccttgatgaccatttggtgtctctgcggatgtctgggagcaggaaggaatttgacgtgaagcaaatcttgaagatacggtggcgctggttcggtcatcaggccagctcacctaactccacggttgactctcaacaaggagagttctggaaccgcggccagaccggcgctaacgggggaaggaagttcctggatccctgctccttgcaactgcccctggcgtctattgggtacagaagatcttcccagctcgatttccaaaattccccttcctggcccatggcaagcaccagcgaagtgcccgcctttgagttcacagccgaggattgcggcggtgcccactggctggaccgtccagaagtggacgatgggaccagtgaggaagagaatgaaagtgattcctctagctgtcgtaccagtaactcttcccaaaccttatcgtcatgccataccatggaaccatgtacctcggacgagttcttccaagctctaaaccacgcagaacagacattcaaaaaaatggagaactacctgcggcacaagcaactgtgcgatgtgatcctggtggctggggaccgaagaatccctgcacatagactagtgctctcatctgtgtccgactacttcgctgctatgttcaccaacgatgtgcgtgaggccaggcaggaagagattaaaatggagggcgtagaacctaactccttgtggtctctgattcaatacgcgtataccgggcgcctggaattaaaggaagacaacattgagtgcctgctcagcacagcctgtttgctgcaactgagtcaggtagtggaagcatgctgcaagtttctaatgaaacagctgcatccaagcaattgcctcggtatacgctcatttgctgacgcccaaggctgcactgacctgcacaaagtggctcacaactatacaatggaacacttcatggaagtcattcggaaccaagaattcgtgctcctgcctgcatccgaaatcgccaagctgttggccagcgatgacatgaacatccccaacgaggagactattcttaacgcccttctcacctgggtgcggcatgatctggagcagcgcagaaaggacctgtcgaaactcctggcctacatcaggctgcccctgcttgctccacagtttctggccgacatggaaaacaacgtgcttttcagagacgatattgaatgtcaaaagttgattatggaggcaatgaaataccacctcctcccagaacgaagaccgatgctccagtctcctagaacaaagccaagaaagtcaaccgtggggacgttgtttgctgtcggggggatggatagcaccaagggagcaaccagcatcgaaaaatacgacctgcgaacaaatatgtggacccctgtggccaatatgaatggcagacgattgcagtttggcgttgccgtgttggatgataagctctacgtggtgggcggcagagatggactcaagacgctcaacaccgtagagtgctataatccaaagaccaagacatggtcggttatgccccccatgagcactcatcgtcatggacttggcgtggccgtccttgagggcccaatgtatgcggtaggcggccatgatggatggtcctacctcaacacagtagaacgatgggatccccaggctcgccaatggaatttcgtggcaacaatgagcaccccccggtctacggtgggcgttgctgtcctttcaggtaaactctatgctgtgggggggcgcgatggctcctcgtgcctaaagtctgtggagtgcttcgacccgcacaccaacaaatggacattgtgtgcccagatgtccaaacgtcgcggcggtgtcggtgtgacgacctggaacggtttactctacgctatcggcgggcacgatgcgcctgccagcaatctgacctctcggctctcagattgtgttgaaaggtatgacccaaaaactgatatgtggactgcagtggctagcatgagcatatctagggacgccgttggggtgtgtctgctcggagataaactttatgccgtaggcgggtatgatggtcaggcttaccttaacactgtcgaggcctacgacccacaaacaaacgagtggacccaggtggccccgttgtgcctgggaagagcgggagcttgtgttgtgactgtcaagctatag

SEQ ID NO: 192221 - DNA, 1050 bp, synthetic construct
  misc_feature 1..1050: note = Description of Artificial Sequence: Synthetic coding sequence
  source 1..1050: mol_type = other DNA
aagaagcaccccagcaccgtgatggtgccccagttcctggccgacatggagaacaacgtgctgttcagagatgatattgagtgccagaaactgataatggaggccatgaaatatcatctgctgcccgaacgacgacctatgctgcagagccctagaacgaagccacgcaagtctaccgtggggaccctgttcgcagtgggcgggatggacagcacaaaaggcgcgacgtccatcgagaaatacgacttgcgtactaacatgtggaccccggtggcaaacatgaatgggcggaggcttcagttcggggtggcagttctcgatgacaaattgtatgtggtgggcggtagggatgggttgaagacattaaacacagtggaatgttacaaccctaagactaaaacatggtcagtcatgccgcccatgtccacgcacaggcacggtctgggcgtggcagttcttgaaggtcctatgtatgcggtggggggtcacgatggctggtcgtacttgaatacagtagaaagatgggatccccaagccagacaatggaactttgtggcaacaatgtccaccccacgcagcactgttggtgtagcggtactgtctggcaagctgtatgctgtcggaggccgggatggtagcagctgcctaaagtctgtggagtgttttgatccccatactaacaaatggactctctgtgctcaaatgagtaaaagacgggggggagtgggggttactacatggaatggcctgctatacgctatagggggccatgacgcacctgcctctaatttgacttcccggctgagtgattgtgtggagcggtacgatcctaaaacggatatgtggacagctgtcgcctcaatgtccatctcccgagacgctgtgggtgtttgtcttttgggtgataagctgtatgctgtcggtggctatgatggccaggcctacttgaacacagtagaggcgtatgacccccagaccaacgagtggacccaagtggctcctctctgcttaggtcgggccggcgcctgcgttgtcactgttaagctgtag

SEQ ID NO: 192222 - DNA, 2130 bp, synthetic construct
  misc_feature 1..2130: note = Description of Artificial Sequence: Synthetic coding sequence
  source 1..2130: mol_type = other DNA
atgagcggcagccggaaggagttcgacgtgaagcagatcctgaagattcggtggcgctggtttggacaccaggcatcctctcccaattctacagtagattctcaacagggggagttctggaacagaggtcaaacaggcgccaacggcgggagaaagttcctcgatccttgttccctccaactccctttggcatccatcggctataggaggtcttctcagctagattttcagaactccccctcttggcctatggcatctactagcgaggttcctgcatttgagttcacagccgaagattgcggaggagcccactggttagatagacctgaggtggacgatggcacaagcgaagaagaaaatgaaagtgactctagcagctgccgtacaagtaacagctcacagacattgtcctcatgccacaccatggaaccatgtaccagcgacgagtttttccaggctttgaatcatgctgagcaaacattcaaaaaaatggaaaattacctccgccataaacagctgtgcgatgtgattttggttgccggcgatcgcaggattcccgcacatcgtcttgttctgtcttctgtctccgattatttcgccgcaatgttcacaaatgacgtgcgagaagccagacaggaggaaattaagatggagggtgtagagcctaacagcctctggtcactgattcagtacgcctatacgggaagactcgagctgaaggaggacaatatcgagtgtttgctgtctaccgcatgcctgctgcagctgagtcaagttgtggaagcctgttgcaagtttttgatgaagcagctccacccaagcaactgtttgggaataaggtcgttcgcagatgcacaaggctgcaccgatttgcataaagtggcccataattatacaatggagcacttcatggaggtgatccgtaaccaggagttcgttcttctgcctgcttctgagatcgccaagcttttggcctccgatgacatgaatatccctaatgaggaaacgattttgaacgctctgctgacttgggtgcgccacgatttagagcagagacggaaagacctgtcaaaactcctagcttatatcagactgcctcttctggctccacagtttttggccgatatggagaataacgtactcttccgcgatgatattgagtgtcagaagctgatcatggaagccatgaagtatcacctcctgccggaaaggaggcccatgttgcaaagcccacggaccaagccacggaagtcaaccgtgggcacactcttcgctgtgggaggaatggattccaccaaaggcgcgacttctatagaaaagtacgatctccgcacaaacatgtggacccctgtcgccaacatgaacggcagacggctccaattcggggtggctgtcctggacgacaaactctatgttgttggggggagagatggcttgaagacgctgaacacagttgagtgctataatcctaagactaagacttggtccgtgatgccaccaatgtccactcacagacacggactcggggtagccgtgctggagggacccatgtacgccgtcggcggtcacgacggctggtcatacctgaatacggttgagcggtgggatccacaggcccgtcagtggaactttgtggctaccatgtctacgcctcgctctaccgtgggagtggccgtgctcagtggcaaactgtatgccgtgggtggcagggatggttcaagctgtttaaaatctgtcgagtgcttcgatcctcacacaaacaagtggaccctgtgcgcccagatgagcaagcgcaggggcggggtcggcgtcaccacctggaacggcctgctgtacgccattgggggacacgatgccccagcatcaaatttgactagtagactttcggattgtgtggaaaggtatgatcccaagaccgatatgtggacggccgtagcctctatgagcatcagcagggacgcagtcggagtatgccttctgggtgataagctgtatgccgtggggggctatgatggacaggcatatctgaacactgtggaggcctacgacccgcaaacgaacgaatggacacaagtggcaccactgtgccttggacgggctggagcctgcgttgtgacagtgaaactttag

SEQ ID NO: 192223 - DNA, 2085 bp, synthetic construct
  misc_feature 1..2085: note = Description of Artificial Sequence: Synthetic coding sequence
  source 1..2085: mol_type = other DNA
atgaacgtgatctacttccccctgcacatcttcgtggtgtacagccgtgcatacacaagtctggtcctggttggctgtacaaatctgtgcgccgtcctgttcgctagatgcttggacgatcacttggtcagcttgagaatgtcagggagcaggaaagagtttgatgtgaagcagattttgaaaatacggtggcggtggttcggccaccaagccagttcaccaaactccaccgtagactcacagcagggagagttttggaatcgggggcagacaggcgccaacggcggtcgaaagttcctcgatccctgttctctgcagctgcctctggcgagcatcggatacagaaggtccagtcagctggattttcagaattcaccctcgtggcctatggcctcaacttctgaagtgccagcattcgaatttacagcagaagactgcggaggggcccattggctggacagacccgaggttgatgacggcactagtgaggaggagaacgagtccgattcgtcttcctgcagactggttttatcctccgttagtgactatttcgctgcaatgttcaccaacgatgtccgggaggcaagacaggaggagatcaaaatggagggggtcgagcctaacagtttgtggagtctcatccaatacgcctacaccggacggcttgagctgaaggaggataacattgagtgcctgctgtctacagcttgtcttttacaactgtctcaggtggttgaagcttgttgcaaattcctgatgaaacagcttcacccctctaattgtctcggaatacgttccttcgccgacgcccaggggtgcactgatttgcacaaggtcgcccacaactataccatggagcacttcatggaggtaatacgaaaccaagaatttgttcttctccctgcgagcgaaattgcgaagttgttggcctctgatgacatgaatatccccaatgaggagacaattctgaacgcactgctgacctgggtgcggcacgatctggagcagcggaggaaggatttgagcaaattgctcgcctacattcggctacctctgttagcaccccagttcttagctgacatggagaacaacgtcctatttcgagatgacatcgagtgtcagaaactcatcatggaggctatgaagtaccatctcctgcccgaacgacgccccatgctccagtcccctagaacaaaaccaagaaagtcaactgtgggtactctgtttgctgttgggggcatggacagtaccaaaggagccacttccatcgagaaatacgatcttagaacgaacatgtggactcccgtagctaacatgaacggtagacggctgcagtttggcgttgctgtactagacgacaagctctacgttgtgggcggtcgagacggtctaaagacactgaatacggtggagtgttacaatcccaagaccaagacatggagcgtcatgccccccatgtccacacaccggcacggtctcggagtggccgtgctggagggtcctatgtacgctgtcggtggacatgacggctggtcttacctgaacaccgtggaacgctgggatccacaggctcggcagtggaactttgtcgccacaatgtccactccaaggtccaccgttggggtcgccgtcctgtcaggcaaactgtatgccgtcggcggtagggacggttcctcgtgtctgaagtcagtggaatgcttcgaccctcatacaaataagtggaccctgtgcgcccagatgtcgaaaaggcgtgggggcgtcggtgttactacatggaacggactcctctacgctattgggggccatgacgcacctgcctcaaatctgacatctagactcagcgactgcgtggaaagatatgaccccaagacagacatgtggactgcagtggcgtccatgtctatcagccgtgatgccgtcggtgtctgtctactgggggacaaactgtatgccgtgggcgggtatgacgggcaagcctatcttaacaccgtcgaggcatatgatcctcagactaacgagtggacccaggttgcacccctttgcctggggcgggccggagcatgcgtggtgacagtcaaactttag

SEQ ID NO: 192224 - DNA, 1707 bp, synthetic construct
  misc_feature 1..1707: note = Description of Artificial Sequence: Synthetic coding sequence
  source 1..1707: mol_type = other DNA
atggagccctgcaccagcgacgagttcttccaggccctgaaccacgctgagcagactttcaaaaaaatggagaattatctgaggcacaagcagctttgtgacgtcatcctcgtggccggcgaccggaggatacccgctcaccgcctggtgttgtcatctgtctcagattacttcgctgccatgttcacaaatgatgtgagagaagcaaggcaggaagagatcaaaatggaaggcgtggagccaaactcactttggtccttgatacaatacgcctatactggtagacttgagctcaaagaggacaatattgagtgtctgctgtcaactgcttgcctgctccagttgtcacaggtagttgaagcatgctgcaagttcctgatgaagcaactgcatccctctaattgtcttggcataagatcttttgccgatgcccaggggtgtacggacctgcacaaggtcgctcacaattataccatggagcattttatggaagttattaggaaccaagaatttgtgttgctgccagcctctgagatcgcgaaactccttgcctcagacgatatgaatatccccaatgaggagaccatattgaacgccttgctgacctgggtgcgccatgatctggagcagagacgaaaggaccttagcaaattgctggcatatatcaggctgcctctgcttgcaccgcagtttctggccgacatggaaaacaacgttctcttccgtgacgatatagagtgccagaagctgataatggaagccatgaagtaccacctgctgcctgagcgcagaccgatgctgcagagccctcgcacgaaaccccggaaatccaccgtcgggactctgtttgccgtgggcgggatggatagtacaaaaggcgcaacgagcatcgagaagtatgacctgcgcactaatatgtggacgcctgttgcaaacatgaacggccgcaggctgcaattcggtgtggccgtgctggacgataagctttacgtggtaggaggcagggatgggctcaagacgctaaacacagttgaatgttataatcccaagacgaaaacctggtccgtgatgcctccgatgtctacacatcggcacggcctcggcgtggctgtgttggaagggccaatgtacgcagtgggtggacacgatggttggtcctacctcaatacggtcgagcgatgggacccccaggctcggcagtggaatttcgtcgccactatgagcacaccccggtctaccgttggcgtcgcagtacttagcggtaagctgtacgccgttggtggtagagacggctcttcttgtcttaaaagtgtagagtgttttgacccccacaccaacaagtggacactatgtgctcagatgagcaaaagacgtggcggtgtaggggtgactacctggaatggactgctatacgctatcggcggacacgacgcccccgcctccaacctgacctctcgcctgtctgattgcgtcgagagatatgacccgaagaccgacatgtggactgcggtcgctagcatgtcgatttcacgcgatgccgtcggagtttgcctacttggtgataagctgtacgcggtaggcggatacgatggtcaagcctatctcaacaccgtggaagcgtacgaccctcagacgaatgaatggacccaggttgcgcccctatgtttgggtagagcaggagcctgtgtcgtaacggtaaagctgtag

SEQ ID NO: 192225 - DNA, 1866 bp, synthetic construct
  misc_feature 1..1866: note = Description of Artificial Sequence: Synthetic coding sequence
  source 1..1866: mol_type = other DNA
atgctgatggccggccagcggggcgcctggaccatgggcgacgtggtggagaaatctttggagggtcctcttgcccctagcacagatgaaccttctcagaagaccggagatttagttgaaatccttaacggggaaaaagtgaaattcgacgatgccgggctttccctgatcctgcagaatggcctggagactttgcgcatggaaaatgccttaacagatgtcatcctgtgcgtcgacatccaggagttttcatgccatcgcgtagtactagccgcagccagcaattactttagagccatgttctgtaacgatcttaaggagaagtacgaaaaacggatcataatcaagggagtggatgcagaaaccatgcacacccttcttgattacacctacacttcgaaggcgcttatcaccaagcagaacgttcagcgcgttctggaggctgctaatctgttccagttcctgcggatggttgacgcctgtgcaagcttcctgaccgaagcattaaatccagagaattgtgtgggcatactccgtctcgcagacacgcactcccttgacagtttgaaaaaacaagtccaaagctacatcatccaaaatttcgtgcagattttaaacagcgaggagtttttggacctaccagtggatactctgcaccacatcttaaagagcgacgacttgtacgtgacagaagaggcacaggtgtttgaaactgtcatgagctgggtgcgacacaaaccatccgagcggctgtgcttgctgccttatgtactggagaacgtgagactgcctctccttgacccatggtactttgtggagaccgtggaggctgaccctctgatcagacaatgccctgaggtattccccctcctgcaggaggcccggatgtatcacctgagcgggaacgagattattagcgagagaacgaagccacgaatgcatgaatttcaatcagaagtcttcatgatcatcggaggatgtacaaaggacgagaggtttgtagcagaggtgacatgcctggacccattgcgccgttctcggttagaagtggctaaactcccattaaccgagcatgagctcgaatctgaaaataaaaaatgggtggagtttgcctgtgtgaccctgaaaaatgaagtctatatctctggcggaaaggagacacaacacgatgtgtggaaatataattcctccatcaataaatggattcagatagagtatctgaacattgggaggtggagacacaagatggtcgttctgggcggcaaggtgtacgtaatcgggggatttgacgggctccagcggataaacaatgttgagacctatgacccattccataattgttggtctgaggcggctccccttctagtgcacgtatcgtctttcgctgccacttcacacaagaagaaactttatgtgataggaggcggccccaatggcaagctggcgactgacaaaacccagtgctacgatccatctactaacaaatggagtcttaaggccgcaatgcccgtggaagcaaaatgcatcaatgccgtgagcttcagggataggatatacgtggtaggcggtgccatgcgagcgctgtacgcctatagtcctttggaggactcatggtgtctcgtgacccagcttagccacgaaagagcatcatgcggaatcgcaccctgcaataaccgcctgtatattacaggtggaagagacgaaaagaacgaggtgatcgctacggtcctgtgttgggacccagaagctcaaaagcttaccgaagagtgtgtcctgcctcggggggtgagccaccatggcagcgtcaccattagaaagtcatacacccacatcagaagaatagttcctggggccgtgtcagtgtag

SEQ ID NO: 192226 - DNA, 1695 bp, synthetic construct
  misc_feature 1..1695: note = Description of Artificial Sequence: Synthetic coding sequence
  source 1..1695: mol_type = other DNA
atgctgggcggcaccgactgccggaccttcctgaccagccacatcaacttaaaaaagactctgtgcgatgtcatcctgatggtccaagagagaaagattcccgcacaccgggtggtgctggctgctgcaagccacttctttaatcttatgtttacaactaatatgctggaaagtaagtccttcgaagttgaattgaaggacgcagaacctgacatcattgaacagttggtcgaattcgcctacactgccagaatatcagtaaactctaataatgtccagagtctgctggatgcagccaaccagtatcagattgaaccggtgaagaagatgtgcgtggattttctgaaagagcaagtggacgcctccaactgtctgggcatctccgtcctggccgagtgcctcgattgtcccgagctcaaagccactgccgacgacttcattcaccagcatttcaccgaggtctataaaaccgacgaattcctacagctggatgtgaagagagtcacacacctcctcaaccaagacaccttgaccgtccgggccgaagatcaggtctacgacgcggccgttagatggttgaaatacgacgaaccgaaccgccagccattcatggtggatattcttgcgaaggtcagatttcctctcattagtaagaactttctgtcaaagaccgtccaggccgagcctctcatccaggataaccctgagtgcctgaagatggtgatttccggcatgcgctatcacctgttaagtccggaggacagggaagaactcgtcgacggcactcgacccagaaggaagaagcacgattatagaattgcgctgttcggcggcagccagccacagtcgtgcaggtactttaaccctaaggactacagctggactgacatacggtgccctttcgaaaagagaagagacgccgcatgtgttttctgggacaatgtggtatatatacttggcggcagtcagcttttcccaataaaacggatggattgttacaatgtggtaaaagatagttggtactctaaactgggacctcctacaccgagagactcccttgcagcctgcgcggcagaaggcaaaatatacacttctggggggtcagaggtgggaaatagcgccctatacttgttcgagtgctatgatacaaggactgagtcttggcacactaagccctccatgctgacccagagatgttcccacggaatggtcgaggctaacggtcttatctacgtatgcggcggaagcttgggtaataacgttagcggtagagtcctcaactcctgcgaggtttatgatcccgctacagagacttggaccgagctatgtcctatgatcgaagcccgaaaaaatcatggcctggtctttgtgaaagataaaatttttgccgtcggggggcagaatggactgggaggactagataatgtggagtactacgatatcaagctcaacgagtggaaaatggtgtctcctatgccctggaaaggggtgacagtaaagtgtgcggcagtgggatctatagtttatgttctagcaggctttcagggggtcggccgcctgggacatatactggaatacaatacagagaccgacaagtgggtggccaactccaaagtaagggctttccctgttacttcttgcttgatatgcgtcgtcgacacttgcggcgcaaatgaagaaaccctggagacctag

SEQ ID NO: 192227 - DNA, 1761 bp, synthetic construct
  misc_feature 1..1761: note = Description of Artificial Sequence: Synthetic coding sequence
  source 1..1761: mol_type = other DNA
atggccgccagcggcgtggagaagagcagcaagaagaagaccgagaagaaacttgcagctcgggaagaggctaaactcctagcgggcttcatgggtgtcatgaacaacatgcgcaaacaaaagactctgtgtgatgtgatccttatggtgcaagaaagaaaaattcctgctcatcgcgttgtgctggcagccgcctcccatttttttaacctcatgttcacaaccaatatgctcgagtcaaaaagtttcgaagtggagctgaaggacgctgaacctgacatcattgaacagcttgtggagtttgcttacacagcccgtatctccgtgaattctaataatgtacagagtctgttggacgcagcaaatcagtatcaaatagagcctgtgaaaaagatgtgtgtggatttcctgaaggaacaggtcgatgcatctaactgcttggggatctctgtacttgccgagtgtttggactgcccggagttaaaagcaactgccgatgacttcatccaccagcattttaccgaagtgtataagacggatgaattcctgcagctggacgtcaagcgcgtcacccacctactgaaccaggatacgctcaccgttagggccgaggatcaggtctatgatgccgctgtccgttggcttaaatatgacgagcctaacagacagccttttatggtggacattctggccaaggtcaggtttccccttatttcgaagaactttctgagcaagacagtgcaagccgaacccctcatccaagataatcccgagtgcttaaagatggtaatcagtggcatgcgctaccacctgctaagtcccgaggaccgtgaagaactggttgatgggaccagacctcggagaaagaagcacgattatcgaatagccttgttcgggggaagtcaaccccagagttgcaggtatttcaaccctaaggactactcatggactgacattaggtgccctttcgagaagcgtcgggatgccgcctgcgtcttttgggataacgtggtttacatattgggaggtagccagctcttccctataaagcggatggactgctacaatgtggtaaaggactcttggtatagcaagctaggcccacccactcccagagactctttagccgcctgtgccgccgagggtaaaatttacacctccggggggagcgaggtggggaacagcgctctgtatctcttcgagtgctacgacacaaggaccgagagttggcacacaaaacccagtatgctgacacagcgatgttcccatggcatggttgaggctaatgggctgatctacgtttgcggtggaagcctgggaaacaacgtgtcaggacgggtgctcaatagctgcgaggtctatgaccctgccaccgaaacatggaccgaattgtgcccaatgattgaagccagaaagaaccatggactcgtatttgtgaaggataagatttttgcagtcggcggccagaatggactgggcggcctggataacgtcgagtactacgacataaagctgaatgagtggaaaatggtatctccaatgccatggaagggagtgaccgtcaagtgtgccgccgttggtagtatcgtgtacgttttagcaggtttccagggagtgggtagactggggcatatactcgaatataatactgagactgataagtgggtggcaaactcaaaagtcagagcctttccagtcacctcctgccttatttgcgtagtggacacctgcggcgcaaatgaagaaacactcgagacttag

SEQ ID NO: 192228 - DNA, 1617 bp, synthetic construct
  misc_feature 1..1617: note = Description of Artificial Sequence: Synthetic coding sequence
  source 1..1617: mol_type = other DNA
atggtgcaggagcggaagatccccgcccaccgggtggtgctggccgcggcttcacactttttcaatctcatgttcactacgaacatgctcgagagtaagagcttcgaagtggaactgaaagacgccgaacccgatataatagagcagttggtggagtttgcgtacactgcacgcatttctgtgaattctaacaacgtccagtcattgctcgacgcagcaaaccagtaccagatcgaaccagtaaaaaaaatgtgcgtagattttttgaaggaacaggtagacgcaagcaactgtctgggtatttcagtgctggctgaatgtctagattgtccggagcttaaagcaacagcggacgatttcattcatcagcactttacagaagtgtacaagacggatgaatttctacaattggatgtgaaacgggtgacacatttactgaatcaggacacactgacagtccgcgcggaggaccaggtgtatgacgcagccgtccgctggcttaaatatgatgagcccaaccggcagccgtttatggtcgacatcctggcaaaggtgaggtttcccctgatatccaagaatttccttagcaagacggttcaggcggaaccattgattcaggacaaccctgagtgcctaaaaatggtgatttccggcatgcggtaccacttgttatcaccagaggacagagaagagctggtggacgggactcgcccacgtcgtaagaagcacgactaccgcattgctctgttcggcggctcccaaccacaaagctgcaggtattttaatcccaaagattattcctggaccgacattaggtgcccttttgagaagagaagggacgccgcttgcgtattctgggacaacgttgtgtacatcctcggcggctcgcagctgttccccatcaaacgtatggattgctataacgtggttaaagactcatggtacagcaaactaggtccaccaacaccgcgggattcgctggctgcctgcgccgcagaagggaagatttacacctccggagggagcgaggttggaaactctgccctttaccttttcgagtgctatgatactaggacggagtcttggcatactaaaccatcaatgctgacacaaagatgcagtcatggcatggtggaagctaacgggcttatttacgtctgtggtgggtccctgggcaacaacgtgagtggccgcgtgctgaatagttgcgaagtctacgacccagccaccgagacttggactgagctgtgccccatgattgaggcgaggaagaaccacggtctggtgttcgtcaaagataagatttttgcagtagggggacagaacggtctgggcggccttgacaacgtcgaatactacgacataaagctgaacgagtggaaaatggtctctcccatgccatggaagggggtgactgtcaagtgcgcagcagtgggtagcatcgtctatgtgcttgccggtttccagggcgtgggcagattaggacacattctggaatacaacaccgagaccgataagtgggtggccaatagcaaagttcgagcatttccagtcacctcatgtcttatctgcgtggttgacacatgcggcgccaatgaggagactctggagacttag

SEQ ID NO: 192229 - DNA, 1161 bp, synthetic construct
  misc_feature 1..1161: note = Description of Artificial Sequence: Synthetic coding sequence
  source 1..1161: mol_type = other DNA
atggccgccagcggcgtggagaagagcagcaagaagaagaccgagaagaagctggccgcacgcgaggaagccaagctgctggccgggttcatgggggtaatgaataacatgcgaaaacagaagaccctctgcgacgtcatcctgatggtgcaagagcgcaaaatccccgcacatagggtcgtgttggctgctgcctcccacttttttaatctaatgtttacaacaaacatgctggaatctaagtctttcgaagtggaacttaaggacgccgagcctgatatcattgagcagttgttacattacaagttctttaaaatgaagaacagaaaagacggccgcgtttctgtatcatacgccatactcatccaaggcctgaaaatttatgaaatttacagcaccaattttccagaacacttcacagaggtgtataagaccgacgaatttctgcagcttgacgttaaaagggtgactcacctgctgaatcaggacaccctgacggtccgtgctgaagatcaagtgtacgatgctgcggtgaggtggttgaagtatgacgagcctaaccggcagccttttatggttgacattctagccaaagtcaggtttcctctgatttcaaaaaattttctgtcaaaaacagtccaggctgagccactcatccaggataacccggaatgcctgaaaatggtgattagtggaatgaggtaccacctgttgtctcctgaggatagggaagagctggtggacgggacacggcctaggagaaagaaacacgactacagaattgcactattcgggggttcacaaccgcagagttgccgctattttaatccaaaggattactcatggactgatatcagatgtccatttgaaaagcgcagagacgctgcgtgcgtcttctgggacaatgtggtgtacatcttaggcgggtctcagcttttccccatcaaaagaatggattgctataatgtggtgaaagatagttggtactcaaaactcggcccgcccacacctcgtgattctctggccgcctgcgcggcggaggggaagatctataccagcggtggcagcgaagttggcaattccgccctctatcttttctgcctcataccagtgaagtttatgatactgccacagaagcacgggttaagttgtgtacagtag

SEQ ID NO: 192230 - DNA, 1284 bp, synthetic construct
  misc_feature 1..1284: note = Description of Artificial Sequence: Synthetic coding sequence
  source 1..1284: mol_type = other DNA
atggccgccagcggcgtggagaagagcagcaagaagaagaccgagaaaaagctcgccgccagggaggaggccaagctgcttgctggattcatgggagtgatgaacaatatgcggaagcagaagacactgtgcgatgttatcttaatggtacaggaacgaaaaatccccgcccaccgggttgtgctggcagcagctagccatttcttcaacctgatgtttacaaccaacatgcttgaatcaaaaaatttcctttccaagacagtgcaggccgagcccctgatccaggataatcccgaatgtctgaagatggtgatttcaggtatgaggtaccatctactctcccccgaggacagagaggaattggtggacggaacccgacctcggagaaagaagcacgattatcgcatcgcgctgttcggtggaagccagcctcagagttgccgctactttaatcctaaggactacagttggactgacatccggtgcccatttgaaaagcgcagagacgcggcttgcgttttctgggataacgtggtttacatattagggggctcccagctttttcctatcaagagaatggactgctataacgtcgtgaaagacagctggtatagcaaactggggccccccaccccccgggactcactcgccgcttgtgctgccgaggggaaaatctataccagcggcgggagcgaagtggggaacagtgccttatacctctttgagtgctatgacacccggaccgaatcatggcatactaagccctcgatgctgactcagcggtgtagccacggcatggtggaggcgaacggcttgatctatgtctgtggtggctctctaggaaacaatgtgtctgggcgagtactgaacagctgcgaagtgtatgacccagctaccgagacctggaccgaactatgcccaatgatcgaagcccgcaaaaaccatggacttgtgtttgttaaagataaaattttcgctgtcggggggcagaatggcctgggtggcctggataatgtagagtactatgacatcaagctcaatgagtggaaaatggtgagtccgatgccctggaaaggagtgactgtcaagtgcgccgcagtcggctccattgtctacgttctcgctggctttcagggcgtgggccgcctcggccatatactggagtacaacacagaaactgacaaatgggtcgctaactctaaggtcagagcgttccccgtaacatcttgtctgatctgcgttgttgacacatgtggggccaacgaagaaacccttgagacctag

SEQ ID NO: 192231 - DNA, 1533 bp, synthetic construct
  misc_feature 1..1533: note = Description of Artificial Sequence: Synthetic coding sequence
  source 1..1533: mol_type = other DNA
atgctggagagcaagagcttcgaggtggagctgaaggacgccgagcccgatatcatagagcaactggtggagttcgcatataccgcccgaattagtgtgaattcaaacaatgttcagtccttactcgatgctgctaaccagtaccagatagagcctgtaaagaaaatgtgcgttgactttctcaaagagcaagtcgatgctagcaactgcctaggcatatccgtgcttgccgagtgccttgactgtccagagctgaaagctacggctgacgattttatccaccagcatttcacggaggtctacaagacggatgagtttctccagctggacgtgaaacgggtgacacacctcctgaatcaagacaccctgaccgttcgcgctgaagatcaagtgtatgacgccgctgttcgatggctgaaatatgacgagcctaacaggcagcctttcatggtggacatcttggccaaggtcaggttccctcttatttccaagaactttttgtcaaaaaccgttcaggcggaaccactgattcaggataaccccgagtgtctaaagatggtcattagtggaatgcgatatcatctgctgagccctgaagacagggaagagctggtggatggaactaggcctagaaggaaaaagcatgactatagaatcgctctgttcggaggctctcagccccagtcttgcagatacttcaatccgaaagattacagctggacagacattcgctgcccgttcgaaaagagaagagacgctgcatgtgtgttctgggataacgtggtgtatatcctgggtggctcccagctctttcctataaaacggatggactgctataatgtggttaaagattcgtggtacagcaaattagggcctcccacaccacgagattcacttgcggcatgcgctgccgagggaaagatttacacttctggcggttcagaagtaggcaattctgccttgtacctttttgaatgctatgatactcggacagagtcatggcacaccaagccgagcatgctgacacagcgctgttctcatggcatggtcgaggcaaacggactcatttacgtttgcggggggtccctggggaacaatgtgtccggtagggtgttaaattcgtgcgaggtatatgaccctgcaacagagacatggaccgaactgtgccccatgatcgaggcaaggaagaaccatggtctagtcttcgtgaaggacaagatcttcgcagttggaggacaaaacggccttggaggcctggacaacgtcgagtactacgatattaagcttaacgaatggaaaatggtgtcccccatgccctggaagggcgtgaccgtgaagtgtgccgcagtagggtccatagtgtacgttctcgccggatttcaaggtgttggccgcttagggcatatcctggaatacaacaccgaaaccgacaaatgggtcgcaaactccaaggtacgcgccttccctgtgactagttgcctaatctgtgttgttgatacttgcggggctaacgaggagactctggaaacatag

SEQ ID NO: 192232 - DNA, 1086 bp, synthetic construct
  misc_feature 1..1086: note = Description of Artificial Sequence: Synthetic coding sequence
  source 1..1086: mol_type = other DNA
atggtggacatcctggccaaggtgcggttccccctgatcagcaagaatttcctgtcaaagactgtgcaggccgagccactgattcaagataatcctgaatgtcttaagatggtgatcagcggcatgcgctaccatctacttagccccgaagatagggaagagctggtcgatgggactagaccccgacggaagaaacacgactaccgaattgctctgtttggaggctcacagccccagagttgtcgttacttcaatccaaaggactactcttggaccgatatacgctgcccgttcgagaaaaggcgagacgccgcttgtgttttctgggataacgttgtatatatattagggggctcccaactgtttcctattaagcggatggattgttataatgttgttaaggatagctggtactccaaactgggaccccctacgcctagagatagtctcgccgcctgcgctgcagaaggaaagatctacacaagtgggggcagcgaggtggggaatagcgccctatatctctttgagtgctatgatactcgaacagaatcctggcacacaaagccttcaatgcttactcagcgatgttctcatggtatggtagaagctaacgggcttatctacgtctgcggcggcagtctggggaacaacgtcagcggccgggtgctcaactcatgtgaggtttacgatcccgccacggaaacttggacagagctgtgccccatgattgaagcaagaaagaaccacggtctagtatttgtgaaggataagatattcgccgtgggcggtcagaacggtctgggcggacttgataacgtggagtactacgacattaagttgaatgagtggaaaatggtcagccctatgccctggaagggcgtgaccgttaaatgtgcagctgtgggcagcattgtttacgtgctggcaggatttcagggggtggggcggttgggtcatatcctggagtacaacacagaaaccgacaaatgggttgccaatagtaaggtgagggcctttccagtcacatcctgtctgatatgcgtcgtggacacctgcggtgcaaatgaggagaccctggaaacttag

SEQ ID NO: 192233 - DNA, 1695 bp, synthetic construct
  misc_feature 1..1695: note = Description of Artificial Sequence: Synthetic coding sequence
  source 1..1695: mol_type = other DNA
atgctgggcggcaccgactgccggaccttcctgaccagccacatcaacctgaaaaagaccctctgcgacgtcattcttatggttcaggagcgtaaaattcctgcccacagagtggtgcttgctgctgcatctcacttctttaatctcatgttcactactaacatgctagagagcaagagcttcgaggtggagctgaaagacgctgaacccgacatcattgaacaactggtggagtttgcttacacagcccgcattagcgtgaatagtaataatgtgcagagtctcctcgacgcagccaaccaatatcaaatcgaacctgtgaaaaagatgtgcgtggactttctcaaggaacaagtcgacgcatccaattgtcttggtatcagtgtcctggcggagtgtctcgattgtcctgagctaaaagccaccgccgatgatttcattcatcagcattttactgaggtctacaagaccgacgaatttttgcagctggacgtgaagagggtgacgcacctcttaaatcaagacaccctgacagtccgtgctgaggatcaggtttatgatgcggctgtaagatggttgaaatacgacgagccgaatagacagccctttatggtggatatcctcgccaaagtgaggttccctcttatctcaaagaactttctttccaaaacggtccaggcagaacctcttatccaggacaaccccgagtgtctgaagatggtgatctcaggaatgcgctatcacctcctgtctcctgaagatagagaggagctcgtcgacggaacccggccaagacgaaagaagcacgattaccgtatagccttattcggggggagccaaccccagtcctgccggtacttcaacccaaaggattattcatggacggacatccggtgccctttcgagaagcggagggacgcggcctgcgtgttctgggacaacgtggtgtacatactcgggggctcgcagctgtttcctattaaacgtatggactgctacaatgtggtcaaggatagttggtactctaagctgggccctccaacaccccgtgattcactcgccgcatgtgccgctgagggtaagatttacaccagcggcggaagcgaggtggggaactctgccctctacctgttcgaatgttatgatacccgaacggaaagctggcatacaaagccaagtatgctcacccaaagatgttcacacgggatggtggaagccaatgggctgatttatgtttgtggcggaagcctgggaaataacgtctccggtcgggtacttaactcctgcgaagtgtacgacccagctacggagacatggaccgagttgtgtccgatgatcgaagccaggaaaaatcacgggctggtcttcgtaaaagacaaaattttcgctgtgggagggcagaacgggcttggggggctggacaatgtggagtactacgacatcaaattaaacgagtggaaaatggttagtcctatgccctggaagggcgtcacagtgaaatgtgctgcagtgggcagcattgtctacgtgctcgccgggtttcagggtgtgggtcgcctgggtcacatcttagagtataatacagaaaccgataaatgggttgctaacagcaaagttcgggccttccctgtgacttcatgtctgatttgcgtagttgatacctgcggggctaatgaggaaaccctcgaaacatag

SEQ ID NO: 192234 - DNA, 432 bp, synthetic construct
  misc_feature 1..432: note = Description of Artificial Sequence: Synthetic coding sequence
  source 1..432: mol_type = other DNA
atgctgggcggcaccgactgccggaccttcctgaccagccacatcaaccttaaaaaaaccctgtgtgatgttatcctgatggtgcaggagcgaaagatcccagctcatagggtcgtcctggccgccgcctcccatttctttaatttgatgttcacaaccaatatgttggaaagtaagtcatttgaagtggagctaaaggatgcagaacctgacatcatcgagcaactcgttgaattcgcatatactgcccggattagcgtaaatagcaataacgtgcagtctctcctggatgccgcaaaccaataccagatagaaccagttaagaaaatgtgtgtagacttccttaaagagcaggtcgatgcttcgaattgcctgggcaagaagtaccagattcctgtggtgtgcttgttctgctttattctgtacttctag

SEQ ID NO: 192235 - DNA, 501 bp, synthetic construct
  misc_feature 1..501: note = Description of Artificial Sequence: Synthetic coding sequence
  source 1..501: mol_type = other DNA
atggccgccagcggcgtggagaagagcagcaagaagaagaccgagaagaaactggctgcccgagaggaggccaagctcctcgcggggtttatgggggtgatgaacaatatgcgcaaacagaaaaccctgtgtgacgtgatcctgatggtgcaggagcgtaaaatccctgctcacagggtggtgttagccgctgccagtcactttttcaaccttatgtttacaaccaatatgctcgagagcaaatcatttgaagtggaactgaaggacgcggaacccgacatcattgaacagcttgtggagttcgcctacacagctcgtatatctgtgaactcaaataatgtgcagagcctcctggacgccgcaaatcagtaccaaatagagcccgtcaaaaaaatgtgtgttgacttcctcaaagagcaagtagacgccagtaattgcctgggagaagccgagaaggtggatcagtccctgcccgagtgtggaatgctgtttacagtgtag

SEQ ID NO: 192236 - DNA, 1863 bp, synthetic construct
  misc_feature 1..1863: note = Description of Artificial Sequence: Synthetic coding sequence
  source 1..1863: mol_type = other DNA
atggccagcgacagcatgagcagcaagcaggcccggaaccacatcactaaaggaaagcggcagcagcagcaccaacagattaagaatcggtctagtatcagcgatggagatggcgaggacagtttcatttttgaggctaacgaagcttggaaggactttcacggcagcctcctgcggttctacgaaaatggagaattgtgtgacgtgacactgaaagtcggaagtaaattgataagctgccataaactagtactggcttgtgtgatcccgtactttcgggcgatgtttctgtcagagatggcggaggctaagcagactctcattgagatcagagactttgacggcgacgcaatcgaggatctcgttaaatttgtgtacagtagccgactgacccttaccgtcgacaacgtccagcccctgctctatgccgcctgtatcctgcaggtggagctagtcgctcgggcttgttgtgagtacatgaagttgcactttcatccgtccaactgtttggctgttagggcgttcgctgaatcacacaacagaattgacttgatggatatggctgatcaatacgcatgcgaccacttcaccgaagtggtggaatgtgaggactttgtgtccgtctcaccccagcacctccataagctgctgagctctagtgacctgaatattgagaatgagaaacaggtgtataatgccgccattaagtggctgcttgcgaatcctcagcatcattcaaaatggttggatgaaacactcgcacaggtccgtcttcccctgctgcccgtggacttccttatgggtgtggtagcgaaggagcagatcgtgaagcagaacctgaaatgtcgggacctcctggacgaagccaggaattaccacttgcatctttcgtcgagggccgttccagactttgagtattcgatccgcaccacaccccgcaagcacacagccggagttctgttttgtgtgggaggccggggcggctccggcgacccattccgtagtatcgaatgttattcaatcaacaagaacagctggttcttcggacccgaaatgaacagccggcggcgccacgtgggtgtgatcagtgtcgaaggaaaggtctatgctgtcggcggccacgacggcaatgagcatcttggatctatggagatgttcgatccactgactaataaatggatgatgaaagctagtatgaacactaaacggagaggtattgccttggcatccctgggaggcccaatttatgccataggggggctcgatgacaatacgtgttttaacgatgtcgagcgatatgacatagagagcgaccagtggagcaccgtcgcgccaatgaacacgcctcggggcggtgttggtagcgtggccctagttaaccacgtgtacgcggtcggtggcaacgatgggatggcatccctgagttctgtggagcgctacgacccccatttggataaatggatagaggttaaggagatgggccaacgcagagcagggaatggagtaagcaagcttcatggctgcctgtacgttgttggaggattcgatgacaattccccactgtccagcgtcgaacggtacgatcctcggtcaaacaagtgggattacgtcgccgccctcaccacccctcgaggcggggtgggtatagcgaccgtgatgggcaagatttttgctgtgggagggcataatggaaatgcgtacctaaatacagtggaagcatttgaccctgtcctgaataggtgggaactcgtggggtcagtgtctcattgccgcgccggagcgggagtggccgtctgctcatgcctgacttctcagataagagacgtcggccacggaagtaataatgtggtggactgcatgtag

SEQ ID NO: 192237 - DNA, 1863 bp, synthetic construct
  misc_feature 1..1863: note = Description of Artificial Sequence: Synthetic coding sequence
  source 1..1863: mol_type = other DNA
atggccagcgacagcatgagcagcaagcaggcccggaaccacatcacaaagggcaaaagacagcagcagcaccagcaaatcaagaacaggtcatctatcagtgacggagacggcgaggacagtttcatattcgaagcaaacgaagcttggaaagacttccatgggagcctccttaggttctacgagaatggtgagctctgcgatgtgacattaaaggttgggtccaagctgatatcctgccacaagctggtgctggcctgtgtcattccttattttcgggccatgtttttgtcagaaatggccgaagctaagcagacactcattgagattcgagactttgatggcgatgctatcgaggacctggtaaaattcgtctatagcagtcgtttgactctgacggtagataatgttcagcctcttctctatgccgcatgcattctgcaggttgagctggtggccagagcttgttgcgagtacatgaagctgcactttcatcctagcaattgcctagctgtgagagcgtttgccgagtcgcacaaccggattgatctgatggatatggccgatcaatacgcctgcgaccactttacagaagtggttgaatgtgaggatttcgtaagtgttagcccccagcacctgcataaactcctgtctagcagcgaccttaacatagagaatgagaagcaggtctacaacgctgccatcaaatggcttctggccaatccgcagcaccactctaagtggctggatgagacccttgcccaagtgcgattacccctcctccctgttgacttcctgatgggagtggtggccaaggaacagatcgttaaacagaacctgaaatgtagggatctcttagatgaagccagaaactaccatttacatctgagtagcagagcagttcccgattttgaatattcaatccgcacaaccccgagaaagcacaccgcaggtgtgctcttttgtgtgggtggacgtggcgggtccggggatccattcagatccatcgaatgttacagcatcaacaagaactcatggttctttggcccagaaatgaactcccgccgacgacacgtcggcgtcatatctgtcgaaggaaaggtgtacgccgtgggaggccacgacggcaatgaacacctgggctccatggagatgtttgaccccttgaccaacaagtggatgatgaaagcatccatgaatactaagcggagaggaattgcattggcatctctgggaggcccaatttacgctatcggcggattggacgacaacacctgcttcaatgatgtggagcgctacgacatcgaatccgatcagtggtcaactgtggctcccatgaataccccccggggcggtgttggctcagtagccctcgttaatcacgtgtacgcagttggcggaaatgatggcatggcaagcctaagcagtgtcgaacgatacgatccccacttggacaagtggatcgaagttaaggaaatgggacagagacgtgcaggcaacggcgtgtcaaagttacacggatgcctatatgtggtggggggcttcgatgacaactcgcccctgagttcagtcgagaggtacgaccctcgatcaaataagtgggattacgttgcagcccttacaacacccagggggggagtcgggatcgccaccgtcatgggcaagatatttgctgtgggtggacacaatgggaatgcctatctgaataccgtagaagcatttgacccagtgctgaaccggtgggagttggtcggttccgtaagtcactgtagggctggcgccggagtcgctgtttgcagctgcctgacttctcaaatcagggacgtgggccacggcagcaacaatgtggttgattgtatgtag

SEQ ID NO: 192238 - DNA, 810 bp, synthetic construct
  misc_feature 1..810: note = Description of Artificial Sequence: Synthetic coding sequence
  source 1..810: mol_type = other DNA
atgaacagccggcggcggcacgtgggcgtgatcagcgtggagggcaaggtgtatgctgtgggcggccatgacggtaacgagcatctgggtagcatggaaatgtttgaccctctgacaaataaatggatgatgaaggcttccatgaacaccaaaaggcgcggcatcgccctcgcctcacttggcggccccatctacgcaatcggagggctcgacgataatacatgctttaatgacgtggagaggtacgatatcgaatccgaccaatggtctaccgtggctcctatgaatacccccaggggaggggtcggcagcgtcgctctggtgaaccacgtctacgcagtgggaggtaatgacgggatggctagtctgagctctgtggagcggtacgaccctcaccttgataagtggatcgaagttaaagaaatgggacagcggcgagccggtaatggagtatcaaaactacacgggtgtttatacgtggtcggcggcttcgatgataattcacctctcagttctgtggaacgatacgacccacgctctaacaagtgggattatgtcgccgctctgaccacgcccagagggggagtcggaattgccaccgtcatgggcaaaatattcgcggtaggtgggcacaatggaaacgcatatcttaacaccgtggaggcattcgaccctgtgttgaaccgttgggaattagtgggatctgtgtcccattgccgcgcgggcgccggcgtggccgtgtgttcctgcttgacctcacaaatcagggacgtgggacacgggtcaaacaatgttgtcgactgcatgtag

SEQ ID NO: 192239 - DNA, 1875 bp, synthetic construct
  misc_feature 1..1875: note = Description of Artificial Sequence: Synthetic coding sequence
  source 1..1875: mol_type = other DNA
atgcagcccgacccccggcccagcggcgccggcgcctgctgccggttcctcccactgcagtcccagtgccccgagggagccggagacgctgtcatgtacgccagtaccgagtgtaaggcagaagtgacaccctcccagcatgggaacaggaccttctcttacacacttgaggaccataccaagcaggcttttggtatcatgaatgaactgcggctctcacagcagctgtgcgatgtaactctccaggtgaaataccaagacgcacccgcagctcaatttatggcccataaggtggtgctggcatcgtccagccctgtatttaaggccatgtttacaaacggtctacgcgaacagggaatggaagtcgtgtcaatcgaaggcatacaccccaaagtcatggaacgcctgatcgaattcgcgtatacagctagcattagcatgggcgagaagtgcgttctccacgtcatgaacggcgccgtgatgtatcagattgatagtgtggttcgtgcctgcagcgacttcctcgttcaacagttggacccttctaatgccatcggaattgccaactttgccgaacaaattgggtgcgtggaactgcaccagagggcccgggagtacatttatatgcacttcggagaagtggctaagcaggaggaattcttcaatttgagtcattgtcaactcgttactctgattagcagagacgatctgaacgtgaggtgcgagtccgaagtttttcatgcttgtattaactgggtgaagtacgactgtgagcagcgccggttctacgtacaagcacttctccgggccgtgcggtgtcacagcctcacccccaatttcctccagatgcagctgcaaaagtgtgagatcctccaatctgattcacgctgtaaggattacctcgtcaagatctttgaagagctgactctgcacaaaccaacgcaggtgatgccctgtagagcccctaaagttggaagacttatctacacagcaggggggtatttcaggcagtccctctcatatctggaggcctacaacccttccgatggaacttggctgaggctggcagatctgcaggtgccaagaagtgggctggcgggttgtgtggtaggggggttgttgtacgctgtaggaggtaggaataattctcctgatgggaacacagatagctccgctctggactgttacaaccctatgacaaaccagtggtcaccttgtgctccaatgtcagtgccccgaaatcgaataggtgtgggggttattgatgggcatatctacgccgtcggtggttcccacggctgcattcaccacaattcagttgaaagatacgagcccgaacgggacgagtggcatttggtggcccccatgctgacccggagaattggagtgggagtcgctgtgctaaatcgactgctgtacgcagtaggaggatttgatggaactaatcgactgaattcagcagaatgttactatcccgaacggaacgagtggagaatgattacagctatgaatactattcgatctggagccggggtgtgtgtgttacataactgtatttacgccgccggcggttacgacggccaagaccagctgaattctgttgaacgttatgacgttgagacagagacttggacctttgtggctcccatgaaacaccggaggtcagctctgggcattacggtccaccaggggagaatctatgtgcttggaggctatgacgggcatacgtttttggactctgttgagtgctatgaccctgatacagacacgtggagcgaggtgacccgtatgaccagtggcaggagcggagtgggggtggcagtcacaatggaaccgtgtcgcaagcaaatcgaccagcagaactgcacatgttag

SEQ ID NO: 192240 - DNA, 1875 bp, synthetic construct
  misc_feature 1..1875: note = Description of Artificial Sequence: Synthetic coding sequence
  source 1..1875: mol_type = other DNA
atgcagcccgacccccggcccagcggcgccggcgcctgctgccggtttctccctctccagagccagtgccccgaaggagccggggatgctgtcatgtatgcgtccactgaatgtaaggccgaagtgactccctcacagcacggtaataggaccttttcctatacccttgaggatcatacgaagcaggcttttggcatcatgaacgaactgcgattatctcagcagttatgcgatgtcactctgcaagtgaagtaccaggatgccccagctgctcagtttatggcccacaaggtcgtcctcgcttcaagctctccagtctttaaagcgatgttcactaatggcctacgagaacagggcatggaggttgtgtctattgaagggatacatccaaaagtgatggaacggttgatagaatttgcttataccgccagtatcagtatgggggaaaaatgcgtcctgcacgtcatgaacggtgcggttatgtaccagattgattccgttgtgcgagcttgcagcgatttcctcgtgcagcagcttgatccctcaaacgcaatcggcattgccaactttgccgagcaaatcggctgcgtggagctccaccagcgcgctcgagagtacatttacatgcacttcggtgaggttgcgaagcaggaggagttcttcaatctttctcattgtcagctggtgaccctaatttctcgtgatgacctgaatgttcgttgtgaaagcgaagtcttccatgcctgcataaattgggtgaaatatgattgcgaacaaagacgcttttatgttcaggccttgttgagagctgtccgctgtcactcgctcacgcctaattttctgcaaatgcagctgcagaagtgcgaaatcctgcagagcgactcccgctgtaaggactacctggttaagattttcgaagagctgacacttcacaagccaacccaggtgatgccctgtcgagctcccaaagtgggccggcttatttacaccgctggtggctatttccgacagtctctgagctacctcgaggcatacaacccgagcgatggaacttggttacggctagccgacctgcaggtgccgcgcagtgggctggccggttgcgttgtcggcggtctcttgtacgccgtaggggggcgaaataacagccctgacggcaacactgactccagtgctctggattgttacaatcccatgacgaaccaatggtccccttgtgccccgatgagtgtaccacggaacaggattggcgtcggagtcattgacggtcacatttatgccgtgggcggtagtcacggttgtatccaccacaattccgtggagagatatgagccagagcgcgatgaatggcatttagtggcccctatgttaacaaggcggatcggcgtcggcgtcgccgtccttaacaggctcctctatgcggtcgggggttttgacggaactaaccgcctcaattctgccgaatgttactaccccgagagaaatgagtggagaatgatcaccgccatgaataccattcggtccggagccggtgtatgtgtcctccacaattgtatctatgcagctggcggctatgacggccaggatcagctgaacagtgttgaaagatatgacgtcgaaacagaaacctggacattcgtagcgcctatgaagcatcggcggtcagcactgggcattacagtgcaccagggacggatctacgtgcttggcggttacgacggacatacctttctggacagcgtggaatgctacgatcctgacaccgacacttggtcggaagtcactcgaatgacaagcggcagaagtggtgtgggggtggccgttaccatggaaccctgccgaaagcagatagaccaacagaactgcacatgctag

SEQ ID NO: 192241 - DNA, 2199 bp, synthetic construct
  misc_feature 1..2199: note = Description of Artificial Sequence: Synthetic coding sequence
  source 1..2199: mol_type = other DNA
atggagggcggcgaccagagcgaggaggagccccgggagcggagccaggccggagggatgggcactctatggtctcaggaatctacacccgaggagaggttacccgtcgaaggcagccggccctgggctgtggcccgaagggtgttaaccgctatattgatcctgggcctgctcctatgtttctccgttttgctgttttacaacttccagaactgtggtccgcgcccctgcgagacatctgtatgcttggatttgagagaccactatttagccagtgggaacacgagtgtcgccccttgcaccgatttcttcagtttcgcgtgtgggagggccaaagaaaccaataactcttttcaggaactcgcgacgaagaacaagaatagactaaggcggattctcgaggttcagaattcctggcaccccggctccggggaagagaaggcattccagttttacaattcatgtatggatacgctcgccattgaagcagccggcacgggacctcttcgtcaggtgattgaagaacttggtggatggcgcatctccggcaagtggactagtttaaactttaaccgtactctcagactgctgatgagccagtatggacacttccccttctttagggcctacttggggcctcatccagcttcaccacatacccccgtaattcagatcgaccagcctgagttcgatgtgcctctcaagcaggatcaggaacagaagatctacgctcagatctttcgggagtatctgacttatctgaaccagctgggaacactcttgggcggagatccctccaaggttcaggaacacagctctctcagtatttcaattacaagtaggctttttcagtttcttaggcccctggagcaaaggcgcgcccagggcaaactgttccagatggtgacaatagatcagctcaaggaaatggcaccggcaattgactggctgagctgcctccaagctaccttcacgcctatgtccctgtcaccgtcccagtctctcgtcgtgcacgacgttgagtaccttaagaatatgagccagctggtcgaagaaatgctactaaagcaacgcgattttctacagagccatatgattttagggttggttgtgacgttgtcaccagcgctcgactcccagttccaggaggctcggcgcaagctgagtcagaaactgcgggagctgacagaacagccacctatgccagcccgtccacggtggatgaaatgtgttgaggaaacagggacttttttcgaacctactctggctgcattgttcgtacgagaggccttcgggccttccactcgaagcgcggccatgaaactttttactgcaattcgcgatgctttaattactaggctcagaaatctcccatggatgaacgaagagacccagaatatggcccaagataaggtggcccagcttcaagttgagatgggcgcttctgagtgggcgctcaaaccagagcttgctaggcaggaatataatgacatccagctggggagttcattccttcaaagcgtgttgtcttgcgtgcggtcactgagagctcgtatcgtgcagtcgttccttcagcctcatccccagcaccgatggaaagtgtccccctgggatgtgaacgcctattacagtgtgtctgaccacgtggtggtttttccagctgggctgctgcaacctccttttttccacccaggatacccaagagccgtgaattttggcgccgccgggtctattatggcgcacgagctcctgcacattttttatcagctcttactccccggcggatgtttggcttgtgacaatcacgctctgcaggaggcgcatttgtgtcttaaaaggcactatgcagcctttccgctacctagtaggacatcctttaacgactccctgacctttctggagaatgctgccgatgtaggggggctcgccatcgctcttcaggcatactcaaagaggttactgaggcaccacggcgaaactgtgctcccgtccctggatttgtcccctcaacagatcttctttcgcagttacgcccaggtgatgtgcagaaaaccatccccacaggatagccacgacacccacagccccccacacctgcgggtccacggaccattatctagcacccccgccttcgcccgctactttaggtgtgctcggggtgcactccttaaccccagcagcaggtgtcagttgtggtag

SEQ ID NO: 192242 - DNA, 1935 bp, synthetic construct
  misc_feature 1..1935: note = Description of Artificial Sequence: Synthetic coding sequence
  source 1..1935: mol_type = other DNA
atgagccggcagttcagcagccggagcggctaccggagcggcggcggtttttcttctggaagcgccggcattatcaactaccaaagacgcacgacatcttcctctacaagacgctctggcgggggtggaggaaggttcagctcatgcgggggtggtggcgggagcttcggcgcaggtggaggattcggttccagaagcctcgtgaatctggggggatctaaatcaatttccatctctgttgcgcgcggcggaggtcgggggagtggattcgggggagggtacgggggggggggctttggcggcgggggatttggcggaggagggttcggaggtggcggaataggtgggggaggctttggcggatttgggtccggcggaggcggattcggaggggggggcttcggcgggggtgggtatggcgggggctatggacctgtgtgtccacctgggggtatccaggaggtcacaatcaaccaatctcttctccagcccctgaatgtggaaattgatcccgagatccagaaagtgaagtcccgagagcgggagcagataaaatcactgaataatcagtttgcttccttcatcgataaggtcaggttcctggagcaacaaaaccaggtccttcagacaaagtgggagctgttgcagcaagtcgatacctcaaccaggacacataacttagagccatacttcgaaagctttatcaacaacctcagaaggagagtcgaccagcttaaatcagatcagtcaaggctggactcagaattgaaaaatatgcaggatatggtcgaagactaccgtaacaaatacgaagatgagataaacaagcgcactaacgccgagaatgagttcgttactattaaaaaagacgtcgatggcgcatacatgactaaagtggaccttcaggcaaagctcgataacctgcagcaagaaattgatttccttaccgcgctctatcaggccgagctgagtcagatgcaaacgcagatcagtgagaccaatgttatcctctccatggacaacaatcgaagcttggatctagactctataatcgctgaggtgaaagctcagtacgaggatatcgcgcagaaatccaaggccgaggctgagtcgctttatcagtcaaagtatgaggaactccagattaccgccgggagacacggcgactccgtgcgaaacagtaaaatcgagatcagcgaattaaaccgtgtcatacagcgcctcaggtccgaaattgacaacgtgaagaaacagatctctaacttacagcagtcaattagcgacgcagagcagcggggagaaaatgctctcaaggatgctaaaaacaaactgaatgacctggaagacgccctgcaacaagccaaggaggacctcgcacggcttctgcgcgactatcaggaattaatgaacactaaattagcccttgacctcgaaatcgccacataccgcacactgctggagggagaagaatccaggatgtcgggcgagtgtgctcctaatgttagcgtcagtgtgtcgactagtcacacgacaatcagcggtgggggctcacgcggcggtggcggcggcgggtacggcagtggaggtagtagctatggatctggcggggggtcttacggctctggcggagggggcggagggggccgaggcagctacgggagtggaggcagttcttatggctcaggtgggggttcatatgggtctgggggtggcggtggcgggcatgggtcttacggctccggaagctccagtggtggctacagaggaggttcagggggaggcggaggggggtcatcaggaggtaggggatccgggggcggatcttctggggggagcattggaggtaggggatcctcttctggcggagtgaaaagctctgggggctctagttccgttaagttcgtgtcaactacatactctggggtaacaagatag

SEQ ID NO: 192243 - DNA, 1755 bp, synthetic construct
  misc_feature 1..1755: note = Description of Artificial Sequence: Synthetic coding sequence
  source 1..1755: mol_type = other DNA
atgagcgtgcggtacagcagcagcaagcactacagcagcagccggagcggcggcgggggtggcggcggaggctgtggtggcggcggtggcgtttcatccttacggatcagttcatcgaaaggtagtctcggcgggggatttagctcgggcgggtttagtggcggctccttctccagaggcagctcagggggaggatgtttcggcggatcctccggaggctatggaggcctgggcggcttcggcggcggctcattcaggggaagctacggaagcagctcatttggcggttcttatggcggaatatttgggggaggctcctttggaggtggttcctttggagggggaagtttcgggggaggtgggtttggcggcggaggctttggcggtgggtttggcggcgggttcggaggtgacggcggccttctttcaggcaatgaaaaagttactatgcagaacctgaacgatcgcctggcctcttacttagacaaagttagagcgcttgaggaatcaaactacgagttggaaggtaaaattaaggagtggtacgagaagcatgggaactcacaccagggtgagccacgcgactactctaaatattacaagactattgatgacctcaagaatcagatcctcaatctgaccaccgacaatgctaacattttactgcagattgataatgcgagactggctgccgacgattttcggttgaaatacgagaatgaagtagctctgagacagtcagtggaggcagacataaacggtctcaggagagtgctcgatgagctgaccctcaccaaagctgatcttgagatgcagattgagtccttaaccgaagagttggcatacctgaagaaaaatcatgaggaggagatgaaggatctacgaaatgtgtcaaccggggatgttaacgtcgagatgaacgccgctcctggcgttgacctgactcaacttttgaacaatatgcgaagccagtatgagcaacttgcagagcagaatagaaaggatgcagaagcatggttcaatgagaagtcgaaggagcttacaaccgagatagataacaatattgagcagatcagcagttacaaaagcgagataaccgaactgcggcgaaatgttcaggccctggaaattgaattgcagagccagctggcactgaaacagagcctggaagcttcgctggctgagaccgaaggcaggtattgcgtgcagcttagtcaaatacaagcccaaattagcgctttagaagaacagctgcaacagatccgggctgagacggaatgtcagaacaccgagtatcagcagctcctggatatcaaaattcggcttgagaatgaaattcagacttacaggtctctgctggagggggagggtagctccggggggggcgggagaggtggcggctcattcggcggcggttatggggggggaagcagcggtggaggcagtagcgggggcggccacggtggaggccacgggggaagtagtgggggcgggtacggtgggggttcaagtggggggggctcatccggaggtggctacgggggtggaagctcctcgggcggacatggagggtcgagcagtggcggctacggtggtgggtctagtggcggcggtggtgggggctatggcggcggtagctccggtggcggatcatcctcaggaggtgggtatggggggggcagtagttctgggggtcacaaatcttcttcgtcagggtctgtgggggagtccagctcgaaaggacctcgttactag

SEQ ID NO: 192244 - DNA, 1485 bp, synthetic construct
  misc_feature 1..1485: note = Description of Artificial Sequence: Synthetic coding sequence
  source 1..1485: mol_type = other DNA
atggacctgagcaacaacaccatgagcctgagcgtgcggacccccgggcttagtagacgcttgagttcccagtctgtgatcgggaggccacgtggtatgtcagcaagctccgtgggcagcggatatggcgggagcgcatttggttttggggcttcatgcggaggtggatttagtgcggcatctatgtttggctcatcaagcggcttcggggggggatctggcagttcaatggccggcggcctcggagcgggctatgggagagcgctggggggaggaagctttggaggcctgggtatgggctttggcggttctcccggggggggtagcctgggaattctgtccggaaacgatggaggcctcctgagtgggagtgaaaaggagacaatgcaaaacctgaacgatcggcttgcgagttacctcgacaaggttcgagcactcgaggaagccaatactgagcttgagaataagatccgcgagtggtacgagacacggggcaccggcaccgctgatgccagccagagcgactattccaagtattaccctctgattgaagacctgcgtaacaagataattagcgcctccataggcaatgcccagcttctgttacagatcgataatgctcgcctagccgcagaggatttcaggatgaaatacgaaaatgaattggccctcaggcaaggcgttgaggccgacatcaacggcttacgccgcgtcttggacgaacttactcttactaggacagacctcgagatgcagatcgagagccttaatgaggagctggcgtatatgaaaaaaaaccacgaagacgagttgcagtcctttcgagtgggcgggcctggggaggtaagtgtcgaaatggacgctgcgccaggggttgacctgacgaggcttctgaacgacatgcgggcccagtacgagactatcgcggaacagaatcggaaggacgctgaagcctggtttatagagaagtccggtgaactccgaaaggaaatctctactaatacggagcagctgcagtcctcaaaatccgaagttacggatctgaggcgcgcgttccaaaacctcgagattgagttgcagtctcagctggccatgaaaaaatctttggaagattctctcgcagaggctgaaggtgactattgtgcccaactctcccaggtgcaacaacttatcagcaaccttgaggctcagctgctgcaggtcagagccgacgcggaacgtcaaaatgtcgaccaccagcggctcctcaacgtcaaagccagactggagctggaaatcgagacgtatcgtcgattgttggatggcgaggcacagggtgacggactagaggagtctctcttcgtcacagactctaaaagccaggcacagtctacagatagttccaaggaccccactaaaacgaggaagattaaaactgtggtccaggagatggtgaatggggaagtggtttccagccaggtgcaagaaatcgaggagctcatgtag

SEQ ID NO: 192245 - DNA, 1068 bp, synthetic construct
  misc_feature 1..1068: note = Description of Artificial Sequence: Synthetic coding sequence
  source 1..1068: mol_type = other DNA
atgagcctgcggctgcagagcagcagcgccagctacggcggcggcttcggcggtggctcctgtcagttagggggcggacggggcgttagtacttgctcgactcgcttcgtgtccggcggatctgccggtggttacgggggaggcgtttcttgcggcttcggcggcggagccgggtcaggctttggcgggggactcgggggaggttttggagggggattcgctggaggctttgtggattttggggcctgtgatggcggcttgctgaccggcaacgaaaagattactatgcagaatctgaacgatcggctggcatcatacctggagaaagtgcgcgctctggaggaggcaaatgccgatctggaagtgaagattcgcgactggcaccttaaacagtcgcccgcttcaccagaacgagattactccccctactacaaaactattgaggagctccgggacaagatactaactgcgactatcgagaataacagagtgattctggaaatcgacaacgctcgtctggcagcagatgacttccggctgaagtacgagaacgagctcgccctccggcagtcagtcgaggccgatattaatggcctgcggcgcgtcttggatgaactgacgctaagcaagaccgaccttgagatgcagattgaatctctgaacgaggagttggcatacatgaagaaaaaccacgaggaggagatgaaagaattctcaaatcaggtggtgggacaggtgaatgtagagatggatgcaacccctgggatcgatctgactagagtcctagccgagatgcgcgagcaatatgaagcgatggcagaacggaatcggcgggatgccgaggagtggtttcacaccaagtccgccgagctgaacaaagaggtttcgaccaatactgcaatgattcagacttcaaagactgaaattacagaacttagacggacactgcagggcctagaaatagagctccagagccagctatcaatgaaagcgggtcttgaaaacactgccgctgacccaggcacccaccagcagcaccgcgggcctgcagagcgggcaccccagtag

SEQ ID NO: 192246 - DNA, 1377 bp, synthetic construct
  misc_feature 1..1377: note = Description of Artificial Sequence: Synthetic coding sequence
  source 1..1377: mol_type = other DNA
atgagcctgcggctgcagagcagcagcgccagctacggcggcggctttggaggcggatcttgccagttggggggagggcgcggggtcagcacgtgttcaactagattcgtttccggcggtagcgccggtggatacggaggcggcgtttcgtgcgggtttggcggcggggcaggatctggattcgggggtgggtacggcggagggctgggcgggggttacggcgggggccttggagggggctttggggggggcttcgccggcggattcgtggattttggggcttgtgatggaggattactcaccggaaatgagaaaatcacaatgcaaaacttgaatgacagattggcgagttacctggagaaggtccgagcattggaagaggccaacgcagatttggaggtcaaaatcagagattggcacctgaaacaaagccccgcctctccagagcgggactactcaccatattacaagactattgaggaactcagagataaaatactgacggccacaatcgagaataaccgcgtcatcctggagattgacaatgctcggctcgcggccgacgacttcaggttgaagtacgaaaatgaactagcactgcggcagtctgtcgaggccgacataaatgggttgcggagagtgctcgacgaattgactctgagcaagacagacctagaaatgcagatagaatctctgaacgaagaattggcttacatgaaaaagaatcacgaggaggagatgaaagaattttccaaccaggttgtgggtcaagtgaacgtcgaaatggatgctacacccggcatcgacttaacgcgagttttagccgaaatgcgggagcagtatgaggcaatggccgaaagaaataggagggatgctgaggagtggttccacacaaagtcagccgaactaaacaaagaggttagtaccaatactgccatgatccagacaagtaaaaccgagatcactgagctgaggcgcaccctgcagggtttagagattgagcttcagtcccagctttccatgaaagcgggactggagaacacggtggctgagacggagtgcaggtacgctctgcagcttcagcagattcagggattaatctcctctatcgaggctcagctgtccgagcttagatccgagatggaatgccagaaccaagaatacaaaatgctacttgacataaagacacgccttgagcaagaaatcgccacatacaggtctcttctggaaggacaggacgccaagatgattgggttccccagtagcgccggttctgtctccccacgcagcacttcagtgaccactacttccagtgcctctgtcacgaccactagcaacgcctctgggagacgaacctcggatgtgagaaggccctag

SEQ ID NO: 192247 - DNA, 1263 bp, synthetic construct
  misc_feature 1..1263: note = Description of Artificial Sequence: Synthetic coding sequence
  source 1..1263: mol_type = other DNA
atgagcctgcggctgcagagcagcagcgccagctacggcggcggcttcggtggcgggtcctgtcaactggggggtgggaggggggtgtcaacgtgtagcactagattcgtcagcggcggaagtgctggcggctatggaggaggggtgtcttgcggcttcggcgggggggccgggtccggtttcggcggagggtacggaggggggctgggcggtggctacgggggtggattaggtggcgggtttgggggcggcttcgctggagggttcgtcgacttcggagcttgcgacggtggcctactgaccggaaatgagaagataaccatgcagaatctgaatgataggctggcttcataccttgagaaagttagggctctagaagaggctaacgctgatcttgaggtgaaaatcagagattggcatctaaagcagagcccagcatccccagagcgcgactactcaccttattataaaaccatcgaagagctgagggacaagatcctcactgcaaccatagaaaacaatagggttattctcgagatagataacgcaagactcgcagccgacgacttcaggttgaaatacgaaaacgagctcgcactgagacaatctgtggaagcggacatcaatggtctgcgcagagtgctggacgagctgaccctcagtaaaacggatctcgaaatgcagatcgagagcttgaatgaggagctcgcctacatgaaaaagaaccatgaagaggaaatgaaagaattctcaaatcaggtagtgggtcaagtgaacgtagagatggacgctacaccagggatcgatcttactcgcgtgctggctgagatgcgcgaacaatacgaggctatggcagaacgcaacagacgggatgctgaagaatggtttcatactaaatcagctgaactgaacaaggaggtgagcaccaacaccgccatgattcagacttctaaaacagagatcaccgagcttcggaggactctccaggggttggaaattgagctgcagtcccaactgtcgatgaaggcaggtttagaaaacaccgttgctgagacggaatgtcgatatgctctgcaactgcaacaaatccagggactgatatcatcaatcgaagcacagctgtcagagttacgaagtgaaatggaatgccagaaccaggaatacaagatgttgttggatatcaaaacgaggctggagcaagaaattgctacctatcgctccttactggaaggccaagacgccaaaaagagacagcctccctag

SEQ ID NO: 192248 - DNA, 1371 bp, synthetic construct
  misc_feature 1..1371: note = Description of Artificial Sequence: Synthetic coding sequence
  source 1..1371: mol_type = other DNA
atgaccaccaccttcctgcagaccagcagcagcaccttcggcggcggatccaccagaggagggtctcttctggctggcggcggcggattcggtgggggatctttgtccggtggaggaggcagccgttccatctccgccagttctgctagatttgtttcgtctgggtcaggaggcgggtacggcgggggcatgagagtttgcggattcggcgggggagctggtagtgtcttcggcggcggtttcggtggcggcgtgggcggtggctttggagggggcttcggtggcggcgatggaggcctgctgtctgggaatgagaagatcaccatgcagaacttgaatgacagactggcaagctacctggacaaggtgagagccttagaggaagctaacgcagatctggaagtcaagatccatgactggtatcagaaacagactcccacatcacctgaatgtgactactcgcagtacttcaaaaccattgaggagttacgcgataaaattatggccaccaccattgataattcccgcgtcatactggaaatcgacaatgcccgcctggcagcggatgattttcgcttgaagtatgagaatgagctcgccttgagacagggagtggaagcggatataaatggcctgcgaagagttctggacgagctaactcttgctaggaccgacctagagatgcagatagaagggctgaacgaagaactggcctacttgaagaaaaaccatgaggaagagatgaaggaattctcgagtcagctggcaggccaggtgaatgtcgagatggacgccgctcctggagttgatctgacccgagtcctggcagaaatgagagagcagtacgaggcaatggcagagaagaaccggcgggatgtggaagcctggttcttttctaaaacagaggaattgaacaaggaggtggcatcaaatactgagatgattcagacatcaaagaccgagatcactgacttgagaaggaccatgcaggaactcgagatagaactccagtcccaactgagtatgaaggccggtttggagaattcgcttgccgagactgagtgcaggtatgccacacaactgcagcaaatccaaggccttattggaggactcgaggcccagttgtccgaactacgctgcgagatggaggcgcagaaccaggaatataaaatgctactggatatcaaaacaagactggagcaggagattgccacttaccgctctctgctcgagggccaggatgccaaaatggcaggcatcgccatcagagaagcaagttccggaggaggagggagcagctcaaactttcacatcaacgtggaagagtcagtggatggccaggtggtcagctcacacaagcgggaaatctag

SEQ ID NO: 192249 - DNA, 876 bp, synthetic construct
  misc_feature 1..876: note = Description of Artificial Sequence: Synthetic coding sequence
  source 1..876: mol_type = other DNA
atgaccggcacccggagccggccccagcccgcccagaacgccaccaccgctaacacctcgcggccactcaaatctagtgggacccgctacgagaatgagttagctcttaggcagggtgtggaagccgacataaatggactgcgacgtgtcctggatgaactaaccttagcccggaccgacctggagatgcaaatcgaggggcttaatgaggagctcgcctacttgaaaaaaaaccacgaggaagaaatgaaggaattctcatcccaactggctgggcaggttaacgtcgagatggacgctgccccaggcgtggatttaaccagggtacttgcagagatgcgcgagcagtacgaagccatggcggaaaagaataggcgcgacgtggaagcatggtttttcagtaagaccgaggagctgaacaaggaggttgcatcaaacaccgaaatgattcagacctccaagaccgagatcacagacctccgtagaactatgcaggagttggaaatcgaattacagtcacagttgagcatgaaggcaggactcgagaatagtttggccgagacggaatgtcggtatgctactcagttgcagcagatacaagggctgatcgggggcctcgaagcccaactgagcgagcttcgctgtgaaatggaggctcaaaatcaagagtacaagatgctgcttgacattaaaacaaggctcgagcaggagattgccacttatcgatctctgcttgagggccaagacgctaagatggccggcatcgctattagagaagctagcagtgggggcggtggctcttcatctaactttcatattaatgtggaggagtcagtcgatggtcaagtggtgtcttcccacaagcgcgagatttag

SEQ ID NO: 192250 - DNA, 1371 bp, synthetic construct
  misc_feature 1..1371: note = Description of Artificial Sequence: Synthetic coding sequence
  source 1..1371: mol_type = other DNA
atgaccaccaccttcctgcagaccagcagcagcaccttcggcggcgggtcgacacggggaggtagcctgttggctgggggtggcggctttggcggcgggtccctcagcggagggggcggctctagatcaatttccgcgtcttctgcacgcttcgtgtcgagcggctctgggggcggctatgggggaggtatgcgcgtctgcggcttcggcggcggcgccggaagcgtgttcggagggggcttcggaggaggagtcggcggcggtttcggagggggttttggcggcggcgacggcggattgctcagcggtaatgagaaaatcaccatgcaaaacctgaacgacagactcgcctcatatttggacaaagtgcgcgcacttgaagaagccaatgctgacctagaagttaaaatccatgattggtatcagaagcagactcctaccagtcccgaatgcgactattcacagtatttcaagacaattgaggaattaagagataagatcatggccactacgatcgacaatagtcgtgtgatactcgaaatcgataatgcccgcctggctgccgatgacttccgcttgaaatacgaaaatgaactcgcattacggcagggcgtggaggctgacattaacggactccggagggtgctagacgagctcacactcgccaggaccgatctcgaaatgcaaatagagggcctgaatgaagaacttgcctatctgaagaaaaaccatgaagaagaaatgaaggaattctcatcacagctggctggccaggtgaatgtagagatggatgctgcacccggtgtggacttaactcgagtattggcagagatgcgcgaacagtacgaagcaatggctgaaaagaatcgacgagacgtggaagcttggttcttttctaaaaccgaagagctgaacaaagaagtggcgtctaacacggagatgatccagacaagtaaaacggagatcactgacctcaggaggaccatgcaggagttagaaatcgaactgcaatcccagctgtctatgaaggctggcctggaaaactctctagcagaaacagaatgccgctatgccacccagctccagcaaattcagggactgatcgggggtttggaggcccagctatcagagctgagatgcgaaatggaagctcagaaccaggagtacaaaatgttgctggatataaagactcgactggagcaagagatcgccacctatcggtccctgcttgaagggcaggacgccaaaatggccgggattgcaatccgagaggcctcgtcaggcggtgggggtagctcatcaaactttcacatcaacgttgaggagagcgttgacggtcaggtcgtgtctagtcataaacgcgagatttag

SEQ ID NO: 192251 - DNA, 756 bp, synthetic construct
  misc_feature 1..756: note = Description of Artificial Sequence: Synthetic coding sequence
  source 1..756: mol_type = other DNA
atgaccggcacccggagccggccccagcccgcccagaacgccaccacagctaatacatcacgtcccctgaagtctagtggcacccgctacgagaacgaactcgccctacgacagggagtggaggcagacattaacggcctgagaagggttctggatgaactgaccctggctaggaccgatctggaaatgcagattgagggtcttaacgaagagctggcctaccttaaaaagaaccatgaggaagagatgaaagaattttcttcccagctcgccggccaggtgaacgttgaaatggacgccgcacccggcgtggatttgaccagggtgcttgcggagatgcgcgagcagtacgaggccatggctgaaaagaatcgtcgcgatgttgaagcctggtttttcagcaagacagaggaactcaacaaggaggtagctagcaacaccgaaatgattcagacaagtaagactgagatcaccgacctgagacggaccatgcaggagctcgagatcgaacttcaatcccagctgagcatgaaggccgggctggagaatagcttggccgagaccgaatgcagatacgcaacccagttgcagcagattcagggtctgattggcggcctagaggcacagctcagtgagcttcggtgcgagatggaggcccagaatcaagagtataagatgctccttgatattaagacacggctggagcaggagatcgccacttacagatcacttctcgagggccaggacgccaaatag

SEQ ID NO: 192252 - DNA, 663 bp, synthetic construct
  misc_feature 1..663: note = Description of Artificial Sequence: Synthetic coding sequence
  source 1..663: mol_type = other DNA
atgaccggcacccggagccggccccagcccgcccagaacgccaccacagctaatacgtctaggccgctgaaaagcagtggcactaggtacgagaatgagcttgccttgcgacagggagttgaagctgatattaatggattacgtagagtccttgatgagctgaccctcgcacggacggatctggagatgcagattgaaggcttgaatgaagagttggcctacctgaaaaagaaccacgaagaggagatgaaagagttctcgagccagttggctgggcaggtgaatgtggaaatggacgccgcacccggggtggatctgacgcgtgtgctggcggaaatgagagagcaatacgaggcaatggccgaaaagaatcgccgtgacgtggaggcttggttcttctctaagacagaggagctgaacaaagaggtggcttccaataccgaaatgattcagacctcaaaaacagagatcaccgacctgcgccgcaccatgcaagagctggagatagaactgcagtcgcaactgagcatgaaggccggtctggagaacagcctggccgagacggagtgccgatacgccacacagctgcagcagattcaggggctcatagggggcttagaggcacagctctctgaacttagatgtgaaatggaggcccagtag

SEQ ID NO: 192253 - DNA, 1422 bp, synthetic construct
  misc_feature 1..1422: note = Description of Artificial Sequence: Synthetic coding sequence
  source 1..1422: mol_type = other DNA
atgaccacctgcagccggcagttcaccagcagcagcagcatgaagggctcctgtggaattggaggcggtatcggcggtggctcctcccgcatcagctccgtccttgcgggtggaagctgtagagcaccctctacttacggcggcggtctgagcgtgtcatcaaggttctccagtgggggagcatgtggcctcggaggcgggtatggcggtggattcagcagcagcagcagctttggaagcggcttcggaggtggttatggtggaggtctcggcgccgggttcggtggaggcctgggcgcaggattcgggggaggtttcgcaggaggggatgggcttttggtgggcagcgagaaagtaacaatgcagaacctgaacgaccgcctggcctcctatttagacaaggtgagagcccttgaagaggctaacgcagacttggaagtcaaaattagggactggtatcagaggcagagaccttctgaaatcaaggactattctccttatttcaaaacaattgaggacttacgaaataaaatcattgccgcaaccatcgagaatgctcagccaatcctgcaaatagacaacgcacgcctcgcggccgatgactttcggacaaaatacgagcatgaactggcacttcgacagaccgtagaggccgatgtcaatggcctacgaagagtgttggacgagctaaccctggctagaacagatctggagatgcagatcgagggcttgaaagaggaactggcctatctgcgtaagaatcacgaggaggaaatgctagccctgaggggccaaaccggaggagatgtgaacgtggaaatggacgccgcccctggggttgacctgtccagaattcttaacgaaatgagggatcagtatgaacagatggcagagaagaacaggcgagacgctgagacttggtttctgagcaaaaccgaggaactgaataaggaagtggcatctaacagcgaactggtgcagagctcccgcagcgaggtgacagagttgcgtcgggttttgcaggggctggagattgaactccagagccagctttcaatgaaagcctcgctggaaaattcgctcgaggaaacaaaaggccgatactgtatgcagctctcccagatacagggcctcattggttctgtggaggagcaactagcccagcttcggtgcgagatggaacagcagtcacaggagtaccaaattctccttgacgtaaaaacccgcctcgaacaagagattgcaacctaccgcagactgctagaaggcgaagacgcacaccttagcagtcagcaagcctcaggacagagctacagcagtcgtgaggtgtttacgtccagctcctccagttctagccgccagactcgcccaatcctgaaggagcaatcctccagtagctttagccagggacaatcttcttag

SEQ ID NO: 192254 - DNA, 1299 bp, synthetic construct
  misc_feature 1..1299: note = Description of Artificial Sequence: Synthetic coding sequence
  source 1..1299: mol_type = other DNA
atgaccaccagcatccggcagttcaccagcagcagcagcatcaagggctctagcggcctggggggcggcagtagccggaccagctgcagactgtccggcgggctcggagcaggaagctgtcggcttgggtctgcggggggcctgggctctactctcggagggtcatcatattccagttgctactcctttggaagtggagggggctacggctctagcttcgggggagttgatggcctgctggccggaggagaaaaggccaccatgcagaacttgaacgatagactcgcttcctatttggataaggtgagggccctggaggaggccaacacggagctcgaggtaaaaattcgggactggtatcagcggcaggcaccaggcccagctagagactactcgcagtactaccgtacaatcgaggagttacagaacaaaatcttgacggctacagttgataatgccaatatcctgctacagatcgacaacgcaaggctcgccgctgatgattttcgcactaagtttgagacagagcaggccctgcggcttagcgttgaggccgacattaatgggctccggcgggttctggacgaattaacacttgcccgagccgacctggaaatgcagattgaaaatcttaaggaagaactcgcctacctaaagaagaaccatgaagaggagatgaacgcattacgcggacaggtcggaggcgagataaacgtggaaatggatgcagccccaggagttgacctgtcgagaattctgaacgagatgagggaccagtacgagaaaatggcagagaagaatcgaaaagacgcagaggattggttctttagtaaaactgaggagctgaatagggaggtcgctactaattctgaattagtgcagtcgggtaagagcgagatctcagaattgcggagaaccatgcaggctctggagatcgagcttcagagccagttaagcatgaaagcgtccctggagggtaacctggctgagacagaaaatcgctactgtgttcagctgagccagatacagggtctgattgggtcagtggaggagcagctggcccagcttaggtgtgagatggagcagcagaatcaagaatacaagatcctacttgacgtcaaaactcgcttagaacaagagattgccacgtacagacgtttactcgagggagaagatgcccacctgacccagtataaaaaggagcccgttacaactaggcaggttcggacaattgttgaagaagttcaagatgggaaagtcatatctagtagagagcaggtacatcagactactcgatag

SEQ ID NO: 192255 - DNA, 1920 bp, synthetic construct
  misc_feature 1..1920: note = Description of Artificial Sequence: Synthetic coding sequence
  source 1..1920: mol_type = other DNA
atgagctgccagatcagctgcaagagccggggccggggcggcggcgggggaggttttcgggggtttagcagcggctcagccgtcgtgagcggaggcagccgtaggtcaacctcttcattctcctgtttgtcccgccacggagggggaggcgggggcttcggcggtggcggtttcggaagtcgatctttggtcggcctaggtggaaccaaaagcatcagtatctctgtggccggtgggggcggtggctttggtgcagccggaggctttggcggcaggggtggcggtttcggtggaggttccagctttggggggggtagtgggttctccggtggcgggttcgggggagggggcttcggaggcggcagattcggcggttttgggggtccaggcggagtcggaggtttgggagggccaggaggctttggaccgggaggctatcctggtggcattcacgaagtctccgtcaaccagtctctgcttcagccgctcaatgttaaggtcgacccagagatccaaaacgtcaaagcccaggagcgggaacagatcaaaacactcaacaacaaatttgcttcctttattgataaggttagattcttggagcagcagaaccaagtgctgcagaccaagtgggaactgcttcagcaaatgaatgtggggaccaggcctatcaacctggagcccatcttccagggttatatcgacagcctgaagaggtaccttgacggccttactgcggaacggacctcacaaaattcagagttgaataacatgcaggacctcgtggaggattacaagaagaaatacgaggacgaaattaataagcgtactgccgccgagaatgacttcgttaccttgaagaaagacgtggacaacgcctatatgatcaaggtggagctccagtcgaaggtcgatttgctgaaccaagaaatagagttcctgaaagtgctctacgacgcggagatctcacaaatccatcagtcagtgacagatacaaatgtgatcctctcaatggacaactctaggaacctggacctggattccatcattgccgaagtcaaagcacaatatgaggagattgcgcaacggagtaaggaggaagcagaagccctctatcactccaagtacgaggagctgcaggttacagtaggtcggcacggggattctctgaaggaaataaagatcgaaatcagtgaactcaacagagtgatccaaaggttacaaggggaaatcgctcacgttaagaaacagtgcaaaaacgtacaagacgccatcgctgatgccgagcagagaggagagcacgcccttaaagacgccagaaacaagctgaacgacttagaggaggccctgcagcaggctaaagaagatcttgcgagactcctcagagattatcaagagctgatgaacgttaagctcgccctggatgtcgagatcgcaacatacagaaaactactggaaggagaagagtgcagaatgtccggcgacctgtcctccaatgtgactgtgagcgtcacatcttctacaatctcgagtaatgtcgcttccaaggcagccttcggggggagtggcggcagagggtcctcgtcaggcggcggctattcgagtggctcctcctcttacgggagtggaggaaggcaaagcgggagccgggggggcagcggggggggtggttcgatctctgggggaggttatggttctggggggggctccggcggcaggtatgggagcggagggggcagtaaagggggctccatatccggaggaggctatggaagcggtgggggtaaacacagctccggggggggaagtaggggcggttcatccagcggcggcggatacgggtccggcggcggagggagcagcagcgtaaaggggtcatccggggaagccttcggatcgtcggttaccttttccttccgctag

SEQ ID NO: 192256 - DNA, 1275 bp, synthetic construct
  misc_feature 1..1275: note = Description of Artificial Sequence: Synthetic coding sequence
  source 1..1275: mol_type = other DNA
atggacttcagccggcggagcttccaccggagcctgagcagcagcctccaggcgccggtggtctccacggtggggatgcagcgtctgggcacaacaccctccgtgtatggcggcgcaggtggccgcggcatacgtataagtaactctaggcacaccgttaattatggctccgatttaaccggaggtggcgatctgtttgtgggcaacgaaaagatggccatgcagaacctgaatgatagactagcatcttacctcgagaaagtcagaacccttgagcagagcaatagcaaactcgaggtacaaattaaacaatggtacgaaacgaacgcacctcgtgctggacgagattacagcgcctactatcgacaaatagaggaattgcggtcccagatcaaagatgctcagctccaaaatgcccggtgtgttttacagatcgataatgcaaagctggccgccgaagattttagattgaaatacgagactgaaaggggaattaggctgactgtagaagctgaccttcagggcctgaataaggtattcgatgatttgaccctccacaagacagatctcgagatccagatcgaggagttgaacaaggacttggccctgttgaaaaaggaacatcaggaggaggtcgacggtctccataagcacctgggtaatactgtaaatgtggaggtggatgcggctcccggactgaacctgggtgtgattatgaacgagatgagacaaaaatacgaggtcatggctcaaaaaaacctgcaggaggcaaaagagcagttcgaacgccagactgctgttctgcagcagcaagtgaccgttaatacggaggagcttaaagggacagaggtgcagttgacggaattgcggcgcacatctcagtctcttgagattgagttgcagtcccacctaagtatgaaggaaagccttgagcacacactggaggaaacaaaagcccggtactctagccaactagccaaccttcaatcactgctctcctccctggaggctcagctgatgcagatccggagcaatatggagcgccagaacaacgaatatcacattctgctcgacattaaaaccaggctcgagcaggaaattgctacataccgccgcctcttagagggggaagacgtaaagacaacagaataccaattaagtacgttggaggagagggacatcaaaaagaccaggaagattaaaaccgtcgtccaggaggttgttgatggtaaggtggtgtcttccgaagtgaaggaagtggaagagaatatttag

SEQ ID NO: 192257 - DNA, 1578 bp, synthetic construct
  misc_feature 1..1578: note = Description of Artificial Sequence: Synthetic coding sequence
  source 1..1578: mol_type = other DNA
atgagctgcagcagccgggccagcagcagccgggccggcggcagctcttccgcaagagttagcgcaggtggctcgtcattctcttcagggtctaggtgcggactcgggggaagttcagcccaggggtttcgaggcggcgctagtagttgcagcctctcaggtggatcatccggcgccttcggcggatcgtttggcggaggttttgggtcttgttcagtagggggcggattcgggggggcatccggcagcggcactgggttcgggggggggagtagcttcggaggcgttagtggattcggtcggggttccggattttgcggaagttcccgctttagctccggggcgactggcgggttttactcgtatgggggtggcatgggggggggcgtgggggacggaggtctgttcagcggtggggaaaagcaaacgatgcagaacctcaacgaccgtttggccaattacctggacaaggtgagggctttggaagaggcaaatacagacctagagaacaaaatcaaggagtggtacgacaaatacgggcctggctctggggatggtggtagtggaagggactacagcaagtactattccattattgaggatctgcggaatcaaatcatcgcagctaccgtggagaatgcaggaattatactgcatatagataatgccaggctggccgccgatgattttcgcctgaaatacgagaacgaattgtgtctaaggcaatctgtggaagccgacattaatgggctgcggaaagttttggacgacctgactatgacccgtagcgacctcgagatgcaaattgagtcgtttaccgaagaacttgcctacctgcgcaagaaccacgaagaagagatgaagaacatgcagggcagttcggggggtgaggtcactgtggagatgaatgccgcccctggaaccgacctgaccaagctccttaacgatatgcgggcacaatacgaggagctggcggagcagaacaggagggaggctgaagagaggtttaataaacagagtgcgtcattacaggctcagatttctaccgacgctggagccgccacatcggccaagaacgagataactgagctgaagaggacgctgcaggctctggagatagagctgcagagccagttagctatgaaatcatccctggaaggaacacttgcggacacagaggccggatatgtcgctcagttatctgagatccaaacacagatctctgccctggaggaggaaatctgccagatttggggtgaaactaagtgtcagaatgcagagtataagcagctgctggacatcaagacccgcctggaggtggaaatcgagacctatagaaggttgttagacggcgaaggaggcgggagtagttttgccgaatttgggggcagaaatagtgggtccgtcaatatgggttccagagatctggtctctggcgattcaagatctggaagctgctcggggcagggcagggattcttccaaaaccagggttacaaaaaccattgtagaggaactggtcgacgggaaggtcgtgtcttcccaagtttcttcgatttccgaggtcaaagtaaagtag

SEQ ID NO: 192258 - DNA, 1890 bp, synthetic construct
  misc_feature 1..1890: note = Description of Artificial Sequence: Synthetic coding sequence
  source 1..1890: mol_type = other DNA
atgagccggcaggccagcaagaccagcggcggcggcagccagggcttttcagggcgatctgccgtggtgtccggcagctctcgcatgagctgtgtcgcccactctggtggggcaggcggaggtgcctacggcttcagatctggggcaggcgggtttggcagtcggagcctatataatctaggaggcaacaagagcatctcaataagcgtcgctgcaggcggctctcgagccggaggatttgggggagggcgatctagttgcgcttttgctggcggatatgggggcggctttggttccgggtacgggggaggctttggtggggggttcggaggcggcagaggaatggggggcggctttggaggagccggcggatttggcggagcaggtgggtttggcggtgcaggcgggtttggcggacccggtgggtttgggggatctggggggttcggaggaccaggtagcctgggctcaccgggagggttcggccccggaggatttcctggggggattcaggaagtgacaattaatcaatccttgctgcaaccactcaacgtggaaattgacccccaaattgggcaggtgaaagcccaggaacgggaacagattaaaacacttaacaataagttcgcatccttcatcgacaaggttcggtttctagaacagcagaataaggtgctggaaactaaatggaatctgctccaacagcagggaacctccagcatatcgggcactaataacttagaaccactcttcgagaatcacatcaattacctgagaagttatctggacaacattctgggggagagaggaagactggattcagaactcaagaacatggaggacctggtagaggacttcaagaaaaagtatgaggatgagatcaataaacgcactgctgctgagaatgaattcgtcacattaaagaaagatgtcgatagcgcttacatgaacaaggtcgagttgcaagccaaggtcgacgctctgatcgatgaaatcgactttttgcggaccctgtatgacgctgaactgtctcagatgcagagccacatcagcgacacatctgtagtattgagcatggacaacaacagatcattggatctcgatagcatcatagcagaggtgcgcgcacagtacgaagacattgcccaacgcagcaaggccgaggctgaagccctgtaccagacaaagctcggggaactccagaccacagccggtaggcatggtgatgatttacgcaacaccaaatctgagataattgaattgaaccgcatgatccaacggctccgggcagagatagaaggcgtgaagaaacaaaatgcaaacctgcaaacagctatagccgaagcggaacagcatggagaaatggccttgaaggacgctaacgctaagctccaggagctacaggcagccctgcagcaggccaaagacgacttggcccgccttctcagggattaccaagagttaatgaacgttaagcttgcactggacgttgagatcgccacttataggaaactgctggaaggcgaggagtatagtcggatgtcgggcgagtgcccctcagcggtttcaatctctgtcgtgtcttcaagcacgacttcagcctctgcagggggctatggcgggggctacggagggggcatggggggagggctaggtggggggttcagtgccggaggggggtccggtagcggtttcgggcgaggaggcgggggaggcattgggggaggttttggcggaggttcatcaggtttttccggcgggtcggggttcgggtccatctcaggagcacggtatggcgtatccggtggcgggtttagttcagccagtaaccgggggggcagcataaaattcagccagtctagccagtcaagtcagagatattcacgatag

SEQ ID NO: 192259 - DNA, 1887 bp, synthetic construct
  misc_feature 1..1887: note = Description of Artificial Sequence: Synthetic coding sequence
  source 1..1887: mol_type = other DNA
atgagccggcaggccagcaagaccagcggcggcggcagccagggcttctctggcagatccgctgtggtctccggatcaagtcggatgagttgcgtggcccacagcggaggcgcagggggaggggcctatggatttcgctccggtgcgggtggcttcgggtctaggtcactgtataatctgggcgggaacaagagtatttctatctctgtggcagccggcggctctcgcgccgggggatttggcggcggccggagcagttgtgccttcgctgggggatacggcggaggcttcggtagcggctacggcggtgggttcggcgggggcttcggtgggggaaggggcatggggggtggatttggaggcgccgggggctttggaggcgctggcgggtttggcggagccgggggcttcggtggcccaggcggctttggggggtccggaggtttcggcggacccggcagcttgggctcgcccggcgggttcggcccgggtgggttccctgggggaattcaggaggtgacaattaaccaaagtctcctgcagcctctgaatgtggaaatcgatcctcagatcggacaagtgaaagcccaagagagagagcaaattaagactttgaataataagttcgcctccttcatcgacaaggtgcgcttcctggaacagcagaacaaggttctggagactaagtggaacctcctgcaacagcaaggaactagcagcatctcaggcaccaacaacctcgagcccctgtttgaaaatcacattaactacctgcggagctacctcgataacattctgggggagcgcggcaggctcgacagtgagttgaagaatatggaggacttggtcgaggacttcaagaaaaagtacgaagatgaaattaacaagcggacagctgctgaaaatgaatttgtcactttgaaaaaggacgttgattcagcctacatgaataaggttgagcttcaggccaaggtcgatgctttgatcgacgagattgacttcctgaggacactgtatgatgccgagctgagccagatgcagagccacatctccgacacctctgtcgtactctcaatggacaataaccgttcacttgacctggatagtatcatcgcagaggtgagagcacagtatgaggatatcgcccagcgttctaaagcggaggcggaggctctgtaccaaacaaagcttggagagctgcagacaactgccggccgtcatggtgatgacctcaggaacactaaaagtgagattatagagctgaatagaatgatccagcggctgcgagcggagattgaaggggtgaaaaaacagaacgccaatcttcaaaccgcgatcgccgaggccgagcaacatggcgaaatggcccttaaagatgccaacgctaagctccaagagctgcaggctgccttacagcaggctaaggacgacttagccagacttctacgggactatcaagagctgatgaacgtgaagttggccttggatgtggaaatcgcgacataccggaaacttctagagggtgaagaatacagaatgagcggagagtgcccttctgccgtgagcatttcggtcgtgtcctcaagcactacttcagccagcgcgggtggctacggcgggggatacggtggtggcatgggaggtggtctcggaggcggattcagcgccggagggggttctggctccggtttcggtagaggcggaggcggcggcattgggggcggcttcggtggaggctccagcggtttctccggaggcagcgggttcggtagcatttctggagccagatacggcgtttctggcggcggtttttcatcagcaagcaatcgggggggtagtattaagttctcacagtcaagccagtctagtcagcggtattctagatag

SEQ ID NO: 192260 - DNA, 1251 bp, synthetic construct
  misc_feature 1..1251: note = Description of Artificial Sequence: Synthetic coding sequence
  source 1..1251: mol_type = other DNA
atgccctacaacttctgcctgcccagcctgagctgccggaccagctgctctagtagaccctgcgtgcccccaagttgtcacagttgtaccctgccaggcgcctgtaatatccctgccaatgtcagtaactgtaactggttctgtgagggatcttttaacggatccgagaaggagaccatgcagtttctcaacgacagactcgcctcctacctagaaaaggtgcgtcaattggagagggataacgctgaactggagaatttaattcgagaaagatctcaacagcaagaacccttattatgcccctcgtaccagagctacttcaagacaattgaagagctccagcagaaaatcctgtgtacaaagtcagagaatgctcggctggtcgtacagattgataatgctaagctggcagctgatgattttcggaccaaataccagaccgaactgagcctgcggcaacttgtggagagcgacatcaatggattacggaggattcttgatgagttgaccctttgcaaatccgatttagaggcacaggttgagtctctgaaggaggaactgctgtgcttaaagtccaaccatgaacaggaagtgaataccctgcggtgtcagctgggcgataggctgaatgttgaagtggacgctgctcccacagtagaccttaaccgggtactgaacgagactagaagccagtatgaagcactggtggagaccaaccgccgtgaggttgagcaatggttcactactcagactgaagagttaaataagcaagtggtgagcagcagtgagcagctgcagtcgtaccaagctgaaatcattgaactcaggagaaccgtgaatgcccttgaaattgaactgcaggctcagcacaatctccgtgatagtctggaaaacactttgaccgagtccgaggccaggtattcgtctcaactgagccaagtgcagagcttgatcacaaacgttgagagccaactcgccgagatacgatcagatttggagaggcaaaatcaagaataccaggtcctgctggacgtccgagccagactagagtgcgaaatcaacacatacagaagtctccttgaaagtgaggactgtaacctccctagtaacccatgcgcaactaccaacgcctgctctaagccaattggcccttgtctctccaatccctgcacgagctgcgtgccaccagctccctgtacgccttgcgccccaagaccaaggtgcggcccttgcaactcctttgttaggtag

SEQ ID NO: 192261 - DNA, 1674 bp, synthetic construct
  misc_feature 1..1674: note = Description of Artificial Sequence: Synthetic coding sequence
  source 1..1674: mol_type = other DNA
atggtgagcaagctgaccagcctgcagcaggagctgctgagcgccctcctgtcatcgggggtcactaaggaagtgctggtccaggctctcgaggaacttctaccctcgcccaatttcggagtgaagctggagactttgccattgtccccagggtctggggcagagcccgacaccaaacccgtctttcataccctgactaatggacatgccaaagggcggctttcaggagatgagggaagcgaagatggagatgattacgacacgcccccaatcctgaaggagctccaggccctgaatactgaagaggccgccgagcaaagggccgaagtggatagaatgttaagtgaagacccttggagagctgcaaaaatgattaagggatacatgcagcagcataatatacctcagcgggaagtcgtcgatgttaccggcctgaaccagtctcatctgtcacagcatctcaacaaggggactccaatgaagacacagaagcgcgctgctctctatacctggtacgttaggaaacagcgcgagatccttcgacagtttaatcaaacagtccaatcatccggtaacatgaccgataagagcagccaggatcagctactgtttctgttcccggagttctcacagcagagccatggaccaggtcagagcgatgacgcttgttctgaaccgaccaataagaagatgcggcggaatcgcttcaaatgggggcccgccagtcaacaaattctttaccaggcttatgaccggcagaaaaatccaagcaaagaggagcgcgaagctctggtggaagaatgtaacagggctgaatgcctgcagcgcggcgtttcaccaagcaaggcccacggattaggttctaatttagtaacggaggttcgggtttataactggttcgccaaccgcaggaaggaggaggcgtttcggcagaaacttgctatggatgcctactcctccaaccagacacactctttgaatcctttattgtcccatggatcacctcatcatcagcctagtagtagtcctccaaacaagctttcgggggttagatattctcagcagggaaataacgagatcacatctagcagtaccattagtcaccacggcaattccgctatggttacctcacagtcggtgttgcagcaggtgagtccagcaagcttagacccaggtcacaatcttcttagccccgacggcaagatgatctctgtcagcggaggtggcctaccaccagtgtctacgctgaccaatatccatagcctgagtcatcacaacccgcagcaatcccaaaacttgatcatgacacccctgtctggtgtgatggcaattgcccagtcgctgaacacatctcaggcacagtcggtccccgtgatcaattcggtcgccggttctctggccgcactacagcccgttcaatttagccagcagttgcacagtccacaccagcaaccactcatgcagcagtctcccgggagccatatggcccagcagccgttcatggccgccgtaacacagctccagaacagccacatgtatgctcataaacaggagccaccccaatattctcatacctcacgtttccctagtgcgatggtcgtcaccgacacctcgagcatttccaccctaacaaatatgagcagctccaaacagtgcccattacaggcctggtag

SEQ ID NO: 192262 - DNA, 1215 bp, synthetic construct
  misc_feature 1..1215: note = Description of Artificial Sequence: Synthetic coding sequence
  source 1..1215: mol_type = other DNA
atgagctacagctgcggcctgcccagcctgagctgccggaccagctgttcttctaggccatgtgtccctccttcgtgccacgggtgcactctgcctggggcatgcaacatcccggcaaatgtctccaactgcaactggttttgcgagggcagtttcaacggctcagaaaaggaaaccatgcagtttctcaacgataggctcgctagctatctggagaaagttcgtcagctcgaacgagacaacgccgaactcgagaatctgataagagaaaggtctcagcagcaggagcctttagtctgcgcgagctaccaaagctattttaagactattgaggagctacagcaaaagatcctctgcagcaaatctgaaaacgctcggctggttgttcagattgataacgccaagctggcgagcgatgacttcagaaccaaatatgaaaccgaactatctctgaggcaattggtggagtctgacatcaatggtctgcgacggattcttgatgaacttaccttgtgtaggagcgatcttgaagcccaggtggagtctctaaaggaggaactactatgcttgaaacagaatcacgagcaggaggtcaatacattacggtgtcagctcggtgatcggttaaatgtggaggtcgacgcagcccccacagtcgatctgaaccaagtgcttaatgaaactaggagccaatatgaagcgcttgtcgaaacgaaccgccgcgaggttgagcagtggtttgccacacagaccgaggagttgaataagcaggtggtgagtagcagtgaacagttacagtcataccaagctgagattattgagttgcgaaggactgtgaacgcacttgaaatcgagctgcaggcccagcacaacctccgtgatagcctggagaataccctcacggagtccgaggcccgttacagctctcagttgtcccaggtgcagcgcctcatcaccaatgttgagtcgcagctcgcggaaatccggtcggaccttgaacggcagaatcaggagtaccaggttttgcttgacgtgcgggcacgtttggagtgtgagattaacacgtacaggtccctactggagtccgaagactgtaagttaccctcgaatccttgcgccacgacaaacgcttgtgataagtctactggcccttgcatctcaaacccatgtggactgagggcgaggtgtggtccatgcaatacctttggctactag

SEQ ID NO: 192263 - DNA, 1215 bp, synthetic construct
  misc_feature 1..1215: note = Description of Artificial Sequence: Synthetic coding sequence
  source 1..1215: mol_type = other DNA
atgccctacaacttctgcctgcccagcctgagctgccggaccagctgctcaagtagaccctgtgtgcctccctcatgccacggctatacgctccctggagcctgtaatattcccgccaacgtctctaattgtaactggttctgcgaaggctccttcaacggatccgagaaagagacaatgcagttcctcaacgacaggttggccagttatctggagaaagtcagacagctcgaacgcgacaacgcagagctggagaacctgataagagaaaggtcccagcaacaggagcccttgctgtgtccaagctatcaatcctatttcaagacaatcgaggaattgcagcaaaagatcctctgcagtaagtccgaaaacgccagattagtagtgcaaatcgataacgccaaactagccgccgacgacttccgaacgaagtaccagaccgaacagtctctgagacagctggttgagagtgatatcaactccttgcggcggatactggatgagctgactctgtgtcgttctgatctagaggcacaaatggaatctctcaaggaggaactgctgtcacttaaacagaaccatgaacaggaagtgaacactctaagatgccaactgggggaccgtctcaatgtggaagtagatgcggctcccgctgtggatctgaatcaggtccttaacgagactcgaaaccagtacgaggcccttgttgagactaaccgccgtgaggtggaacagtggttcgcgacccagactgaggaattaaacaaacaagtggtgtcatcctccgagcagctgcagtcgtatcaagccgaaatcatagaattgcgacgcacggtcaacgctcttgaaatagaacttcaggcgcagcacaacctgcgttattccctcgaaaataccctcacggagagcgaagccagatacagcagtcagctgtcccaagtgcagtccctcatcacaaacgtcgaatcccagctagcggaaattcgtagtgatctggaaaggcagaaccaagaatatcaggtgctgctggatgtgcgtgcgcgcctggagtgtgaaatcaatacctaccgctccttactagaaagcgaggattgtaagcttccatcgaatccttgcgctaccacaaacgcctgcgagaaaccaatcggttcctgcgtaacaaacccctgtggtcccaggagtaggtgcggcccctgcaatacctttggctactag

SEQ ID NO: 192264 - DNA, 1311 bp, synthetic construct
  misc_feature 1..1311: note = Description of Artificial Sequence: Synthetic coding sequence
  source 1..1311: mol_type = other DNA
atgctgtacgccaagcccccccccaccatcaacggcatcaagggcttgcagcgaaaggaaagactgaagcctgcacacatacatttgcagcagctgacctgctttagcatcacctgcagcagcactatgagttacagttgctgcttgccgagcttaggatgcaggaccagttgttctagtaggccctgcgttccaccctcctgccatggttacaccctgcctggtgcttgtaatatccctgcaaacgtttccaactgtaactggttctgtgaaggctcatttaatggatctgagaaggaaacaatgcagttcctcaacgatcgcctcgctagttatctggagaaagtgagacagctggaacgggacaatgctgagctggagaagctgatacaggagaggtcccagcagcaggagccgctcctgtgtccatcctaccagagttattttaaaaccatcgaggagttgcaacaaaagatactctgcgcaaaagctgaaaacgcaagactcgtggtgaacatcgataatgccaagcttgcgagcgatgatttccgatctaagtaccagacggaacagagccttcgtctgctcgtggagtcagatattaactcaatcaggaggatcctggacgaactcactttgtgcaagtcagacctcgagtcccaggttgaatctcttcgcgaggagcttatctgtctgaaaaagaatcatgaagaggaggtcaatactctccgaagccagttaggtgatagattgaacgtggaagtcgatacagcccccacagttgacctgaaccaagtactgaacgagacaaggagtcagtacgaagcactcgtggagatcaatcgccgggaagtggagcagtggtttgctactcagactgaagagctcaataaacaggtcgtctccagctccgagcaactgcagtcttgccaggccgagatcattgagctcagaagaacagtcaacgccttggagatcgagttacaggctcagcataacctgcgggactcactcgagaacaccctgaccgaaagtgaggcacattacagcagccaactctcacaagtgcagtctctgattacgaatgtcgagtcacagctggccgagattcggtgcgatttagaaagacaaaatcaggagtatcaggtcctcttagacgtgcgggcccgactggaatgcgaaattaatacataccgctcgctgttagaaagcgaggactgcaagttgccgtgcaatccttgtgccactacaaacgctagtggcaattcatgcggcccatgcgggacctcgcaaaaaggatgctgtaactag

SEQ ID NO: 192265 - DNA, 1185 bp, synthetic construct
  misc_feature 1..1185: note = Description of Artificial Sequence: Synthetic coding sequence
  source 1..1185: mol_type = other DNA
atgagctacagctgctgcctgcccagcctgggctgccggaccagctgctcatcaagaccatgcgttcctccctcctgccatggatacactttaccaggtgcatgcaatatcccagctaatgtgagcaactgcaattggttttgcgaaggttcttttaacggtagcgagaaggagacgatgcagtttctcaacgatagacttgcgtcctaccttgagaaagttagacaactggagcgggacaatgcagaactggagaaattgatacaagagaggagccaacagcaggaacccctgctatgtccgtcataccaatcctactttaaaactatcgaagaactccagcaaaaaatcttatgcgcaaaggctgaaaacgcccgcttggtggtcaacatcgacaacgcaaagctggcgagcgacgattttcgatctaaatatcaaactgagcaaagtctcagactcctcgtggaaagcgatatcaactctattcgccgcatcctggacgagctaacactgtgcaagagtgacctcgagagccaggtggagtccctgcgcgaagagctgatctgtcttaagaaaaaccatgaggaggaagtaaacaccttgcgctcacagctgggcgacagacttaatgtggaggtcgacactgctccaaccgtcgatctcaaccaggtcctgaacgagactcggtctcagtacgaggccctggtcgaaatcaatagacgggaggtcgagcagtggtttgcaacacaaaccgaggagttaaacaagcaagttgtgtcctccagcgagcagcttcagagctgccaagctgagatcatcgagctgaggcggacagtgaacgccctggagatcgagttacaggcgcagcacaacctgagggattccttggagaatacactcaccgagtcggaggcccactacagtagtcagttatcccaagtgcagtctctgataactaatgtggagagtcagctggcagaaatccgctgcgaccttgaacgccaaaaccaggagtatcaggtgctcttggacgtgcgcgccaggcttgagtgcgagattaacacctacagaagcttactcgagtcagaggattgcaagctcccttgcaatccgtgcgccactacaaatgcttcgggcaacagttgtggaccgtgtgggacttctcagaagggctgctgcaattag

SEQ ID NO: 192266 - DNA, 1278 bp, synthetic construct
  misc_feature 1..1278: note = Description of Artificial Sequence: Synthetic coding sequence
  source 1..1278: mol_type = other DNA
atgtacagcagcagcagctgcaagctgcccagcctgagccccgtggcccggtcgtttagtgcttgcagtgttggactggggagatcaagctatagagcgacatcttgtttacccgctttatgtctccctgccgggggtttcgctacttcttactccggaggaggtggatggttcggagagggtattctgaccggcaatgagaaggaaaccatgcagagcctgaatgatcgtctggcaggctatttggaaaaagttaggcaactcgaacaagaaaatgcttccctggagtcaagaattagggaatggtgtgaacaacaggtgccatacatgtgtcccgactaccagtcctattttcgtactattgaagaacttcagaagaagacactgtgctcgaaagccgagaatgctcgactcgttgtagaaatagacaatgcgaagctggcggcggacgacttcagaacaaaatatgaaacggaagttagcctgcgccagttggtggaatcggacatcaacgggttaagaaggattctcgatgatctgactctgtgtaagtcagatttggaagctcaggtcgaaagcctaaaggaggaactcctatgccttaaaaaaaatcacgaggaagaggtcaatagtctacgctgtcaactgggggaccgcctaaatgtagaggtcgacgccgctcccccagtggatctgaaccgcgtactggaggagatgaggtgccagtatgaaacactagtcgagaacaatagacgcgacgccgaggattggttggacactcagagcgaggaactaaatcagcaggtagtctcaagtagcgagcagctgcaatcttgtcaggccgaaataatagagctgcggagaaccgtgaatgctttggagattgagctgcaagcccagcactcaatgcgcgatgctctggagtctacattggcagaaactgaggctcggtatagctcccaattggcccaaatgcagtgtatgattacgaacgtggaggctcagctcgcggaaatcagagctgaccttgaacgccagaatcaggaatatcaagttctccttgacgtccgagctagactggagtgcgaaataaacacatacagggggctgctggagagcgaggatagcaaacttccctgtaacccgtgcgcccccgattacagccctagtaagtcctgtctcccttgtttgcccgccgcgtcttgcggtccatctgcggctcgtacgaactgttcgcctcgtcccatctgtgttccctgccccggcggccggttttag

SEQ ID NO: 192267 - DNA, 1368 bp, synthetic construct
  misc_feature 1..1368: note = Description of Artificial Sequence: Synthetic coding sequence
  source 1..1368: mol_type = other DNA
atggccagcaagtgcctgaaggccggcttcagcagcggcagcctgaagtcacctggcggcgcctccggcggttcaaccagagtgtctgcaatgtacagttcctcgtcttgcaaactgccctccttgtcacctgtggcacgttctttttccgcgtgtagtgttggcctgggtcgctctagttatcgtgcgacgtcctgtctcccagcgctttgcttgcctgcgggagggttcgctactagctatagcggaggggggggctggtttggggagggtattctgactgggaatgaaaaggagacaatgcaatccctgaatgaccgcctcgccggatacttggaaaaagtaaggcagttggagcaagaaaacgcttcgcttgaaagtcgaatacgcgaatggtgcgagcagcaagtgccctacatgtgtcccgactaccagtcatacttcaggacgattgaggaactgcagaagaagactctctgctcaaaggccgagaatgcacgcctcgtcgtagaaatcgacaacgcaaagttggccgctgacgactttagaactaaatatgagactgaggttagcctcaggcagcttgtggagtcggatatcaatggcctgaggagaatcctcgacgatctgacgctgtgcaaatctgatctggaggcacaggtggaaagcctcaaggaagaactcctgtgtctaaaaaaaaatcacgaggaggaagttaactcacttagatgccaactgggcgacagactaaatgttgaggtcgatgctgctccaccagtggatctgaaccgggtcctggaggagatgagatgtcagtacgagaccctagttgaaaataaccggcgggatgcggaagactggctggacacccaaagcgaggagttaaaccagcaggtcgtttcctctagtgagcagctccaatcttgccaagccgaaatcatagagctcaggagaactgtgaacgccctagaaattgaacttcaggcacaacatagtatgagagatgctctggagtctacattggccgagactgaagctcggtacagctcacaattagcccaaatgcaatgtatgatcacaaacgtcgaagcccagctcgcggaaattcgtgccgatctggagcgccagaatcaggagtaccaagtgctccttgacgttcgtgccaggctcgaatgtgaaatcaatacgtaccgtggcctgctggagtccgaagatagcaaattaccctgtaacccatgcgcaccagattattcccctagcaaaagttgtctgccatgccttccagcagcttcgtgtggtcctagcgcggccagaaccaattgctcacctagaccaatttgtgtaccttgccccggtggacggttttag

SEQ ID NO: 192268 - DNA, 1404 bp, synthetic construct
  misc_feature 1..1404: note = Description of Artificial Sequence: Synthetic coding sequence
  source 1..1404: mol_type = other DNA
atggccacccagacctgcacccccaccttcagcaccggcagcatcaaaggcctatgtgggaccgcaggcggcatctcgcgggtaagctccattcggtcagtgggcagttgtcgcgtgcccagtctagcaggtgctgctgggtacatttcatctgcgagatcgggcctcagtggtctgggatcttgccttccaggatcatatctgagttctgagtgtcacacatctggttttgtcggatctggcggctggttctgtgaaggatcattcaacggcagtgagaaagagacgatgcaattcctgaacgaccgcttggcaaactacttagagaaggtgagacaactggagagggagaatgcagagctcgagtctcggatccaggaatggtatgagttccagattccttatatctgcccagactatcagagctattttaagactattgaggacttccagcaaaaaattctgctgacaaagagcgaaaatgcccgcctggtactgcagattgataacgccaaattggcggctgatgatttccggactaaatatgaaactgagctgagcctgcgtcaactggtcgaggccgatattaatggcctgcggagaatcctggatgagttgacgctttgtaaggcagatctagaggcacaggtcgaatctctaaaggaggagttgatgtgcctgaaaaaaaaccacgaggaagaagtctccgtgttgagatgccagctgggtgaccgtctgaatgttgaagtagacgccgcaccccccgtggacctcaataagattttggaggatatgcggtgccaatatgaggcgctcgtcgagaataaccgtagggacgtggaggcgtggtttaatacacagaccgaagagttaaaccagcaggttgtctccagcagtgagcagctccaatgttgtcaaactgagattatagagctgagacgcactgtgaatgccctagagatcgaacttcaagctcagcacagcatgaggaatagcctggaaagcacgctggccgaaacagaggcacggtacagttctcagttggctcaaatgcagtgtctgatcagcaatgtggaggctcagctgtccgagattagatgtgacctagagcgtcaaaaccaagaataccaggtgctgctcgatgttaaggcacgactcgagggagagattgccacataccggcatctcctagaaggagaagactgcaagttacccccacagccgtgcgctaccgcttgcaagcccgtgatacgcgtgccctccgttcctccagtcccatgcgtaccctcggtcccatgtactccagcaccccaggtgggcactcagatccggacgatcacggaggaaataagagacggtaaagtcatctcatccagagagcacgtccagagtcgacctctctag

SEQ ID NO: 192269 - DNA, 1254 bp, synthetic construct
  misc_feature 1..1254: note = Description of Artificial Sequence: Synthetic coding sequence
  source 1..1254: mol_type = other DNA
atgctgcggagcggcctgagcggcctgggcagctgcctgcccggcagttacctctcctcagaatgtcacacatctggcttcgttggatcaggaggatggttctgcgaaggaagcttcaacggcagcgaaaaggagacgatgcagttcctgaacgatagattggccaattacctggagaaggtacggcagctggagagggaaaacgcagagctggaatccagaatccaggagtggtacgagttccagataccttatatttgtcccgactaccaatcttactttaagacaatcgaggatttccagcagaaaatcctgctgaccaaatccgagaacgcaagactcgttttgcagatagataatgcaaagctggcggcggacgacttcagaacaaagtacgagacggagttgtcactccgacagttagtggaagccgatatcaatggactaaggcgaatcctggacgaactcacattatgcaaggccgatttggaggcgcaggtggagagtctgaaagaggaactgatgtgcctgaaaaaaaaccatgaggaagaagtctccgtcctgcggtgccagctcggggatagactcaacgtggaagtcgacgccgctccacctgtggatctgaataagatcctcgaggatatgagatgtcagtatgaagcattagttgaaaataataggcgagacgtggaagcatggttcaacacacagaccgaagagcttaaccagcaggttgtctcatcctcagagcaactccaatgttgtcagaccgaaattattgagctcagacgcacagttaatgcacttgagatcgagctgcaagcacaacactcaatgcggaattccttagaatccacactagccgagacggaagccaggtacagctcacagctggcacagatgcagtgccttatcagcaatgttgaagcccagctgtccgaaattcgttgcgaccttgagagacagaaccaggagtaccaagtgctcctggacgtgaaagccagattggaaggagaaatcgccacataccgtcaccttctggagggcgaggactgcaaactgcccccccaaccctgcgccactgcctgtaagccagtgatccgggtgccatctgtaccacctgtcccttgcgtgccttctgtaccttgcactcccgccccacaggtgggtacccaaattagaacaatcactgaagaaatccgcgacggaaaggtcataagcagtagagaacatgtgcagtctcgaccactctag

SEQ ID NO: 192270 - DNA, 1200 bp, synthetic construct
  misc_feature 1..1200: note = Description of Artificial Sequence: Synthetic coding sequence
  source 1..1200: mol_type = other DNA
atggcccggcggttccaggaggagctggccgccttcctgttcgagtatgacacccctaggatggtgcttgtgcgcaacaaaaaagtgggtgtcatcttccgcttaatacagctggtcgtgctggtgtacgttattggatgggtgttcctctatgagaaagggtatcagacctctagcggcctgatctcctcggtgtctgtgaaactgaaaggtctggctgtgacccagctgcctggactcggaccgcaggtgtgggatgtggcggattacgtctttcctgcgcagggcgacaattcgttcgttgttatgaccaatttcatcgtgactcccaagcagacacagggctattgcgcagagcatcccgaaggaggcatctgcaaggaggacagcggctgcacccccggaaaagccaagagaaaggcccagggcattcggacgggcaaatgcgtagcattcaatgataccgtgaagacgtgcgaaatcttcggttggtgtccagtggaagtggacgacgacattcctaggcctgccctccttcgcgaggctgagaacttcacactcttcataaaaaactctattagcttcccacgcttcaaagtgaacagacgaaacctggtggaggaggttaatgcagctcatatgaaaacatgcctctttcataaaacccttcaccccttgtgtccagtcttccaactcgggtatgtcgttcaggagtctgggcagaatttttctacgctggccgagaagggtggagtagtcggtatcacaatcgattggcattgcgacttagactggcacgttcggcattgtagacctatctacgaattccacggactgtatgaggagaagaatctgtcgcctggcttcaactttcgtttcgctcgccatttcgtcgagaacgggaccaactacagacacctgttcaaggtatttggaatacggtttgatatacttgtggatgggaaagctggcaagttcgatatcatccctacgatgactaccatagggtcagggatcgggattttcggggtggcaaccgtgctatgcgaccttctgttacttcacatcctgcccaagagacattattacaaacaaaagaaattcaaatacgctgaagacatggggcccggagcggcagaacgggacctggctgctacttcatctaccctgggtttacaagagaacatgcgcacttcctag

SEQ ID NO: 192271 - DNA, 1371 bp, synthetic construct
  misc_feature 1..1371: note = Description of Artificial Sequence: Synthetic coding sequence
  source 1..1371: mol_type = other DNA
atgaccagcagctacagcagcagcagctgccccctgggctgcaccatggctccaggagctagaaatgtcagcgtgtcccctattgacatcggatgccaacctggggctgaagccaatattgcccccatgtgcctgctggcgaatgtggcccacgcaaaccgagttagagtcggctccacccccttgggacggccctctctgtgcttaccaccaacttgtcacacagcctgtccgctgcccggaacctgtcatatccctggcaacataggcatctgtggagcttacggggaaaatacattgaatgggcatgagaaggagacaatgcagtttctgaacgataggctggctaattacctggagaaagtgcgccagctagaacaggaaaacgctgaactagaggcaaccctgctcgaacggtctaagtgccatgaatccacagtttgccccgactaccagtcttacttccatactattgaagagctgcagcagaaaattttgtgttccaaggcagagaacgctagactgattgtacagatcgacaatgccaaactagccgctgacgactttagaatcaagctggagtcagagagatctttgaggcagctggtggaagcggacaagtgtggaacacaaaagttactagatgacgccacccttgccaaagctgacctggaagcacaacaggagtccttaaaagaagagcaattaagtctgaaaagcaaccatgagcaagaggtcaagattctccgaagccagttgggggaaaaactccgtatagagctggacattgaacctactattgacctcaatcgggtgttaggcgagatgagggcgcagtacgaagctatgctggagaccaatcgacaggacgtcgagcagtggtttcaagcccagagcgagggtatttccctccaagatatgtcctgcagcgaggagctccaatgctgtcagtccgagattctggagcttcggtgcaccgtaaacgcattggaggtggagagacaggcgcagcatacgctaaaggattgcctccagaactcactatgcgaagcagaagaccggtttggaaccgagctagcccagatgcaaagcctgatatcaaacgtcgaggagcagctgtccgagatccgcgcggatttagagaggcagaaccaggaataccaggttctgctcgacgtgaagacccggctggagaatgaaatcgccacataccgtaacctgcttgaaagcgaggattgcaaactgccctgcaatccctgctcgacaagccctagttgcgtgactgctccatgtgcaccacggccctcatgtgggccttgcactacatgtggacctacatgtggcgcctccacgacagggtccagattctag

SEQ ID NO: 192272 - DNA, 1785 bp, synthetic construct
  misc_feature 1..1785: note = Description of Artificial Sequence: Synthetic coding sequence
  source 1..1785: mol_type = other DNA
atgaccagcgtgggcgtgttcagcgacatgctgaacggctgcggcaaggacgggctggtgcctcgagccaagccacgtgatgttagtgacttctcactgtacgcccctgccaccaaaccgtgctgctcgcgtacttataagaggcgcaggctgagagctccagccctaacaggtctcggcccagtcacctcactgatcgccccctcatctctctctgccgccatgatagctcgacagcaatgtgtacggggaggtccgcgaggcttttcctgtggatcagctattgtgggcggggggaagagaggcgccttctctagtgtctccatgagtggcggggccggcaggtgttcgagtggtggctttgggtcccgctccttgtacaatcttaggggtaacaaatccatcagtatgtccgtggcaggcagtagacagggagcctgtttcggcggagctggaggttttgggacaggtggctttggcggtggctttggagggagcttcagcgggaagggcggcccaggctttcccgtttgcccagcaggggggatccaggaggtgaccattaatcagtctctgttgacacccctgcacgtggagatcgacccagaaattcagaaggtaagaaccgaggagagagaacagataaagctgctcaataataaatttgccagtttcatcgataaagtgcagtttttggaacagcagaacaaagtgttagagactaagtggaatctgctgcagcagcaaactaccactacctcctcaaagaatttagagcccctattcgaaacctacctcagtgtgcttcgcaagcagttagatacgctggggaatgacaaggggagactgcagtctgagctgaagacgatgcaggactctgtagaggacttcaagacaaagtacgaagaggaaattaataaaaggaccgcagccgaaaacgactttgtcgtcctgaaaaaggacgtagacgccgcgtatctgaacaaggtcgagctcgaagcgaaagtggactccctcaacgacgaaatcaattttctgaaagtgttgtacgacgcagagctgtcccagatgcagacacatgtttccgacacctccgtcgtgctgagcatggataataataggaacctggacctggattccatcatcgccgaggtacgtgcccagtacgaggagattgcacagcgcagtaaggcagaggccgaagctctgtatcaaacaaaggtacaacaactccagataagtgtggatcaacacggagataatctgaaaaacactaagtcggaaatcgccgaactcaaccgcatgattcaacggctccgcgcggagatcgagaacattaaaaagcagtgtcagacccttcaggtttctgtggccgatgcagaacagaggggagagaatgcactgaaggacgctcattcaaagcgcgtcgagctcgaggctgcacttcaacaggcaaaagaagaacttgcacggatgctgcgtgagtaccaagagctgatgtccgtcaaacttgccctcgatatcgaaatcgcaacgtaccgcaaactgttggagggggaggaataccgtatgtctggagagtgccagtcagccgtgtctataagcgtagtgtctggatcaacttccaccggcggaatatctggtggtttgggctctggttcagggtttgggctgtcatcaggcttcggtagcggctccggttcagggtttggattcggggggtctgtaagcgggtcatccagtagcaaaattatttcaacaacgacgcttaacaagagaaggtag

SEQ ID NO: 192273 - DNA, 1503 bp, synthetic construct
  misc_feature 1..1503: note = Description of Artificial Sequence: Synthetic coding sequence
  source 1..1503: mol_type = other DNA
atgatcgcccggcagcagtgcgtgcggggcggcccccggggcttcagttgcggctctgcaatagtcggaggtgggaagcgcggggcattctcttcagtatctatgagtggtggagctggtcggtgttcttcagggggcttcggctcaaaaggagcctgtttcggcggtgccggagggttcgggactggcggattcggggggggcttcggagggtccttctcaggcaaagggggtcccgggtttcctgtctgtcccgccggcggcatccaggaggtgactatcaatcagtctttattgaccccactgcacgtggaaattgatcccgaaatccagaaagtgcgcacagaggaacgtgaacagattaagctgttgaacaataagttcgcatccttcatagataaagtccaatttctggaacaacagaacaaagtcttggagactaagtggaacctgctccagcagcaaaccaccaccacctcaagtaagaatctggaaccactgttcgagacctaccttagcgtcctgcgtaaacagctggacacactaggcaatgataagggtaggttacagtctgagctgaagactatgcaagactctgtggaagacttcaagacgaaatacgaagaggaaatcaacaagcgcacagccgctgaaaacgactttgtggttctgaagaaggatgtcgatgcagcatatctcaataaggtcgagcttgaggctaaggtggattctctgaacgatgagataaacttcctgaaggtgctatatgacgctgaactgtcccagatgcagacccacgtgtctgacacatccgtggttctttcaatggataataaccgcaatctcgacctggactccatcattgcagaagttcgtgcgcagtacgaagagatcgcacaaagatccaaggctgaggccgaggcgctataccagacaaaggtccaacaattgcagatctccgtggaccagcatggagacaatctaaagaacacgaaatctgagatagcggaattgaaccggatgattcagaggctgcgagccgagatcgaaaatatcaaaaaacagtgtcaaactctgcaggtgtccgttgcggatgccgaacagagaggcgaaaatgcccttaaggacgcacacagtaagagggtcgaactcgaggccgcactgcagcaggctaaagaagagctcgctcgcatgcttcgggagtaccaggaactgatgtccgttaagctcgcactagacattgagatcgcaacctatagaaaactcctggaaggggaagagtatagaatgagcggcgagtgtcagtctgctgtctctatctctgtggtgagcggctcaaccagcaccggaggtatctctggtggcttaggctcaggatccggctttggactgtcaagtggctttgggagcggctccggcagtggttttgggttcggcggctcagtcagcggcagttcatcatctaagattatctctaccaccacgctcaataagcgaagatag

SEQ ID NO: 192274 - DNA, 1563 bp, synthetic construct
  misc_feature 1..1563: note = Description of Artificial Sequence: Synthetic coding sequence
  source 1..1563: mol_type = other DNA
atgatcgcccggcagcagtgcgtgcggggcggcccccggggcttcagctgtggatctgccattgttggaggcggcaagaggggtgctttttcgtcagtctcgatgagtggtggagcaggacgctgtagcagtggagggtttgggtcaaggagcctatataacctgcgcggtaataagagtatctcgatgagcgtagccgggtcccggcagggggcatgttttgggggagccggaggtttcggcactggaggattcggagggggttttggaggctccttttccgggaaaggtggacctgggttcccggtgtgtccggccgggggcatccaggaagttacaatcaatcagtccctgctcactcccctccacgtcgaaatcgaccctgaaatccagaaggtgcgtactgaggagagagagcaaattaaactcctgaataataagtttgcctcctttatcgacaaggtgcagttcctagaacagcagaacaaagtcctggagaccaagtggaatctgctccaacagcaaacaaccaccacaagctccaagaacttggaaccattgttcgaaacgtacctctccgttctgcggaagcaactggatacccttggaaacgacaaagggcggctgcagtccgagctgaaaaccatgcaggactccgtggaggatttcaaaaccaagtatgaggaggaaatcaacaaacgcaccgccgcggagaacgactttgtcgtgctcaagaaggacgtggatgccgcatatctgaataaggtggagctggaggcaaaggtcgatagtctaaatgacgaaataaactttctgaaagttctttacgacgccgaactgtctcagatgcagactcacgtctccgatacttctgtggtactttcaatggacaacaacagaaatctggatctggacagtataattgcggaagtccgggcccagtacgaagagattgcacagcgcagcaaggccgaagccgaagctctctaccagacaaaagtccaacagctccagatctctgtagaccagcacggggacaaccttaagaatactaagtccgaaatcgcggaactgaatcgtatgattcagagacttcgggcagagatcgagaacattaaaaaacagtgtcagactctgcaggtgtctgtcgcggatgcagagcagaggggggagaatgctctcaaagacgcacatagcaaaagggtcgagctggaagctgcacttcagcaagctaaagaagagttggctcggatgcttcgcgaatatcaagagctgatgagcgtgaagcttgctctcgacatagagatcgccacttaccgtaagctgctagaaggtgaggaatatagaatgtctggagaatgccagtctgctgtgtcaataagtgtagtcagcggcagtaccagtacaggcggaataagtgggggtctaggaagcggctcaggatttggattgagttccggcttcgggagcggatctggcagtggattcggtttcggaggatctgtttctggctctagctcttctaaaatcatttccaccacaacattgaacaaacgccgatag

SEQ ID NO: 192275 - DNA, 1695 bp, synthetic construct
  misc_feature 1..1695: note = Description of Artificial Sequence: Synthetic coding sequence
  source 1..1695: mol_type = other DNA
atggccagcaccagcaccaccatccggagccacagcagcagccggcggggcttctcggctaatagtgcccgcctgcccggcgtgtccagatctgggttctcttcagtgtcagtttcacgatcacgggggtccggcgggctgggcggcgcatgcggaggagctggttttgggtccagaagtctgtacggcctggggggttctaagagaatcagcatcggtggaggctcctgcgccatctcgggcgggtacggaagccgagccggaggaagttatggctttggaggtgctggtagcggattcgggttcggagggggcgctggcatcggtttcggtctgggaggcggggctgggctggctggtggattcgggggacctggattcccagtctgtcctcctgggggcatccaggaggtgactgtgaaccaatcacttttgacaccgctgaatctccagatagacccaacgatccagcgcgtccgagcagaagaaagagagcaaatcaagactctgaataacaaattcgcctcctttatcgataaggtgcggtttttagaacagcaaaataaggtgcttgagaccaagtggacactactccaagagcagggcaccaagaccgtgaggcagaacctcgagcctttattcgagcagtacatcaataatctgcgcagacaactcgatagcatcgtaggagagaggggcagacttgattctgaacttaggggaatgcaggatttggttgaagatttcaagaataagtacgaggatgaaataaataagaggaccgcagctgaaaacgagttcgtgacactgaagaaggatgttgacgccgcatatatgaataaggtcgaactgcaggccaaggcagacaccctgaccgacgaaattaatttcctgagggccctttatgacgccgagctatcccagatgcagacacatattagcgatacgtccgtggtcctgagtatggataacaataggaatttagacctagactcaatcattgctgaagttaaagcacagtacgaggaaattgcccagaggtctagagccgaggctgagagctggtatcaaacgaagtatgaggagctacaggtgacagccgggcggcatggcgatgatctccggaatacaaaacaggagatagctgagataaatcgtatgatacaacgattgcggtccgagattgaccacgtgaagaaacagtgcgccaatctccaagctgcaatagccgatgccgagcaaaggggcgaaatggccctaaaagatgcgaagaacaaattagagggcctcgaggacgccctacagaaagcaaagcaggacctggcacgcctgctcaaggaatatcaggagctcatgaatgtgaaactggcgctcgacgtggagattgctacttaccgtaagctcctggaaggagaggagtgtaggctgaatggggaaggcgtcggccaggtgaatatcagcgtggtgcagtctactgttagtagtggctacggaggtgccagcggcgttgggagcggactgggccttggtggtggctcaagctactcctatggcagcgggctcggcgtgggaggcggattctcttcctcatccggacgtgccattgggggtgggttaagctcagtggggggaggaagcagcaccattaagtatactactaccagctcctcgtcacggaaaagctacaagcactag

SEQ ID NO: 192276 - DNA, 1563 bp, synthetic construct
  misc_feature 1..1563: note = Description of Artificial Sequence: Synthetic coding sequence
  source 1..1563: mol_type = other DNA
atggccagcaccagcaccaccatccggagccacagcggcagccggtctctctacggattggggggttcaaaacggatcagcattggcggcggaagctgtgcgatttctgggggctacggaagccgggcaggcggatcatatggcttcgggggagccgggtctgggtttggctttggaggaggcgccgggatcgggtttggcctcgggggcggagccggcctggccggggggtttggcggacctgggttccctgtttgcccccccggaggaattcaagaggtcactgtcaatcaatctctcttgacccccctgaacttgcagatcgatcctacgatccagcgtgtcagggcggaagaaagagaacagattaagactctcaataataagtttgctagcttcatcgataaggtgcggttccttgagcagcagaacaaagtgcttgaaacaaagtggactcttctccaagagcaaggcacaaagacagtgcgtcagaacctggaacccctctttgaacagtacataaataaccttagacggcagctagactccattgtaggggagcggggaaggctcgacagtgaactgcggggcatgcaagatttagttgaggactttaaaaataagtatgaggacgaaatcaataagcgcaccgccgctgaaaacgagtttgtcacattgaagaaggacgtcgacgccgcctacatgaacaaggtggaactgcaggctaaggccgacacccttaccgacgaaattaactttcttagggcgttgtatgatgcagaactgtcacagatgcaaactcatattagcgataccagcgtggtgctctctatggataataatcggaacctggaccttgactccattatcgctgaggtgaaggctcagtatgaagagattgctcagcgctcccgggcggaagcagaaagctggtaccaaacgaagtatgaagagctgcaagttacagcgggcagacacggagacgacctccgaaacacgaagcaagagatagccgaaatcaacaggatgattcagaggttacgttctgagatcgaccatgtcaaaaagcaatgtgccaatctgcaagccgcaatagctgatgcggagcaaagaggcgagatggccttaaaagatgctaagaacaagctggagggactcgaggacgccctgcagaaggcaaaacaggatttagcaagacttctgaaggaatatcaggagctcatgaacgtgaagctggccctggatgtggagatcgcgacttatcgaaaacttctggagggcgaagaatgccgattgaatggcgaaggcgtgggccaggtaaacatttcggtcgtccagagcaccgtatcttctggctacggaggggctagcggagtcggcagcgggctgggcttgggcggtggaagcagctacagctatggaagcggcctaggcgtgggcggcggattcagtagctcttccggaagggcaatcggaggaggtctttcttccgtcgggggtggctccagcacgatcaagtacaccacaacttcatcatcttcgcgcaagagttacaagcattag

SEQ ID NO: 192277 - DNA, 1695 bp, synthetic construct
  misc_feature 1..1695: note = Description of Artificial Sequence: Synthetic coding sequence
  source 1..1695: mol_type = other DNA
atggccagcaccagcaccaccatccggagccacagcagcagccggagaggattctccgccaatagtgctcgcctgccaggcgtgtctcgctcaggcttcagctcaatatctgtgtcccgtagcaggggctctggcggcctggggggggcgtgtggcggggcaggatttggtagtagaagcctctacggtcttgggggttctaaaaggatctcaattggcggaggctcttgtgctatttccggcggatacggctcacgcgccggcgggtcatacgggtttggcggcgcagggtctgggttcggcttcggggggggggctggaattggttttggacttggagggggggctggtctagccggcgggtttggcggtccgggatttcccgtgtgcccgcctggggggatacaggaggtgaccgtcaaccagagccttctaacccctctgaatctgcaaattgatccagccatacagcgggtgcgggcggaggagagagaacagatcaaaaccctcaacaacaaatttgcatcttttatcgataaagtacgcttcctggagcaacagaataaagtgttggatacaaagtggaccttacttcaagaacagggaacaaagactgtgcgccagaaccttgaacccctgttcgagcagtatataaataacctccggcgtcaactggataacatcgtgggggaacgaggcaggttggactcagagctcagaaacatgcaggacttggtcgaggacctgaaaaacaagtatgaggatgaaattaataaaagaaccgccgctgagaatgagtttgtgacgctgaagaaggacgtggatgcagcctacatgaacaaggtggagttgcaggctaaggcggataccttgactgacgagatcaacttcctgagggccctgtatgacgccgaattgagtcaaatgcagacccacatcagcgacactagcgtcgtgttaagcatggacaacaatcgtaatctggatttggatagcatcatagcagaggttaaagcccaatatgaggagattgcccaacggtcaagagctgaggcggagagttggtatcaaactaaatatgaggaactgcagattactgcggggagacatggcgacgatctacgtaatacgaaacaggaaatcgctgagattaatcggatgatccagagactcaggtccgagattgatcatgttaaaaagcagtgcgctaatctacaggccgccatcgctgatgctgagcaacgaggggaaatggcccttaaggacgccaaaaacaagctcgagggattggaagacgcacttcaaaaggcaaagcaggacctggcaaggctcttgaaggagtatcaggagctcatgaacgtaaagctggccctcgatgtcgagatcgctacctacaggaaactgctggaaggggaggagtgccgtttgaatggagagggtgtgggccaagttaacatttccgttgttcagtctacagtttcctctgggtatgggggagcaagtggcgtgggctccggcctggggctggggggaggtagttcatactcttatgggagtggcctgggagtcggcggtggattctcgagctcttcaggacgagctacaggcggtggtttaagctccgtgggagggggatcttcaactatcaaatatacaactacctcctcttccagccgaaagtcatacaaacactag

SEQ ID NO: 192278 - DNA, 1575 bp, synthetic construct
  misc_feature 1..1575: note = Description of Artificial Sequence: Synthetic coding sequence
  source 1..1575: mol_type = other DNA
atggccagcaccagcaccaccatccggagccacagcagcagccggcgggggttcagcgcaaattctgcacggctgccaggcgtgagccggagcggattcagtagcatcagtgttagccggagccgagggtccggaggcctggggggtgcgtgcggcggggcaggctttggctcgcgatcgctgtacggtttgggcggctctaagcgcatttctatcggtggcgggagctgcgccatatcagggggttatggcagtagggccggcggtagctatggtttcggtggcgccggctcaggcttcggcttcggcggtggcgccgggattggcttcggtctggggggcggtgcaggcctggccggaggattcggggggcccggtttcccggtttgcccgcccggcggcatccaggaagttaccgtcaaccagagtctgctgaccccattgaacctgcagattgatcctgccatccagcgcgttcgggctgaggagcgggaacagatcaagacactgaataacaagtttgcctcctttattgataaagttcgattcctcgagcagcagaacaaagtgctggatacaaaatggacgctgcttcaagaacagggcaccaaaaccgtgcgccaaaatttggagcctctgtttgagcagtacattaataacttgagacggcagctggataacattgtcggagagcgagggaggctggacagtgaactacgtaacatgcaggatctcgtggaggatttgaagaataaggatgaaattaattttctgagggcattgtacgacgcggagttatctcagatgcagacccacatctcagatacgagcgttgtgttaagtatggataataaccgcaaccttgatctggacagcatcatcgccgaggtgaaagcccagtatgaagaaatcgctcaacggagtcgcgctgaggccgagtcctggtaccagactaaatacgaggaactgcagatcactgccggcagacatggcgacgatctacgaaatactaagcaggaaatagcggaaattaaccgcatgatacagaggctgcgatcagagattgaccatgtaaagaagcaatgcgccaatcttcaggccgccatagcggacgcagagcagcgcggcgagatggcactgaaagatgctaaaaacaagctggaaggtttagaggacgcattgcagaaagcaaagcaagatcttgcccgtttgcttaaagaataccaggagctgatgaacgtgaaactggcactcgatgtggagatcgcaacttaccgcaagctgctggagggggaagagtgtagactcaacggcgagggcgtcggtcaggtgaatatctctgttgtgcagtccaccgtgtcgtccggttatggcggcgctagtggggtcggcagcggattagggttaggcggtggcagcagttactcttacgggtccgggttgggcgtgggaggaggcttctcctcctccagcggccgggccaccggaggcgggctttccagcgttggcggcgggagtagcaccatcaagtacacaaccacctcttcatcaagtcgcaaaagttataagcactag

SEQ ID NO: 192279 - DNA, 1695 bp, synthetic construct
  misc_feature 1..1695: note = Description of Artificial Sequence: Synthetic coding sequence
  source 1..1695: mol_type = other DNA
atggccagcaccagcaccaccatccggagccacagcagcagccggagaggctttagtgccaatagtgctcgtctgccgggggtcagcaggagcggcttttccagtataagtgtgtcaagaagtcggggcagtggcggtctcggaggtgcttgcgggggcgccgggtttgggtcacgctcactgtatgggctgggagggtccaagcgtatctcgattggaggtggctcttgtgctatctcaggcgggtatggaagcagggccggtggctcctatggattcgggggcgcaggctcaggctttggtttcggggggggagccggaatagggtttggcctcggaggtggggccgggctggctgggggctttggggggccaggttttcccgtctgtccgcctggtggaattcaagaggtcacggtgaaccagagcttgctgacgcctctcaatctccagatcgatcccgctatccagcgcgttagagccgaggaaagagagcaaatcaagacattaaataataagttcgcatcgtttatcgataaagtgcggttccttgagcaacaaaataaggtgctagatacaaagtggacactgctgcaggaacaggggaccaagaccgtgcgccagaatcttgagcctctgttcgagcagtatattaacaacttacgccggcaacttgacagtatcgtgggagaaaggggcagactcgacagcgagctgcggaatatgcaggatttggtagaagatctcaagaacaagtacgaggacgagattaataagcgcactgcagcagaaaacgagttcgttaccctcaagaaggatgttgatgccgcatacatgaataaggtcgaactccaggcaaaggcagacaccctgaccgatgagatcaacttcctccgggcgctgtacgacgccgagctgagccagatgcagacgcacatttctgacacatctgtagtgctgagtatggataacaaccgcaacctcgacctggattccatcatagcagaggtgaaggcgcagtatgaagaaatcgcccaaagatctcgcgctgaagccgaaagctggtaccagacaaaatacgaggaacttcaggtgacagccggccggcacggggatgatcttagaaatacaaaacaggagattgctgagattaaccgcatgatacagagactgaggtcggagatagaccatgtgaaaaaacagtgtgctagcttacaagcagctatcgccgatgcagaacagaggggggaaatggctttgaaagacgcgaagaacaagctggaagggttggaggacgcacttcagaaagccaagcaggatctcgcgcgcttgctcaaggaataccaggagctgatgaatgtcaaactagccctcgacgtagaaatcgccacctataggaaattgttggaaggcgaggaatgcagactgaacggggagggggttggacaggtcaatgtttctgttgtacaatcaaccatctcttctgggtatggcggggcctcaggcgtgggctccggcctcgggctcggggggggctcctcatattcatatggaagcggcctggggatcgggggcggcttttcttctagtagcggacgggccatcggcggaggcctcagcagtgtaggcggcggaagcagcactatcaaatacaccaccacaagttcttcatctcggaagagctacaaacattag

SEQ ID NO: 192280 - DNA, 1650 bp, synthetic construct
  misc_feature 1..1650: note = Description of Artificial Sequence: Synthetic coding sequence
  source 1..1650: mol_type = other DNA
atggccagcaccagcaccaccatccggagccacagcagcagccggagcggcttcagctctatttcagtgtccaggtcacgggggtctggagggctggggggggcatgtggcggggccggcttcggttctcgttccctttacggcctcggcggtagtaagcgcatctctataggtggcggaagttgcgctataagcggtggatacggatcgcgggccggcgggagttacgggtttggcggagccggcagcggcttcgggttcggagggggcgccggcatagggttcggcctgggtggcggcgcgggcttggccgggggcttcggcggccctggctttccagtgtgtcccccaggaggcattcaggaggtcaccgtgaaccagtcgctgctcaccccgttgaacctgcagattgaccccgctattcagcgggtccgggctgaggagagagaacagatcaaaacccttaacaataagttcgcgtctttcatcgataaggtgagattcttagagcaacaaaacaaggtcctggacacgaagtggacccttctgcaagagcagggcacaaagacagtgcgccagaatctcgagcctctgttcgaacaatacattaataacctgcgacgtcagctagatagcattgtcggggagcgtggtagactggatagcgagctgcgaaatatgcaggatctggtcgaagacctcaaaaataagtacgaggatgagataaataaacggactgcagccgaaaacgaatttgtgacactgaaaaaagatgtagatgccgcatatatgaataaggtcgaactccaggctaaagccgacacactaaccgatgagatcaacttcttgcgcgctctctatgacgccgagcttagccagatgcaaacccacatcagcgatacttccgtggtgttgtccatggacaataacagaaatctggacctggactccatcatcgctgaggtcaaggcacagtacgaagaaattgctcagagatcccgtgccgaagccgagtcctggtaccaaactaagtacgaagaactacaggtcacagcaggaagacacggagatgatctgagaaacaccaagcaggaaatcgcagagatcaatcgcatgattcagcgcttacggagtgagatcgaccacgtaaagaagcaatgtgcctcattacaagctgctattgccgatgctgagcagcggggagagatggccctcaaggacgctaaaaataagcttgaaggattggaggatgctctccagaaagccaaacaggacctggccaggcttctcaaggagtaccaagaactcatgaatgtcaagctggccttagatgtcgaaatcgcaacctatcggaagctcctggagggagaggaatgtcgcctgaatggagaaggtgtgggccaggtaaacgtgtctgtcgtgcagagcacaatctcatcaggatatggcggggcaagcggagtaggatccggcctagggttagggggtgggtcctcttatagctacgggtcagggctggggatcggtggcgggttctctagctcttcaggcagggcgatcgggggtgggctctcttccgtgggcggagggtcatctaccataaagtacacgacgacaagctcttcttcccgcaaatcctataagcactag

SEQ ID NO: 192281 - DNA, 1572 bp, synthetic construct
  misc_feature 1..1572: note = Description of Artificial Sequence: Synthetic coding sequence
  source 1..1572: mol_type = other DNA
atgagccggcagttcacctgcaagagcggcgccgccgccaagggcggctttagcggatgcagcgccgtcctgagcggcggctcttctagcagcttcagagcaggctcaaagggcctctcaggtggctttgggagccgatcactgtactcacttggaggagtccgctctctaaacgtcgcctccggatccggcaagagcggcgggtatggcttcggacggggaagagcctcagggtttgccgggtcaatgttcggatcagtggccctgggtccagtatgtccaaccgtctgtccaccgggtgggatccatcaggtgacagtcaacgagtcactgctggccccgttaaatgtcgagctcgatcccgagattcagaaggtgcgggcgcaagaacgagaacagatcaaagctctaaataacaaatttgcctccttcatcgacaaagtgcgattcttggaacagcaaaaccaagttctcgagactaaatgggagttgctgcagcagctcgatttaaacaactgtaagaataatctggagcctatcctggagggttatatatcaaatctccgcaaacagctcgaaacactctcaggagaccgcgtgcgcctcgatagcgaattacgcaatgttcgtgatgtggtggaagactataaaaaacgatacgaggaggagatcaacaaacgcaccgccgcagaaaacgagttcgttttgttaaagaaagacgtggacgctgcatatgccaacaaggtcgagttacaggctaaagtcgagagcatggaccaggaaataaagttcttccgctgcctgttcgaggcagaaatcacacagatccagtcacacatatccgatatgtccgtgatcctgagcatggataacaataggaacctggatcttgatagtataattgacgaagtacggacccagtatgaagaaattgccttgaaatctaaggccgaagctgaggctttatatcagaccaaatttcaggagctgcaactcgcagctgggcggcacggagacgatctaaaaaataccaagaacgaaattagcgagctcaccaggctgatccagcgtattcgatctgagatcgagaatgttaagaaacaggccagcaacctggagaccgcaatcgccgatgcggagcagcgcggagataatgctctcaaggatgccagggcgaaactggacgaacttgagggcgcattacatcaggccaaggaggagctcgcccgtatgcttagagaataccaggagctcatgtcccttaagctggcactagacatggagatcgccacctaccgaaagctgctggaatccgaggaatgtcgtatgagcggtgagtttccttcaccggtttctattagtatcatctcgagcacctcaggcggctcagtgtacggcttccgaccctccatggtttccggcgggtacgttgctaacagtagcaactgcatctccggcgtgtgctctgtgagagggggtgaagggagatcaagaggtagcgccaacgactataaggacaccctaggcaaggggagctcactgtcagctccctcaaaaaaaaccagcaggtag

SEQ ID NO: 192282 - DNA, 1536 bp, synthetic construct
  misc_feature 1..1536: note = Description of Artificial Sequence: Synthetic coding sequence
  source 1..1536: mol_type = other DNA
atgagccggcagctgacccacttcccccggggcgagcggctgggcttttctggctgcagcgccgtcctatctgggggaatcggctcatcatcagcaagttttcgggcaagagtcaaagggtcagctagctttgggtctaaaagcctctcttgcctgggcggctcccgcagtctggccctcagcgccgccgcacgaaggggaggagggcggctgggaggatttgtggggacggccttcggctcagctgggctgggacctaagtgcccttccgtatgtccacccggggggatccctcaggtgacagtgaataagtctctgctggctccgttgaatgtcgagatggacccagaaattcagagagtgcgcgcccaggaacgggagcagatcaaagctcttaataataagtttgcatccttcatcgataaagtccgctttctcgaacaacaaaaccaggtccttgagaccaaatggaacttgctgcagcagctggatctgaacaattgccgtaaaaatctggagcctatctatgaaggctacatcagtaacttgcagaagcagctggaaatgctgagcggcgatggggtacgcctcgactccgaacttcggaacatgcaggacttagttgaagactacaaaaaaaggtacgaagtggaaattaaccgcaggactgcggctgagaatgagtttgtggttctcaaaaaggatgtagatgcagcttacatgaataaagtggaacttcaggcaaaagtggattcattgaccgacgaaattaaatttttcaaatgtctgtacgagggcgagatcacccagattcagagtcatatttctgatacttctatcgttcttagtatggataacaaccgggacctggacttggactccatcatagccgaagttcgggctcagtacgaggaaatcgcactcaagtcgaaggcagaagctgaaactctgtatcagactaagattcaggagttacaggtaacagccggtcagcacggcgacgacctgaaattgaccaaagctgaaatctctgaactcaatcgattgattcagaggatcaggagcgagatcggcaatgtcaaaaagcagtgtgcggatctggagactgccatcgccgatgcagagcagcggggcgactgtgcccttaaggatgcgagggctaagctggatgagctggaaggggccctgcaccaggctaaggaggaactggcaaggatgctgagggaatatcaagagctggtctcactgaaactagctctggacatggagattgcaacctatagaaagttactggaatcagaggaatgcaggatgtccggcgagtatccaaattcagtgtctatcagtgtcataagctccaccaatgcgggagcgggtggagcaggcttctccatggggtttggggcctctagctcctatagttacaaaactgcggctgccgatgttaaaactaaaggatcctgcggtagcgaacttaaggatcctcttgcaaagacctcgggctcatcatgcgcaaccaaaaaggcctctcgatag

SEQ ID NO: 192283 - DNA, 1410 bp, synthetic construct
  misc_feature 1..1410: note = Description of Artificial Sequence: Synthetic coding sequence
  source 1..1410: mol_type = other DNA
atgagccggcagctgacccacttcccccggggcgagcggctgggcttctcaggctgctctgctgtgctgtccgggggtatcggcagtagttcagcaagcttccgggcacgcgttaaggggtcggcatcttttggttcaaaaagtctctcctgcctgggaggctcaagaagccttgccctgtctgccgcagctcggagggggggaggacgacttggtgggtttgtaggaactgccttcgggagcgctgggcttgggcccaagtgtccaagcgtctgccctccaggaggaataccccaggtaactgttaataagtccctacttgcccccctgaatgttgagatggaccctgagatccagcgcgtgagagctcaggagcgggaacagattaaagcgcttaacaataagtttgcttcgtttatcgataaggtgcgcttcctggaacaacagaatcaggtcctcgaaactaagtggaatttattgcagcagcttgatctcaacaattgtcgcaagaatttagaacccatctatgagggatatatttcgaatttacagaagcagctggagatgctcagcggagatggagttcggctggactcagagctacggaacatgcaggatcttgtcgaagattacaaaaagcggtacgaggttgaaattaaccgcaggaccgcagcagagaatgagtttgtggtcctgaagaaagacgtggatgctgcctatatgaataaagttgagctccaggcaaaggtggactcattgactgatgagatcaagttcttcaagtgcctgtacgaaggcgaaatcacccagatacaaagccacatctctgacacatccatcgtactatccatggacaataacagggatctcgacctcgactccattatagctgaagttcgggcacagtacgaggaaatcgccctgaaatccaaagccgaagccgaaacgctctaccagacgaaatgcgctgacttagagaccgccatcgccgatgctgaacagaggggcgactgcgcattaaaggacgcgcgggctaagctggatgagctggagggcgcccttcatcaggcaaaagaagagctggccagaatgttgagagagtaccaggagctcgtgagtctcaagctggccctggatatggagatcgcgacctatcggaagctgctcgagagcgaagagtgccggatgagcggagagtatccaaactctgtctctatcagtgttatatcctcaaccaacgcaggtgcaggcggtgcaggattttcaatgggctttggagcttccagctcctactcatacaagacggcggccgcagatgttaagacaaaggggagctgcggcagcgaattgaaggatcccctcgctaaaacatctgggagttcatgcgctacgaagaaggcctcccggtag

SEQ ID NO: 192284 - DNA, 972 bp, synthetic construct
  misc_feature 1..972: note = Description of Artificial Sequence: Synthetic coding sequence
  source 1..972: mol_type = other DNA
atgctgagcggcgacggcgtgcggctggacagcgagctgcggaacatgcaggacttggtagaggattacaaaaaaagatacgaagtggaaatcaatagaagaaccgccgcagaaaacgagttcgttgtgctgaagaaggatgttgacgctgcgtacatgaacaaggtggaactccaggccaaggtagatagtctgacggacgaaatcaagttttttaagtgcctttatgaaggggagataactcagattcagagccacatttcagacacatccatcgtgttaagcatggataataatcgggatctggatctggactctattatcgcagaagtacgcgcacaatatgaggagattgcgctgaagtctaaggccgaagcagaaaccctgtaccagactaagatccaagaactgcaggtgacggcgggtcagcatggagacgaccttaagttgaccaaggccgagattagtgagctaaaccgcttgatacagcgaattagaagcgagataggtaatgtgaagaaacagtgtgccgacctggaaaccgccattgcagatgctgaacagcgaggggattgcgcactgaaggatgctcgagccaaactagacgaattagagggggctcttcaccaggccaaagaggagctagcacgaatgttgagagagtatcaagaactcgtgagtttgaagttagccctcgacatggaaatcgccacatatcggaaacttcttgagagcgaagaatgcagaatgagcggtgaataccctaactccgtgtccatcagtgtcatctcctccacgaatgcaggtgccggaggtgccggattttcgatggggttcggcgcaagtagtagttattcctataagacagcagccgctgacgttaaaacgaagggttcgtgcggcagcgagttgaaagacccgctggcgaaaactagcggcagcagttgtgcaaccaaaaaagcctcacgctag

SEQ ID NO: 192285 - DNA, 1536 bp, synthetic construct
  misc_feature 1..1536: note = Description of Artificial Sequence: Synthetic coding sequence
  source 1..1536: mol_type = other DNA
atgagccggcagctgacccacttcccccggggcgagcggctgggctttagtgggtgttctgcagtccttagtgggggtattggtagctcatcagcaagttttagagcaagagttaagggaagcgcatcttttggctcgaagtcattgagttgcttgggcgggagtcgcagcctcgccctgtccgcagccgcccggagaggtggaggccgcctgggtgggttcgttggcacggccttcggatccgctggactcgggcccaaatgcccaagtgtgtgcccgccgggtggaattccccaggtcaccgtcaacaaatcgctcttggcccctttgaacgtggagatggatcccgaaatccagagagtgcgagcccaggagagagaacagattaaagctcttaataataagttcgccagcttcattgacaaggttcgctttctcgaacagcagaatcaggttctagaaaccaagtggaatttactacagcagttggatctgaataactgcagaaagaacctggagcccatatatgaaggctacatctcaaatctgcagaagcagttggagatgctgtctggagatggcgtaaggttagacagtgaactgagaaacatgcaggatttggtggaagactacaaaaaacggtacgaggtggaaattaacagacggaccgctgccgagaacgaatttgtcgtacttaaaaaggacgtcgacgcagcctacatgaataaggttgagttgcaagcaaaggtggattctctcacggacgagataaagttttttaaatgtctttacgagggagaaattacgcaaatccaatcccacatctcagacaccagtattgttctgtcaatggacaataaccgcgacctcgacctggattctataattgcagaggttagagcccagtacgaggaaattgcacttaaaagcaaggccgaagccgagactctgtatcagaccaagatccaggagctacaagtcaccgcaggtcaacacggggacgacctcaagctgaccaaggcggaaatctcagagttgaacaggcttatccagaggataagatcagagatcggcaatgttaagaagcagtgtgctgatttggagactgcaattgcagacgcagagcaacgcggggactgcgcacttaaggatgctcgcgcaaagcttgatgagttggagggggcactgcaccaagcaaaagaagaattggctcgcatgcttcgtgagtatcaggagttagtttccctgaagttggctttggatatggagatcgccacctatcgtaaactcttggaatccgaggaatgtaggatgtccggggagtaccctaattccgtctcaatatctgtaatttcgtccactaacgctggcgctggtggggccggcttttctatgggattcggggctagctctagctactcctacaaaacggccgccgctgatgtgaagacaaaaggctcctgcggctcagagcttaaggatccactggctaagacaagcgggtcaagctgtgctactaaaaaggccagtcgctag

SEQ ID NO: 192286 - DNA, 1623 bp, synthetic construct
  misc_feature 1..1623: note = Description of Artificial Sequence: Synthetic coding sequence
  source 1..1623: mol_type = other DNA
atgagccggcagttcacctacaagagcggcgccgccgccaagggcggcttttcggggtgctctgcggtcctctccggaggaagttctagcagctaccgggccggaggcaaaggcctgtccggggggtttagcagccgtagcctgtactccttaggcggagcccgctccatctctttcaacgtggccagtggaagcgggtgggccggcggatacgggtttggtagggggagggcaagcggatttgcaggatcaatgttcgggtcagttgcactcggaagcgtgtgccctagcctgtgccctcctggagggatacaccaggtgacgatcaataagtccctgctggcgcccctcaatgttgaactggaccccgagatccagaaggtgcgagctcaggagagagaacagatcaaagtgctgaacaataaatttgcatccttcatagataaagtgaggttcctcgaacaacagaaccaggtcctggaaactaagtgggaacttctgcagcagctagatttgaacaactgtaaaaataacttagaacccatcttagaagggtacattagcaatctgcgcaagcagctcgaaaccctgtcaggcgatcgggtgagattagacagtgaattgcggtccgtgcgagaagtcgtagaagactataaaaagcggtacgaggaagaaatcaacaagaggaccaccgccgagaatgaatttgtggttctgaagaaggacgtggacgctgcgtatacatcaaaagtggaactccaggctaaagtcgatgcccttgacggtgaaattaagtttttcaaatgtctgtatgaaggtgagaccgcccagattcagagccacatcagcgataccagtatcatattgtctatggataacaacaggaatctcgacctcgacagtatcatcgcagaggtgcgcgcacagtatgaagagattgcacggaagtccaaagctgaggccgaagccctgtaccagacaaagtttcaggaactccaactggcagctggccgccatggcgacgatctgaagcatacaaagaatgagatttcagagctgacacgacttatacagagactccgctctgaaattgagtccgttaaaaagcagtgtgcgaatcttgaaaccgccatcgccgacgctgaacagcgtggcgactgcgcccttaaggatgcccgagccaagctagatgagcttgagggcgccttgcagcaggcaaaagaagaattggcacgaatgttacgagagtatcaagagttgctgagcgttaagctcagtctggacattgaaattgctacctatcgcaagctcctggaaggtgaggaatgtcgaatgagcggagaatataccaacagtgtcagcattagtgttataaatagttccatggcagggatggccggtacaggcgcgggctttgggtttagcaacgctggcacctacggatattggccatccagcgtctcaggcggctatagcatgctccctggagggtgcgtgactggcagtggcaattgcagcccccggggcgaggcaaggactcgcttaggcagcgcttcagagtttcgtgattctcagggaaagactctggccctgtctagtcctactaagaagacaatgcgctag

SEQ ID NO: 192287 - DNA, 1590 bp, synthetic construct
  misc_feature 1..1590: note = Description of Artificial Sequence: Synthetic coding sequence
  source 1..1590: mol_type = other DNA
atgagccggcagctgaacatcaagagcagcggcgacaagggcaacttctccgtgcacagcgctgtagtacctcgcaaagctgtcgggtccctagcttcctactgtgccgccggccggggcgccggcgccggattcgggtctcgatccctgtactcactcggcggaaatcgacggatctcttttaatgtggccgggggcggcgtaagagccggggggtacggcttcaggccagggtccggctatggcgggggtcgggctagcggcttcgcaggctctatgtttggatccgtcgccctcggccccgcatgcctgagcgtgtgtccccccggcgggatccatcaggtaaccgttaacaagtccctcctagctcccctgaacgtcgaactggatccagaaatccaaaaggtcagggcgcaggagagagagcagataaaggtcttgaacgacaagttcgcttctttcatagataaggtcagattcctcgagcagcagaatcaggtcctggaaaccaaatgggagctgctacaacaactcgatttgaacaattgcaaaaaaaaccttgagcccatcctggaggggtatatctcgaatcttcggaaacagctcgagaccctgtccggggacagagtcagactcgacagcgagctccggtcaatgcgcgatctggttgaagattacaagaagcggtacgaagtggagatcaatcgccggacaacggccgagaatgagtttgtagtgctgaagaaagacgccgatgcagcatatgcggttaaagtcgaacttcaggcaaaggtggatagtttggataaagagattaagttcttgaaatgcctctacgacgccgaaatcgcgcagattcagactcacgcgagcgagacgtctgtgattctgtcgatggataataaccgcgatttggatctagattcaattatcgccgaggtccggatgcattacgaggaaattgctctgaagtccaaagccgaggccgaggccctttatcagactaagatccaagagctgcagctagctgccagccggcacggtgacgatcttaaacacaccagatccgaaatggttgagctgaatcgtctgatccagcggattaggtgtgagatcggcaatgttaagaaacagagggcctcactggagaccgcaattgccgacgccgaacagcggggggataatgccctgaaagatgcccaagccaagctggacgagcttgaaggcgccctccatcaagccaaggaggaactcgcaagaatgctcagagagtaccaggagctgatgagcctaaaattagccctggacatggagattgctacgtaccggaaacttctggagggcgaggaatgcagaatgtccggagagaaccctagtagcgtctctatctctgtgatatcctcctcttcctacagctatcaccacccctcatctgccggtgtcgacctcggagccagcgcggtcgcaggaagcagcgggtctacacagagcggccagactaagacaaccgaggctcgggggggggacctcaaagatactcaaggcaaatcaaccccagcaagcatccctgctcgcaaagcaactaggtag

SEQ ID NO: 192288 - DNA, 1656 bp, synthetic construct
  misc_feature 1..1656: note = Description of Artificial Sequence: Synthetic coding sequence
  source 1..1656: mol_type = other DNA
atgagccggcagagcagcatcaccttccagagcggcagccggcggggtttttcaaccacctcagcgattacaccagcagccggacgcagccgatttagttctgtatccgtggcacgtagcgcagccgggagcggtggactggggcgtatcagcagtgccggcgcttccttcggatcccgctctttgtacaacttagggggcgcaaagagagtgtccatcaacggctgtggctcatcctgtcgatcaggttttggaggacgggcctctaatagattcggggtgaactccggcttcggatacggcggtggtgtgggcggggggttctcagggcccagctttcctgtatgtccacctggcggtattcaggaggtcaccgttaatcaatcactgctaacaccccttcacctgcagatagatcctaccattcagagggtaagagctgaagagagagaacagatcaaaactttgaataacaaatttgccagcttcattgataaagtgcgcttcctcgaacagcaaaacaaagtgttagaaacaaagtgggccttactgcaggaacaggggagtaggaccgttagacagaatctggaaccgctgttcgattcttataccagcgagttacgtaggcagctagaaagtattacaaccgagcgcgggcggcttgaggcagaactgcgcaatatgcaggatgtggtggaagattttaaagtgaggtatgaggatgagatcaataagcggacagcggcagagaatgagttcgtagcactcaaaaaggacgttgatgccgcgtatatgaataaagtcgagctcgaagccaaggtgaagtccctgccagaagagatcaattttattcacagcgttttcgatgccgaactgagtcagctccagacccaggttggcgatacgtctgttgtgctctctatggacaacaatcgaaatctggatctggattcgataatcgcagaggttaaagctcagtacgaagatattgcaaaccgcagcagggccgaagctgagtcatggtatcagactaaatacgaagaactccaggtcacggccgggaggcatggcgatgatttgagaaacaccaagcaagaaatatctgaaatgaaccgcatgatccaacgcttgcgcgccgaaatagatagtgtgaagaaacagtgctctagcctccagaccgctatcgctgacgctgagcagcggggtgagctggctctgaaggatgctcgagccaaactggtggatctcgaagaagccctgcagaaggccaagcaggacatggcgagactgctccgcgaatatcaggaattgatgaatatcaagctggctctggatgtggaaattgccacttatcgaaaactgctggaaggggaagaatgccgcctgtcaggcgagggagtttccccagtgaatatctcagtcgtgaccagtactctgtccagtggatatggttcaggaagctccataggtggtggcaatcttgggctgggcgggggaagcggctactcttttaccacatccggcgggcactctttaggcgccggcctgggggggtcaggcttttctgcgacaagtaacagaggtctcggcgggagcgggtcgtccgttaagtttgtgagcaccacctcatctagccagaagagctacactcactag

SEQ ID NO: 192289 - DNA, 1737 bp, synthetic construct
  misc_feature 1..1737: note = Description of Artificial Sequence: Synthetic coding sequence
  source 1..1737: mol_type = other DNA
atgagccaccagttcagcagccagagcgccttcagcagcatgagccgccgcgtgtacagcaccagctctagcgcaggctccggaggcgggtctcccgcagtgggatcggtctgctacgctcgggggcggtgcggtgggggggggtacggcatccacgggcgaggatttggatctagatccctgtataacctcggtggatcacgctcaatatccatcaacctaatgggtcggagtacttcgggattctgtcaggggggaggagtgggtgggttcggaggaggtcgtggcttcggcgtcggctccaccggagccggtgggtttggaggaggaggctttggaggggcaggattcggaacgtccaactttggactggggggattcggcccctattgcccccccggagggatacaggaagttactatcaaccagtctttgctggagcctctccatttagaagtggaccctgaaatccagcgaatcaaaactcaggagcgggaacaaattatggtgctgaacaataagttcgcgagcttcatcgataaggtcagattcctggaacagcaaaatcaggtgcttcaaactaagtgggaactacttcagcaggtaaacacctccacagggacaaataatctggaacctctcctggagaattacatcggggacctgcgcagacaggtcgatctgctgagtgctgaacagatgaggcaaaatgccgaggtgcgatccatgcaggatgtggttgaagattacaaatctaaatatgaggatgaaataaacaagcgcacgggctcagaaaatgactttgtcgtgctgaaaaaggacgtggacgctgcatatgtttcaaaagttgacctcgaaagcagggtggacacccttaccggtgaagtcaatttcctaaaatatttatttttgaccgaactcagtcaggtgcagacacacataagtgacacgaatgtgattctgtctatggacaacaataggagcctggatcttgatagtattatcgacgctgtgcgcacacagtatgagctgattgcacagaggtctaaagacgaagctgaggctctgtaccaaactaaatatcaggagctgcaaataactgccgggaggcatggggacgacctcaaaaattctaagatggaaattgcagagcttaaccgcaccgtacagcggctccaggcggagatttccaacgtgaaaaagcagatagaacagatgcaaagcctgataagcgatgccgaagagcggggggagcaggcactgcaggacgcctggcagaagctccaggacctggaagaagctcttcagcagtccaaggaggagctggcccgcctcttgcgtgactaccaagcaatgctgggcgtgaaactgtctctcgacgtagagatcgccacatatcgccagctgctcgagggcgaagagtcacggatgtccggcgagcttcagagtcacgtctcgatctctgtgcagaattctcaggtgtcggttaacggaggggcaggaggtgggggtagctacggcagcggcgggtatggtggtgggtcgggaggaggctatgggggtggcagatcataccgcgggggcggggctcgcggccgcagcgggggaggctatgggagcggatgtggcgggggggggggatcctatgggggcagcggccggagcgggcgcggttccagccgagttcagataatccagacgtcaaccaatacatctcatagaaggatcctcgaatag

SEQ ID NO: 192290 - DNA, 1038 bp, synthetic construct
  misc_feature 1..1038: note = Description of Artificial Sequence: Synthetic coding sequence
  source 1..1038: mol_type = other DNA
atgcggcagaacgccgaggtgcggagcatgcaggacgtggtggaggactacaagtcaaaatacgaggacgagatcaataaacgaactggaagtgagaacgactttgtagtcctaaaaaaggatgtcgacgccgcgtacgtgagcaaggtcgacctggagtcaagggtggacaccttgactggggaggtgaacttcctcaagtacctgttcttgaccgagctgtctcaggttcagacacacatcagcgacactaacgtgattctcagcatggacaacaaccggtcactcgacttagactccatcatcgacgcggtgagaacccagtatgagcttatcgcacagcgctccaaggacgaagctgaggccctatatcagactaagtaccaggaacttcagattacagctggccgccatggcgatgatctcaagaatagcaagatggagatagcagaattaaatcgaaccgtgcagaggctgcaggccgagataagcaatgtcaaaaagcagattgagcagatgcagtcactgattagcgacgcagaggagcgcggagagcaagctctgcaggacgcctggcaaaaactgcaggatctcgaagaggctctgcagcagtcaaaggaggaattggccaggcttttgagggattaccaggctatgctgggggtcaaactgtccttggacgtggagatcgcaacttatagacagctgctggagggcgaagaatcaaggatgagcggtgagcttcagtcacacgttagtataagtgtgcagaactcgcaagtgtctgttaatggcggcgccgggggaggcggaagctacgggtcaggcggatatgggggcggcagcggaggtgggtacgggggcggccggtcttaccgagggggaggagcccgcggaagaagtggtggaggctatggatctggatgcggggggggcggaggctcttatggcggatctggcaggagcggccgtgggtccagccgagtgcagatcatccagacttccacaaacacatcccaccggaggatactggagtag

SEQ ID NO: 192291 - DNA, 1563 bp, synthetic construct
  misc_feature 1..1563: note = Description of Artificial Sequence: Synthetic coding sequence
  source 1..1563: mol_type = other DNA
atgagcctgagcccctgccgggcccagcggggcttcagcgcccggagtgcctgctccgctcggtctagaggaaggagcagaggggggttctctagtaggggcgggttttcgtctagatccctgaattccttcgggggatgcctggaaggaagccgcgggtctacgtggggctccggcgggagactcggcgtccgttttggcgagtggagcggtggccctggtctcagcctgtgccctccggggggcattcaggaagtgactattaaccagaaccttctcacacctctgaagattgaaattgacccccagttccaggttgttcgcacccaggaaactcaggaaatacgcactctaaacaatcagttcgccagtttcattgacaaagtgaggtttctagagcagcagaacaaggtgctggagacgaaatggcatcttttacagcagcagggacttagtggttcacagcaagggttagaaccagtgtttgaggcctgcctggaccagctgcgaaaacagctcgagcagctgcagggggagcgcggagcacttgatgccgaactgaaagcctgtcgagatcaggaagaggaatataaaagtaagtacgaggaggaggcacaccggcgggctacattagaaaacgactttgtcgtgttgaagaaggacgtcgacggtgtgttcttatctaagatggagctcgaaggcaaactcgaggcgctaagggagtacctctacttccttaaacacctcaatgaggaggagctgggtcagctgcagactcaggcctccgacacaagtgtggttctgtccatggataataataggtacctagacttttcttctattatcactgaagtgagggcacggtacgaggagatagcccggtcaagtaaggcagaggccgaagctctgtaccagacgaagtatcaagagctgcaggtatctgcccagctccatggggaccgaatgcaggagacaaaggtgcagatttcacagctgcatcaggagatccagcgcctgcagtcccagacagagaacctgaaaaaacagaatgcctctcttcaggccgccatcaccgacgccgagcagcgtggtgagttagctctcaaggacgcgcaagctaaggtggacgagctcgaagcagccctacggatggctaaacaaaatctggcccgccttctttgcgaataccaggagttaacatctacgaaactttctctcgacgtagagattgcaacctaccgaaggctcctggaaggcgaggagtgtcgaatgagtggggagtgcacttcccaggtcactatatcttctgtcggaggcagcgccgtcatgtccgggggcgtcggtgggggtctcggttccacatgtggcttgggatcggggaaaggctcacccggatcctgctgtacctcaatagtaacaggcgggagcaacatcattctaggctcaggtaaggatcccgtattggatagctgtagtgtcagcgggagttctgccggtagttcatgccatacgatcttgaaaaaaaccgtcgagtctagtctgaagacttctatcacctactag

SEQ ID NO: 192292 - DNA, 1233 bp, synthetic construct
  misc_feature 1..1233: note = Description of Artificial Sequence: Synthetic coding sequence
  source 1..1233: mol_type = other DNA
atggagggccacgaggccagccccgcccaggtgggccagggcgaccgtggcaaggtcagatttctcgaacagcaaaacaaagtactggagaccaaatggcatttgctacagcagcaaggcctcagtggatcccaacaaggactcgagcctgtattcgaagcctgtctggaccagttgcgcaaacagctggagcaacttcagggggagcgcggggccctcgatgccgaactcaaggcgtgcagggaccaggaagaggagtataaaagtaaatacgaggaggaagcacacaggcgagctacgctggagaacgattttgtagtgctgaagaaagatgtggatggcgttttcctttccaagatggaactggaggggaaactagaagcacttagggagtacctgtactttctgaagcatctcaacgaagaggagttaggccagctgcagacgcaagcatcagatacttctgtggtattaagtatggacaataacaggtatctggatttttccagcatcattactgaagtccgtgccaggtatgaagaaatagctcggagttcaaaagccgaagctgaagccctgtaccagactaaatatcaggaactgcaggtttcagctcagttgcatggcgaccgcatgcaggaaaccaaggtgcagatcagtcagttacatcaggagattcagagattgcaatcacaaaccgaaaaccttaagaagcaaaatgctagtcttcaggcggccatcacggacgcagagcaacgcggggagctagctcttaaggacgcacaggccaaggtagatgagcttgaggccgcgctgcgcatggccaaacagaacctggccagactgttgtgcgagtatcaagagcttactagtaccaaattgtctcttgatgtggagatcgcgacatatagacggctgctcgagggagaggagtgcagaatgtccggcgagtgcacgagtcaggtgacaatctctagcgttggggggagtgccgtcatgtccggtggggttggcggtgggcttgggtcaacatgcgggctgggctccggaaaaggctccccggggagctgttgtacctcaatcgtgacaggcggatccaacattatcctcgggtccggcaaagaccctgtcctggatagttgtagcgtgagtggcagcagtgctggatctagctgtcatacaattttaaaaaagaccgtggagagttccctcaaaacctccatcacttattag

SEQ ID NO: 192293 - DNA, 876 bp, synthetic construct
  misc_feature 1..876: note = Description of Artificial Sequence: Synthetic coding sequence
  source 1..876: mol_type = other DNA
atggagctggagggcaagctggaggccctgcgggagtacctgtactttcttaagcatttgaacgaggaagaactggggcagctgcagactcaggcgtctgatacctcagtcgtcctgtcaatggacaacaatcggtatctggacttttcatctattataacagaggtgcgggctcgttacgaggagattgctcggagcagcaaggctgaggcggaggctctctatcagaccaagtatcaagaactgcaggtctccgcacagttgcatggggatcgaatgcaggaaacaaaggttcagatatctcagcttcaccaggagattcagcgcctgcagagccaaaccgaaaatctgaagaaacagaacgcatccctgcaggccgccattacggatgctgaacagcgcggagagctggctcttaaagacgcacaggcgaaggttgacgagctcgaggcagcacttagaatggcaaagcagaacctggcccgcttgctctgcgagtaccaagaactgacctctaccaagctctcactcgatgtggaaattgcaacctatcgccggcttctggagggcgaagagtgcaggatgtccggcgagtgtacttctcaggtgaccatttcttctgtgggagggtcagccgtgatgtccggcggcgtcggcgggggcctcggctctacctgtgggctgggaagcgggaaaggctctcctggctcctgctgcacctctatcgtgactggcggctctaatatcatccttggaagtggtaaagatccggtccttgactcctgttctgtatcggggagttccgctgggagctcatgtcatactatcttgaagaagaccgtggaaagctccctgaagaccagcattacatactag

SEQ ID NO: 192294 - DNA, 1608 bp, synthetic construct
  misc_feature 1..1608: note = Description of Artificial Sequence: Synthetic coding sequence
  source 1..1608: mol_type = other DNA
atgcggagcagcgtgagccggcagacctacagcaccaagggcggcttctcttcgaattctgcctctggcgggagtggaagccaagcaaggacgtccttctcaagtgtcacagtgtctcgttcttcgggtagtggtggcggagcacactgtggtccggggaccggggggtttggcagcagatctctatataacctcggcggacacaaatccataagcgtgtcagtggccggcggggctctgctgggccgtgctttgggcggctttggatttggcagccgggctttcatgggacagggtgcaggccgccagactttcggaccagcctgtccccctggaggcattcaagaggtgacggtgaatcagtctctcctcaccccactccatgtggaaatcgatcctgagatacagcgggttcgcactcaggaaagagagcagatcaaaaccctgaacaataaatttgcctcatttatcgacaaagttcgattcttagaacaacagaataaagtgcttgagactaaatgggcgctgctccaggagcaagggcagaatctcggcgtgacaaggaataacctggaacccctctttgaagcttacctgggaagcatgagaagtacactcgatcggctccaaagcgagcggggcaggctcgattccgagctccgtaatgtgcaggacctggtcgaggactttaaaaataaatatgaagacgagatcaataaacatacggcggcagagaatgaattcgtggtactcaagaaagatgtggacgccgcatacatgggtcgcatggacctccatggaaaagtgggtacactgacccaggaaattgatttcctgcagcagctgtacgaaatggaattgtcgcaagtccaaactcatgtatctaatactaatgtggtgctgtcaatggacaataatcgtaacttagacctggattctattatcgctgaggtgaaggcccagtacgaactgattgcccagaggagccgagctgaagccgaagcctggtaccagactaagtatgaggaactgcaagtaacagccgggaaacatggagacaacttacgggatacaaaaaatgaaattgccgaactcaccagaactatccagaggctccagggagaagcagatgcggctaagaaacaatgccagcagttgcagaccgctattgcagaagccgagcaacgtggagagttggccctcaaggacgcccagaaaaagctcggcgacctggatgtggcactacaccaggccaaagaagacctcacacgtctgctcagggattaccaggagctcatgaacgtcaagctggcactggatgtcgagatcgcaacttatcgcaagctgctggagtccgaggagtccagaatgagcggggagtgtcctagtgcagtgtccatctccgtcacaggcaattctactaccgtttgtggcggaggtgccgcgtccttcggcggaggtatcagcctaggagggtctgggggggccactaagggggggtttagtactaatgtcggatacagcactgtgaagggtggacctgtgagcgccgggacctccatcctccgtaagacaacaactgtcaaaactagtagccaacgctattag

SEQ ID NO: 192295 - DNA, 1269 bp, synthetic construct
  misc_feature 1..1269: note = Description of Artificial Sequence: Synthetic coding sequence
  source 1..1269: mol_type = other DNA
atggcctgccggagctgcgtggtgggcttcagcagcctgagcagctgtgaggtgactccggtcggcagtcccaggccgggcacttccgggtgggactcttgtcgggctcccggaccaggcttttcctcccgcagtttgaccggctgttggagtgccggcactatttccaaggtgacggtgaacccagggctgctggtcccactagacgtgaagctagaccctgccgtgcagcaactcaagaatcaggagaaagaagaaatgaaggccctcaatgacaagtttgctagtctgattggcaaggtgcaggcgctcgaacagcgcaaccaattgctcgaaactcgatggtcgttcctgcagggacaggactccgctatcttcgacctggggcacttgtacgaagagtatcagggccggctgcaagaggaactgcgcaaggtctcacaggaacgaggtcaactcgaagccaatctgttacaagtcctggagaaagtcgaggaattccgcatcaggtatgaagacgaaatcagtaagagaaccgatatggaatttacatttgtgcaacttaagaaagacttagatgccgagtgcctgcacagaacggagctggagactaaactgaaatctctggagagcttcgtggaacttatgaaaaccatttatgagcaggagctgaaggatctggcagcccaggtgaaagatgtatccgttaccgttgggatggactcacggtgccatatcgatctttccgggatcgtcgaggaggtgaaggcccagtatgacgctgtggccgctagatcattggaggaagcagaagcctactccaggtcacagctggaggagcaggctgctagatctgcagaatacggtagttcgctacaatctagccgttccgagattgctgatcttaatgtgcggatccagaagctacgatctcagatcctgagcgtgaaaagtcactgcttaaaactggaggaaaacattaaaacagccgaggaacaaggtgaactggcattccaggacgcaaagaccaagctggctcagttagaagccgcgctccagcaggccaaacaggatatggctcgccagcttcgcaagtaccaggagctcatgaacgtaaaattggccctggacatcgagatcgcaacctaccgcaaattagtggagggcgaggaaggccggatggattcccctagcgcaacagttgtgtccgccgtgcaatccagatgcaaaacagccccaagtctcccttaccctctgtgtagcctgtag

SEQ ID NO: 192296 - DNA, 1359 bp, synthetic construct
  misc_feature 1..1359: note = Description of Artificial Sequence: Synthetic coding sequence
  source 1..1359: mol_type = other DNA
atggcctgccggagctgcgtggtgggcttcagcagcctgagcagctgcgaagttacacccgtgggctccccacgacccgggacatccggctgggattcatgtcgggccccgggccctggattcagttcacgttccctgaccggttgctggagcgctgggacgatctccaaagttacagtgaatcccggtttgctagtgcctctggacgtgaaactcgatcccgccgttcaacagctgaaaaaccaggagaaggaggaaatgaaagccctgaacgacaagtttgccagcctaataggtaaggtccaggccctggagcagcgcaaccaactcttggaaactagatggagcttcctccaggggcaggacagtgctatcttcgacctgggtcacctctatgaggaataccagggccggttacaggaagaactcaggaaggttagtcaggaacggggacaactggaggctaacctcctgcaagtgctagagaaggtagaggagttccgtatccgatatgaggatgaaatctccaaaaggactgacatggagtttaccttcgtgcagcttaaaaaagacttagacgcagaatgtcttcatagaaccgaactcgagactaaattgaaaagcttggaaagtttcgtggagctcatgaagaccatctacgagcaggagctgaaagacctagccgctcaggttaaggacgtctcagtgacagtgggtatggactccaggtgccacatagacctctccggaatcgtggaggaggttaaagctcagtatgatgccgttgcggctagatcactggaagaagcagaggcttactcccggtctcagcttgaggagcaggccgccagaagtgcagagtacgggtcctctctgcagtctagccgaagcgagattgcagacttgaacgttaggatacagaaattaaggagtcaaattctcagcgttaagtctcattgccttaaattggaggagaacatcaaaaccgctgaggaacaaggcgaactggcattccaggacgctaaaaccaagctggcccagctggaagccgcgcttcagcaggctaaacaggacatggcacggcagctcagaaaatatcaggaattgatgaacgtcaagttagccctggatattgagatagcgacctaccgtaagctagtagagggcgaggaaggtcgtatggactccccgtcggccaccgtagttagcgctgttcaatcacgctgcaaaacggctgcaagtaggtccggactctcgaaggcccccagtaggaagaaaaaaggctccaaggggccggtgatcaaaattacggagatgtctgagaaatatttctctcaggaaagcgaagtgtctgagtag

SEQ ID NO: 192297 - DNA, 1518 bp, synthetic construct
  misc_feature 1..1518: note = Description of Artificial Sequence: Synthetic coding sequence
  source 1..1518: mol_type = other DNA
atgacctgcggcagcggcttcggcggccgggccttcagctgcatctcagcctgtggaccgcgccccggcagatgttgcatcactgcagcaccctatagggggatctcctgttaccggggcttgacaggggggtttggatctcactccgtttgtgggggattccgagccgggagctgcgggcgatcgtttggctaccgctcgggtggggtttgcggaccgtctcctccctgcattaccacggtgtcagtaaatgagtcattgttgactccgctcaaccttgaaattgacccaaacgctcagtgtgtaaaacaggaagaaaaagagcagatcaagtccctcaacagccgttttgccgcattcatcgataaggtccggtttcttgagcaacagaataagttactggagactaaactacagttctatcagaatagagaatgctgtcagtcaaatctcgagccgttgttcgaaggctatattgaaacattacggcgggaagcggagtgcgtggaagctgactcaggccggctcgcttcagagttgaatcatgtccaggaagtgttagaggggtataaaaagaagtacgaggaggaagtatcgcttagagccaccgctgaaaacgagtttgttgcacttaagaaagacgtcgattgcgcgtatctgcgtaaaagtgacctggaggctaatgtcgaagctctaattcaggaaatcgatttcttgagaaggctgtatgaggaagagattctgatcctgcagagccacatcagcgatacaagtgtagtggtcaagttagacaattccagagacttaaacatggactgcattattgctgaaatcaaggcccagtacgatgacatcgttacccgctcccgggccgaggccgaaagttggtatcggagtaagtgcgaagagatgaaagcaacagttattaggcatggcgaaaccttacgtagaacgaaagaagagattaatgagctgaacagaatgatccagcgcttgacagctgaggtcgagaacgctaagtgccaaaactccaagctggaggccgccgtggcccagagtgagcagcagggagaagccgcgctgagcgatgctcggtgcaagctggccgagctggagggggcgttacagaaggccaagcaagatatggcttgtctgatccgtgaatatcaagaggtaatgaattcaaaacttggcctcgacatcgaaatcgccacctaccgcaggctactggagggcgaagagcagagactgtgcgagggaattggggccgtcaatgtatgcgtctcttcgagtagagggggcgtcgtgtgcggcgatctctgtgtatcaggatctcgcccagttacaggctccgtgtgctcagctccttgtaatggcaatgttgccgtcagcaccgggctgtgcgccccgtgcgggcagctgaacacgacgtgtgggggcggcagttgcggcgttgggtcttgcggcatctccagtctcggcgtcggcagttgcggctcaagttgtcggaagtgctag

SEQ ID NO: 192298 - DNA, 1455 bp, synthetic construct
  misc_feature 1..1455: note = Description of Artificial Sequence: Synthetic coding sequence
  source 1..1455: mol_type = other DNA
atgacctgcggcagcggcttcggcggccgggccttcagctgcatctccgcctgcgggcccagaccgggcagatgctgtatcaccgctgctccatataggggcatctcctgttaccggggactgactggagggttcggcagtcactccgtctgtgggggtttcagagccggcagctgtggccgtagttttggttacagaagcgggggggtgtgcggtcctagcccaccttgcatcactacggtgtccgtcaacgaatccttgcttacaccactgaacctggagattgaccccaatgcccagtgcgtgaaacaagaagagaaagagcagattaaatccttgaattcccgcttcgctgcctttatcgacaaggtcagatttctcgaacaacagaataaactgctcgaaacaaagttacaattttaccagaatagggaatgttgtcagtctaacttggaacctctgtttgaagggtacatcgagactctccggagggaggcagaatgcgtggaggccgatagtggccgactggctagcgaactaaaccacgttcaggaggtgttggaaggctataaaaagaagtatgaggaggaagtgtcccttcgcgccactgcagaaaacgagttcgtggctctcaagaaggacgttgactgtgcctatttgcgcaagtcagatctggaggccaatgtggaggccctaatccaggaaatcgacttccttcggaggctgtacgaagaggaaattcttatcctgcagtctcacatttcggacacatctgtagtggtgaaacttgataattctcgggatctgaatatggactgcattattgctgaaatcaaggcacaatacgatgacatcgtcacacgctcacgagctgaggcagagagctggtaccgctccaagtgtgaggaaatgaaagctacagttattcggcacggagagactctcagaaggacaaaggaagaaattaacgagttaaatcgcatgattcagcgattgactgctgaggtggagaacgccaagtgtcaaaatagtaagttggaggccgctgtggctcagagtgagcagcagggcgaagccgccctgtccgatgcacggtgcaagcttgccgaactggagggagccctgcaaaaagccaaacaggatatggcctgtctcattagagaatatcaggaggtgatgaattcgaaattggggctggacattgagatcgccacttaccgtagacttcttgagggtgaggagcagagactttgtgaaggaatcggggctgtcaatgtgtgcgttagcagctcacggggcggcgtcgtgtgcggcgacctgtgcgtatccgggtctcgacccgtgacaggttccgtgtgttctgctccatgtaacgggaatgtcgcagtgtccaccggcctttgtgccccttgtgggcaagtcggtagctgcgggagcagttgccggaagtgttag

SEQ ID NO: 192299 - DNA, 1482 bp, synthetic construct
  misc_feature 1..1482: note = Description of Artificial Sequence: Synthetic coding sequence
  source 1..1482: mol_type = other DNA
atgacctgcggcttcaacagcatcggctgcggcttccggcccggcaatttcagctgcgtctctgcctgcgggcctaggccttcacgctgctgcataaccgctgcaccctacaggggaatttcatgctaccgcgggctaaccggcggtttcggatcccatagcgtgtgtggcggcttccgcgccggctcctgcgggcgtagcttcggctatcgaagcgggggagtttgcggacccagtcctccatgcatcacaaccgtgagtgtaaacgaaagtctcttgacgccacttaatctagagattgatccaaacgcccagtgcgtcaagcaagaagagaaggaacagataaagagtttgaactcccggtttgcagcgttcatcgacaaggtgagatttctcgagcagcaaaataagctgctggaaaccaagctccagttctaccaaaacagggaatgctgtcaatctaacttagagcctctgttcgccgggtacattgagactctgcgcagagaggcggagtgcgtggaggcggactcagggcgcctggccagcgagcttaatcatgtgcaggaagtactggagggctacaagaagaagtatgaggaagaagtcgctcttcgggctacagccgaaaacgaattcgtggctctgaagaaagacgtggattgtgcttacttgcgaaagtctgaccttgaggccaatgtggaggccttgatacaggaaatcgactttctcagacggttgtacgaggaggaaatcagaatcctccagtctcacatctctgacacctccgtagtagtcaaactggataacagccgggacttgaatatggactgtattgtggcggaaatcaaggcacagtatgacgacatcgcaacccgatctcgagctgaggccgagtcttggtacagatccaagtgtgaggagatgaaggccacagtgatacgacacggcgagacactgagacgcaccaaggaagagattaatgagctgaacaggatgatccaaaggctgactgctgaggttgagaatgccaagtgccagaattcgaaactggaagcagccgtggcgcaaagcgaacagcaaggagaagcagctctttcagacgcacgttgcaagttggccgagcttgagggagctttgcagaaagccaaacaggacatggcttgcctgatcagagagtatcaggaggtgatgaactctaagttgggcttagacatcgaaatagccacttaccggcgtctcctggaaggagaggaacagcggttatgcgagggcgtggaggctgtgaatgtgtgcgtgtcttcctcaaggggcggggtggtgtgtggagatctgtgcgtgagtggtagccggccagtgaccggtagtgtttgctctgcgccatgtaatggtaacttggtggtttcaacaggactctgtaagccatgcggccagctcaacaccacatgtggcggaggttcttgcgggcagggacggcactag

SEQ ID NO: 192300 - DNA, 1524 bp, synthetic construct
  misc_feature 1..1524: note = Description of Artificial Sequence: Synthetic coding sequence
  source 1..1524: mol_type = other DNA
atgagctgccggagctaccggatcagcagcggctgcggcgtgacccgcaattttagcagttgctccgcggtggcaccgaagaccggaaaccgctgctgtataagtgcagcgccctacaggggtgtgtcttgctaccgcgggctgactggtttcggctcccggagcctttgcaacctcggaagttgcggtccacgtattgccgttggtgggttccgagcggggtcttgtggtcgaagcttcgggtaccgctccggaggcgtttgcggccccagccccccttgtattaccaccgtgagcgttaatgagtcactgctgacgccactgaatttagagattgacccaaacgcgcagtgcgtgaagcaggaggaaaaggagcaaatcaagtccctgaatagccggtttgccgcattcatagataaagtacgcttcctcgagcaacagaacaagttactcgagaccaagtggcagttttatcagaatcaacgttgttgtgaatccaatctggagcctctttttagtggctatatcgaaacactgagacgtgaggcagaatgcgtggaggccgattccggaaggctggcctccgaactgaaccacgtgcaggaggttttagaggggtataagaagaagtatgaggaagaagtggcccttcgggctaccgccgagaacgagtttgttgtcctgaagaaagatgtagactgtgcctacttacggaaaagcgatctcgaagccaatgtggaggccctggtggaagagtcgagctttctgagacgtctgtatgaggaggagatacgcgtgctgcaggcccacatctcggatactagcgtgatcgttaaaatggataattctcgcgatctcaatatggactgcatcatcgcagagatcaaagctcagtatgacgatgtagcttcgcgctcgcgggccgaagccgagagctggtatcgctccaaatgcgaggagatgaaagcaactgtgattcgccacggtgagactctgaggcgaactaaagaagagattaatgaacttaaccgtatgatccagagactcacagctgaaattgagaatgctaagtgtcaaagagcaaagctggaagccgcagttgcagaggcggagcagcaaggcgaggctgcactgtccgacgcccggtgtaaacttgctgagttagagggcgctctccagaaagctaaacaggatatggcttgtctgcttaaagaatatcaggaagtgatgaactctaaactaggattagacatcgagatcgctacttacagaaggctgctagagggagaggagcatcgcctgtgtgagggtgttggttccgtcaacgtgtgcgtgtccagttcccgcggcggcgtgagttgtggaggactgagttacagcacaacacctggccggcaaatcacctccgggccttcagccatcggcggtagcatcacggttgtggcccccgattcctgcgcaccctgtcagcctcggtcttcttcattttcctgcgggagttccaggtctgttcgtttcgcctag

SEQ ID NO: 192301 - DNA, 888 bp, synthetic construct
  misc_feature 1..888: note = Description of Artificial Sequence: Synthetic coding sequence
  source 1..888: mol_type = other DNA
atggtgttcaaggtgcagttcctgagcagccggcccagcctgagccacacacaggacgtcgattgcgcttacttgcgcaaatctgaccttgaagccaacgtcgaagcgttggtggaagagtcatctttcctgcgtaggctttacgaggaggagatcagggtgctgcaagcccatatctctgacactagcgtgattgtcaagatggacaactcgagagacctcaatatggactgcatcatcgcagagattaaagcacagtacgacgacgtggcttcaagatctcgtgccgaggccgaaagctggtatcgatcaaaatgtgaggagatgaaggcaaccgtcattagacatggcgagaccttgagacgcacgaaggaggaaataaacgagttgaaccgtatgatccagcggctgacagctgaaatcgagaacgccaaatgccagagagctaagcttgaagccgctgttgctgaggctgaacagcagggcgaggctgccctctccgacgccagatgcaaactggccgagctggaaggggctcttcagaaggctaaacaggacatggcatgtctcttgaaggaataccaggaggtcatgaactcaaagctgggactggacatcgaaatcgccacctaccggcgtcttctggaaggagaggagcaccgcctttgtgagggggttggcagcgttaacgtgtgcgttagtagttcccgagggggggtaagctgcggtggcttgtcctattccaccaccccaggcagacagattacaagtgggcccagcgctatcggcggaagcatcacggtggtcgcaccggactcatgtgcaccttgtcagccgcggtctagtagtttttcctgtggatcttccagaagtgtgagatttgcctag

SEQ ID NO: 192302 - DNA, 1461 bp, synthetic construct
  misc_feature 1..1461: note = Description of Artificial Sequence: Synthetic coding sequence
  source 1..1461: mol_type = other DNA
atgacctgcggcagctactgcggcggccgggccttcagctgcatcagcgcatgtggtccacgacccggccgctgttgtattacggctgctccctacagagggatatcctgctaccgaggactcacgggtggcttcggtagtcactccgtgtgtggcggttttagagcgggctcctgcggtagaagttttggctataggtcggggggagtgtgtggaccgagccccccctgtattaccaccgtgtccgtgaacgaatcgctgctgactccactgaatcttgagatcgaccctaatgctcaatgcgtgaaacaggaagagaaggaacagattaaaagcctcaacagcaggttcgcagctttcatcgataaggttagatttctggagcaacagaacaaactcttggaaaccaagctgcaattttatcagaacagagagtgttgtcaatccaacctcgagcccctgttcgaaggctatattgaaacactgagaagggaagccgaatgtgttgaagccgatagtggccggctggccagcgagctcaatcacgttcaggaggtgctggaagggtacaaaaaaaagtacgaggaggaagtgtctcttcgtgccacagccgaaaatgagttcgtggctctgaagaaagacgtcgactgtgcgtatctgcggaaaagtgacctggaggcgaatgtcgaggcacttatccaggaaatcgattttctgagacgtttgtatgaagaagagataagggtcctgcagtcccacatcagtgatacaagcgtggtggttaaactggacaactcaagagatctgaacatggattgtattatcgccgagattaaggcccagtacgacgatattgtgaccagaagtcgagccgaggccgagtcctggtataggtccaaatgcgaggagatgaaagcaaccgtgataagacatggggaaacattgagacgaactaaagaagagattaatgagctgaacagaatgatacaaaggctgaccgcggaagtcgaaaatgctaaatgccaaaacagcaagctcgaggccgccgtcgctcagagtgagcaacaaggcgaggccgccctgtccgatgcgagatgtaaactcgctgagctggagggggccctgcagaaagcaaagcaagatatggcttgcctcatccgagagtatcaggaagtgatgaattctaagttgggcctcgatattgagattgccacctatcgccgccttcttgaaggtgaagaacaaaggctctgcgagggcgtcggctctgtgaacgtctgcgtaagttcttcacggggcggggtagtgtgcggcgatctctgtgcatcaactacggcgcccgtggtaagcacccgagtttcttcagtcccttcgaatagcaatgtcgttgtaggcactactaacgcctgcgctcctagtgcccgcgtgggcgtgtgtggtgggagttgtaaacgctgctag

SEQ ID NO: 192303 - DNA, 1872 bp, synthetic construct
  misc_feature 1..1872: note = Description of Artificial Sequence: Synthetic coding sequence
  source 1..1872: mol_type = other DNA
atgagctgccggcagttcagcagcagctacctgagccggagcggcggggggggcggtgggggcctaggatccgggggaagtattcggtcttcttatagtcggtttagctctagcgggggcggcggcgggggcggtcggtttagttcaagctcggggtatggaggaggaagttccagggtctgtgggcgggggggcggcggatctttcgggtatagttatggaggaggctctggcggcggcttctcagcatcctccctcggaggagggttcggaggcggcagtcgaggattcggaggtgcctcaggcggaggatacagcagttccggaggcttcggaggcggattcggggggggaagtggaggtgggtttggaggcggttatggaagtgggtttggaggtttcggaggattcggcggaggcgcgggtggaggcgatggtggaatcctaacagctaacgagaagagcacgatgcaagagctaaactcccggctggcttcgtatctggataaggttcaggccttggaagaagccaacaatgacctagagaacaagatacaggactggtatgataaaaaaggtccagccgccatacaaaagaattattccccctactacaacactatcgacgatctgaaggaccaaattgttgacctgactgtgggaaacaacaagacccttcttgacatcgacaacacccgcatgacactcgatgactttagaataaagttcgagatggagcagaacctgagacagggagtcgacgccgacatcaacgggctcaggcaagtcctagacaatctgaccatggaaaagtcagacctggagatgcagtacgaaaccctccaggaggagctgatggcactcaaaaagaaccacaaagaggagatgtcacaattgacagggcagaattccggagacgtgaatgtggaaatcaacgttgccccagggaaagacctgaccaagacactcaacgacatgcggcaggaatacgaacaactgattgctaagaatcgaaaggacatcgagaaccaatacgagacgcagattacacagattgagcacgaagtttcatccagcggacaggaggttcaatccagcgccaaggaagtcacccaactgaggcacggagtgcaagagctggagattgaactacagtcccagcttagcaaaaaggctgcacttgagaagagcttggaggacacaaagaatcgctattgcggtcagcttcagatgatccaggaacaaataagtaacctggaggctcaaatcaccgacgttcgtcaggagatcgaatgtcagaaccaggagtacagcctgttgctatccattaagatgcggttagagaaggaaattgagacctaccacaatttgctggaaggagggcaggaagactttgaatcatcgggcgccggaaagattggactcggaggaaggggcggctccggagggtcctacggcaggggcagcaggggtggttctggcggctcctatggcggcggcgggtcaggaggtggctatggcgggggttcgggaagtagagggggctcaggtggcagttacggaggtggttctgggtctggcgggggcagcggagggggatatggggggggcagcgggggtggccatagcggagggtctggtggcggtcactctggaggcagtgggggaaactacggcggtggcagtgggtccgggggcgggtcaggaggaggttacggcggaggctccggctccagggggggcagtgggggatctcatggcggcggctcaggctttggaggcgaatcgggggggtcgtacgggggcggagaggaagctagtggatcaggcggaggatacggagggggatctggaaagtcttcacacagttag

SEQ ID NO: 192304 - DNA, 534 bp, synthetic construct
  misc_feature 1..534: note = Description of Artificial Sequence: Synthetic coding sequence
  source 1..534: mol_type = other DNA
atggcctgctgccagaccagcttctgcggcttccccagctgcagcactagcggcacctgcggctcctcctgctgtcagccgagttgttgcgaaaccagcagctgccaacctagatgctgcgagacgtcctgctgtcagccatcttgctgccagacttccttctgcgggttcccttcctttagcacagggggcacttgcgacagttcgtgttgccagcctagttgttgcgagaccagttgctgccagccatcatgctatcaaaccagtagctgtggtactggctgcggaattggcggagggatcggctatgggcaagaggggtcctctggcgcggtcagtacccgcattcggtggtgcaggcctgactgtcgggtggaggggacttgccttccaccctgctgcgtcgtaagctgcacaccgccgtcctgttgccagctgcatcacgccgaggcctcttgttgcaggcctagctattgcggtcagtcatgttgcaggcccgtttgctgctgttactgctcagagcccacctgctag

SEQ ID NO: 192305 - DNA, 504 bp, synthetic construct
  misc_feature 1..504: note = Description of Artificial Sequence: Synthetic coding sequence
  source 1..504: mol_type = other DNA
atggcctgctgccagaccagcttctgcggcttccccagctgcagcacgagcggaacttgtgggtcctcttgttgccaacccaggtgttgtgagactagttgctgccaacccagttgttgccagacctccttctgtggatttccttcctttagtactgggggcacatgcgatagttcatgctgccagccttcgtgctgcgaaacaagctgttgccagccctcctgttaccaaacgtcatcatgcggtacgggctgtgggatcggtggggggatcgggtatgggcaggagggctcctcaggcgcagtgagcacaaggatccggtggtgccgccccgactgccgcgtcgaaggaacttgcctgcctccttgctgtgtggtatcttgcacccctccgtcatgttgtcagctgcatcacgccgaagcctcttgctgtcgcccttcctactgcgggcaatcctgttgccgcccagtctgttgttgttactgctccgagcccacttgctag

SEQ ID NO: 192306 - DNA, 492 bp, synthetic construct
  misc_feature 1..492: note = Description of Artificial Sequence: Synthetic coding sequence
  source 1..492: mol_type = other DNA
atgagcttcaactgcagcacccggaactgcagcagccggcccatcggtggaagatgtattgtccccgtggcacaagtcactacgacctccacaacggatgcagactgtctcggcggtatttgcctgccatcctcttttcagaccggatcatggttgctggaccattgccaggagacctgctgcgaacccacagcatgccagccaacgtgctaccggcggacatcctgcgtgagcaatccatgccaagttacctgctcaagacagaccacctgtatttcaaacccatgcagcactacgtactcacgacctctgacttttgtgtccagcggatgtcagcctctgggaggcatctcaagtgtttgccagccagtcggcggtatcagcaccgtctgccagcccgtggggggagtgagtacagtttgccagccagcctgcggagtcagtagaacctaccagcagagctgcgtgtccagctgtaggcggacctgctag

SEQ ID NO: 192307 - DNA, 504 bp, synthetic construct
  misc_feature 1..504: note = Description of Artificial Sequence: Synthetic coding sequence
  source 1..504: mol_type = other DNA
atgacctgctgccagaccagcttctgcggctaccccagctgcagcacctccggaacttgtgggtccagctgctgccagccatcctgctgtgagacgtcctgctgtcagccaagttgctgccagacaagcttctgcggcttcccatctttttccacgtcagggacttgcagctcaagctgctgtcagccatcttgctgtgagacaagttgctgtcagccatcctgttgtcagacttcttcatgtggaacggggtgtggtataggcggtggcatcgggtacgggcaggagggctctagcggcgccgtgtcgacacggatccgatggtgccgccctgattgcagagtagagggcacgtgcctacccccctgctgtgtggtctcttgtactcctccaacctgctgccagctccaccacgcagaggccagctgttgtcgccctagctactgtgggcagtcttgctgccggcccgtctgctgttgttactcctgtgaacctacttgctag

SEQ ID NO: 192308 - DNA, 366 bp, synthetic construct
  misc_feature 1..366: note = Description of Artificial Sequence: Synthetic coding sequence
  source 1..366: mol_type = other DNA
atggccagctgcagcaccagcggcacctgcggcagcagctgctgccagccttcctgctgtgagacgtcctgctgccaacccagttgctgccaaactagctcatgtggtaccggatgtggaataggtggcggcatcggatatggccaggagggatccggggggtcagtgagcacccggattagatggtgccatccggactgccacgtcgagggaacgtgtcttccgccatgttacctcgttagttgtactccgccaagttgttgtcagctgcatcatgcagaagcttcctgttgccgcccgtcatattgtggtcagtcttgttgcagacctgcctgttgctgccattgttgcgagccgacctgctag

SEQ ID NO: 192309 - DNA, 837 bp, synthetic construct
  misc_feature 1..837: note = Description of Artificial Sequence: Synthetic coding sequence
  source 1..837: mol_type = other DNA
atgggctgctgcggctgcagcggcggctgcggcagcagctgcggcgggtgtgggtctggctgcggggggtgtggaagcggatgcggtggatgtgggagcggctgcggaggatccggttcgtcatgctgtgtcccagtgtgctgttgtaagccggtctgttgccgggtccccacatgtagttgttccagttgtgggaagggcggatgcggatcctcggggggaagcaaggggggctgtgggagttgtgggggctgtaaaggtggctgcggtagttgtggaggctctaaaggtggttgtggaagttgcgggggcagcaagggtgggtgtgggagctgtggaggttctaaaggaggatgcgggagtggatgtggagggtgcgggagcagctgctgcgtccccgtatgctgttgcaagcccatgtgctgttgcgtcccagcatgcagttgttcgtcttgtgggaagggtgggtgcggatcctgcggctgtagtaagggcgcatgcggaagttgtgggggcagcaaaggcgggtgcgggagctgcggcggatgtaaagggggctgcggtagctgcggtggttcaaaaggcggctgtggctctggctgcggcggttgtgggtcaggctgcggcgtccccgtctgctgttgttcctgctcaagttgtgggtcctgtgccggatccaaggggggttgtgggtcttcgtgcagccaatgttcgtgttgtaagccttgttgctgttccagcgggtgcgggtcaagctgctgccaatcttcatgctgtaagccatgttgttcccaaagcagttgttgcgtccccgtctgttgtcagtgcaagatctag

SEQ ID NO: 192310 - DNA, 510 bp, synthetic construct
  misc_feature 1..510: note = Description of Artificial Sequence: Synthetic coding sequence
  source 1..510: mol_type = other DNA
atgggctgctgcggctgcagcggcggctgcggcagcagctgcggcggatgtgatagtagctgtgggtcctgcggatccggctgccgcgggtgcgggccttcctgctgtgctcccgtatattgctgtaagccggtctgctgttgtgtgccagcctgttcatgctcatcttgtggcaagcggggatgtgggagctgtggggggtccaagggcggatgtgggagctgcggctgctcccagtgtagctgctgcaaaccctgttgttgctcctccggctgtggaagctcttgctgccagtgcagttgctgtaaaccctattgcagtcagtgttcttgttgtaagccatgctgcagctcctctggtagaggaagctcatgctgtcagtccagctgttgtaaaccttgctgttcctcaagcggctgcgggagctcttgttgtcaaagctcttgctgcaagccctgctgtagccagtctaggtgctgtgtccccgtgtgttaccagtgtaagatttag

SEQ ID NO: 192311 - DNA, 1740 bp, synthetic construct
  misc_feature 1..1740: note = Description of Artificial Sequence: Synthetic coding sequence
  source 1..1740: mol_type = other DNA
atgtgcgaccagcagcagatccagtgccggctgcccctgcagcagtgctgcgtcaagggcccgtctttctgttccagtcaatccccttttgcccagtcgcaggtggtggtgcaggcaccttgtgagatgcagatcgtggactgtccggcaagctgtcccgtgcaggtgtgccaggtgagcgaccaagccccctgccagtctcaaactacacaggtcaaatgccagagcaagaccaagcaggtgaaaggtcaagctcaatgtcagagcaaaaccacgcaagtaaaaggacaggcggccagccagtcccagacctctagtgtgcaatctcaagccccttgccagtccgaagtgagttatgttcagtgcgaagcatcccaacctgtacagacctgttttgtggagtgtgctccagtctgttataccgaaacttgctacgtggaatgcccagtgcagaactacgttccctgtcccgccccacagccggtgcagatgtatcggggccggcctgccgtgtgtcaaccccagggccgattttcaacccagtgtcagtatcaagggagctacagcagctgcggcccccaatttcagagtagggccacttgcaataactatacgccacagttccagttgagacctagctacagctcatgttttcctcaatatcgctcccgcacctcattcagtccctgcgtcccacagtgtcagacccagggctcatacggcagcttcaccgagcagcaccgatcccggtctacctctaggtgcctgccacctcctcgccgattgcaactatttcctcggtcctgtagcccaccgcgtcgttttgagccatgttcttcctcctacttgccactgagaccatccgaaggcttcccaaactactgtacacctccccggagaagtgagcccatttacaattcgaggtgccccaggaggccaattagctcttgtagtcaaagaaggggccccaaatgccgtatagaaatctcatccccatgctgcccacggcaggtgcccccacagaggtgtcccgtggaaatcccccctattcgccgccgcagccagtcttgcgggcctcagccatcctggggcgcttcttgcccggaactaagaccccatgtcgagcctaggccattgccaagtttctgtccaccgcgccgactcgaccagtgtccggaaagtccgctccagcggtgccctccccccgccccacgaccgcggctgcggccggagccgtgcatcagtctcgagccaagacccaggcctctgcccaggcagctgagtgagccatgcttgtacccggagcctctgccggctctgcgaccaacacccaggccggtgcccctgcctcgaccagggcagtgcgaaatacccgaaccaaggccatgcctacagccctgcgagcacccggagccttgccctcggccggagcctattccgttgccagccccttgtccctcaccggagccgtgcagggagacctggagatctcccagcccctgttggggcccaaatccagtgccgtatcccggggatctaggatgccatgagtcttccccacaccggctggacactgaagctccatactgtggacctagctcctacaaccagggccaggagtctggagctggctgcgggcctggggatgtctttccggaacgcaggggacaggacggacacggagatcaaggcaatgcatttgccggagtaaagggcgaggctaagagtgcctatttttag

SEQ ID NO: 192312 - DNA, 1059 bp, synthetic construct
  misc_feature 1..1059: note = Description of Artificial Sequence: Synthetic coding sequence
  source 1..1059: mol_type = other DNA
atggccggcaccatctgcttcatcatgtgggtgctgttcatcaccgacactgtgtggtctaggtctgtgaggcaggtctatgaggtacatgatagtgatgactggaccattcacgactttgagtgcccaatggaatgcttttgccctccctccttcccaactgccctgtactgtgagaatcggggactaaaggagatacctgccattccgtctaggatctggtacctgtacctgcaaaataatctgattgaaacaattcccgagaaaccattcgagaatgctactcagctgagatggattaacttgaacaaaaataaaatcacaaattacggtattgaaaagggtgccctttcacaactgaaaaagctgctgttcctgttcctggaagacaatgagctggaagaggtccctagccctctgccaaggagccttgaacagctgcagctggctagaaacaaggtgagcaggataccccaggggacattctcaaatctggaaaacctcacattgttagacttgcagaacaataaactggtcgacaatgcgtttcagagggatacgttcaagggtttaaagaacctgatgcagctgaacatggccaaaaacgccttgcgcaatatgcccccacggctgcctgccaataccatgcagttgtttctggacaataactctatcgagggaattcccgagaactattttaatgtgatcccgaaggtggccttcctacgcctgaaccataataaactctccgatgaaggtttgcccagtcgaggcttcgacgtgtcgagcattttggacctgcagttgtcacacaatcagttaaccaaggtgccccgcatcagcgcgcacctgcagcatctccatctggatcataacaagataaaatctgtcaatgttagtgtgatttgtccttcaccctcaatgctgcccgcggagagagactcattcagctacggacctcacctccgatatctcaggctggacggcaatgaaataaagcctcccataccaatggctctcatgacctgctttcgcctgttgcaggctgtgattatatag

SEQ ID NO: 192313 - DNA, 897 bp, synthetic construct
  misc_feature 1..897: note = Description of Artificial Sequence: Synthetic coding sequence
  source 1..897: mol_type = other DNA
atggaggagaagcagatcctgtgcgtgggcctggtggtgctggacgtgatcagcctcgttgacaaatatccaaaggaggactcagagattagatgcctgtcccagaggtggcagcggggcgggaatgcatcaaatagttgtacagtgctctcactgctgggcgcaccatgtgcctttatgggctccatggcccccggtcatgtcgctgactttcttgtcgctgatttccggcgcagaggtgtagatgtatcacaggtggcatggcagagcaaaggagacaccccaagctcttgctgtattattaataattccaacggcaacaggaccattgtccttcacgacactagcctgcccgacgtctcggccaccgatttcgagaaagtggacctaacccagtttaagtggattcacatcgaggggcgcaacgcctcagagcaggtgaaaatgcttcagcggattgacgcccacaacacaagacagcctcctgagcaaaaaattagggtgtcagtggaggtcgagaaacccagagaggagctctttcaactcttcggctatggggacgtggtgtttgtgagcaaggatgtcgccaagcaccttggattccaaagtgctgaagaagctctacgcggcctctacggcagagtgcgaaagggagccgtgctggtatgcgcttgggccgaagaaggcgctgacgctctcggccccgatgggaagttgctgcatagtgatgcgttcccgcctcctcgggtggtggacacccttggcgccggtgatacttttaatgcctcagtgattttttccctgagtcaggggagatctgtgcaagaggccctgcgctttggctgtcaagtcgccggaaaaaaatgcggtttacaggggttcgatggcatcgtgtag

SEQ ID NO: 192314 - DNA, 897 bp, synthetic construct
  misc_feature 1..897: note = Description of Artificial Sequence: Synthetic coding sequence
  source 1..897: mol_type = other DNA
atggaggagaagcagatcctgtgcgtgggcctggtggtgctggacgtgatttcactagtggacaagtacccgaaggaagattctgaaatccgctgcctgagtcagcggtggcagcgggggggtaacgccagcaactcgtgtaccgtattatctttactcggcgcgccatgcgcctttatgggtagcatggctcccggccacgttgcagatttcgtgctcgatgacctgaggcggtactccgtggacctgagatatacagtgtttcaaaccacaggaagtgtgccgatagccaccgtaatcataaatgaggccagcgggtctcggacaatactgtactatgaccgaagtctgccagatgtatctgcaaccgattttgaaaaggtggatctgacacagttcaagtggatccacatcgagggacggaatgcctccgaacaggtgaaaatgctgcagcgcattgacgcccacaacacgaggcaaccacccgagcagaaaatacgcgtgagcgtggaagtagagaagcctcgggaggagctgttccagcttttcggctacggtgacgtggtgtttgtctccaaggatgtcgctaagcacctcggtttccaaagtgcggaggaggcgctaagaggcctctatggtagggttcgcaagggcgctgtgcttgtttgcgcatgggccgaagagggggccgatgctcttggcccagatggcaagctcctgcactccgatgcatttccccctccacgtgtggttgacaccctgggggctggcgatacattcaacgcatccgtcattttcagcctctcacaggggaggtctgtgcaggaagcccttcgtttcggttgtcaggtagccggtaaaaagtgcgggctgcagggattcgacggtatagtgtag

SEQ ID NO: 192315 - DNA, 1041 bp, synthetic construct
  misc_feature 1..1041: note = Description of Artificial Sequence: Synthetic coding sequence
  source 1..1041: mol_type = other DNA
atggaggagaagtacctgcccgagctgatggccgagaaggacagcctcgacccaagctttacccacgcactgcgactcgtaaaccaagagatcgaaaagttccagaagggggaaggaaaagatgaagaaaagtatattgatgtggtcatcaataagaacatgaagctgggccagaaagtgcttatacctgtcaagcaattccccaaattcaatttcgtggggaagctgctggggcctaggggtaactccttgaagcggcttcaagaggagacacttaccaagatgagtattctaggcaagggctccatgagggataaggccaaagaagaggagctaaggaagtcaggggaagctaaatacttccatttgaatgacgatctgcacgtgctcatcgaagtcttcgcccctccagcagaagcctatgcccggatgggtcacgccctggaggaaattaagaagttccttataccagactacaacgacgagattcgccaggcccagttacaagagctgacttatctaaacggaggctcagaaaacgcggatgtgccggttgtgcggggcaagcccacactgcgtactcgtggggtcccagcccccgccatcacccggggccggggtggggtgactgcccgacccgtaggcgttgtggtgccccggggtacgcctactcctagaggagtgttgagcactagagggcctgtctctagaggcagaggcttgcttacccctagggcccggggtgtccctcccaccggctatagacccccccctccacctccaacccaggaaacatatggggaatacgactacgacgatgggtacggcacagcctacgacgaacagagctacgactcgtatgacaatagttattcgactccagcccagagcggggcggactattacgattatggtcatggtctgtctgaagaaacttacgactcgtacggccaagaggagtggaccaactcccggcataaagccccctccgcccggaccgccaagggagtgtaccgcgaccagccctacggcaggtactag

SEQ ID NO: 192316 - DNA, 495 bp, synthetic construct
  misc_feature 1..495: note = Description of Artificial Sequence: Synthetic coding sequence
  source 1..495: mol_type = other DNA
atggacatgggcaccagcgccctgagcaagaagccctggtggaccctcccgcagaatttccacgcccctatggttttccatatggaggaggaccaggaggagctgatattcggtcatggcgacacttacctccggtgcatcgaggtgcattcacacactctcattcagctggaatcttggtttaccgcaaccgggcagacacgagtgaccgtggtgggtcctcaccgtgccaggcagtggctgttgcacatgttctgttgtgtcggcagccaggactcgtaccaccatgcccgcggactggaaatgctggaacgagtgcgctcacagcccctgacgaatgatgacctcgttactagtattagtgtccccccctataccggcgatctgagtctcgcacctagaatcagcggaactgtgtgcctgtcagtgccacagccctccccataccaggtcataggctgtagtggcttccatttaagtagcctgtacccttag

SEQ ID NO: 192317 - DNA, 714 bp, synthetic construct
  misc_feature 1..714: note = Description of Artificial Sequence: Synthetic coding sequence
  source 1..714: mol_type = other DNA
atgctgagcgccttccagcggctgttccgggtgctgttcgtgatcgaaactgtctctgaatatggcgtcctaatctttatttacgggtggccctttctgcagacactggcaatgctgttaatcggaaccgtctccttccacttatggattcggagaaatcgcgagagaaatagtagaagtggaaaaacccggtgcaggtcgaagaggtccgagcagagcatggatatgggcacttccgctctgtccaaaaaaccctggtggactctaccacagaatttccacgcacccatggtgtttcatatggaggaggaccaggaggagcttatattcggtcacggtgatacttacctgcgatgcatcgaggtgcatagccacaccctgatccagctggagtcttggtttaccgccacaggacagaccagggtgaccgtcgtcgggccgcacagagcccggcagtggctgctccatatgttctgttgtgtgggttcacaggattcatatcaccacgcacgcggattggagatgttggagagagttaggagtcagccgttgaccaatgacgatttggtgacatccatcagcgtcccaccctacactggcgacctgagcttggcgcctagaatttctggaaccgtatgcctgagtgtgccccagcccagtccataccaggtcatcgggtgtagcggattccatctatccagcctgtacccttag

SEQ ID NO: 192318 - DNA, 297 bp, synthetic construct
  misc_feature 1..297: note = Description of Artificial Sequence: Synthetic coding sequence
  source 1..297: mol_type = other DNA
atggacatgggcaccagcgccctgagcaagaagccctggtggaccttgcctcaaaattttcacgcccctatggtttttcacatggaggaggaccaggaagagcttattttcggccacggcgacacatatttgcgatgtatcgaagtccacagtcatacactgatccagctggaatcatggtttaccgcaacgggccaaacacgggtgaccgtagtcggcccacaccgggcacgacagtggctcctgcacatgttctgctgtgtgggcagccaggatagctatcaccatgctagatag

SEQ ID NO: 192319 - DNA, 2133 bp, synthetic construct
  misc_feature 1..2133: note = Description of Artificial Sequence: Synthetic coding sequence
  source 1..2133: mol_type = other DNA
atgagcgactacagcaccggcggccccccccccggcccccccccccctgccggcggcgggggtggcgctggcggggccgggggagggcctccacccggcccgccaggggccggagatagaggtggagggggacctggcggcggcggacctggtggcgggtccgcagggggacccagccaacctcctggcggcggggggcctggaattaggaaggacgcgttcgctgatgccgtccagcgagctcggcaaatcgccgccaagattgggggcgacgctgccacgaccgtgaacaatagtaccccagatttcggcttcggaggacagaaacgccagctggaagacggggaccagcccgagtctaagaagttagcttcccagggcgactctatcagtagccagctgggccccatccatcccccccctaggacctctatgacagaagaatatcgggtgcccgatggcatggtcggactcatcatcgggcgggggggggaacagataaataaaatacagcaagatagtggttgtaaagtgcaaatctcccctgattcggggggcctacccgaaagaagcgtgagcctgacaggcgccccagaatccgtgcagaaggccaaaatgatgctggatgacatcgtctctcgaggtcgaggcggtcctcctgggcagttccacgataacgccaatggcggccagaacgggactgtccaggagattatgattcctgccggaaaggccggtttagtgataggtaagggaggagagacgataaagcagctccaggagcgggctggggtgaagatgatcttaattcaggatggctcccagaacacgaatgtggacaagcccctgcgcataattggagacccctataaggtccaacaggcatgcgagatggtgatggacatcctcagagagcgagaccaagggggatttggcgatagaaacgaatatgggtctcggatcggaggagggatcgacgtgcccgtccccagacactctgtaggtgtggtaatcggacggagcggcgaaatgattaagaaaatacaaaatgatgctggggtacgtatccagttcaagcaggatgacggaaccggacccgagaaaatcgcccacattatgggtcctccagataggtgtgagcatgccgcgcggattataaacgacctcctgcagtcactgcggtccgggccccccggacctcctgggggaccggggatgcctcctgggggaagaggacgcggtcgcggccaggggaattggggtccgccaggaggcgagatgacattttcaatcccaactcataaatgtggcctagttatagggagaggcggtgaaaatgtgaaggctatcaaccagcaaactggggctttcgtggagatttcccgacagctacctcctaacggtgatcccaattttaaactcttcattattagagggagtccacagcagattgatcatgccaaacaactgatcgaggagaaaatcgaaggaccactctgtcccgtgggtcccgggcccggggggcctgggcccgctgggcctatgggaccattcaatccaggtcctttcaaccaggggcccccaggagcccctccacacgctggcggccctcccccacaccagtaccccccacaaggttgggggaacacgtatccacagtggcagcctcccgcacctcatgaccccagtaaggccgccgcagcagcagcggatcctaatgctgcctgggctgcttactacagtcattactaccagcagcctccgggccctgtgccgggacctgcacctgctcccgccgcacctccagcgcagggtgagcccccgcaacctcctcccactggccagagcgattatacgaaggcctgggaggagtattataaaaaaatcggacagcagccccagcagccgggagcccccccacaacaggactacacaaaagcgtgggaggagtactataaaaaacaggctcaggttgctactggcggcggtcctggtgcaccgcccgggtttctggcccctccgactgtgttccagcccctgcttagttctgccctggcacaactgccccgtccaaggccttctcctctccctgggctggtatgttgtctctttatctgctcccggggtgattag

SEQ ID NO: 192320 - DNA, 2136 bp, synthetic construct
  misc_feature 1..2136: note = Description of Artificial Sequence: Synthetic coding sequence
  source 1..2136: mol_type = other DNA
atgagcgactacagcaccggcggccccccccccggcccccccccccctgccggggggggaggcggcgctggtggagccggagggggcccccctcccggaccacctggtgcaggggacaggggcggcgggggcccgggaggcggagggccaggcggcgggtccgccggaggccctagtcaaccgccaggagggggtggtcctgggatacgcaaggatgccttcgctgatgccgtccaaagagcccggcaaatcgccgccaagattgggggagacgccgcaacaacagtgaacaattctacccccgacttcggcttcggaggccagaagagacaactggaagatggggatcagcccgagtcaaagaaactggcatcgcagggagactcaattagtagtcaattggggcctatacatccacctcctcgaaccagtatgactgaagagtacagagttcccgacggcatggtaggactgataattggccgtggcggcgagcaaattaacaagattcagcaagacagcgggtgtaaggtccaaatcagtcctgacagcggaggcctgccagagagaagcgtgtcattgaccggggcccctgagagcgtgcagaaagcaaaaatgatgttagacgatatcgtgtccagagggagaggcgggcccccgggacagttccatgataatgccaatgggggacagaacggcacagtgcaagaaattatgatccccgcgggaaaggctggcctggtgattggcaagggcggagagacaatcaagcagctccaggaaagggccggggtaaagatgatcctgatccaagacggatcccagaatactaacgttgacaaacctctgcggataattggcgacccttacaaggtgcaacaagcatgtgagatggtcatggatattctcagagaaagggaccaaggaggattcggcgatagaaacgagtacggcagtaggattggtggaggtattgatgtacccgttcctcgccactctgtgggcgttgttataggtcgaagcggtgaaatgattaaaaagattcaaaacgacgccggcgtgaggattcaatttaagcaggacgacggcactgggccagagaagatcgcacacattatgggacctccagaccgctgcgagcacgccgcaagaattatcaatgacctactgcagagtctgagaagcggccctcccggcccgcccgggggacccgggatgccacccggtggacgcgggcgcggccgaggacagggcaactggggacctcctggaggagagatgacattctctatccctactcataagtgcggcctcgtgattgggcgaggcggagaaaacgttaaagccatcaaccagcaaacgggcgctttcgttgagatttcgcgtcagctgccacccaacggagatcccaatttcaagttgttcatcataagggggtcgcctcagcagatagaccacgcaaaacaactgattgaggaaaagatcgagggccccctgtgcccggtcggacccgggccaggcgggcctggtccagctggccccatgggcccctttaacccagggccatttaaccagggaccccccggggcccccccacatgctggggggccgccccctcaccaatacccaccacagggctggggaaacacatacccccaatggcaacccccagcccctcacgaccctagtaaggcggctgccgctgccgctgaccctaacgccgcctgggcagcctactattcccactactaccagcagcctccaggccccgtgcccggccctgctcctgcacccgcagcaccccctgcacagggggagcctccccaacctccgccaaccgggcagagtgattatacaaaagcttgggaagagtattacaagaagatcggccagcagcctcagcagcccggggctcccccacagcaagactatacaaaagcatgggaagaatactataagaagcaggcacaagtggctaccggtggaggccctggggcgcccccaggttctcaacccgactatagcgcagcatgggcagaatattatcggcaacaggcagcctattacggacagaccccaggccccggaggacctcagccaccccccacccagcaggggcaacagcaagcacagtag

SEQ ID NO: 192321 - DNA, 1095 bp, synthetic construct
  misc_feature 1..1095: note = Description of Artificial Sequence: Synthetic coding sequence
  source 1..1095: mol_type = other DNA
atgagcgactacagccccggcggcggcagcgccggcggccccagccagccacccggtgggggcggcccagggatccggaaggatgccttcgccgacgccgttcaacgggccaggcagatcgctgctaagattggtggcgatgcagccacaacggtgaacaattctacaccagactttggcttcggtggccagaagcgccagctcgaagatggagaccaaccagaaagcaaaaagctggcatcccaaggagacagtatctcctcccaattaggccctatccaccctccacctcgaacatctatgaccgaggaatatcgggtgccagacggaatggtgggcctgataatcggcaggggcggggagcagataaataagatccagcaagatagtggttgcaaagttcagatttccccagattccggcgggttacctgaacgcagtgtgtccctgacaggggcacctgagtccgttcagaaggctaagatgatgctggacgatatcgtttcaagaggccggggcgggccccccggccagttccacgacaacgcaaatggtggacaaaatgggaccgtacaggagatcatgattcccgcgggcaaagctggtctggttattggcaagggaggagagacaatcaagcagcttcaggagagggctggcgttaaaatgattctaattcaggacggatcgcagaatacaaatgtggacaagcctcttcgcatcatcggagacccgtataaggtacaacaggcatgtgagatggtcatggatattcttagggagcgcgatcaggggggattcggcgaccgcaacgagtacgggagcaggatcggtggtggcatcgatgtccccgtaccccgccactccgtgggcgtggtaattggaagatctggcgaaatgatcaagaaaattcagaacgatgctggtgtgcgcatccagttcaagcaggatgacgggacagggccagagaaaattgcacacataatgggtcctcccgacagatgcgagcacgcagcgaggatcattaacgatccatcctctagttcattccttctgcccacacccggtcataggcccagttgcctgtccggctag

SEQ ID NO: 192322 - DNA, 255 bp, synthetic construct
  misc_feature 1..255: note = Description of Artificial Sequence: Synthetic coding sequence
  source 1..255: mol_type = other DNA
atggacgacgacgccgccccccgggtggagggcgtgcccgtggccgtgcacaagcatgccctgcacgacgggctgcgccaggtggcaggccctggagctgctgctgcacacttaccccgttggccaccgccacaattggctgcaagccggcgcgaagcccccccgctgagccaacgtccacatcgcacgcaaggcgccggatctcctcccgagacaaacgaaaagctgacaaacccacaggtgaaggaaaagtag

SEQ ID NO: 192323 - DNA, 822 bp, synthetic construct
  misc_feature 1..822: note = Description of Artificial Sequence: Synthetic coding sequence
  source 1..822: mol_type = other DNA
atgagcatgagccccaccgtgatcatcctggcctgcctgggcttcttcctggatcagtcagtatgggcccatgtgggaggtcaggacaagccgttctgctccgcctggccgtccgccgtggtaccgcaaggcgggcacgttactcttcgctgccattacagacgcggatttaacatctttaccctttataagaaagacggtgtgccagtcccagagctctataatcgcatcttttggaacagcttccttatctctcccgtcaccccggcccacgccggaacatatagatgtagagggtttcatcctcactcacctacagaatggagcgcaccttcaaacccgctggttatcatggtgacgggtctctacgaaaagcccagcttgactgccagacctggccctacggtgcgggcgggagagaatgtgactttgagctgcagctcccagtcttcattcgacatataccatctgtcaagggaaggcgaagcccatgaactgcggttacctgccgtgccgtctattaacggtacatttcaggctgactttccacttggtccagccactcacggcgaaacttacagatgttttggatcatttcatgggtcaccctacgagtggagtgatccgtcagatcctcttcccgtatcagtaacagggaatcccagtagttcctggccctcccccaccgagccctccttcaaaactggcattgctagacatctccacgccgtcatccgatacagtgtggccatcattctttttaccatccttcccttcttcctgcttcacaggtggtgtagcaagaaaaagatgctgctgtag

SEQ ID NO: 192324 - DNA, 1269 bp, synthetic construct
  misc_feature 1..1269: note = Description of Artificial Sequence: Synthetic coding sequence
  source 1..1269: mol_type = other DNA
atgggcggccaggacaagcccttcctgagcgcctggcccagcgccgtggtgccccgcggcggtcacgtaacgctgagatgtcactatcgccacaggttcaacaacttcatgctctacaaagaggatagaatacacatccccatcttccacggccgcatatttcaggaatcattcaatatgagccctgtcacaacagctcatgctgggaactacacatgccgcggctcacatccgcacagtcccactgggtggtccgctccctcaaaccctgtggtgattatggtcaccggcaatcaccggaaacctagtctgctggcgcacccagggcctcttgttaagtcaggcgagcgagtaattctccagtgctggagcgacatcatgttcgaacattttttcttgcacaaagaagggatatcaaaagatccgagccggctagttgggcagattcacgacggcgtgtccaaagcaaactttagcataggtcctatgatgctcgcactggctgggacttaccggtgctacggatcagtgacccataccccatatcagcttagcgctccaagtgatccccttgacatcgtagtcactgggccttatgagaaaccttctctatccgcacaacctgggcctaaggttcaagcaggcgagtcagtgacactcagctgctccagtcgtagttcgtatgacatgtaccacctgtcaagggaaggcggcgctcatgaacgtcggctgccagctgtgcgtaaagtgaaccgaacattccaggcagacttcccattggggccagctacgcatggcggcacgtaccggtgttttggctcattcaggcattctccctacgagtggtccgatccctccgatccgctgctggtgagcgttacaggaaacccgagctccagctggccaagcccgactgagccctcatctaagtcagggaatccccgtcacttgcacatcttaatcggaacatctgtggtgattatcttatttatcttgcttctcttttttctgcttcatctttggtgtagcaacaaaaagaacgccgccgtcatggatcaggagccggcaggtaatcgaacggccaactccgaagacagtgacgagcaggacccggaggaagtgacctacgctcagttggaccactgcgtgttcacccaaaggaagatcacacggccgtcccagcgtcccaaaactcctcccacagatactattctttacaccgagcttcccaatgcgaaacctcgttctaaagtggtatcatgtccctag

SEQ ID NO: 192325 - DNA, 1050 bp, synthetic construct
  misc_feature 1..1050: note = Description of Artificial Sequence: Synthetic coding sequence
  source 1..1050: mol_type = other DNA
atgagcctgatggtggtgagcatggcctgcgtgggcctgttcctggtgcagagagccggaccccacatggggaatcaccgcaaaccgtcactactggcccatcccggacccttagttaagtccggcgaacgcgtcatcctacaatgctggtctgatatcatgtttgagcacttttttctgcataaagaggggattagcaaagacccgtctcgtttggtgggacaaatccacgacggcgtgagcaaggccaacttttcaatcggtcctatgatgctggccttagccgggacctacaggtgttacggatctgtgacccatactccttatcagctatccgctccctctgaccccctggatatcgtagtgaccgggccatacgaaaaaccgagcctgtccgcgcagccaggccccaaagtgcaagccggggagtccgttactctcagctgctcaagccgctccagttatgatatgtatcacctgagccgagagggcggggcccatgagaggcggctgcctgcggtcagaaaggtgaatcgaacatttcaggccgatttccctctcggtccagccacccatggaggcacctatcgttgtttcggaagttttagacacagcccctatgaatggagcgacccatctgaccccctcctcgtctctgtgaccggcaacccttcctctagttggccttcacccaccgagccatccagtaagagcggaaaccccagacatcttcatatcctaatcgggacttccgtcgtgatcattctattcattctgctcctgttcttcctcctccacctgtggtgctccaataagaaaaacgcagcagtgatggatcaagaaccagcaggaaatcgcaccgctaattcggaggattcggatgagcaagaccctgaagaggtgacctatgctcaactggaccattgtgtgttcacacagagaaaaataaccagaccctcacaacgccccaaaacacctccaacagatacaatcctatacacagaactccctaacgctaaaccccggtctaaagtggtctcatgcccgtag

SEQ ID NO: 192326 - DNA, 1335 bp, synthetic construct
  misc_feature 1..1335: note = Description of Artificial Sequence: Synthetic coding sequence
  source 1..1335: mol_type = other DNA
atgagcctgatggtggtgagcatggcctgcgtgggcctgttcctggtccagcgggccgggccacacatgggaggccaggataaaccctttttgtcggcctggccttctgcagtggtcccacgggggggacacgtcaccctgcggtgccactacagacaccgatttaataacttcatgctgtacaaggaggaccggatacacatacccatctttcatggaagaatctttcaggagtcattcaatatgagcccagtgacgacagcccacgcaggaaactatacttgtcggggctcacatccgcattctcccaccggatggagtgctccctcaaaccccgtcgtgatcatggtgactggcaatcatcgtaaacctagcctgctggcacatcccggacctttggtcaaatctggagaacgggtcatacttcagtgttggagcgatatcatgttcgagcattttttcttgcacaaggagggcatttccaaagatccttcgcgcctggtgggccaaatccatgacggcgtcagtaaagcgaatttcagtattggtcctatgatgctggccctggctggcacttaccggtgctatgggagtgttacccataccccttatcaattgagcgcaccaagcgatcccctggacatcgtggttactgggccatatgagaagcccagcctgagcgctcagccaggccccaaagtgcaagccggggaatctgtgaccctctcatgttcctctcgttccagctacgacatgtaccacctcagcagagaagggggagcccatgagaggcgcctgcctgcagtgaggaaggtaaacaggacctttcaggccgactttccgctgggacccgccacgcacgggggaacctacaggtgctttggtagttttaggcattcaccctacgagtggagcgatccttccgacccactactcgtctcggtcactggaaacccgagttcttcttggccttcccccacagagccctcctctaaaagcgggaatccacgccatttacatatcctcatcggcacctccgttgttattattctgtttattctcttattgttttttctgctgcacctgtggtgctccaacaagaagaacgctgcagtaatggaccaggagcccgctggtaacaggacggcgaattcagaagacagcgatgaacaggatcccgaagaggtgacttatgcccagctcgatcactgtgtttttacccagaggaagattacccgcccctcacaaaggccaaagacaccacccacagatactattttatacaccgagctgcctaacgccaaaccgcggtcaaaggttgtctcctgtccgtag

SEQ ID NO: 192327 - DNA, 1368 bp, synthetic construct
  misc_feature 1..1368: note = Description of Artificial Sequence: Synthetic coding sequence
  source 1..1368: mol_type = other DNA
atgagcctgatggtggtgagcatggcctgcgtgggcctgttcctggtgcagcgtgctgggccacacatgggaggacaggataagcccttcctatctgcctggccttcagccgtcgtgccgcggggcggccacgtgaccttgaggtgtcattataggcacaggtttaacaattttatgctgtataaggaagatagaatccacattcccatctttcacgggagaatctttcaggaatctttcaatatgtcccccgttacaaccgcccatgccggcaactacacatgcagagggtcacacccccattccccaaccggttggagtgcacctagcaaccctgtggtcataatggtgactggcaatcaccgcaaacctagcttgcttgcccatccgggccctctggtcaagtcaggggaacgcgttatcttacagtgctggagtgacattatgtttgaacactttttcctgcataaagagggaatttctaaagatccgtctcgtctagtgggccaaattcacgatggagtgtccaaagccaatttttcaatcggccctatgatgctcgcactcgctggaacttatcgctgctatgggtccgtcacccatactccctatcagctgagcgctccatctgacccattggacatcgtagtaaccggaccctacgagaagccgtctctatccgcccagcctggccccaaagtccaagccggagagtcagtgaccctgtcttgctcgagcagatcaagttacgacatgtaccatctcagtcgcgagggcggagcccacgagcgtcgcctgcccgccgtaagaaaagttaataggacattccaggctgactttccactggggccggcgacccacgggggtacctaccggtgttttggtagtttcagacatagtccctacgagtggagtgacccttcagaccctctcttggtgtcagtgaccggaaacccaagttctagctggccatctccgacagagccctcatcgaaatcaggaatctgccgccaccttcatgtcctgataggcacgtccgtagtgatcttcctctttatacttttactcttttttcttctctatcggtggtgtagcaacaaaaagaacgcagccgtaatggatcaagagcctgcaggggaccggacagtcaaccgacaagactcagatgaacaggatccacaagaggtgacctacgcacagcttgatcattgtgtcttcatacagagaaaaattagtcggccatctcagagacctaaaacaccccttacggatacatccgtgtacaccgaattgcctaatgccgagccccgctctaaggttgttagctgccctagggcccctcagtcgggcctggagggagtcttctag

SEQ ID NO: 192328 - DNA, 1335 bp, synthetic construct
  misc_feature 1..1335: note = Description of Artificial Sequence: Synthetic coding sequence
  source 1..1335: mol_type = other DNA
atgagcctgatggtggtgagcatggcctgcgtgggcctgttcctggttcagcgggccggccctcacatgggcgggcaggacaagcccttcctctccgcctggccgtccgcagtcgtaccgcggggagggcacgtcactctgagatgccactatcgccataggtttaataattttatgctgtataaagaagatagaatccatattcccatattccacgggagaattttccaagagtcatttaatatgagcccagttacgactgcccacgcaggcaactatacctgccgggggtcacatccccatagcccaaccggttggtctgctcccagcaaccctgtggtgattatggttacgggtaaccatagaaagccttcccttctggcccatccggggccactggtgaagtctggggagcgtgtgatactgcagtgttggagcgacataatgttcgagcatttcttccttcacaaagaaggaatcagtaaagatccatcaaggctggtgggacaaatccatgacggtgtctccaaagcaaacttttctatcggacctatgatgctcgctctggctggcacctaccggtgctatggaagcgtaacacatactccctaccagctcagcgcccctagtgatcctcttgacatcgtggtcacgggcccctatgaaaagccttctctcagcgcgcagcccggtcccaaagtgcaagcgggggagtcagttaccctgtcctgttcatcgcgcagttcctacgacatgtatcacctttcaagggagggaggcgcccatgagcggcggctacccgccgttcgaaaagtcaataggacttttcaggccgactttcctctggggccagccacccacggagggacttacaggtgctttggctcttttcgtcactctccctacgaatggtcggacccttctgatcccctgctggtgtcagtgactgggaatccaagttcttcttggccctcgccaacggaaccttcctctaaaagcggtaacccgagacacctccacatactgataggcaccagcgttgtgattatcctattcattctccttctgttcttcctgctgcacctttggtgttctaataagaaaaacgcagctgtcatggatcaggagcccgcgggtaaccggacagccaatagcgaggactccgatgagcaggaccctgaggaagttacctatgcgcaattagaccattgcgtatttacacagaggaaaataacaagaccaagccaacggccaaaaacaccacccaccgatacaatcctgtacacagaactgccaaatgccaagccccgaagtaaggtcgtgtcctgcccgtag

SEQ ID NO: 192329 - DNA, 1284 bp, synthetic construct
  misc_feature 1..1284: note = Description of Artificial Sequence: Synthetic coding sequence
  source 1..1284: mol_type = other DNA
atgagcctgatggtggtgagcatggcctgcgtgggcctgttcctggtgcagcgtgctgggccacatatgggtggccaagataagccttttcttagcgcctggcccagtgccgtggtgccccgtggaggccacgtgacgttgcggtgccattacaggcacagatttaataacttcatgctctataaagaagacagaattcatatacccattttccacggacgcatttttcaggagtcattcaacatgagtcctgttacgactgctcatgctggtaattacacatgccggggttcgcatccccacagcccaaccggatggagtgccccaagtaatccagtcgtcatcatggtgacaggtaatcaccgaaagccctccttgttggcgcaccccgggcccctggtgaagtccggggagagagtaattttacagtgctggtcggatataatgtttgagcactttttcctgcacaaagaggggatcagtaaggacccctctagactcgtggggcagatccatgatggagtgtccaaggctaatttttcaatagggcccatgatgcttgctctcgctggcacgtaccggtgttacggaagtgtcacacacacgccctaccagctttcggcgccctctgacccattagatatcgtagttacagggccttatgaaaagccaagtctctccgcacaacctggcccgaaggtccaggcaggcgaatccgtcacactctcatgctcctcccgcagctcctatgacatgtaccatctgagtagagaaggaggcgcccacgaacgtagactcccagctgtgcgtaaagtgaaccgaaccttccaagcggacttccccctggggcctgctacacatgggggcacctacagatgttttggttcattcaggcactctccttatgagtggtcagatccttccgacccgctgctggttagcgtgactggcaaccctcgccaccttcatatcctgatagggacgtccgtagtcatcatcctgttcatcctgctcctgtttttcctcctccatttgtggtgtagtaataaaaagaatgccgccgtgatggatcaggagcccgccggtaacaggacggcgaactccgaagatagtgacgagcaggatccagaggaagtcacctacgcccagctggaccactgtgtgtttacccagcgcaagatcacacgtccatctcagaggcccaagacacctcctacagacacaattctgtacactgaactgccgaatgccaaaccgcgatccaaagtagttagctgcccttag

SEQ ID NO: 192330 - DNA, 1368 bp, synthetic construct
  misc_feature 1..1368: note = Description of Artificial Sequence: Synthetic coding sequence
  source 1..1368: mol_type = other DNA
atgagcctgaccgtggtgagcatggcctgcgtgggcttcttcctgttgcagggggcctggcctctcatgggtggccaagataagccctttctcagcgcacgaccaagtaccgtagtcccaagaggagggcacgtcgcactccagtgccactaccggcgcgggtttaataactttatgctttacaaggaggaccgctctcatgtcccaatcttccacggacggatctttcaggaaagttttataatgggccccgtgaccccagcacatgccgggacctatagatgtcgagggtctcgtccccatagcctcaccggatggtccgctccaagcaaccccctggttattatggttactgggaaccatcgcaaaccgtcccttctggctcaccccggcccactactcaaatctggcgaaactgtgattctgcagtgctggtccgatgtgatgttcgagcatttcttcctccatagagaaggcatctcagaggacccgagtcgtcttgtaggccagatacacgacggtgtttctaaggcgaacttttctattgggccgctgatgcctgtactggcaggcacatatagatgttacggctccgtccctcatagcccatatcagctgagcgcaccatcagacccgctggatatcgtgatcactggactgtatgagaagccttcgctgagtgcacagcccggtcctaccgtccaggctggagagaatgtaacgctcagttgtagttcctggagttcctatgacatctatcatttatcaagagaaggggaagctcatgagcgacgcttgcgcgcggtgccaaaggtgaatcggacttttcaagctgatttccctcttgggcctgcaactcacgggggtacatatcgatgttttggtagctttagggccctgccctgtgtttggagcaactcctcagatcctctgctggtatcagtgactggcaacccgtccagctcttggccaagtcccacagagccctcctcaaaaagtggaatctgtcgtcatctgcacgtgctgatcggcacaagcgtcgttatttttctcttcatactgttactgtttttcctgctgtaccggtggtgctccaacaagaaaaacgcagccgtgatggaccaggagcctgcaggcgaccggaccgtaaaccggcaggacagcgatgagcaggacccacaagaggtaacctatgctcagttagatcattgcgttttcatccaacgcaaaatctcgcggccctctcagcgtccaaagacccccctgaccgatacctccgtatacacagaattgccaaatgctgagccacgctccaaggtagtcagctgccccagagctccacagtctggcctcgagggtgtcttctag

SEQ ID NO: 192331 - DNA, 1047 bp, synthetic construct
  misc_feature 1..1047: note = Description of Artificial Sequence: Synthetic coding sequence
  source 1..1047: mol_type = other DNA
atgagcctgatggtggtgagcatggcctgcgtgggcttcttcctgctccagggcgcatggccccacgagggcgtccaccggaaaccctctctgctggcccatcccggccgtctggtaaaaagcgaggagacagttatactgcagtgctggtcagatgttcgttttgaacattttttgctccaccgtgagggcaaatttaaagataccttacacttaattggggagcaccatgacggagtgtctaaagccaatttctctattggaccaatgatgcaggacctggctgggacttatagatgttacggcagtgtgacccacagtccataccagttatccgccccaagcgatccgctcgatatcgtaatcaccggcctgtacgagaagccgtctctgtctgctcagcccgggccaaccgtgctggcaggggagtctgtcaccctgagctgctcctccaggtcatcttacgacatgtatcacctgtcacgcgagggcgaagctcacgaatgtcgcttttctgctggccccaaagtgaacggcacttttcaagcagattttcccctggggccagccacccatggcggcacctacaggtgtttcggatcttttcgcgatagtccatatgagtggtccaacagttccgatccattactcgtatctgtgactgggaaccccagcaactcatggcctagcccaaccgaacctagtagtaagacaggtaatcctaggcacctccatattctgataggaacaagcgtggtcatcatcttgttcatcttgcttttttttctgctccatcgctggtgttctaacaagaagaatgcagccgtcatggatcaggaatcagctggcaatagaacagctaactcagaagacagcgatgaacaggaccctcaagaggtgacctacactcaactgaatcattgtgtctttacacagcgcaaaatcactaggcccagtcaacggcccaagaccccacccactgatattattgtctacaccgagctgccgaatgccgaaagtaggagcaaggtggtctcctgcccttag

SEQ ID NO: 192332 - DNA, 1128 bp, synthetic construct
  misc_feature 1..1128: note = Description of Artificial Sequence: Synthetic coding sequence
  source 1..1128: mol_type = other DNA
atgagcctgatggtggtgagcatggcctgcgtgggcttcttcctgctacagggcgcttggcctcatgagggaggtcaggacaagccactgctgtctgcctggccttctgccgtggtgcccaggggcggacatgtcaccttgttgtgtcgctctcggctggggttcactatcttttccttgtataaggaagatggcgtgcccgttcccgaactgtacaacaagattttctggaagagcatactcatgggtcctgtgacccctgcacatgctggcacatatagatgtcgggggagtcatccaaggtcacccattgagtggtctgctcctagtaaccctctggttatcgtggtgaccggtttgttcgggaagccgtcgcttagtgctcagccaggtcctaccgttaggaccggggaaaatgtgaccctctcctgtagctctcgcagttctttcgacatgtaccatttgtctagggagggtcgagctcacgagccaagactgccagccgtaccatcagttaatggcactttccaggcagattttcccctgggacctgccacccacggaggtacatacacttgttttggatcgctgcacgactctccctacgaatggtcagacccctcagatccactcctcgtctccgtcaccggcaactcctcctcttcatcctcgtctcccaccgagccttctagtaagacaggcatccggcgccatctacacattcttattgggacaagcgtggctatcatattgttcatcatccttttcttctttctcctccactgctgctgttcaaataagaaaaacgccgcggtaatggatcaagagccggcaggcgacagaaccgtgaatcgagaagacagcgatgatcaggatccacaagaggtaacatacgcccaactagaccactgtgtgtttactcagaccaagatcacatcaccgagccaacggcccaaaactcccccaaccgatacaacaatgtacatggaactccctaacgcaaaaccacgaagtttgtccccagcccataagcatcattcccaagcattaaggggatcatctagagagaccactgctctgtcccagaaccgggtggcctcttcacatgtccccgccgccgggatctag
